United States Patent Application Publication US 2014/0128277 A1 - sequence listing, part 6

SEQ ID NO: 4750 - DNA, 2988 bp, Homo Sapiens
  NM_018677
actcccccactcaccaggccccgcccctctacggaggccccgcctctagttcggcctgttttctcagtcccggcacccgccgcgaccgcaaaggcggccgcggttctaggaacttgacgtgatggggcttcctgaggagcgggtccggagcggcagcgggagccggggccaggaggaagctggagccggaggccgggcgcggagttggtctccgccgcccgaggtcagccgctccgcgcacgtcccctcgctgcagcgctaccgcgagctgcaccggcgctccgtggaggagccgcgggaattctggggagacattgccaaggaattttactggaagactccatgccctggcccattccttcggtacaactttgatgtgactaaagggaaaatcttcattgagtggatgaaaggagcaactaccaacatctgctacaatgtactggatcgaaatgtccatgagaaaaagcttggagataaagttgctttttactgggagggcaatgagccaggggagaccactcagatcacataccatcagcttctggtccaagtgtgtcagttcagcaatgttctccgaaaacagggcattcagaagggggaccgagtggccatctacatgcctatgatcccagagcttgtggtggccatgctggcatgtgcccgcattggggctttgcactccattgtgtttgcaggcttctcttcagagtctctatgtgaacggatcttggattccagctgcagtcttctcatcactacagatgccttctacaggggggaaaagcttgtgaacctgaaggagctggctgacgaggccctgcagaagtgtcaggagaagggtttcccagtaagatgctgcattgtggtcaagcacctggggcgggcagagctcggcatgggtgactccaccagccagtcccccccaattaagaggtcatgcccagatgtgcagatctcatggaaccaagggattgacttgtggtggcatgagctcatgcaagaggcaggggatgagtgtgagcccgagtggtgtgatgccgaggacccactcttcatcctgtacaccagtggctccacaggcaaacccaagggtgtggttcacacagttgggggctacatgctctatgtagccacaaccttcaagtatgtgtttgacttccatgcagaggatgtgttctggtgcacggcagacattggttggatcactggtcattcctacgtcacctatgggccactggccaatggtgccaccagtgttttgtttgaggggattcccacatatccggacgtgaaccgcctgtggagcattgtggacaaatacaaggtgaccaagttctacacagcacccacagccatccgtctgctcatgaagtttggagatgagcctgtcaccaagcatagccgggcatccttgcaggtgttaggcacagtgggtgaacccatcaaccctgaggcctggctatggtaccaccgggtggtaggtgcccagcgctgccccatcgtggacaccttctggcaaacagagacaggtggccacatgttgactccccttcctggtgccacacccatgaaacccggttctgctactttcccattctttggtgtagctcctgcaatcctgaatgagtccggggaagagttggaaggtgaagctgaaggttatctggtgttcaagcagccctggccagggatcatgcgcacagtctatgggaaccacgaacgctttgagacaacctactttaagaagtttcctggatactatgttacaggagatggctgccagcgggaccaggatggctattactggatcactggcaggattgatgacatgctcaatgtatctggacacctgctgagtacagcagaggtggagtcagcacttgtggaacatgaggctgttgcagaggcagctgtggtgggccaccctcatcctgtgaagggtgaatgcctctactgctttgtcaccttgtgtgatggccacaccttcagccccaagctcaccgaggagctcaagaagcagattagagaaaagattggccccattgccacaccagactacatccagaatgcacctggcttgcctaaaacccgctcagggaaaatcatgaggcgagtgcttcggaagattgctcagaatgaccatgacctcggggacatgtctactgtggctgacccatctgtcatcagtcacctcttcagccaccgctgcctgaccatccagtgaacatgatcctgacctttacctaggattcctcctgctccaaactttgcccatcctctttgccccctcaggagtgctgagggccagtgttgacccacactaccctcccttgaccagctgtctgggaccggaaaccagctttgtctccaggtagagacaacatcctgtgactgccaggcagaaaggacagggcccaggtcagcctcagtctgctgtgcctccagactgcagagctctcagaacccagaacagagacgaaaaggctacctctcctacccaagttaagtgttcaaaggggatgtgagggcctccactgaagcagggaggcagctgtgtaatcctatgtcagctctcttaggaagccccagtacttatattgggcatgcacttgcccttaaaaacaatgatttgtgagtccaggaacaatttactatttttaaaatattttgctgcttctgttctgggtctgaattcccttttgtgccagatgccagtactgtctgcccattggctccaggggctgtatgggcagattcagtctccagagggtattcagatcatctgcttctttgaaggagtaaatgtgttttgttcctagggccagaggagcttgtcttccttgtcctctgttcccaccctcccctgaacagaacccagcccataagagacattctcagatgaaactctgttttcttgccccagtcaggctcaagccctgtggttgtaggaataaagcctgtgatctcaagaagtggaaaaaaaaa

SEQ ID NO: 4751 - DNA, 2478 bp, Homo Sapiens
  NM_018683
atcggccgccgttgcgcggcgcagagcggcagcaagatggcggcgcaacagcgggactgcgggggtgctgcgcagctggcggggccggcggcggaggctgaccccctaggacgcttcacgtgtcccgtgtgcttagaggtgtacgagaagccggtacaggtgccctgcggacacgtcttttgctctgcatgcctgcaggaatgtctgaagccgaagaagcctgtctgtggggtgtgtcgcagcgctctggcacctggcgtccgagccgtggagctcgagcggcagatcgagagcacagagacttcttgccatggctgccgtaagaatttcttcctgtccaagatccggtcccacgtggctacttgttccaaataccagaattacatcatggaaggtgtgaaggccaccattaaggatgcatctcttcagccaaggaatgttccaaaccgttacacctttccttgtccttactgtcctgagaagaactttgatcaggaaggacttgtggaacactgcaaattattccatagcacggataccaaatctgtggtttgtccgatatgtgcctcgatgccctggggagaccccaactaccgcagcgccaacttcagagagcacatccagcgccggcaccggttttcttatgacacttttgtggattatgatgttgatgaagaggacatgatgaatcaggtgttgcagcgctccatcatcgaccagtgagcagagtccgtgcttgctatctgtctcatgttacagagcttccattacatattaaacgtgaaatctatgactcctgtaccttacctgttcaacagacctgaaaatgagccatggcattgggacagggtcacttctgacaggggaagtgggtccccaggtcagcccttctcttccctttgggctcttgccaaagctgtcttcccctactgttaaccttgtttgtcacacggtcgagttcgtattggttctcggctacttcctggagcttctgccgcctcctgtggaagataatctagcttctccacctcttgtttcacactcattcctcccatccagtgtttgtctctcgggtccttcaagccagccaggaccttttctgggtcatgaatagcacaatgaagcaagtgtctcctttccttgtccccaaggtgtgcagactttggcagccgtgcacctgaccagagctgaagctcccgctgggctgtggggttgccagaagctggggttgccatcccggggtacatgtcaccagtcctcttggggttttgtaccatctgatgctggaagttttgattagtgatattttctactactacatatttagagttcactggttcagtcttaaatgcctgcatggtgcctttttaggataaggtataaccatacatttttggtggaagtgtttctgggttagggaagttaaagtctgtttatccgtaagtggggaggagggtcagctaagagaagtgggagggccagagctttttggttctgatttacaaattaatgaagtagtttcaaacaacgcggtcatgtttacctctccatttgggagcctgcctacattcttgttctagaagcacaaaaaatcctcagatgaattagaagaaagaggtttggggactcagcggatactagttcttttaccttctgcttggtaacttagattaaactgagcattgtttttctgtcacaaatgttttccttatgacactggtttcgacatgtaaaatgtgtttgaaaacctgctttgtagatgcagagagaagctataggaaacccagtaccacccctggtctgttctgacgagacatcgttcataaggcacagcacatcgcaagatgaacagttgttaataaaagctgttgctggaaacttgctttaggaacagctcaagaaccttggagttcatatttcacaaatattaataaatataagtccaagagctgtcagcctaatctgtaggagcagaacctctgattgaccaaaaggcatatgggtttaggttggttttttgatgtcatatgtctctgatggggctgcaagtgctacctcgcgcttgtacactgctgctgtggggctccgcgcctgccggtgaagagctgcagatgccgagaagccagcaaacacagggcccactggaaaaaaatagttttttcattagtatttctcgggaggacccaaaagttaaggtcagcttgttcactgtaatttctggaagaagttcactcagaccttcctgaattcagatcatctcagaagtctggagggaaatctggcgaaaccttcgtttgagggactgatgtgagtgtatgtccacctcactggtggcaccgagaaacttacttccttgtattaagtgcacttcttgtatttctaataagatgactttccagaaagtgagatttgttatgttctggcttttaaaaggtaaaatataaataaatttcataacttaatctaaaaaaaaaaaaa

SEQ ID NO: 4752 - DNA, 3733 bp, Homo Sapiens
  NM_018690
gacagacaggatggacttcctccggctatacctccctgggctgcaccaggccttgaggggggcactggattccctcggcacctttgtctcctacctcctgggagatgcagtccccactgtagagcgggaggcgcaggcggctgaggaactgggggtggtggcggtgggaaagacagggaagattgtagaggaggaagcccaggaggacctggagggccttagaggcagccaaaacgagggggctggaaggctgagagggcctggagatgacagaagacatgaagtggggagctcagctgtagaacagacctggggctggggagatggcagctcccatgggtcccaagcagagaggcaggacagtggggctggggagacagccaaggctgccaggtgccaggagccaagcgcccacttggaggccagaaagaaatccaaggcagggtctggggcttgccaagacaggagcggccaagcccaggagaggcaggagtcccatgagcaggaagtgaacagagaagagaggctgagaagctgggaacaggaggaggaggaggaagaggtcagggcaagagagccagggatggccagaggggcggagtcagagtggacctggcatggggagacggaggggaaggctggtgctgttgggccaaaggcggcaggggacaaccgggagatggagcagggggtcagggaggcagatgcaggggaaactgaggagcctggggccgaaggggctgggaaaggagaagaggtggtagtggtggagaaggcctgtgaaagcactagggcatgggggacgtggggcccaggggcagagcctgaggactggggaatcttaggcagagaggaggccaggacaaccccaggtagggaagaggccagggcaattttagatggggaggaagccaggacaatctcaggcggggaggaggctgagacagcctcaggcggggaggaggctgaaacagcctcaggcggggaggaggccgggacagcctcgggaggggaggaggccgggatagcctcaggcggggaggctgggacagcctcaggaggggaggaggccgggacagcctcaggaggggacgaggcctggacaacctcaggcaaagaggaggctgacctgctgggagtcagacagacagaatatggagcagtcccaggagaaaggctcctagaggctactggaaaagtctgggtcctagaggaggagggggatgaggagagagaggctgaggtgagccctttccccaaacagccccaggtcctgggcactgaaagaacagaagaggctgctgagagccagaccgcagggagggaagctgtgggaggccaggaggcaggggagagctttgagggccaggtagacctgcgtggtaaggaggctgagatgaggcaggacttggggatcagggccgaccgggccaggatggaagagctggtacaggcagaggaggcccaggaggagagagggagcagcagggatccagtggctgagctgccctcagatggagaggctgaaggcactgccgacttggaggcaactccagaggccaggcctgaggaggagctcacaggggaggagagtgaggcggcccagactagctgtggcctactgggcgtggaatggggtggcctcacacacagcgtcaccaaaggccaaggacctgagctgatggggggcgcccagaccccaactaagcaacccgaggaaagggaggcaggggaggtggagctcatgggagttctggccctgagcaaagaggagcaggagaggagcctggaggcaggtcccaggcacgcggggtctgtaaagcctgaggcctccgaggccttcccaggagcctgggaaaaccgcacgagaaaggacatggagagaggaaatactcaggaggatgcggccgatggcgagcagcgggaggaggaggagactgcgggaggccagaccctggcggctgaggctgaaggagaccgagagtctgaactatcagaagtcccagaggcaggcggggaggggctgacaacccaggacgcgggatgtggaactgaggagggagaggcatctgtctcagagaaccaggagctggacggaagcacaggggcagacgcagggccttgcccgtcactgggagaggcctatgccagagaaactgaggatgaggaggcggaggctgacagaacatccagaagaggctggaggctgcaagcggtggctgtgggcctcccggaccgtgaggatgcacagactggctctgtggctgctgggattatggggggtgatgtggtcccacacatcagcgctgctggcgctggtgaagctttggaaggggtgcttgggcaaggctgggactcgaaagaaaaggaagaggcagcagcaggagagcatgcaggtgggcaagaatttggtctggagggctcagcagaggaagaggtgactggcagaggcagccaagtagaggcttttgagtccagggagggaggaccttggggagggcgggtagaggccgaggaatctgcaggcgcagaggacagctgtgggctggatcccgcgggctcccagacagcgagggcagaggggatgggagccatggtggaggctggggggcttctagaaaagtggacgctgttggaagaagaggctgttggatggcaggagagagaacagagggaagacagtgaggggcggtgtggggactaccaccctgagggagaggcaccaaggctccttgatgcagagggtctcatggtgaccgggggccggagggcagaggccaaggagactgagccagaaagcctggaacatgtcaggggccaggaggagcagccaacacaccaggcccctgcagaagctgcgccggagtcagtcggggaagccgagacggctgaggccatgggcagtgccagaggaggtgctgccaacagctggagcgaggccccgctccccgggtccctcctagacgtctctgtcccaaggagtcgcgtgcacctctcgagaagctcctcacagcgtcgctcccggccctcttttcgtcggactccggcctgggagcagcaggaggagcccccagcccccaaccctcctgaggaggagctgtcagctcctgagcagagacccctccagctggaggaacccctggagccaagccctctgaggcatgatgggaccccggtgccagccaggagaaggcccctgggacacgggtttggcctcgcgcaccctggcatgatgcaggagctgcaagcccgtctgggccggcctaagccccagtgactgagacccggtgctctgggagccaggccctgagtgggtgccagaaggcttgctccaatgccactgagccctgctccctctgccactgtggacacatcctctccaccctctgggcctcagtgtcttgatgtatcattcatggagcaggcaaaaccagacgtctgggaagaccgtgaacttaaggagtctgattctccgacacaggctggtggaccacctaccccactgagaccacctctcagggtgcctgccctggttcctccccagcctgagtcagctgtctggactgcaaggaggctgggcacgggggctcacgcctgtcaccccagagctttgggaggccaaggtgggaggatcgcttgagaccaggagttcgagaccagcctgggcagcatagcaagatccccatcttttaaaaacaaaataaaacaataaagactgcaaggaagactgagg

SEQ ID NO: 4753 - DNA, 2886 bp, Homo Sapiens
  NM_018691
tctgcgctgaaggagcacttccggggcagtaggaacgccgagtcggctgccgtggctgtgctgagggtggcggccggatagctgatgttctaatcatgtcagataaagatgatattgagactccactgctaactgaagcagcccccatccttgaagatggaaactgtgagccagccaagaattctgagtctgttgaccaaggtgccaaaccagagagtaaatcagaacctgtagtttccactcggaaaagaccagagaccaaaccttccagtgaccttgagacttcaaaagttctccctattcaggataatgtttccaaagatgtaccccagaccagatggggttattgggggagctggggcaagtccatactctcctcagcctcggctacagtagctacagtaggacaaggcatttcaaatgtcatcgagaaggcagagacttcccttggaatccctggtcccagtgaaatttcaactgaagtcaagtatgtagcaggagagacaaatgccaaagagaatgaaaactcctccccagtggctggggcatttggtgtattctctaccatctctactgctgttcagagcacaggaaagagtgttataagtgggggtttggatgccttagaattcattggaaaaaagacaatggatgtgatagcagaaggggatcctggatttaaaagaaccaagggtctgatgaaccgaaatgctacactatctcaggttttacgagaggcgaaggagaaagaagagatacggacctccaatgaggttaccgtggaaacagacaagaaaactcattatgggctactctttgatgaatttcaaggcctttcacatctagaagctctggagatgctttcccaagaaagtgaaataaaggtgaaatctatccttaattctctgagtggagaagaattagagactctaaaagttgaattagagcaactcaaagaaacattttctctagcagaattttgtgaagaagaggaagaagagaaaaaaggggatgaagattttaccaaggacataacagagctgttttcccagctgcacgtttcctccaaaccagagaaacttgccagggcaagaaataccgcccacgaatggatcaggaagtctctgaccaagccattagcagagaatgaagaaggagaaaaacagtcggaagcagaaaatactgagcaagtcaacaaaaattcaatagaggatatccatgcgtttgcaatccggagcctggctgaactgactgcctgctcaattgaactattccacaaaacagctgcattggttctgcatggcaggaagcaggaagtgacagccatagaaaggagccaaactctttcccagatgacaattgtgttgtgtaaagagttgtcctctctgtctaaagagttcactacctgcctaacaactgctggggtcaaagaaatggcagatgtccttaacccattaatcactgcagtatttctagaggcatcaaacagtgcctcctacatccaggacgcctttcagctactcttacctgtgctagagatctctctcattgagaacaagattgaatcacacagacatgagctgcagggccagaaacctttgttagaacattgaagaatggagacgttttgacctgggacttgtgacggccaaggaatgccaccttattctggctactcctgcagaaatgaaggagtggggttattttagtatataaaaattcaggcaggagagatggtttaaagaggaagattgttgccttcagtgtttgattgaagtattcaggttctcacagtattctttccagttgttgtaattcataaattatttgaaaagaaacttttgtagaaagtccaagaataataactctagataaagattagtgggacactcaggcaaaaatgttggtctttctttgacatgttgcaaaatgttatcaattttgtcatggatataatttgcagcccatggatataactggttgataagccagagaaaaataatttagtgttctaaaattcatggcatgtgtggtttattaatgccatgtactttctcctttctggaataaaatctatggctttaagaaaactgagcatatgtaaactctgtgatgattaccctttatcacatgaattcttggaaatagaaagtttcatctgcttttttaaattcttagtagatatttggcattgaggagaaacttgtagactattatagccatgtgaattaactgtagcaaagtgccctttttcttcaaattgctccccctccccaggatgacacacttcatgtcatagctgaaccctactctactggattcaaggccagtaaatgcaatttagagaagcagttttatgtttgcagatattctgagtctcttcaggatgtgtttcgtgtctaccatatatgcaggataaattctttaacagcaaactccaaaggaatgttgaagctgttttagcaatgaggatttttttgtttgagtgttgaagtgggccatagtcctttagaaatgatgttcatttatgataggatttaacttctaaggcatagtttattttttcctctttcctttttgtttgttttaatgtattctttagcatgtttttgatataacttttatcctccagatcttaagctttcttttgctctcttcagcaatttaagagactattaagctgtcgtcttcctaaaagctattttggtatccactctttttaaaaaaattctccaactttgtggttttttaatgattaaggtaatttgttagctctgcccctcatcttctaaaacctttgtaataaaatgtattaatcatgttatttgatcctttcatttacttttgtaaacacgagccctaatatcttacttagaccaaaaaaaa

SEQ ID NO: 4754 - DNA, 2233 bp, Homo Sapiens
  NM_018696
gcgcacttccgcccgggcgcattgtagccccgcggacagctgggccagggtgcgggcctgcgcctccctcggctcctggcgcgggcctcggggagaggggtggaagatgtctatggatgtgacattcctggggacgggtgcagcatacccatctccaacccggggtgcctctgctgtggtccttcggtgtgaaggcgagtgctggctctttgactgtggggagggaacacagacacagcttatgaaaagccaacttaaagcagggagaattaccaagatcttcatcacacaccttcatggagaccatttctttggccttcctgggctcctctgcacaatcagcctgcagagtggctccatggtgtccaaacagcctattgaaatctatggccctgtagggcttcgggactttatctggcgaaccatggaactctctcacacggagctggtcttccattatgtggttcatgaactggttcctacagcagatcaatgtcctgcagaagaactaaaagaatttgcgcatgtgaatagagcagacagtcctcccaaagaggaacaaggaagaactatcctgttagactcagaagaaaactcataccttctgtttgatgatgaacaatttgttgtaaaagcatttcgcctctttcacagaattccctcatttgggttttcagtcgtggaaaagaaacgcccaggtaaactcaatgcacagaaacttaaagaccttggtgttccaccaggtcctgcctatgggaagctgaaaaatggaatttctgttgttctggaaaatggggttacaatttctccccaagatgtcttaaaaaagcctattgttggaagaaaaatctgcatattgggtgactgctctggggttgtgggtgatggaggagtaaaactgtgctttgaagcagacctgttgatccacgaagcaaccctggatgatgcccagatggacaaagcaaaggagcatggccacagcacaccacagatggcagcaacatttgcaaagttgtgccgtgcaaagaggctggttctgactcacttcagtcagaggtacaaaccagttgccttggccagagaaggagaaacagatggcattgcagaactaaaaaagcaagctgaatcagtgttagatctccaagaagtgactctagcagaagattttatggtgataagcattccaatcaagaaatgaaaccagtgttcctgagtgcacactgacatgtctgtgaatatgttactgaacctatagtccagtttttttatttcttgttttagtctgaaattatttgggccctaataatcctaaaaagaatggagctgcattgatgaattggctcagtatttaaagggagcaaactttttgataataaatctttttaagagaaaaaaaacccagcatcctttttgaagtccagatttgtcaaaatgatagactattcagttatacatcttattttgtgctactaccacagatagccaatattccatgcagtcctgggcttagcttctgcccagctttattgctgctattggcaaagagcacaggactcagccctcgtggctaaaaatggtattttggcagtttgtattgaatctgtttgtgttattaacagaagagggagaaatgtcatgagacgttggacaggcaggattgatgatagcatgaccatagctttgctggaatactgaatgcagggtttggctaggtgtttattttaacattttattaaactttctatttgggtcttaacccatggttctcagctggggtgacactgctcctctagaagcaggtttgaaattatgggtatgttttcttgtcacagtgactgagtacggtggtggtagtggtggtactactactactggtatttagtcagcagggataagggatgttagctgtcctgcaaagttttggtcagtcatatacaataaagaatcatctcaccccgaaatgcaaattgcaggcccattgagatacacagcaagttagtttatactcttgatgtgaatatagtttaccaaaattagtgacataatgagtggaattactaggtaagtcaaatcctaaagagtgaatgtgttagaattgcagtgtcataccaaataacattcaaaagaaatgagccattaagtgaagcttatgaacctggaggtaaaaaatgcttatctgttaaactgaggtttcattgacgtgtccctattaataaacgttatttgccccaca

SEQ ID NO: 4755 - DNA, 4353 bp, Homo Sapiens
  NM_018697
gggctggcgcagcaggggccggtgaaatgcaggctgacgacggcgcgccaggggctgagctcgccccggtcggcgacgcgcacacaccttgagtgacagcgacctcttctctacaggttttccccgcgggagcgtggccctagcgggcgttcggttttctttggaaatcgcggagggggctggccgggcgcagcgatccccaccccgggactccagccccggccgtgcgcgtcgccgcggacgggctctgcgggccacggggaaggtgcgaggaggcgcgagcaggctgtgagccgctgggcgctcccgcgagcccgctcctctccgtcgggagcagggcaaaggcgccaggaacagggcagaggcacagcgcccaccgcctctgcggccgcctgatgtgcgagcagcccgcgacgaggcagtgcacgctcagacgccccgctcctcccgccagcgcgcggcctcgctcctcctagaggacgctctctgcgcgggccctcggaggaggcggcggcggggcgagctgcagcgccgggacaggaggtttgtccccgcccgcgcgccgtaccgcggcggagatgggcgagaccatgtcaaagaggctgaagctccacctgggaggggaggcagaaatggaggaacgggcgttcgtcaaccccttcccggactacgaggccgccgccggggcgctgctcgcctccggagcggccgaagagacaggctgtgttcgtcccccggcgaccacggatgagcccggcctcccttttcatcaggacgggaagatcattcataatttcataagacggatccagaccaaaattaaagatcttctgcagcaaatggaagaagggctgaagacagctgatccccatgactgctctgcttatactggctggacaggcatagcccttttgtacctgcagttgtaccgggtcacatgtgaccaaacctacctgctccgatccctggattacgtaaaaagaacacttcggaatctgaatggccgcagggtcaccttcctctgtggggatgctggccccctggctgttggagctgtgatttatcacaaactcagaagtgactgtgagtcccaggaatgtgtcacaaaacttttgcagctccagagatcggttgtctgccaagaatcagaccttcctgatgagctgctttatggacgggcaggttatctgtatgccttactgtacctgaacacagagataggtccaggcaccgtgtgtgagtcagctattaaagaggtagtcaatgctattattgaatcgggtaagactttgtcaagggaagaaagaaaaacggagcgctgcccgctgttgtaccagtggcaccggaagcagtacgttggagcagcccatggcatggctggaatttactatatgttaatgcagccggcagcaaaagtggaccaagaaaccttgacagaaatggtgaaacccagtattgattatgtgcgccacaaaaaattccgatctgggaattacccatcatcattaagcaatgaaacagaccggctggtgcactggtgccacggcgccccgggggtcatccacatgctcatgcaggcgtacaaggtctttaaggaggagaagtacttgaaagaggccatggagtgtagcgatgtgatttggcagcgaggtttgctgcggaagggctacgggatatgccatgggactgctggcaacggctattccttcctgtccctttaccgtctcacgcaggataagaagtacctctaccgagcttgcaagtttgcagagtggtgtctagattacggagcacacgggtgccgcattcctgacagaccctattcgctctttgaaggcatggctggcgctattcactttctctctgatgtcctgggaccagagacatcacggtttccagcatttgaacttgactcttcgaagagggattaaaaggtgcaaaaagacaactaaaatacccatttggaccaaaagccaccagattgcttagtgcctgacacagaaacaactgggaatcctgaaagagaagcagacaccgtcacaggcccctctggttagactagcatgagtgaccgaagccatccatcaacattttctaacagcaccctcatcaatataaaatatgacttcttcacatacagattctctgtagtgtttgcatgtttcttggtgtttgttgtctccaggtgtaagctgttttaaatggaaggcccttctattcctgagggctcagagctgaccatgcatgaatgtatggcagtgtccacttttctgtataaaatgtataaagtggggtttcttccatattgacaaatgagggaacaggtggtgtctatcttgtatatcagaaagattatctagggtctatcctagtgataatacattgtcagccttttctgtggcaccttccagatgagaatgagggagcgaccactccaaggacggacaggaccagcagttctgcaggggcgtgctggggtggtttgggagtgcacagctgaacgcttcccgtttggattttacactcaccttcgtgttttaaagaagcctcagagtgcattgcagctctgtcagggccccattcccagcagaggcttcaggtgctttgtgtagagtccagggcagctggagctttgttggggagacttctggacccaaagggagctttcccaagaagcctttgatggccacactgtaggcagcagtgactaagcactggcagttccagaacatttacccaggtatatgttactaaaacaggctccacctcagtttatcaacattataagttactgttctaagaaaagtaaatacagttccagatgggttattgcagattaacagaaagacactcaactggactcatgtccctgcaattaaacttacttcaaccttttggaaagttatcaaaatctaaatttggaatgaatgcatttcctattttttgtctacttttgggtgataaaaagtactagcccttatttatagatatgagaaacataatgttctaaccaacaacattatggtatttgtgtgacttttatttgaaaaaatgtgagcagtaatttgggttagcctaccttcattaattctatcacatagatttcagtttttagaagggtttctgtcatcatggaagaggtggtctgggactaggtacttctcgtcttgtgagctaaggcttgtgtcatgaaagacaagaggcctctcttaacagcccagtccttgtctgcagggggaggcctgagcatttcccagccccagtgtccacacctctcagaaaagagaaaaaagaatgtcagtttaggagaaaagcttcctttttacttgtgtggttatgtgtggggctggcacccgaaatgtgtgacattcagcttctaaacgatgcctggagagtctgtttgctgcagacacccttgctcctgagtcattattttctttcatgttagattgatgacttctgtgaatagaaatcatcctgatcctattttacctggcctccagggcctgttgatgggctttgcaggcagtccagcagcccacacctgcaggcaggatgctgtcgtcaatgagctgagggtagctgctttgctgaagacctcacacgatgtccaatctcatccaaataacattgttcccatcctccccacccaccacatcaaaacataacacatcacagcactcagtagaggtcctgcctccccatttctcaagggaagccagtaggcaacacagccagcacggtgctctccagggcagcccctctcagacgaggaggcagcgggtgcagccaggtgtctgcagagcagccacaaaggtggcctaggatgcgggtgtctccccaggtgagtccatccacacacgtttgaaaaacactattagtctttctaacacactgagggaaagattaaaatctgtggaataaaggaggagattttatttacagatttttttaaaagccacctgggttgacaccttcctacttatccactagatgtcatcagaggtgctgttccgtggttctgcattaacccctgcctcatgtctgtaacatgtgacagtaattccagctcggtccctccaggcaaaggagaaacgggacttacttcacaggacagaggattgacagaagtcagtttaagataagtgtttgaatcagatttcagtacatctcattcatttcttagatttgtattcacaattgtgttctctaaaatgtgtctaaattttaaaaatatgtacatgcataatgtcattttaaaatctgaaggaaagaatttgaagtccacaaaaagtgtttgaggttctttggttttgttagtaaaagccagttctgtggtgatgacctatggaa

SEQ ID NO: 4756 - DNA, 3035 bp, Homo Sapiens
  NM_018714
ggcgtaggtagatcgccgggggctgacgagtgcaccatggccaccgcggcaacctcacccgcgctgaagcggctggatctgcgcgaccctgcggctcttttcgagacgcatggagcggaggagatccgcgggctggagcgccaggttcgggccgagatcgagcacaagaaggaggagctgcggcagatggtgggcgaacggtaccgcgacctgatcgaggcggccgacaccatcggccagatgcgccgctgcgccgtggggctagtggacgccgtgaaggccaccgaccagtactgcgcccgcctccgccaggccggctcggccgcgccccggccaccgcgggcccagcagccacagcagccatcccaggagaagttctacagcatggctgcccagatcaagctactcttagaaattccggagaagatctggagctcgatggaagcctctcagtgtctccacgccacacagctctacctgctctgctgccacctccacagcctgctccagctggattcttctagttcccgatacagtcccgtcctctcccggtttcctatactcatccggcaggtggcagccgccagccacttccggtcaactattctgcatgaaagcaagatgttgctcaaatgccaaggtgtgtctgaccaagctgtggccgaggccctgtgctctataatgctcttagaagagagttctcctcgccaagccctcacagacttcctgctggccagaaaggcaactattcagaaacttctcaaccagccacaccatggtgctggtatcaaggctcagatttgctcattagtggagttgctggccaccactctgaagcaagctcatgcccttttctacactttgccagaaggactgctgccagatccagccctgccatgtggcttgctcttctctactctggagaccatcacaggccagcatcctgccggaaagggcactggtgtcctgcaggaagagatgaaactctgcagctggtttaaacacctgccagcatccatcgtcgagttccagccaacactccgaacccttgcacatcccatcagtcaggaatacctgaaagacacgctgcagaaatggatccacatgtgtaatgaagacattaaaaatgggatcaccaacctgctcatgtacgtgaagagcatgaagggtctcgcgggaatccgggacgccatgtgggagttacttaccaatgagtccaccaatcacagctgggatgtgctatgtcggcggcttctggagaagccgctcttgttctgggaagatatgatgcagcaactgttccttgaccgattacagactctgacaaaagaaggctttgactccatctccagtagctccaaggagctcttggtttcagctttgcaggaacttgaaagcagcaccagcaactccccttcaaataagcacatccactttgagtacaacatgtcgctcttcctctggtctgagagtcctaatgacctgccttccgatgcggcctgggtcagcgtggcaaaccggggtcagtttgccagtagcggcctctccatgaaagcacaagccatcagcccttgtgtacagaacttctgttctgccctggattctaagctgaaggttaaactagatgacctcctggcttacctcccctctgatgactcatcactgcccaaggacgtttctcccacacaggccaagagttctgcctttgacagatacgcagatgcggggaccgtgcaggagatgctgcggactcagtccgtggcatgcatcaagcacatcgtggactgcatccgggcagagctacagagcattgaagagggtgtgcaagggcaacaggatgccctcaacagtgccaagctgcactcagttcttttcatggccagactctgccagtccctgggagagctgtgcccccatctgaagcagtgcatcctgggaaaatcagagagctcagagaaaccagcaagggagtttagggctctgagaaaacagggaaaggtgaaaactcaggaaatcattcctacacaggccaagtggcaagaggttaaagaagtactcctccagcagagcgtgatgggctaccaggtctggagcagtgcagttgtgaaagttttgattcatggattcacccagtcattacttctagatgatgctggctcagttctggccacagccaccagctgggatgagctagaaattcaggaggaggcagagtctggcagcagtgtcacatccaagatccgactccctgcacagccgtcctggtatgtacagtccttcctgtttagtttatgccaggaaattaatcgggttggaggccatgccttgccaaaggtgacattacaggagatgctgaaaagctgtatggttcaagtagtagctgcctatgagaaactctccgaagaaaaacagattaagaaagaaggtgcatttccagtcacccagaaccgggcgctgcagctgctttatgatctgcgttacctcaacattgttctgacagccaagggtgacgaggtgaagagtggccggagcaagccagactccagaattgagaaagtgactgaccacctggaagccctcattgatccatttgacctggacgttttcacgccacacctcaacagcaaccttcatcgcctggtgcagcgaacttctgttctgtttggattggtgactggtacagagaatcagctcgccccccggagcagtacgttcaactcccaagaaccccataacatcctgccactggcatccagtcagatcaggtttggacttctcccactgagcatgacaagcactcgaaaggctaaatcaaccagaaacatcgaaacaaaagctcaggttgtccccccggcacgctccacagctggtgacccgacagttcctggctccttgttcagacagcttgtcagtgaagaagacaacacgtctgcaccttcattattcaaacttggctggctctctagtatgactaagtaacatggcaacacatctgtctctccctaaataaatactaccacattatttcttctaaa

SEQ ID NO: 4757 - DNA, 4109 bp, Homo Sapiens
  NM_018715
cgcacatgtgtttctgttttgtgttgtagcatttgttctggaagctcgtatttacattttaagtgtatctggtgagtgggctggagccctcgtctgggccggaaaaaaaaaagccctccgatccgtcttttagttgcttctcttccttttttctctccggtttctcatcactccaaccagccgcgaccatgcccaggaagaaggcggcggcggcggcctgggaggagccgagctcgggcaacggcactgcccgcgccgggcccaggaaacgcggcggcccggcgggcaggaagcgcgagcggcccgagcgctgcagtagcagcagcggcggcggcagcagcggcgacgaggacggcctggagctcgacggggcccccggcgggggcaagcgcgcggcgcggccggcgacagcaggcaaggcgggcggcgcggccgtggtcatcaccgaacccgagcacaccaaggagcgcgtcaaacttgaagggtcaaagtgcaaagggcagcttttgatttttggggcaaccaactgggacttgattggtcgaaaagaagtgcctaaacagcaagctgcttaccgcaatctcggtcagaatttgtgggggccccacagatatgggtgcctggcgggggtccgggtgcggacagtggtctcgggctcgtgtgctgcacacagcctcctcatcaccacggaagggaagctgtggagctggggtcgaaatgagaaggggcagctgggacatggtgacaccaagagagtagaagcccctagactcatcgagggtcttagccacgaagtgattgtgtctgcagcatgtgggcggaaccacaccttggccttgacggaaacgggctccgtgtttgcgtttggggaaaacaagatggggcagctgggccttggcaaccagacagacgctgttcccagccccgcgcagataatgtacaacggccagccaattaccaaaatggcctgtggggctgaattcagtatgataatggactgcaaaggaaacctctattcctttgggtgccctgaatatggtcagctgggacacaactcagatgggaagttcatcgcccgggcacagcggatagagtacgactgtgaactagttccccggcgagtggccatcttcattgagaagacgaaagatggacagattctgcctgtaccaaacgtggttgtacgagacgtggcctgtggcgctaaccacacgctggtcctggactcccagaagcgagtcttctcctggggctttggtggctatggccggctgggccacgcagagcagaaggatgagatggtcccccgcctggtgaagctgtttgacttccctgggcgtggggcttcccagatctatgctggttacacctgctcctttgctgtcagtgaagtgggtggtctgtttttctggggggccaccaacacctcccgtgaatctaccatgtacccaaaagcagtgcaggacctctgcggctggagaatccggagcctggcttgtgggaagagcagcatcattgtggccgccgatgagagcaccatcagctggggtccgtcaccgacctttggggaactgggctacggggaccacaagcccaagtcttccactgcagcccaggaggtaaagactctggatggcattttctcagagcaggtcgccatgggctactcacactccttggtgatagcaagagatgaaagtgagactgagaaagagaagatcaagaaactgccagaatacaacccccgaaccctctgatgctcccggagactcctccgactccacacctctcgcggcagctgtcatttccatgtgcactgggacgggaagtcaaacgaggaatttaaaaaagcaaaagttgaccgaaggtgcatttttgtttagactccctgaggttccgttttacacatgatccaacgttaactacctttttttctgtatgctttccaaagtccttttttttcccttaatgttgaattaaaatacttgctcatagttgatttaccattcctacaaaagaggcagaaactttgagcaatctaggttttttttttttttaagttttttctttcttcctctcctgaatacactccccaaaacacccctttccagttacaattagcatcgtgatccaagcagatgccacatggaagaggaatcgccatttactcagaaaaaatgtcccttacaggaaccggcagcagctaggcagtcaccggcccgcctccatccaaaatcacgctcgcgtgcttcggaagcatccgggtcactccttctccgctttttcttgcagatgggcctaggccggtgtcggttctgtttctccccttggctgcctgtacgcccacagccttctggctgcgacattatagaatcggccgtgtcccccctggtgggggattggggatctgtgtttagccatttatatctactttagctgttaaagaggtccaaatgaaaatcaggtgattgtggaaccatggggacttgggggtggggcagaggtgggaacatttgtatcagttgagtcagcttggtggctccctgtggagccagggctgagccttgtcacgcgcactcgccaattaagagatggaccagccagcagtcaagtgcattctccagtccttgcaagaaggatcagccctttctgtgccagcctcgatcgccttgtgctttggtctctttttctcccccccgcctggatcctgcctcgcgcgggccgtcctgttgctgagactcggggtaccgttctgctgacccagctccctttagtcacgtttgcttggctctggtaccaaatagttgggattaccgaagagtccccttccttgcgtgtcagcacggatgctgtgactgccacctgcgtcctcgtcaagtgcccgagctcgccgccgtgtgtgctgcgctgagtgagttatgaggtgcctttcccggaaccctcctctcgcctggacccaagagaggcgacagctgtggctggggctcttggtttccagagggtctggactggtttgggtgctttaaaatagatatttagttcagtggtgcttatgggggagatgggactagaacttaagtgtgagacttgggtggatgggaaagttaaatattggtctcttcaagttttttttttcttttgctttgttaccacttgtcactgtctccatgttaaaatgccaaaaatgatgtagttgttgttgcttttttccctattttccaccccagtcgctccttaccgtgactcctgcccttggagggcatgtagcagtgtctgtcctgccagtcccaaggccctgtgggaggagactggcctgcatctctctaagacttagtctgacgccacgcgcatctcttgttctgtgttcaatcagtagtccaggggagaagcttctgctacttcagagctttgctaaactaacctaatttgtccaaatcaccccaaaaccaccatctctgacgtaagcttccatgcgacagcctgatccgtttccctggacaggtctctttcctggaatgcagcccaggcacctgtgctcctggcacccttgaggtctctcctttgagccgtggtcaccgagagggttgaggacgcagcacccgaggtcccagcctttgcaggagcctccctgggcttagctggacttagatcttcggtggcctcatgtaaacgtggcagccagcctcttctagaaccctagcccagggactggagcaggaaagggaccttcaaagtgaagactgccttgtcccgcagctccttctggcttagattgaaaaatgggcttcctaatgggttaaatcctttaaaacaaggagttgtgggggaagggtgtcgtgcactcctagagaaaggtacacagttgcccggttgggaatgtgcttggcgctgaccctgcgggcatctgactggtcttccagctcaggaaaaagaatttgaaagaggcttagcgtgaaggggaatcaaagaggaggttgtgatttggtcgaaggtgcctggtttagtgctgtaattgtcttattattttttttatatatatatttcttggagtaaacattttaaataaacaacaacattgtctactgtcttggaaaaaaaaaaaaaaaaaa

SEQ ID NO: 4758 - DNA, 3526 bp, Homo Sapiens
  NM_018718
ggcaacccgtgaggctagaaccccgaacgtggtcggttggagaaaatatgtccctccggaggcacattgggaaccctgagtatctgatgaaaaggataccacagaacccaagataccagcatatcaaatcaagactggacactggtaacagtatgactaaatatactgagaagctcgaagagattaagaaaaattatagatacaaaaaagatgagcttttcaagagactaaaagttacaacttttgcccagctgatcatccaagttgcttccctctctgatcaaacactggaagtgacagctgaggagattcaaaggctggaagacaatgattctgcagcttcagaccctgatgctgaaaccactgccaggaccaatgggaaaggaaatccaggtgagcagtcgccgagccctgagcagttcataaacaacgcaggagcaggggactccagccgctcaactcttcagagtgtcatcagtggtgttggggaactggatctagacaaagggccagtgaagaaagcagagccccataccaaagacaaaccttatcctgactgccccttcctgctgctagatgtgcgtgatagagattcttaccagcagtgccacattgttggagcttacagttacccaattgcaactctgtctagaacaatgaacccttattcaaatgatattcttgaatataaaaatgcccatggcaagatcatcattctgtatgacgatgatgaaaggctggccagtcaggcggccaccaccatgtgcgagcgtggatttgaaaacctcttcatgctttccggaggtctaaaagtcttagctcagaaattcccggaaggactgattactggttccctgccagcatcttgccagcaggcccttcctcctgggtctgcccggaaacgatccagccccaaagggccacccctaccagctgagaataaatggagatttaccccagaagacttaaaaaagatagaatattatctggaagaggagcaagggcctgcagatcatcctagccgactgaaccaagctaactcctccggaagagagtccaaggtgcctggtgcccgaagcgctcagaatctgccaggtggcggccccgccagccactcaaacccccgctccctcagcagtggtcacctgcaaggcaaaccctggaagtaaagactttgtctcacttaggcaaataaatgttcttcctcttttcagaacccctgagcatttcccaagttgggtcatttccagaaacttctgcagaggaaagaccatgacatatgtatgggataggcctcttccctgtccctgtctccagttcctctcccctcaggaggccacctcaggaaggattttgacaggtgaccataaaaaccagaggtgtgacaggctctagtctcctccctgttgtttacagcatatttaagtcttgtgaaactgtataggaaaaaagtatctacgtttttagtttttttgttttgtttttttttaataaggtccagcttgttgggtctctctgtgttgttttgtaaatacttcagtcacatctgcccgtgtgcctgtccctgccaccttttcattcactgttcttgacttcatgaaggcttctccgggcagtcttggtgtgagaagctgtttccaagggtgcagatgagccttaggttccagccgcctgcagaccccaccccagcaggctcactcagcaaggagctctctgcccagcatattgcaggccctgttttgagtatggaagccagtgcctgtgtactcactgaaattgaagatgaggaaagtagctgtacactcactgaatgctcccccttactagatatttcctggagccagaaaggtatgcatgtgggtgtcttcacaccggggaggagggcctctcatgggaaagccctggccaccacaccggcctgtgccccttgaagcccaccaaagcggccctcacttgtggtcagtatatcagttatgacgcccattgcccagcttcagtccatccatgttagatggacagaaattatggccagttgaaaataccagctttggttggacaactgtggacacacaaggtgaagaggactccgaagtcctttgtcagggctgacaacctcgtaagcccttgcttagaaatacagtattagtctaattgagtaattagtgcaatttcctgcttacttttcattctcatgactgaactgtgattaggaagttgtgattatagattctggttttggccggaattttgaatcagcattaattgaattgctaaatgactgacattcattccatttaattgggggaacaaaaggcctcaggtaaggatgaggaactctgaaatcagatggaaaagagcggtgttaatttttatggtctgtgatcgtagctgtgataagggactgaggaataaattgtgctctttgtcatggcaaccagcttctgaaaagcccactgaaaattgcctgtcctgctggtaactgctacggggtaagatttgccttaacagtactattttctcgccaccaaaaaaaaaaaaaaaaaaaaaaaaaaatgcaccacagtatttctagcatgggggctgtgtttgtatgagaaataaacgtaataaatatctcatagagacatatggaaaaataactttcagattcagcccagttctgttttagagtgtgtttattcttctctacttgatttccaaagtgcaacattttccgatgctttagaaatcaaacaaaccagggacattgttcagatgtcaagccatgcccaattttccacaagattcaagaatcttgtataaaattcagccaacgtacacatagctttaatgaggagcctgtcatgtttccccataaatttattgcctgagaacttagttcagcctttgctaatgccaaaatgctctggctttgtattttctttacagcatagatagaaaaatgcacatttttccacactcagctttcccctagcatggacaagattttcagccatttttgccacatatacatttttaaggaaaaaagatttttctctgtaagaaagttctggttatgctgttttaaaggtgacttgtcaggagttgagacttccctgccggattctattttgaaagtaaatggtcttccctccttgttccgattctgcgttcccatcgtcagacaactttggagtattagaaaccactgtatatatgtggaaagccaggtcagccagacctgttagaattggtgtgcactcacctgagagatctggcaggttggatatatttatgtgtatttctccacagtgcttgctttgccctgttggtaaggattttaaataaccatgctcaaaagagctgttctaatctgcgttttgcatgttaagtgttaatatcaaacattctttacgtgctcgaggtattgcttttaacattctactttgccagtttcttcattagattaattgacatgtattatttaaatgaccagtgatgctttgtgcaattatgaatgttgaagattaaagtacatagttactaa

SEQ ID NO: 4759 - DNA, 2922 bp, Homo Sapiens
  NM_018719
gtgctccgggcggagcgcgctagctgctcgggcgcggggcgttcttggtgcgccgggccgtggtgagtccgggctcccgtggccgcgtgctgggaggagactggagcccggttaggaagaatggagttggcgactcgctaccagatccctaaagaagtggctgacatctttaacgcccccagtgatgatgaagagtttgttggcttccgagatgatgttcccatggaaaccctctcgtcagaggagagctgcgatagttttgactcactagagtcagggaaacagcaggatgtgcgctttcattccaaatacttcacagaagagctaagaagaatttttatagaggacactgactcagagactgaggattttgcaggatttacgcagagtgatctgaatggaaagactaacccagaagtaatggtcgtggagtcagatttgagtgatgatggcaaagcatctttggtgagcgaggaagaggaagatgaagaagaagataaggctacccctagaagaagcaggtctagaagaagtagtattggtcttcgagtagcctttcagttccccaccaagaagctggccaacaaaccagataaaaacagttcttccgagcagttgttttctagcgcacgcttacagaatgagaaaaaaacaattcttgaaagaaagaaagactgtagacaggtgatacaaagggaagattctacctctgagtctgaggatgactctcgggatgagagccaggagagttcagatgctttgctgaaaaggaccatgaacatcaaggagaacaaagccatgcttgcccagttattggcggaattgaactcgatgccagatttcttcccagtacgaaccccaacctcagcttctaggaagaagacagtgaggcgggccttctcggagggacagatcacgcggcgtatgaacccaacccggagtgcgcggcctcctgagaagtttgctctagagaacttcactgtctcagccgctaaatttgcggaagagttttacagcttccgaagaaggaagacaattggggggaaatgccgggagtacagacgacgtcaccgtatatcttcttttcggccagtggaggatatcaccgaagaggacttagaaaatgttgccataactgttcgagataaaatctatgataaagttctgggtaacacgtgccatcagtgtcgacaaaagaccatcgacaccaagacagtgtgtcggaaccagggttgctgtggtgtgcgaggacagttctgtggaccatgcctgcggaaccgctatggggaggatgtcagatcggcattgctggacccggattgggtgtgtcccccctgtcgtgggatctgcaattgcagctactgtcggaagcgtgacggccgctgtgccacaggaatcctcattcatctggccaagttttatggttatgacaatgttaaggaatatctggagagcttacaaaaggagctggtagaagacaattaagaggaaaacaaacagaaccagccacctcaccatagagtactccaacaagacatgcataccattggtgcctaagaaagatttttttacagttgtgtttttatacagaaattctttgtagaaattactattttttgttaaagattgtttatatgcttacaaagatttctcaggaagacagcagagcagaggaatctatatagatgtatgcacagacctgtctgtatgctgaactttgttaaaaatatctgccagttattaaaaagcacagtttaaatggggtggggttaaagttcaggtaagtaagttagagagaaaacattgtatgatcagctcctgcacttgatctatctatctttggcttcccaaacagtaactcactccaggccaagtgtgccttagcacgagtgaccacagtttaatagaccacacacatcgtttaacctgctcttggtcattggaaatttacactgaacaaagtgcaattaactgtagaacagttttatttttattaaaacttgactgaacaaaaggggaccatcaacattgtagacactggacactggaggccttacagagtgctagcctcttccttcaggactcacctggggcctgctgcttttatattttgaaagagtttaagggctaataatttaatttgttgtttgttaaaaattaaaatctccgttctttccggctgcattgcttttgcatgttcacatatgatgtacttttatgatgtacttttttttttttgagatggagtcttgttctgttgcccaggagggagtgcagtggtgcaacctcggctcactgcaacctttgcctcctaggttcaagtgattctcctacctcctgagtaactgggattacagtcgtgtgccaccacgctcagccctgagttagtttctagtatttttttctgactttcactctaaggatagcgttgaaaaaagaatgcacgtgtgagttactaaaaagttagaataatgtgcatgggaacagtgcagcaacatgctagaaaatcctcactgcactccagcagaggctagaggaatgccagtgttaccttacgcttctagaagcagagccactccagccagaacccattttgcagtcttctcttcgctcttcagcctgaaggtccagatgtagctggggcctctcagtttggttctatacacagggcactcgtaggtctgtttggtttcttgtctgtccacgggggtggcttttgcaaagatgaccggcatagggcatgccagctccttgagacgggcttcaacaatggttcctgcttgggtgtcccagcgggcgcctatggcaaaaacacagcggttgcaattgtgtggcagcttgctactaatgataatgatcaagtaagttgtttgatgcaataaacattcaacattctggttttgtcataaaaaaaaaaaaaaa

SEQ ID NO: 4760 - DNA, 2072 bp, Homo Sapiens
  NM_018725
agcgtgcgggtggcctggatcccgcgcagtggcccggcgatgtcgctcgtgctgctaagcctggccgcgctgtgcaggagcgccgtaccccgagagccgaccgttcaatgtggctctgaaactgggccatctccagagtggatgctacaacatgatctaatccccggagacttgagggacctccgagtagaacctgttacaactagtgttgcaacaggggactattcaattttgatgaatgtaagctgggtactccgggcagatgccagcatccgcttgttgaaggccaccaagatttgtgtgacgggcaaaagcaacttccagtcctacagctgtgtgaggtgcaattacacagaggccttccagactcagaccagaccctctggtggtaaatggacattttcctacatcggcttccctgtagagctgaacacagtctatttcattggggcccataatattcctaatgcaaatatgaatgaagatggcccttccatgtctgtgaatttcacctcaccaggctgcctagaccacataatgaaatataaaaaaaagtgtgtcaaggccggaagcctgtgggatccgaacatcactgcttgtaagaagaatgaggagacagtagaagtgaacttcacaaccactcccctgggaaacagatacatggctcttatccaacacagcactatcatcgggttttctcaggtgtttgagccacaccagaagaaacaaacgcgagcttcagtggtgattccagtgactggggatagtgaaggtgctacggtgcagctgactccatattttcctacttgtggcagcgactgcatccgacataaaggaacagttgtgctctgcccacaaacaggcgtccctttccctctggataacaacaaaagcaagccgggaggctggctgcctctcctcctgctgtctctgctggtggccacatgggtgctggtggcagggatctatctaatgtggaggcacgaaaggatcaagaagacttccttttctaccaccacactactgccccccattaaggttcttgtggtttacccatctgaaatatgtttccatcacacaatttgttacttcactgaatttcttcaaaaccattgcagaagtgaggtcatccttgaaaagtggcagaaaaagaaaatagcagagatgggtccagtgcagtggcttgccactcaaaagaaggcagcagacaaagtcgtcttccttctttccaatgacgtcaacagtgtgtgcgatggtacctgtggcaagagcgagggcagtcccagtgagaactctcaagacctcttcccccttgcctttaaccttttctgcagtgatctaagaagccagattcatctgcacaaatacgtggtggtctactttagagagattgatacaaaagacgattacaatgctctcagtgtctgccccaagtaccacctcatgaaggatgccactgctttctgtgcagaacttctccatgtcaagcagcaggtgtcagcaggaaaaagatcacaagcctgccacgatggctgctgctccttgtagcccacccatgagaagcaagagaccttaaaggcttcctatcccaccaattacagggaaaaaacgtgtgatgatcctgaagcttactatgcagcctacaaacagccttagtaattaaaacattttataccaataaaattttcaaatattgctaactaatgtagcattaactaacgattggaaactacatttacaacttcaaagctgttttatacatagaaatcaattacagttttaattgaaaactataaccattttgataatgcaacaataaagcatcttcagccaaacatctagtcttccatagaccatgcattgcagtgtacccagaactgtttagctaatattctatgtttaattaatgaatactaactctaagaacccctcactgattcactcaatagcatcttaagtgaaaaaccttctattacatgcaaaaaatcattgtttttaagataacaaaagtagggaataaacaagctgaacccacttttaaaaaaaaaaaaaaaaaaaaaaaaaaaaaaaaa

SEQ ID NO: 4761 - DNA, 3909 bp, Homo Sapiens
  NM_018837
gagcgagagtgtgtcgagtgagtgtgcgtctgtgtgtcccggcgagggtgcgcgctcggcgccgggagcgcggccagccgagtccggaggcatcgggaggtcgagagccgccgggaccccagctctgcgttcactgccccgtccggagctggacttcggggccggggccggggccgtgcgccggggacaggcagggccgggtcgcgggccgcgcgtcccccaggccggagatctgcgagtgaagagggacgagggaaaagaaacaaagccacagacgcaacttgagactcccgcatcccaaaagaagcaccagatcagcaaaaaaagaagatgggccccccgagcctcgtgctgtgcttgctgtccgcaactgtgttctccctgctgggtggaagctcggccttcctgtcgcaccaccgcctgaaaggcaggtttcagagggaccgcaggaacatccgccccaacatcatcctggtgctgacggacgaccaggatgtggagctgggttccatgcaggtgatgaacaagacccggcgcatcatggagcagggcggggcgcacttcatcaacgccttcgtgaccacacccatgtgctgcccctcacgctcctccatcctcactggcaagtacgtccacaaccacaacacctacaccaacaatgagaactgctcctcgccctcctggcaggcacagcacgagagccgcacctttgccgtgtacctcaatagcactggctaccggacagctttcttcgggaagtatcttaatgaatacaacggctcctacgtgccacccggctggaaggagtgggtcggactccttaaaaactcccgcttttataactacacgctgtgtcggaacggggtgaaagagaagcacggctccgactactccaaggattacctcacagacctcatcaccaatgacagcgtgagcttcttccgcacgtccaagaagatgtacccgcacaggccagtcctcatggtcatcagccatgcagccccccacggccctgaggattcagccccacaatattcacgcctcttcccaaacgcatctcagcacatcacgccgagctacaactacgcgcccaacccggacaaacactggatcatgcgctacacggggcccatgaagcccatccacatggaattcaccaacatgctccagcggaagcgcttgcagaccctcatgtcggtggacgactccatggagacgatttacaacatgctggttgagacgggcgagctggacaacacgtacatcgtatacaccgccgaccacggttaccacatcggccagtttggcctggtgaaagggaaatccatgccatatgagtttgacatcagggtcccgttctacgtgaggggccccaacgtggaagccggctgtctgaatccccacatcgtcctcaacattgacctggcccccaccatcctggacattgcaggcctggacatacctgcggatatggacgggaaatccatcctcaagctgctggacacggagcggccggtgaatcggtttcacttgaaaaagaagatgagggtctggcgggactccttcttggtggagagaggcaagctgctacacaagagagacaatgacaaggtggacgcccaggaggagaactttctgcccaagtaccagcgtgtgaaggacctgtgtcagcgtgctgagtaccagacggcgtgtgagcagctgggacagaagtggcagtgtgtggaggacgccacggggaagctgaagctgcataagtgcaagggccccatgcggctgggcggcagcagagccctctccaacctcgtgcccaagtactacgggcagggcagcgaggcctgcacctgtgacagcggggactacaagctcagcctggccggacgccggaaaaaactcttcaagaagaagtacaaggccagctatgtccgcagtcgctccatccgctcagtggccatcgaggtggacggcagggtgtaccacgtaggcctgggtgatgccgcccagccccgaaacctcaccaagcggcactggccaggggcccctgaggaccaagatgacaaggatggtggggacttcagtggcactggaggccttcccgactactcagccgccaaccccattaaagtgacacatcggtgctacatcctagagaacgacacagtccagtgtgacctggacctgtacaagtccctgcaggcctggaaagaccacaagctgcacatcgaccacgagattgaaaccctgcagaacaaaattaagaacctgagggaagtccgaggtcacctgaagaaaaagcggccagaagaatgtgactgtcacaaaatcagctaccacacccagcacaaaggccgcctcaagcacagaggctccagtctgcatcctttcaggaagggcctgcaagagaaggacaaggtgtggctgttgcgggagcagaagcgcaagaagaaactccgcaagctgctcaagcgcctgcagaacaacgacacgtgcagcatgccaggcctcacgtgcttcacccacgacaaccagcactggcagacggcgcctttctggacactggggcctttctgtgcctgcaccagcgccaacaataacacgtactggtgcatgaggaccatcaatgagactcacaatttcctcttctgtgaatttgcaactggcttcctagagtactttgatctcaacacagacccctaccagctgatgaatgcagtgaacacactggacagggatgtcctcaaccagctacacgtacagctcatggagctgaggagctgcaagggttacaagcagtgtaacccccggactcgaaacatggacctgggacttaaagatggaggaagctatgagcaatacaggcagtttcagcgtcgaaagtggccagaaatgaagagaccttcttccaaatcactgggacaactgtgggaaggctgggaaggttaagaaacaacagaggtggacctccaaaaacatagaggcatcacctgactgcacaggcaatgaaaaaccatgtgggtgatttccagcagacctgtggtattggccaggaggcctgagaaagcaagcacgcactctcagtcaacatgacagattctggaggataaccagcaggagcagagataacttcaggaagtccatttttgcccctgcttttgctttggattatacctcaccagctgcacaaaatgcattttttcgtatcaaaaagtcaccactaaccctcccccagaagctcacaaaggaaaacggagagagcgagcgagagagatttccttggaaatttctcccaagggcgaaagtcattggaatttttaaatcataggggaaaagcagtcctgttctaaatcctcttattcttttggtttgtcacaaagaaggaactaagaagcaggacagaggcaacgtggagaggctgaaaacagtgcagagacgtttgacaatgagtcagtagcacaaaagagatgacatttacctagcactataaaccctggttgcctctgaagaaactgccttcattgtatatatgtgactatttacatgtaatcaacatgggaacttttaggggaacctaataagaaatcccaattttcaggagtggtggtgtcaataaacgctctgtggccagtgtaaaagaaaatccctcgcagttgtggacatttctgttcctgtccagataccatttctcctagtatttctttgttatgtcccagaactgatgttttttttttaaggtactgaaaagaaatgaagttgatgtatgtcccaagttttgatgaaactgtatttgtaaaaaaaattttgtagtttaagtattgtcatacagtgttcaaaaccccagccaatgaccagcagttggtatgaagaacctttgacattttgtaaaaggccatttcttgggaaaaaaaaaaa

SEQ ID NO: 4762 - DNA, 600 bp, Homo Sapiens
  NM_018838
ttccatccggtgggttttgctcggcgcacccgggaggcggggccagcgaggcaagatggagttagtgcaggtcctgaaacgcgggctgcagcagatcaccggccacggcggtctccgaggctatctacgggtttttttcaggacaaatgatgcgaaggttggtacattagtgggggaagacaaatatggaaacaaatactatgaagacaacaagcaattttttggccgtcaccgatgggttgtatatactactgaaatgaatggcaaaaacacattctgggatgtggatggaagcatggtgcctcctgaatggcatcgttggcttcacagtatgactgatgatcctccaacaacaaaaccacttactgctcgtaaattcatttggacgaaccataaattcaacgtgactggcaccccagaacaatatgtaccttattctaccactagaaagaagattcaggagtggatcccaccttcaacaccttacaagtaaagacaatgaagaacagttgaaacatgcaaaatatggagcttttcatgtaattactcttttactgtttaccattcactataattcacaattaaaattgtgtgactaaa

SEQ ID NO: 4763 - DNA, 1140 bp, Homo Sapiens
  NM_018840
gggcgcgcgacactgcaccgcccctcccttcgcggcgcctgctctgtagagccggcggaaccgggtagcttggccaggttgtgaggaaccgcagcgcgccgcaggaccgggccgctgagcctgcagccgccccgcgccgtgacctgcgaccctagaccccgactccctttggctcagcccgcgcgccccaggcccggcccgggcggcgcgacgggaggatgagcggcgggcggcggaaggaggagccgcctcagccgcagctggccaacggggccctcaaagtctccgtctggagtaaggtgctgcggagcgacgcggcctgggaggataaggatgaatttttagatgtgatctactggttccgacagatcattgctgtggtcctgggtgtcatttggggagttttgccattacgagggttcttgggaatagcaggattctgcctgatcaatgcaggagtcctgtacctctacttcagcaattacctacagattgatgaggaagaatatggtggcacgtgggagctcacgaaggaagggtttatgacctcttttgccttgttcatggtcatttggatcatcttttacactgccatccattatgactgatggtgtacagctcccaagtgctccctatccagtccaaaggaccctcttgattacagcacaggaacttgatcgttggggaaccccagccccttggaacttggaagacccgtgtttcctggaccgcgaatcagtgtgttgggcatcagtgttttctgcaagggttgtgacctgaaactttttaaaaaccacccacctttggggaagcatttctgaatttatccatcaccaaccatttcttcttggataccatcaagtaacagctattatttgccaagtggagctgtcatttaatttgatgcacctctggattcagatgaaacattaaattgtcttcctcgattctccatcgggtgtagagtttttaaactatcaatggcatttcaagtcttctgaaacagcatggctgtatgtgcgtggtccatagcacagtacatgcagcatctaataagagtttccattgtagaatgttttcacatacttgaataaatcaaatctttaattgagaaaaaaaaaaaaaaaaaaaaaaaaaaaa

SEQ ID NO: 4764 - DNA, 3152 bp, Homo Sapiens
  NM_018843
cgccccctcacgccgccgtccttctcgcgcctcgctctggccctgcaggttgtgtttccgcctctaccccgcctccattccgttgctctctcagtctcagacccgggctctcggtccgccgcttcaggtcttggcgcagcctcagagagttggcgcggctctgtgttgaccaaacctagtggatgcagttagcgccggagcccggccccgcccgtcaccagggttattcccgccttctaggtttgccaggactgccggccctgcagctgccttctgccccaggtttttggctactgatgttacaaacaataaaatattggagcatagagttgaagaacagactcaaaccaggtttttatttaattagttaaaaatatggatcctgagacaaggggacaagagattatcaaagtgacacctcttcaacaaatgcttgcctcatgtactggagctatactgacatcagtaatagtgacacccctggatgttgttaaaattagactccaagcccaaaacaacccactccccaaaggaaaatgttttgtatatagtaatggactcatggatcatctatgtgtctgtgaagagggaggcaacaaactatggtataagaagccaggaaatttccagggaacattggatgcattttttaaaatcattcgaaatgagggcattaaatctctatggagtggccttcctcctaccctagtgatggcagttcctgccacagttatttattttacctgctatgatcaattaagtgctcttctgagatctaagttaggagaaaatgaaacctgcataccaattgttgctggaattgtagccagatttggtgcagtaactgtgataagtccactagaattgattagaaccaagatgcagtccaagaagttttcttacgtggaactgcatcgatttgtcagcaagaaagtatctgaagatggttggatttccctttggaggggctgggctcctactgttcttagagatgtacctttctcagcaatgtactggtataactatgaaattttaaagaagtggttatgtgagaaatctggtttatatgagccaacatttatgatcaactttacttcaggggcattgtctggttcttttgctgctgttgcaactttaccatttgatgtagtaaaaacacaaaagcagacacaactttggacatatgaaagtcataaaatttctatgcctttgcatatgtcaacctggattataatgaagaacattgttgctaaaaatggattttccggattattttcaggcctaattcctcgcttaattaaaattgctcctgcttgtgccattatgatcagtacatatgaatttggaaaggcttttttccagaaacaaaatgttcgaaggcagcaatactagtgatgctgtttcaacttgaaacaacaactatagccaaagaagatggagactcttaggcaagaatgtttttcaccattattctctcacaatgattttatgtctttctttcctataatttaaataaataatttcagctctacctctaaatcataattttaaaataaattttatcttatttttggtgatattgaaaaagatattctagaaatcaccaccattgagcattcttgtaaaaatagattactccttagcatcaaaagcagtctcttgaaagtttaatattatatgtttcagtgtaacataatcttactgggagtgtgttgaatacaccagaactttttgaattgtgtgctgaatgatgtacatagtctagaagaaaaaagcccaagtcttgtgcacatttaaatcgtgtacataagtatttccgtatttcagtaaagtagataaagcactcgttaaatagcattgtttacatcgaccaaatattgcctgtttcctttaattcaaatgcattaggttcccgcctccctctccttccccgccatgttgctgttttaaggcttcatatgtattaacatttctctgatcaaaattgtggctgttttccttatgaaccataatataatcatttgtgtgatgtacattgtgccatttttgatgactaaatgtctatatttctgccattcctgtaagagagggagttttttactgatagtagcaaatgttcacttcagtcaaacttgggtgttcagtggtaaaccatatagtatttagactggtaaaaatagtttgcacacaggaatagcctctgatttttagctctcttgtaatccaagtatcattgttcatggaattctctaggtcatttttattgtgttgttctaacaagacagattattgctacaacaatagttacaagatatttctaaaatatcctttgatttttactctaagtatggtagagtaagaggctaaacaagaagctgtttccttgaagacattgctttcagtcaccatacatgtctaaataatttagcttatcattcattctatgtaggaatgagataagaaaggatatgatggcaggaaaagaaatgctattcattttttatactttagttttattttcttaggatctatatcctatatatatatattttttaaagcactaatttattgcagtctttattttagaaaaatgtgaagcatttttttctcccctaaaatgaatatatttagatgacaagtctttagtgctggtagaggaactaattgattttgtactatagtaggaaagtgtttatatgtttcaccagaaataaaatatgtagggtttgtatgtaatcttctgtgtttatcctatgttgatttaccttaaatttgcaacatacatatccacataaatattcatgactttcttatatttcattaaaatgttttatggcttcttaaaatcatcactgtgcttctaaatatttttacgtaaaatcattgtataatgctatactgtgatatacatgaaagtttatcttgaacagtgctctttaacaatattaaatttaaatttatcttggttttgctatgcttatgggtaattcatagaaaacagaaaaaatactgttcccaaaaggcagttatatatttcagtttaatatcacctataagtatgagaaaggtttccatgtctcctacccctcactgcacttaggaaaattcttatttatgaataaagtaagataagtaaatctaaaaaaaaaaaa

SEQ ID NO: 4765 - DNA, 6034 bp, Homo Sapiens
  NM_018844
agacctggaccccggcaccctcccgccggggccgcacttagcagtggaaagtctgtcctcctgaagaagttgcgctccgacctccaagcatcaggtcaaaagtctaactcattctctgacctgccgccaattagaaaacaactgttgccaataaacgtggtcgcgccgcctgtgacctcagccgggacggacccgcgggcgggagcctgcggggcgtgaggcggggtggggccctggctcccctcccccgcccagccgcggcgtctgacgtcccgcgcgtcggcggccgcggagcagcgcagggagccaggcgggctgccggcgggtgtgaagaaaaaaatgacactccaatgggctgcagtggcaacctttctttatgccgaaataggactcattttaatcttctgcctaccttttattcctcctcagagatggcagaagattttttcatttaatgtctggggtaaaattgcaactttttggaacaaggctttccttaccattatcatcctattgattgttctatttctagatgctgtgagagaagtaaggaaatattcctcagttcataccattgagaagagctccaccagcagacctgatgcctatgaacacacacagatgaaactttttaggtctcaaagaaatctttacatttctggattttccctatttttttggctagttttgagacgtctggttacgcttattactcaactggcaaaagaactgtcaaacaaaggtgtacttaaaactcaagcagaaaatactaacaaggctgccaaaaaatttatggaagaaaacgaaaaactaaaaaggattttgaaaagccatggtaaagatgaagaatgtgttttggaagcagaaaataaaaaactagtagaagaccaggagaaactgaaaactgaattaaggaagacttcagatgccctttctaaggcacaaaatgatgtgatggaaatgaagatgcagtcagagagactttcgaaagaatatgatcaactcctgaaagaacactctgaacttcaggatcgtttagaaagaggcaacaagaaaagactgtgaactttataaaagacacttgcaatatactgtgtcaaaatgataattttgttatgttagcctctagaaaatttaagttcagaaaaatgcactatgaccggttcgtaatttttttaatgccacacataggttgtattgtaatggcattatcaaaatatttgatgatgtttcagatatattgcaaagtctgtattccagctcttaagaaaaatataagcatgttaaataccatatttacatattgataatgtcattggtatatggtggctgtttaccaataaaaggaaaaaattcattaaccggttgcttccaaaattagaagttttaagttgcatgaaaccattaatagccttgaaagctttgataagttttcagtaataataacctatttaatcagatgatgatgtgtttgaaaatagtgttcaatatcagcaaatttgtacacagggaatgtaaataaggataactgatcagagttatccactgtatttataaggaagagtcggaaaaaacaatgaccttagttttttttaagcctgatgatactatggtttactctaataagatagctatattgataattatatttttgttactgtgcccttgcacattttggtctttttgttaatatttttattaataacacataattagtaaccactctactgtttcaagttaatctagtaatagagcttacatatatttgtataactgctataccactgaactgaatttattttacaacagtgtagaattcttgaaaagttaacgtagaaaatatccaaaaagcagtatttctagaaagtgtccaaaaagcagtatttctttcccttggttgtgagagtaactaattatataaatattacctcaaaaatacatacactggtatcacacagtctttctacaatgtttctgtattctgaaagctaaatattaagtactatttttccattcaaatattcatttagaatttcctttagaagatggcagtgattataatattaatatgatttcatttgttccagtgtttagacatgaaatcatcttccttgtctcatgaaaacctaaatataaaaaaaaggaaaatactggagtttttatttctcttgtctttgttacatcctctgtttattataattttagcaccaacttcacacctagctaatttttttcatcataaagtggatgaaatgagcaagtacctaaaaattttatttcagataaaagtcaggagttactgctaaaaaacagacatgtaggagacattcaacaggagtatgaaatgagagttagaccatatgggctgacaacaccataaataacaagaaaagggagtgctgaaataggagagaacagagcaaatgttagctcaaagtatagacttagaaatatcaaagtaagagctatctggataaatatatagatattgagtgcttggaatcctagcctactatgtgaaaattaagtctaatgtcagaataacttacagaaaaatagaaaatgcacagctttaaaatgggcagagttaaaatctattcccagctttatcacttatttagccatgctagcctaggcctctatttccttgtctccaaaatgagaataataaaatttaggtcaggattactatataaactaagataatacagtgattctcaaagttgttcagactgtatagtaaggagaaagtctggttgcactttgaagagcttgaagatttgaaagattcccaaaaaagcattttaaagtttacatttaagggaccttggacctcaaccctctcaagtttacaagtctgaaactttagacatcaaaagtttgagcagtttttccaaggcaacattgatagttagattcagggccaggctgtaagtctagaatttagatatcctgatcccccagataccgctcttctggttatacacagaccagctataatttgctaaacataaaatattgcagtgtattagccggctgtggctccagagtctgtgccctttaccaccgtgcccaactgtttcacatgctgtgtttggtagtttttcctagtactctccttaataatggtggtgtttagcaaattgtattacataaataaatatttatttcatggattgagttatgttgcatattaaattactttccttcccattgtcaataatgacttctttatgtcttaggctgtattataaattcaaacacaggaatgttattcttgcctttttccatcagaattacctaaagttttattagactttccccctacttgcaaatctgcctggaggttctggtctttaggaagtagcacttagcaagttctggataagcactccagaatttgggatgagttatccttgttgtttgtccagctctatcttggaccccagtgctgctaattagattcatgccttgttctttagggcataagttcctctcttggctatttttcctagtatgctgagaactaggattccctttcagtgacagagtcctgccctggaaccccaatcaagagcctaaagtttaactactctctgagatattagcctgatgccagcagcctgcctggatctctaaatattacccattctgggagttgttagtggtctctgctttcctgcagtgtcactcctgcttcctcattgggcctgctagccacagctacttggatgtacccgaacctgttgccttgccctacctctgtgggctggttcagttctgcattcccattccagtgtccactgccttctcgctatccctcccatctgtgcgccaccaccagcttatccccagccctgctaacatgacaaactattgtgcatttgagtgcccactatacaatgtgtgaatataaccgtgcttttaagcattgactttaatgtctgggatgatccgtctagagtccatggaaccctcctgtgttttttcatccctttcttagtaatcttggaaatccacttatgaaattctttttctaacatttctttgctgaacggcatttttaaaattactttcacggtgtttctttccagtttgatctctacacaaacacaactttattacttgcaccagaaatgatttcaaacactttaggaactgtggtaggcttaattatgacttcccaaaagatatccctataccaatccctggaacctggaaatgttctcttctatagcaaaagatatgattaagttaaagtcttgagatggagagattattctgggtaatctgggagtgccctaaatgcagctacatctatgcttatatagaagcaaagggagatattaccacacagaagaggagaaagcacagtgaccacagaggcagagattggagtgatggagccgcagcaaaggaatgctgacagccaccagaagctggaggaggcaaagaacagattcttccccagagcctcttccagcaggagcatggccctacagataccgataaaactgatattggacttcctggcctccagaactatgggaataaatttattgtttcaagctatcaagtttgtgattatttgttactgctgccatagtaaattaatacaggagcatgcaggacagatctgtaatggcctgaactgaatttcaaggggtgtggaaaacagttactctttaacaccactccgtcttccccattagccatttggataagtcaaagatagccttagccatctcctatcttagttacttttctccttcaactgtattttgccattgtcgttgccattgcctctgcctaactgcaagccatcatcatctctcacatggactatgacgacctcctcatctccctgtatcttctctaatgcttctctcatatacatgctctcagcagccacctggtttaaaacaaaaacaaaaaaaacactaatcatgtcattccctgcttgtcttcccgttctttccaactgtcattccctgcttgtcttccaattctttccaactgcagttaagatcaaaccaccaagacctcaccaggctcccatctacttttcagcctcaactcagtccacctgctctgccaatcacacctgtttctttttgttgttctttccctaggatatagatcctggcatacctgcattctgattcttcttggaacaagccaaattctttcccctgtcagtacgtttgcatgtgtagtacatgttgcatcccaggcctgtctgccttcttaccctattttattttcatcatagcacttactaccatctgaaatgatctcatttatggtttgtctcctcagtgattaacacagttcctgcacacagtaaatcagtagttctcaacaggaagtgaagaggtcatcctgaggggaacatttagcaatacctagagacatttctggttgtcataaccaggggaatgctcctagtggatagaagtcagggaggctgttaaacccattccacaatgcacaggactggaacaaagaatgatctctcactcagaatgtcagtgttgccaaggtggagacatcctgcagtagatgcttgtggcagagggtactggttgtaccccagtatccattctttcattcacctgtgttaatacatgctccagttttgtatttttttttataaacagctgtcaagcataaagataacattttccatctccttgtatgtaagtggaaataggactgtcatgtggggccagtttcttttttttcttcctctgtcctgctgcttgaaacatatgctgctatcttagatcatgaggtcgaggccatgcaaagtggagcaacaaggagctgtgtccctgacgccataagcaccacacctgtcctgaattgctgtgaatgacaccagctaactacaatgcattgtctcaacatcctagacataataaaaagccataaatatgtttgtcctatgcagcacaaaacctttgtatctttgccttttatgttgggatcttaattaaaaattacatcctctactgtcaaaaaaaaaaaaaaa

SEQ ID NO: 4766 - DNA, 3826 bp, Homo Sapiens
  NM_018850
caaagtccaggcccctctgctgcagcgcccgcgcgtccagaggccctgccagacacgcgcgaggttcgaggctgagatggatcttgaggcggcaaagaacggaacagcctggcgccccacgagcgcggagggcgactttgaactgggcatcagcagcaaacaaaaaaggaaaaaaacgaagacagtgaaaatgattggagtattaacattgtttcgatactccgattggcaggataaattgtttatgtcgctgggtaccatcatggccatagctcacggatcaggtctccccctcatgatgatagtatttggagagatgactgacaaatttgttgatactgcaggaaacttctcctttccagtgaacttttccttgtcgctgctaaatccaggcaaaattctggaagaagaaatgactagatatgcatattactactcaggattgggtgctggagttcttgttgctgcctatatacaagtttcattttggactttggcagctggtcgacagatcaggaaaattaggcagaagttttttcatgctattctacgacaggaaataggatggtttgacatcaacgacaccactgaactcaatacgcggctaacagatgacatctccaaaatcagtgaaggaattggtgacaaggttggaatgttctttcaagcagtagccacgttttttgcaggattcatagtgggattcatcagaggatggaagctcacccttgtgataatggccatcagccctattctaggactctctgcagccgtttgggcaaagatactctcggcatttagtgacaaagaactagctgcttatgcaaaagcaggcgccgtggcagaagaggctctgggggccatcaggactgtgatagctttcgggggccagaacaaagagctggaaaggtatcagaaacatttagaaaatgccaaagagattggaattaaaaaagctatttcagcaaacatttccatgggtattgccttcctgttaatatatgcatcatatgcactggccttctggtatggatccactctagtcatatcaaaagaatatactattggaaatgcaatgacagtttttttttcaatcctaattggagctttcagtgttggccaggctgccccatgtattgatgcttttgccaatgcaagaggagcagcatatgtgatctttgatattattgataataatcctaaaattgacagtttttcagagagaggacacaaaccagacagcatcaaagggaatttggagttcaatgatgttcacttttcttacccttctcgagctaacgtcaagatcttgaagggcctcaacctgaaggtgcagagtgggcagacggtggccctggttggaagtagtggctgtgggaagagcacaacggtccagctgatacagaggctctatgaccctgatgagggcacaattaacattgatgggcaggatattaggaactttaatgtaaactatctgagggaaatcattggtgtggtgagtcaggagccggtgctgttttccaccacaattgctgaaaatatttgttatggccgtggaaatgtaaccatggatgagataaagaaagctgtcaaagaggccaacgcctatgagtttatcatgaaattaccacagaaatttgacaccctggttggagagagaggggcccagctgagtggtgggcagaagcagaggatcgccattgcacgtgccctggttcgcaaccccaagatccttctgctggatgaggccacgtcagcattggacacagaaagtgaagctgaggtacaggcagctctggataaggccagagaaggccggaccaccattgtgatagcacaccgactgtctacggtccgaaatgcagatgtcatcgctgggtttgaggatggagtaattgtggagcaaggaagccacagcgaactgatgaagaaggaaggggtgtacttcaaacttgtcaacatgcagacatcaggaagccagatccagtcagaagaatttgaactaaatgatgaaaaggctgccactagaatggccccaaatggctggaaatctcgcctatttaggcattctactcagaaaaaccttaaaaattcacaaatgtgtcagaagagccttgatgtggaaaccgatggacttgaagcaaatgtgccaccagtgtcctttctgaaggtcctgaaactgaataaaacagaatggccctactttgtcgtgggaacagtatgtgccattgccaatggggggcttcagccggcattttcagtcatattctcagagatcatagcgatttttggaccaggcgatgatgcagtgaagcagcagaagtgcaacatattctctttgattttcttatttctgggaattatttctttttttactttcttccttcagggtttcacgtttgggaaagctggcgagatcctcaccagaagactgcggtcaatggcttttaaagcaatgctaagacaggacatgagctggtttgatgaccataaaaacagtactggtgcactttctacaagacttgccacagatgctgcccaagtccaaggagccacaggaaccaggttggctttaattgcacagaatatagctaaccttggaactggtattatcatatcatttatctacggttggcagttaaccctattgctattagcagttgttccaattattgctgtgtcaggaattgttgaaatgaaattgttggctggaaatgccaaaagagataaaaaagaactggaagctgctggaaagattgcaacagaggcaatagaaaatattaggacagttgtgtctttgacccaggaaagaaaatttgaatcaatgtatgttgaaaaattgtatggaccttacagggtgttttctgcaattgtatttggtgcagtggctctaggacatgccagttcatttgctccagactatgctaaagctaagctgtctgcagcccacttattcatgctgtttgaaagacaacctctgattgacagctacagtgaagaggggctgaagcctgataaatttgaaggaaatataacatttaatgaagtcgtgttcaactatcccacccgagcaaacgtgccagtgcttcaggggctgagcctggaggtgaagaaaggccagacactagccctggtgggcagcagtggctgtgggaagagcacggtggtccagctcctggagcggttctacgaccccttggcggggacagtgcttctcgatggtcaagaagcaaagaaactcaatgtccagtggctcagagctcaactcggaatcgtgtctcaggagcctatcctatttgactgcagcattgccgagaatattgcctatggagacaacagccgggttgtatcacaggatgaaattgtgagtgcagccaaagctgccaacatacatcctttcatcgagacgttaccccacaaatatgaaacaagagtgggagataaggggactcagctctcaggaggtcaaaaacagaggattgctattgcccgagccctcatcagacaacctcaaatcctcctgttggatgaagctacatcagctctggatactgaaagtgaaaaggttgtccaagaagccctggacaaagccagagaaggccgcacctgcattgtgattgctcaccgcctgtccaccatccagaatgcagacttaatagtggtgtttcagaatgggagagtcaaggagcatggcacgcatcagcagctgctggcacagaaaggcatctatttttcaatggtcagtgtccaggctgggacacagaacttatgaacttttgctacagtatattttaaaaataaattcaaattattctaccatttt

SEQ ID NO: 4767 - DNA, 4599 bp, Homo Sapiens
  NM_018926
atgggagggagctgcgcgcagaggcgccgggccggcccgcggcaggtgctatttcctttgctgctgcctttgttctaccccaccctgagtgagccgatccgctactcgattccggaggagctggccaagggctcggtggtggggaacctcgctaaggatctagggctcagtgtcctggatgtgtcggctcgcaagctgcgagtgagcgcggagaagctgcacttcagcgtagacgcggagagcggggacttacttgtgaagaaccgaatagaccgtgagcaaatatgcaaagagagaagaagatgtgagttgcaattggaagctgtggtggaaaatcctttaaatatttttcatgtcattgtggtgattgaggatgttaatgaccacgcccctcaatttgataaaaaggaaatacatttagaaattttcgaatctgcatccgctggtacacgactatcgcttgaccctgccacggatcctgatataaacataaactcaattaaagattataagataaactctaatccttatttttcattaatggttagagttaattccgatggtggcaaatacccagagttatctctggagaaactcctagaccgggaagaacagagatctcatagcttgatattgactgccttggacggaggggacccaccaagaagtgccaccgctcacatagaaatttctgtcaaggataccaatgataaccccccggttttcagcagagacgaatatagaattagtcttagtgaaaatctgccccctgggtcccctgtgttgcaagtgacagccactgaccaggatgagggggtcaatgctgagataaactactacttccgaagcactgcccagagcacaaaacatatgttctcattggatgagaaaacaggtatgattaagaataaccagtcatttgattttgaagatgtagaaaggtacaccatggaagtggaagcgaaggacggaggtggtctctctacccagtgtaaagtaatcatagaaatccttgatgaaaacgacaacagcccagaaataatcatcacttctctctctgatcagattttggagaattcacctccaggaatggttgttgccctcttcaaaacacgggatctggatttcggaggaaatggagaagtcaggtgtaatatagaaacagacattccattcaagatttattcttcttccaataactactacaaactggtgacagatggagccctggaccgagagcagacaccagaatacaatgtcaccatcgtagccactgacaggggcaagccgcctctttcttccagtagaagcatcaccttgtatgtcgctgacatcaacgacaacgccccagttttcgaccagacgtcctacgtggtccacgtggccgagaacaacccgccaggagcctccattgcgcaagtgagcgcctctgacccggatttggggctcaatggccacatctcctactctatagtggcgagtgacctagagcccctggcggtgtcgtcatacgtgtcagtgagcgcgcagagcggggtggtgttcgcgcagcgcgcctttgatcacgagcagctgcgcgccttcgcgctcacgctgcaggcccgcgaccacggctcgcccacgctcagcgccaacgtgagcctgcgcgtgttggtgggagaccgcaatgacaacgcaccgcgggtgctgtacccagctctgggtcctgacggctccgcgttcttcgatatggtacctcgctctgcagagcccggctacctagtgactaaggtggtagcggtggacgccgactcgggacacaacgcctggctgtcctaccacgtgctgcaggccagtgagcccggactcttcagcctggggctgcgcactggggaggtgcgcacggctcgagccttaggcgacagggacgcagcccgccagcgcctgctggtcgctgtgcgtgacggtggacagccgccactctctgccaccgccacgcttcatctggtcttcgcagacaacttgcaagagatactgccagacctcagcgaccgccctgtactctctgacccccaggctgaactgcagttttacctggtggtggccttggccttaatctcagtgctcttcctcctcgccgtgattctggccattgccttgcgcctgcgacgctctctcagccctgctacttgggactgcttccatcctggtctctgtgtcaagtctggacctgtagttccccccaactacagtgaggggactttgccttattcttataatctgtgcattgcacatacgggtacaaaagagtttaatttcctaaaatgcagtgtgcccctacattccaatgaagacatggtttgcagtgtttctcctggagccttaattccacctcatggtggggaggatttgacttcacatcctgagactctgacttcgcaagccccgcccaacacggactggcgtttctctcaggcccagagacccggcaccagcggctcccaaaatggcgatgacaccggcacctggcccaacaaccagtttgacacagagatgctgcaagccatgatcttggcgtccgccagtgaagctgctgatgggagctccaccctgggagggggtgccggcaccatgggattgagcgcccgctacggaccccagttcaccctgcagcacgtgcccgactaccgccagaatgtctacatcccaggcagcaatgccacactgaccaacgcagctggcaagcgggatggcaaggccccagcaggtggcaatggcaacaagaagaagtcgggcaagaaggagaagaagtaacatggaggccaggccaagagccacagggcggcctctccccaaccagcccagcttctccttacctgcacccaggcctcagagtttcagggctaacccccagaatactggtaggggccaaggccatgctccccttgggaaacagaaacaagtgcccagtcagcacctaccccttcccccccagggggttgaatatgcaaaagcagttccgctgggaacccccatccaatcaactgctgtacccatgggggtagtggggttactgtagacaccaagaaccatttgccacaccccgtttagttacagctgaactcctccatcttccaaatcaatcaggcccatccatcccatgcctccctcctccccaccccactccaacagttcctctttcccgagtaaggtggttggggtgttgaagtaccaagtaacctacaagcctcctagttctgaaaagttggaagggcatcatgacctcttggcctctcctttgattctcaatcttcccccaaagcatggtttggtgccagccccttcacctccttccagagcccaagatcaatgctcaagttttggaggacatgatcaccatccccatggtactgatgcttgctggatttagggagggcattttgctaccaagcctcttcccaacgccctggggaccagtcttctgttttgtttttcattgtttgacgtttccactgcatgccttgacttcccccacctcctcctcaaacaagagactccactgcatgttccaagacagtatggggtggtaagataaggaagggaagtgtgtggatgtggatggtgggggcatggacaaagcttgacacatcaagttatcaaggccttggaggaggctctgtatgtcctcaggggactgacaacatcctccagattccagccataaaccaataactaggctggacccttcccactacataatagggctcagcccaggcagccagctttgggctgagctaacaggaccaatggattaaactggcatttcagtccaaggaagctcgaagcaggtttaggaccaggtccccttgagaggtcagaggggcctctgtgggtgctgggtactccagaggtgccactggtggaagggtcagcggagccccagcaggaagggtgggccagccaggccattcttagtccctgggttggggaggcagggagctagggcagggaccaaatgaacagaaagtctcagcccaggatggggcttcttcaacagggcccctgccctcctgaagcctcagtccttcaccttgccaggtgccgtttctcttccgtgaaggccactgcccaggtccccagtgcgccccctagtggccatagcctggttaaagttccccagtgcctccttgtgcatagaccttcttctcccacccccttctgcccctgggtccccggccatccagcggggctgccagagaaccccagacctgcccttacagtagtgtagcgccccctccctctttcggctggtgtagaatagccagtagtgtagtgcggtgtgcttttacgtgatggcgggtgggcagcgggcggcgggctccgcgcagccgtctgtccttgatctgcccgcggcggcccgtgttgtgttttgtgctgtgtccacgcgctaaggcgaccccctcccccgtactgacttctcctataagcgcttctcttcgcatagtcacgtagctcccaccccaccctcttcctgtgtctcacgcaagttttatactctaatatttatatggctttttttcttcgacaaaaaaataataaaacgtttcttctgaaaagctg

SEQ ID NO: 4768 - DNA, 7185 bp, Homo Sapiens
  NM_018941
ctctcgtagcgacgcccccaggggggcagaacgcgtgcgcacgcgcgtgcgaacgcgcgtgcgcgggcggtgtttgaggccggccagtcgtgactgggcggcaatgaggtcagtgactgccgggagtcctgcaggggcggggcggcgccaagcgcagggagcccggctgagtggcagcccagattgaagatggatacgtgacaatcccagggaccgctgcactgacttcatttccttagacaagacacagtgtagggcccggcccgtgttggccccaggactcctttggaatatagctgtggacaatgaatcctgcgagcgatgggggcacatcagagagcatttttgacctggactatgcatcctgggggatccgctccacgctgatggtcgctggctttgtcttctacttgggcgtctttgtggtctgccaccagctgtcctcttccctgaatgccacttaccgttctttggtggccagagagaaggtcttctgggacctggcggccacgcgtgcagtctttggtgttcagagcacagccgcaggcctgtgggctctgctgggggaccctgtgctgcatgccgacaaggcgcgtggccagcagaactggtgctggtttcacatcacgacagcaacgggattcttttgctttgaaaatgttgcagtccacctgtccaacttgatcttccggacatttgacttgtttctggttatccaccatctctttgcctttcttgggtttcttggctgcttggtcaatctccaagctggccactatctagctatgaccacgttgctcctggagatgagcacgccctttacctgcgtttcctggatgctcttaaaggcgggctggtccgagtctctgttttggaagctcaaccagtggctgatgattcacatgtttcactgccgcatggttctaacctaccacatgtggtgggtgtgtttctggcactgggacggcctggtcagcagcctgtatctgcctcatttgacactgttccttgtcggactggctctgcttacgctaatcattaatccatattggacccataagaagactcagcagcttctcaatccggtggactggaacttcgcacagccagaagccaagagcaggccagaaggcaacgggcagctgctgcggaagaagaggccatagctgctccagccggggctccggggcggcagcagagctggcacaccgattctgggaagccccgcgaatgatggcttttgaattaatgaggcagtgaatgttttgtgtttacttctaagggaaatactaactttctttcgcattagtattaattttgaagtagctacaaagtatttttaagaaattataattttatgactgtctggcaggctctgtcagtttagccgcgccggaccgtgtcaagcatctaggagaggagtccatggtgtccaggcatcggggcgtcacacctgttgaggagtggggtggctttgaatgctggaaatggcttcatagtgaagtgcctcccacagggcgggtgggtcagcgttgactctttccagctgcacactcatatgccgtgtgtcttattcagaagtcacattcttttcagttggagagaattgggctaagatagaaaataacatgatttgttccttattaaagcttcccagcgtatgaaattctaagctgggtggggtggctcacacccgacgtaatcccagcacgttgggaggccgaggcaggtggatcacttgaggccaggagttcgagaccagcctggtcaagatggtgaaaccccatctctactaaaattacaaaaattagccgggtgtcgtggcacacacctgtaatcccagctatttgggaggccaaggcaggagaattgcctgaacccgggaggcggaggttgcagtgagctgagatcgcaccactgcactccagcactccagcctgggtgacagagcaagactctctctcaaaaaaaaaaaaaaaaaaaaattctagaccgaagtgtacggcagtgccatctggtggcaagtggtacaaagacaacgctgaggggtagtgactcctgtagcagcagagacgccttggagtttaacccccaccaaccagagcgtgggctggtaaagatgaaatcttgcaagttttttttttttttaaatcatggtacctgttttaaaatgagaagttattattcatactgtgttgctcatttgacaaaataaggtaaggatttcataatcaggttgtctgggtttcagagctgtttttaattgactgagttacctacaggcacccaatctagaccctaattctgtggttggtgttcctctgtagatttcaagacaagtagtgatgtcattttctccctgagctgtagggtggacctggacccctcagagatgctcgactgcagggtcctggggtccctagagtggtcctgcagcagcccctggcaatgagctgcctgatgatgagtcccaaggtacattgttctactgttttatacccaggtagaagttacacagcaatttagcaatgttgttaacagacatacagaattgtgtgtgtgtgtgtgtgtgtgtgtgtgagtgttttgatataaacgtgcaattaaaattcaaagtttattttttatcacaagcacctttgaaatgtacgtggaaaacgtcggctgctcgtgagaatcatgtgtgacttacgttccttatgttttatggaactctcggaacagtgttttgtttttgtttagtttttgttttcgtttttttgagacggagcctggctttggctcccaggctggagtccagtggtgtgatctcggctcactgcaacctccacctcccgggttccagggattctcctgcctcaccctttcaagtagctgggattacaggtacctctaccatgcctggctgattttttgtatttttagtagagacagggtttcaccatgttggccaggctggtctctgactcctgactaaaagtgatctgcccacctcggcctcccaaagttctgggattacgggcgtgagccacttcacccggcccggagcggtgtattttgattgctggtgctttaactatattgaccaaggtgtatagtaacctatttatcacattttacgaagcaattttaatcttaaacacatccagcaaatggtgtccctgctgaaacttttaactggaaacctcacacctggcaggcagcactctctgcagccgtgcccttgtggagtcagcaggagctggtgtttttcagccagacagaggcataataaagtgactgatgtttacagaacccaaatgatgtcttcctctctctcaaaataaactaacctattcatattgctgtgaatgctttatcttggagatagaaaatataatgataaattcatcatgtgttcagaattcgatttggagttggaagtggacagcctaatttttatctcacctccactaggactttgaccttcccaggggtccacactttacctcctgtatcttcatacgcgtgtgtggatgcatagagatggaggtgctgtagagaagcacaggctcacccgctccgtccagtgtcacccacacattggtccggggacccctcagtgcagagcctgaagttgggggtttaggggtggaaaaggcttcgtgaaatgttaatgatgcgtacaccttccagatggcacagcactttcccatggtcctcactggcctcagtctccctgaccggcagtgtgaggggatgtagctatagtggagcatggtacaagcgacattcatgagctctgacttcttggtgccaggttggtgtgagcctgggcccggcccactcagcggcccacattggccagcattcagctgcacgtgtgtgctgcgtgcttcacatcctctattgagagttacagcaagtgttaaacgaggtgagttcacataacaggaattctggaactgcttgaaaactaggacgattgggcaatatcggccttaactccacctgatggcaggtgacccggatagaaaatggccctgcgtttagccaggatgtggctctccagcttggcttcagtgtgatcacttgtcagtgcgctttctctttcgatagtgaaatccttctctatacctatgttttgttttgtttcttaagttgggaaacagaatgggccagggaggttgagtgactgaagaccaagggttggtgcagcctcctcgccgcgctgcgggggctgggccgcacaggcttctgcccttctcggtgtccaggctccttgggtgatgctggagttgtcatggccgcagttcagtgtgagattttttaccaggtattgcgcttaagggacatgattttccattttcttcgcccggacaacttgaatgaaatgggcactgttgattccacttctgtcgaggagcttcggggctcagagaggtgatgacgtgcccaaggtgacgcaactcgtgaacagccgtgcctgccttgggcgcagcctccggcgccagagctgggctcttcaacacggcatttagcgcagaaagtcgtggttcaggcagtatgggccgctgtgacaaaacacctaagactgggtagtttataaagaacagacattcaggccaggcacggtgactcacgcctgtaatcccagcactttgggaggccgaggcgggtggatcatttgaggtcaggagtttgaaaccagcctggccaacatggtgaaaccccatctctactaaaaaaacaaaactagctgggggtggtggtgcatgcctgtggtcccagctacttgggaggctaaggtagaagaattgcttgaacctgggaggcagagattgcagtgagccgagatcacgccattgcactccagcctgggtgacacagtgagactccatctcaaaaaaaaaaaaagaacggacatcatttctcacagttctggaggctggaagtccaagataaaggtgtgggctgattagtttctgctgggaacactgcatcctcacgtggtggaggggatggaaggtcaacaggcctcagctagttctccgctgcctttttatgaggcattaagccatttgcaagagtagggggccccacctcttaataccaccgcaatgacaattacaatgtcatgtgaattctggaggggacacggtcacactgcagcatcagcacccggtgaatgtggttctcttcccatgtccgaattttgtgagctccacacgggcagggttgcatctgttttattctctgattgattctaagccccatgtccctggcacaggatggctgcttggcagtagggagtggatgaaccagtagtacccagggctgccaggcagggccctgcaggggacagacccaagggctgatatggggacacctgctgaggggggaatttaccacggtaagggcagggctgggaggctgggcagccagtttcaccctcgcacaggctgcctggcaagaccagcggctggaggtgatgtcctcagtagagaacggtggccactggaaacgtgtggccagaaggggaaacgctcgggcctctggtgggggccagcctggggtggggtcggccagggtcagctgcctttccttcatgctggggaggagatgttgtgtgcatgtgagaaagcatttgatagcatgccaaaagtttcctccattatgtgcgtgtcaagtgtttgaccaggtcagaactcttgttctatgcgaatgtgctcacgcagacagaagcggaggggctccgtcgctctgccctcacgccgctgaaccgcgagggtctcccgctcctcaggcttgcggctcggccgcgaagtgtgtcaggtgtgcatcctgggtgctcctttgtgctctgtcctacggtgacacaggcggcgtggggttagacaggtaccggtcagactacggtgacacaggcggcgtgcggttagacaggtaccggtcagattacggtggcacaggcggcgtggggttagacaggtaccggtcagattacggtggcacaggcggcgtggggttagacaggtaccggtcagattacggtggcacaggcggcgtggggttagacaggtaccggtcagattacggtggcacaggcggcgtggggttagacaggtaccggtcagattacggtggcacaggcagcgtggggttagacaggtaccggtcagattacggtggcacaggcggcgtggggttagacaggtaccggtcagattacggtggcacaggcggcgtggggttagacaggtaccggtcagattacggtgacacaggcggcgtggggttagacaggtaccggtcagattacggtggcacaggctgcgtggggttagacaggtaccggtcagattacggtggcacaggcggcgtggggttagacaggtactggtcagatgcacgggctccctaaacccctgctgtggcttcggcagtaaagacaggacgcacccatgtcacaagaggagcacaggcaggggtgttggtgttggggcagccctcagggtctccagaccccagccccactcacacagcagcctaggaaggaagggcagagtcccaggtgtcagctggtgggtctcccaggagctgcccctccctggaagtcacaggacaggaatgacagatcagggaactgcaggaagctgccacctctggggtcagaatatgcccagcctgcgggggctctctatcggggtcttcgagagccagacagcctgccttgtgctgcatacctggctttgctctgtgcagaacccagcacacgtgattttgtgtgacatgccagcagcctggctcccaggacaggaggcctgccctgggggaggggctgcaggaggagggggggcaggcacccatgagtctgtccagccttgtcacagatgcatcgcccaccctgcggtcctgatttcagctcacctcagagtaaatcagaataaactgcacccagactttcacgaatgcatgttgacgctttcagttcacccctttctttgctaactttcttcctattttcttctaatgcgagagcttattaattccatatttatcattttgaataacttttctcctttttagtaacaaaatgtacttcactcttagtaaaatgtatttactattttagtaacaaaaatatacttgcctaatcatgtttaaaatatagtgatgtgaaaaattcaaaaaaaaaaaaaaaaa

SEQ ID NO: 4769 - DNA, 1587 bp, Homo Sapiens
  NM_018944
gcggcggttttttttcccatggcgctctggggcgcgggcgatttgtaggtaatggcaggcgttcggtcactgaggtgtagcagaggatgcgctggcggctgtgagtgcggcgacaagggcaaatgcagcgactcctcgctgttgggcaagagactctccgaagactcgagccgccaccagctgttgcagaagtgggcgagcatgtggagctccatgagcgaagacgcgtcggtggccgacatggagagggcgcagctggaggaggaggcggcggctgcggaggagaggccgctggtgttcctgtgctccggctgccggcggccgctgggcgactcgctgagctgggtggccagccaggaggacaccaactgcatcctgcttcgctgtgtttcctgtaatgtttctgtggataaggaacagaagctatccaaacgtgaaaaggaaaatggttgcgtccttgagactttgtgctgcgcggggtgctcactcaatcttggctacgtgtacagatgcacgcccaagaatcttgattacaagagagacttgttttgcctcagtgttgaagccattgaaagttatgttttagggtcctctgaaaagcaaattgtgtcagaagataaagagctttttaatcttgaaagcagagttgaaatagaaaagtctctaacacagatggaagatgtcttgaaagcattacaaatgaagctgtgggaggccgaatccaaattgtcctttgccacttgtaaaagctgaactctagtctgtgtcctccattctgcccccgcccttcctccccttatttgttaaatgaagcaacatagtgagacgtcgtctctacaaaaaaaaaaagaaaaaaaaaattagccaggcatgcgaaacgctgaggtgggaggatcagatgagcttgggaggttgaggctgcagtgagccttggtcatgccactactgtgttctagtctgggcaacagagtgagaccttctctcaaaaaaaaaacccaaaattgtagaattacttctatagctatattttatgataaagaagtgattgtttctcaaaatcgcattttaaagacgttttatggtacttgttggaattgggacttaggagttttgattttgataagaaactgggataattttctgaactttttttcctctgtatcacatttatttactatttttaaaaactttgacatttaacacttgggacaacatttattataaatgataagaaaaatcttagaggtttgtctacccacagtgtcatggaatcttctctgaaaactaatccataaagttccctggagaaattggtcagaatgatctgtcagaaccatttgaaaacttgctcaagagcagttgcttatatatagtaggattttactttttcctgcttatgtactactatatgcttaaaaaacctggaggaatacttaccaaagaggagtaaccatctctgagggtgggattctgggggaatttttgtttttttctgttttctataatgtgaaacttttgtagtatgtatttttctaattgaagagaataaagattaaaacaaagtgctttaaaaaaaaaaaaaaaaaa

SEQ ID NO: 4770 - DNA, 5387 bp, Homo Sapiens
  NM_018945
cagtcagttggtctgggcactgcagcaggctcggctctgtcccagcacttgtctgggagaaaagtggtgttactcacccagggagagtctctctttctaccttccttctttctcgatctccttgtgtgcttttgtgtttctttatttcttttccttttttttctttttttttttttgttacttaattatattcctaatcctggatgaagttgctggattctgcagcacaagtcttcatgaacaagcagcaccgctcagagatttcacggcattcaaaggtcacagaactgccactatggttaaatgtcttgtttaatggttgagaggtgtggcgaaatcttgtttgagaaccccgatcagaatgccaaatgtgtttgcatgctgggagatatacgactaaggggtcagacgggggttcgtgctgaacgccgtggctcctacccattcattgacttccgcctacttaacagtacaacatactcaggggagattggcaccaagaaaaaggtgaaaagactattaagctttcaaagatacttccatgcatcaaggctgcttcgtggaattataccacaagcccctctgcacctgctggatgaagactaccttggacaagcaaggcatatgctctccaaagtgggaatgtgggattttgacattttcttgtttgatcgcttgacaaatggaaacagcctggtaacactgttgtgccacctcttcaatacccatggactcattcaccatttcaagttagatatggtgaccttacaccgatttttagtcatggttcaagaagattaccacagccaaaacccgtatcacaatgctgttcacgcagccgacgtcacccaggccatgcactgctacctgaaagagccaaagcttgccagcttcctcacgcctctggacatcatgcttggactgctggctgcagcagcacacgatgtggaccacccaggggtgaaccagccatttttgataaaaactaaccaccatcttgcaaacctatatcagaatatgtctgtgctggagaatcatcactggcgatctacaattggcatgcttcgagaatcaaggcttcttgctcatttgccaaaggaaatgacacaggatattgaacagcagctgggctccttgatcttggcaacagacatcaacaggcagaatgaatttttgaccagattgaaagctcacctccacaataaagacttaagactggaggatgcacaggacaggcactttatgcttcagatcgccttgaagtgtgctgacatttgcaatccttgtagaatctgggagatgagcaagcagtggagtgaaagggtctgtgaagaattctacaggcaaggtgaacttgaacagaaatttgaactggaaatcagtcctctttgtaatcaacagaaagattccatccctagtatacaaattggtttcatgagctacatcgtggagccgctcttccgggaatgggcccatttcacgggtaacagcaccctgtcggagaacatgctgggccacctcgcacacaacaaggcccagtggaagagcctgttgcccaggcagcacagaagcaggggcagcagtggcagcgggcctgaccacgaccacgcaggccaagggactgagagcgaggagcaggaaggcgacagcccctaggggccggcccaacttagacgcggctctcctccggcagggcccccagagggcagaagcagcgtggaggggccctcacgcagcagcccagccactttctgagtgttgtcctggggctctttggaacgccatcttcctcccacttacctgcctcccctccttttcgcaaatgtacagaagccatttgtcacctcagcattcgctgccgaaatgagcaactccattcagtaacgtgggagctgatcccacgggcaggctctccctgctccaggagaagactaggaggaagaatgaggtgctcctgccgtgtccgccttgttccgggtcgcactggaacaggcagcaattcctaagtccggagcgtttgagcgtttgctatctgactgctgatctgcgtgacagaaacaccagcatatttgcaacgccaaggatattggtcttaagtgcaagagcacaaatgagagtgtgagagaaagtaccttctattttaataataatattattataaaaataataaatctttttaacttttatattttatgcactagacaatggatctgcaactttggactaaggtcattcaatgtacccaaacttgaacagggggttcattgttttgctattgactttattatgccactttggggcagagacttggcatcttcgcagtttaagaaaccacgtttcctatccaatccgaagggaaggtgctgtacagttcattcctttgcaccattagccaatctgtcttttatggattctgtgacatgtttatattcacccatgtacattttctgtaaataccaaacgctactgattcccatgccaaaatacatgagtattatgggattgctacctgtataaacaatggcactgtgaaaatactgttagttttaatacaagagaatgcatttgtaaatatggtatagagtttattaatatactattgtttgcagataaaggccttaactttaaacatctttcatcttctgaaagctgcccaacttaaatcctcatagatgtctttctcaactgccttcccatgttcatctgtatgttttccagctaaggtcacaaaccaaaactgaataaagtctttgaggaaacattttggaaacttcacatgcattccgcttgagaccatagtgtttaatctatggcaccaagcatcgtttcctcagattaatgagacccttcaacaagcctgaatcagtcacttttcaacacagcgatgttttaacaagccagctgctaagcttgtgtttatgtgactcttgttacagatcatggcggtgcgtcagcctcacaggagacatagcaggtctcagaaaccttctatgaccctgtcatctaaccatcagggaattccctgctcccatgccacacatttgtctattatggctatagtaccaaagtacttttggtgtttggttggtgtgcatttctttagtgtcgatagtaactggatttttctttttccttaatctcatgtgaacaactacccaactgtttagctgaagttcatattatttaagtaaagaaaatatttcagttttataacagactttaccttcctggcaggtcattgtagttaattatgtctctagcttggagtgtcaccttggaatttcgttgccattttttctcagacacctggccgtaaaatcagtttgttacagcattcttctctaggctgctaaacgctgtgcattgaaccttttctttagaagtttcagcgtaactaatgttagatgaaaattgttgatgcccctttctttttactttaaacaatgtggtagtgggagaatgactgtttctgccactatcaacctgatcctcatgctgatagaatgacagctagcacttatttcctaagtgcaactgttttagagatttttctcctaacatgcaaaggaaatactgattggcctataataagttcctatagggagactgaggcttgcagaattaaggttcaggggaaattttggaaagttggttgtattttcattgaagtaggagagattatcagatggtgctaaagaaagtgtgaagatcttatgaaataggtggatggtaagttgaaattattgatgtgggtaagaagggaggttgtggaaagttaacactagctttgtatttttttttctgtaaaactgtgaactgatatattttcctttatcactttagtattctgcagttctcagcttggtgaggctccaaaagagaatatgtcagatgtattcctacttccaaacctgtcttactttggtttgatggtacacatagggcttttgaacagtctatttttaatgtatatgaggtcaaatcaaggaaggcaattgctggggacaagaaaagtagaggtaggaaagaagacactattttagctaatggggtttcttgggactaaaaaatggctttgtttaaattataattatataataatttaaataaatgagattggaggtattcttagtagttctgagttgatagtttacattacaattaggtcttgaagaagagctcacagagaaaaaactaccaaatatccaatgggtaagcccatgatgtagccactagtacaataaaaatctgaagtaaaatgaggcataaacttgatgcagctgcctccctcattcaactggggagttcttgagttcctcatttgttggtaaaaagaaaaagaatgtgaaaatgtctctttttttcttggctattagtggctgtcttgcaatatttcaataggagtccaattactagttaaaacactggcggggtgcggtggctcacgcctgtaatcctagcactttgggaggccaagttgggcagatcacaagttcaagagatcgagaccattctggccaacatggtgaaaccccgtctctactaaaaatacaaaaattagctgggcatggcagtgcgtgcctgcaatcccagctactcaggaagctgaggcaggagaatcgcttgaacctgggaggtggaagttgtagtgaactgagatcgcaccactgcactccagcctggcaacagagctagaatccgtctcaaacaaacaaacaaaaaatcccacagctattggatcatccacagattttttctttacaatcttgttctccttgtccatggaccatcaatagttgacttgccaggtttaattctttcattgcttgagaagaaaggaatcaaaggactgtgtgtagtaagctgacggtaaagttaagattaaattaagacagagagagaatacatatcactgccaggcctgataggaaaaatctgctcttccttttaataacagtgatgaattgtcaggaccttatttaggaaaccctgacctacccataactccctgctaggctaagtagaaaccaggttatttctccctgcttatggctccccgcaaagggacttgcagcgtgtcctgcaactttgtcttcagatagtgcttcctacaaaactaggtcttgttttgtaatcttttctcgtgttgaatcagatctgcttacttatttaggtttggttatgagcttgtatctcactgtatttctcatgctttgttcttttaaacaaatcctttaaactgtgtcattttgtatacacatgtgaggtttgaaaaaaaaaaaaaaaaaaaaaagaactaccttgtgagttttgctcaaaatgtggcctaagtagccattggcatgtctagatgaacaaataaaaataaagataatttctttaaaata

SEQ ID NO: 4771 - DNA, 1257 bp, Homo Sapiens
  NM_018946
cggcgaccgcgggctgacgtggcggggctggcgtgtgggtctcgcagcgttgctcacagaacagagtagaggcggcggcggcggcggccggacccagactggtagtgaggctttggaccccgagccgctgcaatgccgctggagctggagctgtgtcccgggcgctgggtgggcgggcaacacccgtgcttcatcattgccgagatcggccagaaccaccagggcgacctggacgtagccaagcgcatgatccgcatggccaaggagtgtggggctgattgtgctaagttccagaagagtgagctagaattcaagtttaatcggaaagccttggagaggccatacacctcgaagcattcctgggggaagacgtacggggagcacaaacgacatctggagttcagccatgaccagtacagggagctgcagaggtacgccgaggaggttgggatcttcttcactgcctctggcatggatgagatggcagttgaattcctgcatgaactgaatgttccatttttcaaagttggatctggagacactaataattttccttatctggaaaagacagccaaaaaaggtcgcccaatggtgatctccagtgggatgcagtcaatggacaccatgaagcaagtttatcagatcgtgaagcccctcaaccccaacttctgcttcttgcagtgtaccagcgcatacccgctccagcctgaggacgtcaacctgcgggtcatctcggaatatcagaagctctttcctgacattcccatagggtattctgggcatgaaacaggcatagcgatatctgtggccgcagtggctctgggggccaaggtgttggaacgtcacataactttggacaagacctggaaggggagtgaccactcggcctcgctggagcctggagaactggccgagctggtgcggtcagtgcgtcttgtggagcgtgccctgggctccccaaccaagcagctgctgccctgtgagatggcctgcaatgagaagctgggcaagtctgtggtggccaaagtgaaaattccggaaggcaccattctaacaatggacatgctcaccgtgaaggtgggtgagcccaaaggctatcctcctgaagacatctttaatctagtgggcaagaaggtcctggtcactgttgaagaggatgacaccatcatggaagaattggtagataatcatggcaaaaaaatcaagtcttaaaaataaagtgccattctctgaattctcaaaaaaaaaaaaaaaaaa

SEQ ID NO: 4772 - DNA, 5544 bp, Homo Sapiens
  NM_018947
gtagccgccagctcggccgcacgtcagggcgcgggagcgcggagcgagtttggttgcacttacaccggtacttaagcgcggaccggcgtgtccttggacttagagagtggggacgtccggcttcggagcgggagtgttcgttgtgccagcgactaaaaagagaattaaatatgggtgatgttgagaaaggcaagaagatttttattatgaagtgttcccagtgccacaccgttgaaaagggaggcaagcacaagactgggccaaatctccatggtctctttgggcggaagacaggtcaggcccctggatactcttacacagccgccaataagaacaaaggcatcatctggggagaggatacactgatggagtatttggagaatcccaagaagtacatccctggaacaaaaatgatctttgtcggcattaagaagaaggaagaaagggcagacttaatagcttatctcaaaaaagctactaatgagtaataattggccactgccttatttattacaaaacagaaatgtctcatgacttttttatgtgtaccatcctttaatagatctcatacaccagaattcagatcatgaatgactgacagaatattttgttgggcagtcctgatttaaaactaagactggcttgtggttaaatgaatatgttcagtttttgaattttaatagtaactccaattcagtaaatggtatcactgtttaccccttttaaagatatgattagacttcgttagtaatgttcaacttttcacaaagatggtgagtgccatcttaaaacttactggagattggttttatatttagatttatataactggttatgtgaatatatttaaatactggggaaattgcttcactgtcttagaaccaagcaagattcacctgtgttttgtgttcatgttcatttgcctcttaaaggcaagggttgaagataaataaggtagcaatgtctatagttttggccttaactatgccaatctaattataattccctgtatttaaaatggtttcttttacttattgaaaggcattttagtgtggtttatgtgtaatattaaagattattcaacacctctcacatcttacagatctataaggtcacatgcttttaaaatagtagcaagttaaacttcactcttgaattctttacaatctaagtcaaactaagttataatttaggattgtctttaaacagccattcagaaacaaaactgtagaactgtgtatttgattgggaatggtgcttttgccaacttaaaaggattaaagtaacggagatatacacaaattttaaaattatgtgtgatcacaagactaaagataattaaaaagaaaaccacagatcatgactttttgactgtgcttgatttcatgactgatgcacaaattttaatgattaaaaagtgcaggagccctaaatgtcagtgcagcagccctaaatgtcagtgcagcagtgttaaccagtcatggtgctagattgtttacttggttttctaggactgcctcaactagaataacacttcactaattgactcttagtttctttgctcagattgagaactgcagcatttatgccagacatggacagaggaatgcctgtggtcatagttttgtgatgtgtaacagtgtataattacatactgaattatttcatgcatagtctgtgccatacacatttagagtagtccttggagattttatggagatggtgagcacaaggtaagtcataaagaataatgagaaaataaatctatgctggtgcagctgagaactgtatctttgtgggacagtgagaagactgagaagatgtgaatccatggtctcaaaggtgatagggacgattagataggtgttttaaggcctgaaagcaatttataacatatgagtcttatttttatttatagaaatgtggaaagcttgctgtaattcatatttgaagtcctagtctgagttctggtggggaatttaaaaatgcatcctggaaatcctttaaagatttcagactttgaaaggccttgtagcagaggacttggtgactgtataaagttagtggtattcagggacagtgtagcaagtagcttacaaggggacaattctggactaatgagaaagacctgaagtgaaggctagagagttgattttttttttttttggcatcctggaaatgatacaggaaacatattaagatagatacagaaatgtgttcaaccttccatcttggctagttgtggcgtttagtttgttttttgagacatggtcacgctgtgtcgccaaggctggagtgcagtggtgcgatctcggctggctgcaacctctatttcccaggctcaagcgattctctcacttcagcttcccaagtagctgggactacaggtgttcgccaccatgcccagctaatttttttgtagagatggagttttgccatgtggtcccaggctggtctcaaactcctgagctcaagcaatccgtccacttgccttggctccccaaagtgctgggattacaggcgtgagccaccaggccctgcctggttttcaaattcagaaatcttattatttaacccagaagtaatcagcccagtagtaacttaggtttaattttttttcaggtttaaaatttttctcatttattttttctgagacggagtttcgcccttttcgcccaggctgagtacagtggtgcaatctcactgcaacctccgccttccagttgcaagtgattctcctgcctcagcctcctgagtagctgggattacaggcacccgccaccacgcctggctaatttttgtatttttagtggagatggtgtttcaccatgttggccagactggtcttggactcctgacctcgtgatccacccaccttggcctcccaaagttctaggattacaggtgtgagccaccacgtccggccaatttttctcatttctatgcctcctatattaaggtctgtgttggcacagatgagtaactgccatgttctaggtcagttatacccaagcacttctggtggtttaaaatgtgattctgtaacttttttatttttatttttttgagataatttcactcttgttgcccaggctggagtgcaatggcgtgatcgctgctcaccgcaacctccgccttccaggttcaagcgattctcctgactcagcctctcaagtagctgggattacaagcatgcgccaccatgcccagcttattttgtgtttttagtagagacagggtttctccatgctggacaggctggtcttgaactcccgacgtcaggtgatctacctgcctcggcctcccaaagtgctgggattacaggcgtgagccaccacgcctggccaattatgtaattttttaaaaaggacatttctatcagggatatataccttcagaaataaggaaataggggaaaaaaagagcactataaaccacatgttttcatttctagtgcttcgctgtaagtggctaggttggtagaatcaaaaacaagggccagatgtatttaaggggtattcagatgccacctacatgcttattttgtctagaacagtgctgtctaatagaactttctgtgacgatggatattttgtagacttttgctgtccagtgtggtagccactaaccacatgtggctgttaagcccttgaaatatagctagtgtgactagaaagtattttattttaaatttacataggcacaagtggctagtggctactgtattgacattctgggtctaggactagaaccagtggtctgtaacaaaagtactttctctttactctattaaatctagaattagccgggcatggtcgctcatgcctgtaatcccagcactttgggaggccaaggcaggcagatcacttgaggtcaggcgtttgagaccagcctggtcaacatggcgaaaccctgtctctacaaaaaacataaaaattagccaggtgtggtggtgggcacctgtaatctcagctacttgggaggctgaggcacaagaatcacttgaacttgggaggtggaggttgcagtgagccaagattgtgccactgcactcaagcctgggtgacgagtgaaactgtctccaaaaaaaaaaaaaaatctagaattcttggaagtacattatattgcccttcagaatagattccagttcctgttgtgctcacctttataattttaccataagttttacctattcgtaagttggcagttttagatagataacattctggtggtagctagggatttaccttttgtcatccttttcctgcacttctcttgaattcctttatagatgtacagttttgctttaaccactgaagattgctgtaaattataaagggtgtgatagaatccacatggctgtcaagaaggagatcttaccaaggacagttgactgactagtctcagattgtttcatatcatttatacttgggtaagagtaaactagataactgggcgtcgtggtgcacacctgtagtcccagccactctgaggcaggaggactgcttgtgcccagaagttcgaggctgcagtgtagctgtgattgtgctactgcactccagcctgggcaacagataaaggaaactccatctcttttaaaaaaaaaaaaagtggtctgggtgcagtaggtcatgcctgcaatcccagcactttgggaggccaaggcaggcagatcacctgaggtcaggagcttgagaccagcctggccaacatggtgaaaccccatctctaccaaaaatataaaaactagctgggcgtggtggcggcacctgtaattgcagctatttgagaggctgaggcaggagaatcgcttgaacctgggagatgggggttgcagtgagccaagaccgccccatcgcactccagcctgggcaacaatagtgaaactccgtctcaaaaagaaaaaaagtttccttagaatggaaaatattcattcatgagctcttttggcaatccgtcatcagtatattctgaaaaccaataagatgttgccaagttgggggcgagagctatgtaatgcaaggcatatgcctgatgaagtatacaaatacacctgaccagaaactttgtctcccacataagtctcttctaggcactgtcggggtacatactgagctgctgctttggctgtattttctgtgcctcagaataaccattgtcctggtgttcatatccttagagttcagtacaaaatgttggatatccatttaataggttccaggttatcttagttggagtttggggtatttgaaaacgtcatgccttcaggctatcatttccctcagaaagctaagtaaatttactgcattcatttctcaaagagtaaaagtgcaggttgtatgtgtctatgaacatttaaacatgttaaaatgttaaatttaacattttaaatttaaacatttaaatatgtctgtaacttgaacagtgtagtttcagaaaggaccactgggctagtgtaatgcagaaaatgctgggtctaggattaggagaaaattgtgtttagtgtgtatcaataaacagcccgtggacccaatctgaaaaaaa

SEQ ID NO: 4773 - DNA, 8670 bp, Homo Sapiens
  NM_018963
gcggcgcgcacggtatggcggcggcggcggcggcggcggcgcgcgcctgagaagaggggacgccagcccggtcaggcctcggcgcggcctacacgctccgctcgctcgctcgctcccgcctcccgccccgcgcccggccatggcggagccgtcgtccgcccgacgcccggtgcctctcatcgagtcggagctgtacttccttatcgcccggtacctatcggcgggcccgtgtcggagagcggcccaggtgctggtgcaggagctggagcagtaccagttgttgccgaagagattggactgggagggcaacgagcacaacaggagctacgaggagttggtcttgtccaataagcatgtggctcctgatcatcttttgcaaatctgccagcgcatcggtcctatgttggataaagaaattccacccagtatttcaagagtcacttctttacttggtgcaggaaggcagtctttgctacgtacagcaaaagactgcaggcacacagtttggaagggctctgcctttgctgctcttcatagaggaagacctcctgaaatgccagtgaattatggttccccaccaaatcttgtggagatacatcgaggaaaacaactcacagggtgttccacttttagtacagcatttccaggaactatgtatcagcatataaaaatgcacagaaggattctcggacatctatctgctgtttactgtgtagcatttgataggacaggacatagaatctttacaggttcagatgactgtttggtaaagatttggtcaacacataatggccgcttgttatctacattaagaggtcattctgcagaaatttcagatatggcagtaaactatgagaatacaatgattgctgcggggagctgtgataaaattattagagtgtggtgcttgagaacttgtgccccagttgctgtgctccaaggacacacaggatcaattacatctttacagtttagcccgatggccaaaggctctcaaagatacatggtttccactggtgctgatgggacagtttgcttttggcaatgggatttagaatccttaaaatttagcccacgtcccctgaagttcactgaaaagcctaggccaggcgttcaaatgctttgttcttcttttagtgttggtggtatgtttttagccacaggtagtactgatcatgtaatcagaatgtattttttgggttttgaagcacccgaaaaaatcgcagaacttgaaagccacactgataaagtagatagtatccaattttgtaacaatggtgatcggttcctaagtggtagcagagatggaacagcacggatttggagatttgagcagttagaatggaggagcattttattggatatggctaccagaatctcaggggacttatcttccgaagaggaaaggtttatgaaacctaaagtaacaatgatagcttggaatcaaaatgatagcattgttgtcacagctgtgaatgatcatgtcctcaaagtgtggaattcttacactggacaactgcttcataacttaatgggacatgctgatgaagtatttgttctggagacacatccctttgattccagaattatgttatctgcaggacatgatggcagcatatttatatgggatattacaaaaggtaccaagatgaaacattattttaatatgattgaaggacaaggacatggagctgtgtttgactgtaagttttcacaggatggacagcattttgcctgtacagattctcatgggcaccttctgatatttggttttggatgcagcaaaccatatgaaaagattcctgatcagatgttcttccatactgactatcgaccacttattagagattctaataattatgtcttagatgagcaaactcagcaggctcctcatcttatgcctccaccattcttggtagatgtagatggaaatcctcatccaaccaagtatcagagattagtaccaggccgagaaaattctgcagatgaacatttgattccacagctgggctatgtggcaacaagtgatggagaggtgattgaacaaattataagcctgcaaaccaatgataatgatgaacgcagcccagaatcgagtattcttgatggaatgataagacagttgcagcagcagcaagatcagagaatgggagcagatcaggatactattccaagaggactttcaaatggtgaagaaacaccccggagaggttttagaaggctgagcttagacattcagtcccctccaaatattggtctgcgtcgtagtggacaagttgaaggtgttcgtcagatgcatcaaaacgctccacgcagtcagattgctacagaacgtgacctgcaggcttggaaacgaagagtggttgtaccagaggtaccactaggcatatttaggaagctggaagacttccgattagagaaaggtgaagaggaaagaaatctttatataataggaagaaaaagaaagactcttcagctctcacataagtcggattcagtggttttggtatcacagtctagacaaaggacatgtaggcgtaaatatccaaattatggtagaagaaatcgtagctggcgtgagttatcttctggaaatgagtcttcaagctctgtaagacatgagacttcctgtgatcagagtgaaggttctggttcttcagaagaggatgaatggagaagtgacagaaaaagtgagagttacagcgaaagttcaagtgactcttcatctagatattccgattggacagctgatgcgggcatcaatttgcagcctcctttaagaacatcatgtcgtcgacgaattactcgattttgtagtagttcagaagatgaaatatctactgagaatttatctcctccaaaaagaagacgaaagagaaagaaagaaaataagcctaagaaggagaatttgcggaggatgactccagcagagcttgcaaatatggagcatttatatgaatttcaccctccagtttggattactgacaccacacttagaaaatctccttttgttcctcaaatgggtgatgaggtaatatattttcgacagggtcatgaagcttatattgaggctgtaagaagaaataatatttatgaactgaaccctaataaggagccatggagaaaaatggatcttagggatcaagaattggttaaaatagttggaatacgatatgaagttgggccccctacactctgttgcctaaaactagcatttatagatccagcaactggaaaacttatggacaaatctttctctattagatatcatgatatgccagatgttattgactttcttgtattgcgtcaattttatgatgaagcaagacagaggaattggcagtcttgtgacagattccgctctattattgatgatgcttggtggtttggaacagtgttaagtcaagagccatatcaaccacagtatcctgatagtcatttccagtgttatattgttaggtgggataatactgaaattgaaaaacttagcccatgggacatggaaccaattcctgataatgttgatccacctgaagaattaggagctagtatttctgtcacaacagatgagctagagaaattgctctataaaccacaagctggtgaatggggtcagaaatcaagagatgaagaatgtgatagaattatcagtggtatagatcaacttttgaatcttgatatagcagcagcttttgcaggccctgttgatttgtgtacatacccgaagtactgtactgtagtagcttatccaaccgatctttacacaattcgaatgagacttgttaatcgattttacaggaggctgtctgcgttagtttgggaagtcagatatatagaacataatgccagaacatttaacgaacctgagagtgtaattgcaagatcagctaaaaagataactgaccaacttttaaaatttatcaagaatcaacactgtacaaatatctcagaactttctaacacatctgaaaatgatgagcaaaatgctgaggatttggatgatagtgatcttcctaaaacatcttctggaaggaggagagtccatgatgggaaaaaaagcatcagagctacgaactatgttgaaagcaactggaagaaacagtgtaaggaactagtgaacttaatttttcagtgtgaagattctgaaccatttagacaacctgttgatttggttgaatatccagactacagagatattatagataccccaatggattttggaacagtaagggaaactctagatgcgggaaattatgacagccctttggagttttgcaaagacatccggctgatatttagcaatgcaaaagcgtatacaccaaacaaaagatcaaagatttatagtatgaccttgagattatctgccttatttgaagaaaaaatgaagaaaatctcttctgattttaaaattggtcaaaaattcaatgaaaaacttcgaagaagccagaggttcaagcaacggcaaaattgtaaaggtgacagtcagcctaacaaaagtatcagaaacctcaagccgaagaggttaaaatctcagacaaaaataattcctgagttggtaggttctcctacccagtctacctcaagtaggacagcttatcttggaacccacaagacaagtgctggtatctcttcaggtgttacttctggtgactcttcagattcagcagaatcatcagaaaggaggaaaagaaatagacctataacaaatggttctacattatctgaaagtgaagtggaagattctttagctacctctttgtcatcgtcagcttccagtagttctgaggaaagcaaagagagttccagagctcgtgaatcctcctcacgcagtgggctatccagaagcagcaatctcagggtaaccagaactagagctgctcaaagaaaaactggtcccgtttcattagcaaatggatgtggcagaaaagccactcgaaagagagtctatttaagtgattctgataacaattcattggagactggtgaaattctaaaagccagagctggaaataaccgaaaagtcttaaggaagtgtgctgctgtggctgccaataaaataaagctaatgagtgatgtagaagagaattctagctctgaaagtgtctgttctggtcggaagctgcctcaccgcaatgcttctgctgtagctagaaaaaagttattacataattctgaagatgaacagagcttaaagtcagaaattgaagaagaggagctaaaagatgaaaatcaactattaccagtgtccagttctcacactgcccagagcaatgttgatgaatctgaaaacagagactcagagtcagaaagtgatttgcgggtagcccggaaaaattggcatgctaatggttacaagtcccatactccagcaccttcaaagacaaaatttcttaaaatagagtcttctgaggaagactctaaaagtcatgattcagatcatgcatgtaacagaactgctggcccatcaacgtctgtgcagaaacttaaggcagagagcatctcagaggaagcagattctgaaccaggaagatctggtggtaggaaatacaatacatttcacaagaatgcgagtttctttaaaaaaaccaagattctgagtgactcagaagactctgaatctgaagagcaagatagagaagatgggaaatgtcataaaatggaaatgaacccaatttcaggaaatctgaactgtgaccctattgctatgtcccagtgttcctcagatcatggatgtgaaactgatttagattcagatgatgacaaaatagaaaaaccaaacaattttatgaaagattctgcatcacaagacaatggactaagcagaaaaatttccaggaaaagggtctgttccagtgactcagacagtagtttacaggtggttaagaaatcatcaaaagccagaacaggtctcctgaggattactcgaagatgtgcagctacggctgccaataagatcaagctcatgagtgatgtagaagatgtcagtttagaaaatgtgcacactagaagcaaaaatggaaggaaaaaacctctccatcttgcttgtactacagctaagaagaaattgagtgattgtgaaggaagtgtacattgtgaagtaccaagtgaacagtatgcctgtgaaggcaagccacctgatcctgactccgaaggtagtacaaaagtgcttagtcaggctctaaatggagactcagactctgaagatatgttgaattcagaacacaagcacaggcataccaatattcacaaaatagatgcaccttctaaaagaaaaagttcctctgttacatcttcaggagaagattcaaaaagtcatattccagggagtgagactgataggacattttcttcagagtcaaccttggcacaaaaagctactgcagagaataattttgaagtggaactgaattatgggctgcgcaggtggaatggcagaagactcaggacctatggaaaggctccttttagtaagacaaaagtgattcatgattcacaggaaacagcagagaaggaagtaaaaaggaagagatcgcatcctgaattggaaaatgtgaaaatctctgaaacaactgggaattcaaagtttagacctgatactagttccaaatcatcagatttgggatctgtaactgaatcagatattgactgtactgataatacaaaaaccaaaaggaggaaaacgaaaggaaaagcaaaagtagttagaaaagaatttgttcctagagacagagaacccaatacaaaagtgagaacatgtatgcataatcagaaggatgcagtgcagatgcctagtgaaactctgaaagcaaaaatggtacctgagaaagttccccgcagatgtgctactgttgctgcaaataaaataaagataatgagtaatctaaaagaaacgatctcaggaccagaaaatgtctggattaggaagagtagcagaaaactgccccatcgaaatgcttctgctgcggctaagaaaaaattactgaatgtttataaagaggatgatacaaccataaattctgaaagtgaaaaagagctagaagatattaatagaaaaatgctttttttaagggggttcagatcctggaaagaaaatgcacaatagtgactatgagaatgtagaagtggcatctgaaaacaattggtacacaagtaaactggcagttacattctgctcccagctctaaaattactcccttattggcatctttggaggaattttctaaaagccataatccagtgggttcctcccagtcagctcttgtacagacatgtgctctggggaattctgaggaggaaataaattgcagagtctgtaggtggagaggtggaaagaaaagacaaatggcctgctataagactactattcctttccagaatgcaaggccttgaagacatgattccttagaggaagaatataatgggaagtgtacaggctaggaagaacttgaagtgaacaaatttcaaaatcttaacctgatgctaattttcagggttctccattacagtgtaaaaattcagaccacgacaactatggtgtcatgaggaaaaaaaatcaggcatttttccaaaggaagtgctaatgggcctatttgacttctgagtgaagcaaaaactacccagatccattccctacaattcacatccccaaaggtcaaaaacaaactaggaggacctgggaatttcagctggagatactgattattgagttctgaagtagagtgttggaaataggcaattagagaaagtccattgatgtcattttgtttataatattgcagttcatactgaatgaccacttgatatgactaattcagggaatatatatttttctatgaaagctatgaatgttactatcacggcttttccttatttttacttgtatgtagcagcatttacagaaatgccaaaaatgtgcctcattaagaggcaggtcttaatcagttagataaaaataaaatgtatagcttaagatcaaaacagtcatatttttagatacagtgaaatcttttatgtttctctacagcaccttaaaaattagaacttgaatactttgagtaaacttactacaatctcatcccaacaaactttaatggtagcatgtttggcctatttcattgtggcctgtactaggattagaaaatttggtcgtggtataacaaagaagtgtatttacaataggatttaatttgttgttaatatgtatttgttgaaattaaaattgccagattaaatgaatatactgtcgcatctttttaacatagtaacgtgttactggaaaaattaagttgttgaaagtaagttgttttcccatttaaaaatatctgaatatatgatttgcatgtgtaaatctgaaaaactaaactacagaaacctagggttttctatttcttttttaagtcaaatgcatttttttttttttgttatacagatgaaccaagtgtctaaaatacttgagaaatttgtggttgcatgtctgttttaaaaaaaaggctttttgttttttagcataagccagaatattctaacctactaagtctgtgtcctttgctccttttgtagtatactttcatctaaattactgatccccaatatgttgatacacaggtgagaaagggaagaattcctaataaactgctattacttttaggtgaaaaaaaaaaaaaaaaaaaa

SEQ ID NO: 4774 - DNA, 3098 bp, Homo Sapiens
  NM_018964
tgggaagttcgcgcaagtgcggctctgcagggaggagggagggccgaggggaaggccctcgagagagtggagggcaacagtggccacggttcctctgtacttcgtttcttccctttatagaattgagagattgctgagcctaaatacatgttgctgcattgcctccgagaatggccggacctatccccactctcaccaaaacagagtgtgggactcactgctccctcgcctactagagcagagccactgccagaaggaaggggacaagacccagcaggacaccttctttccacgctttccagcctgtgggagcggcaggggcaacagagagaggatctggagccaggattaatgactcatttatgaagcatcttattctgcgaccgaggctcagtggtcagtggcgacgtaaatggctcgactccccgctggcattcgcttcatcatctcattctccagggatcagtggtacagagccttcatttttattttgacatttctgctgtatgcaagttttcacttatctcgaaagcctatcagcatagttaagggtgagctccacaagtactgcactgcttgggatgaagctgacgtcaggttcagcagccagaacaggaagtctgggtccgctgccccccaccagctccctgacaatgagaccgactgtggctgggcaccgtttgataagaacaactatcagcagctgcttggggccctggactactccttcctgtgcgcctatgccgtggggatgtacctcagtggcatcattggggagcgcctgccgattaggtattacctaactttcgggatgctcgccagcggagccttcaccgccctgttcggcttagggtatttctacaacatccacagtttcggattctacgtggtaactcaggtcatcaacgggctggtgcagaccaccggctggcccagcgtcgtcacctgcctcggcaactggtttggaaaaggaaggagaggtttgattatgggggtctggaactcccacacctccgtgggcaacatcttggggtcattgatcgctggctactgggtgtccacatgctggggcctgtccttcgtcgtgcctggagccatcgtggcagccatggggatagtgtgctttctcttcctcattgaacatccgaacgacgtcaggtgctcctccaccctggtgacgcactcaaaaggctatgagaatggtacaaacagattgagactccagaagcaaatcttgaagagcgaaaagaacaagcctctggacccagagatgcagtgcctgctgctctcagatgggaagggctccatccacccgaaccacgtcgtcattctccccggggacggtgggagtggcacggccgccatcagcttcacaggggccttgaaaattccaggcgtgatagagttctcactgtgtctgctgtttgccaagctggtcagctatactttcctcttctggctgcccctgtacatcacgaatgtggatcaccttgatgccaaaaaggcgggggagctctccaccctgtttgacgtgggcggaatctttggtgggatcctggcaggtgtgatctcagaccgactggagaaaagggcctccacctgcggcctgatgctgctgctcgcggcccccacgctctacatcttctccaccgtcagcaagatggggcttgaggccaccatcgccatgctgctgctcagcggagccctggtcagtgggccctacacactcatcaccaccgccgtctccgccgacctggggactcataaaagtctgaaaggcaacgcgcacgccctctccaccgtgacggccatcattgacgggacgggctctgtaggagcagccctgggccccctgctggctgggctcctctccccgtccggctggagcaatgtgttttacatgctgatgtttgcagatgcctgtgccttactgttcctgatccgcctcatacacaaggagctgagctgcccagggtcagctacgggggaccaagttccatttaaggaacagtgacaccccaccccagtcccgtggagggggtctgggcccacccttcacaactgcctttcaaggacagttcagacaaagggccctgcatggaaagagtgacctccctttgccttttgcacacgcacctggaaaagacacagaagccaacctgagaacccctggtgctattttaaaggagacatattgctgaacagcagtgagaaaagtctgcaggaactgctgcctgagccaagccagagaaccgaagacccggccggccctggcctcacaggcgtgtgcccatgcagccacccaaatgcacgcgtgacaacaaggccgggagggtggggggggtgcacaggtagccccgaccctctcaggcattccagccacagaacatcaaagtgagcgagtactgcgctggctgtggcttcagagaacctgtatgtgccacatggaaaaacaggacaccagagcccaccagacagtgccggccagcagagaagcagagagccagcgccacacaacatcaagaaggccgacaaccaggttggaaaccaagacggagctcagacccaccacatcgccccagaggcttttccagcacccatgatgtttcggactgacctaaaaactaattgtcgagaagccaagggtgaggaggcaggaagcacctccggttggaggcacccaggcttgccagccacagagcgccccaaagtcaccgtcatcccagcccctggccttcctgctgccctccggggccatggcactgctgttcagctcaggcacaggggcacagcagaggtttgggaagcggtctccccaccggcactgggattggcgggtccaagcccagcaaccggcttcgctccacaacacacaccacacctgggactgtttttaatacatagcaacagactgggttatttatttaagatgtgtattgtgtcatatgaagtttaagagacataaatggcattttgttatttattaagacaaactccaattgttctctggctgtttttttcagttgtgtctagcaaaatacttatctgccctttgaaataaaatgtttttgtttaaaaaatctcagaacactcaaaaa

SEQ ID NO: 4775 - DNA, 2196 bp, Homo Sapiens
  NM_018975
actctcgatgcgccgcggctgctgctgcgcaggcccagtgctgcgcttcgcggcagaggcgtctgcggtgacagctcagtcagttgagctctgtgtgccaggcgctcgcgagggggtagctcttctagtagtgctcggcgtcagacatggcggaggcgatggatttgggcaaagaccccaacgggcccacccattcctcgactctgttcgtgagggacgacggcagctccatgtccttctacgtgcggcccagcccggccaagcgtcggctgtcgacgctcatcctgcacggcggcggcaccgtgtgccgagtgcaggagcccggggccgtgctgctggcccagcccggggaggcgctggccgaggcctcgggtgatttcatctccacgcagtacatcctggactgcgtggagcgcaacgagaggctggagctggaggcctatcggctgggccccgcctcggcggcggacaccggctcggaagcaaagcccggggccctggccgagggcgccgcggagccggagccgcagcggcacgccgggcggatcgccttcacggatgcggacgacgtagccatccttacctacgtgaaggaaaatgcccgctcgcccagctccgtcaccggtaacgccttgtggaaagcgatggagaagagctcgctcacgcagcactcgtggcagtccctgaaggaccgctacctcaagcacctgcggggccaggagcataagtacctgctgggggacgcgccggtgagcccctcctcccagaagctcaagcggaaggcggaggaggacccggaggccgcggatagcggggaaccacagaataagagaactccagatttgcctgaagaagagtatgtgaaggaagaaatccaggagaatgaagaagcagtcaaaaagatgcttgtggaagccacccgggagtttgaggaggttgtggtggatgagagccctcctgattttgaaatacatataactatgtgtgatgatgatccacccacacctgaggaagactcagaaacacagcctgatgaggaggaagaagaagaagaagaaaaagtttctcaaccagaggtgggagctgccattaagatcattcggcagttaatggagaagtttaacttggatctatcaacagttacacaggccttcctaaaaaatagtggtgagctggaggctacttccgccttcttagcgtctggtcagagagctgatggatatcccatttggtcccgacaagatgacatagatttgcaaaaagatgatgaggataccagagaggcattggtcaaaaaatttggtgctcagaatgtagctcggaggattgaatttcgaaagaaataattggcaagataatgagaaaagaaaaaagtcatggtaggtgaggtggttaaaaaaaattgtgaccaatgaactttagagagttcttgcattggaactggcacttattttctgaccatcgctgctgttgctctgtgagtcctagatttttgtagccaagcagagttgtagagggggataaaaagaaaagaaattggatgtatttacagctgtccttgaacaagtatcaatgtgtttatgaaaggaagatctaaatcagacaggagttggtctacatagtagtaatccattgttggaatggaacccttgctatagtagtgacaaagtgaaaggaaatttaggaggcataggccatttcaggcagcataagtaatctcctgtcctttggcagaagctcctttagattgggatagattccaaataaagaatctagaaataggagaagatttaattatgaggccttgaacacggattatccccaaacccttgtcatttcccccagtgagctctgatttctagactgctttgaaaatgctgtattcattttgctaacttagtatttgggtaccctgctctttggctgttctttttttggagcccttctcagtcaagtctgccggatgtctttctttacctacccctcagttttccttaaaacgcgcacacaactctagagagtgttaagaataatgttacttggttaatgtgttatttattgagtattgtttgtgctaagcattgtgttagatttaaaaaattagtggattgactccactttgttgtgttgttttcattgttgaaaataaatataactttgtattcgagtctcgtcaaaaaaaaaaaaaaaaaaaaa

SEQ ID NO: 4776 - DNA, 4961 bp, Homo Sapiens
  NM_018976
acaaagagaaggcgcccgggcggccgcggtcccgcccactgacgcgtccccggggtgccgctataacccgccgctcgcagggctgctccacagccgcgcgacgccgccgccttagaacgcctttccagtactgctagcagcagcccgaccacgcgttaccgcacgctcgcgcctttcccttgacacggcggacgccggaggattggggcggcaatttgtcttttccttttttattaaaattatttttcctgcctgttgttggatttggggaaattttttgtttgttttttatgatttgtatttgactgagagaaacccactgaagacgtctgcgtgagaatagagaccaccgaggccgactcgcgggccgctgcacccaccgccaaggacaaaaggagcccagcgctactagctgcacccgattcctcccagtgcttagcatgaagaaggccgaaatgggacgattcagtatttccccggatgaagacagcagcagctacagttccaacagcgacttcaactactcctaccccaccaagcaagctgctctgaaaagccattatgcagatgtagatcctgaaaaccagaactttttacttgaatcgaatttggggaagaagaagtatgaaacagaatttcatccaggtactacttcctttggaatgtcagtatttaatctgagcaatgcgattgtgggcagtggaatccttgggctttcttatgccatggctaatactggaattgctctttttataattctcttgacatttgtgtcaatattttccctgtattctgttcatctccttttgaagactgccaatgaaggagggtctttattatatgaacaattgggatataaggcatttggattagttggaaagcttgcagcatctggatcaattacaatgcagaacattggagctatgtcaagctacctcttcatagtgaaatatgagttgcctttggtgatccaggcattaacgaacattgaagataaaactggattgtggtatctgaacgggaactatttggttctgttggtgtcattggtggtcattcttcctttgtcgctgtttagaaatttaggatatttgggatataccagtggcctttccttgttgtgtatggtgttctttctgattgtggtcatttgcaagaaatttcaggttccgtgtcctgtggaagctgctttgataattaacgaaacaataaacaccaccttaacacagccaacagctcttgtacctgctttgtcacataacgtgactgaaaatgactcttgcagacctcactattttattttcaactcacagactgtctatgctgtgccaattctgatcttttcatttgtctgtcatcctgctgttcttcccatctatgaagaactgaaagaccgcagccgtagaagaatgatgaatgtgtccaagatttcattttttgctatgtttctcatgtatctgcttgccgccctctttggatacctaacattttacgaacatgttgagtcagaattgcttcatacctactcttctatcttgggaactgatattcttcttctcattgtccgtctggctgtgttaatggctgtgaccctgacagtaccagtagttattttcccaatccggagttctgtaactcacttgttgtgtgcatcaaaagatttcagttggtggcgtcatagtctcattacagtgtctatcttggcatttaccaatttacttgtcatctttgtcccaactattagggatatctttggttttattggtgcatctgcagcttctatgttgatttttattcttccttctgccttctatatcaagttggtgaagaaagaacctatgaaatctgtacaaaagattggggctttgttcttcctgttaagtggtgtactggtgatgaccggaagcatggccttgattgttttggattgggtacacaatgcacctggaggtggccattaattggcaccactcaaactcaaactcagtccatctgatgccagtgttgagtaaactcaactactatgaaatttcacctaatgttttcagtttcacttccttttgaagtgcagattcctcgctggttcttctgagtgcagaataagtgaacttttttgttttgttttgtttttttaagaaacttatctgtatgttagaaatggatatgaacaacaaaaccacgagtctcgggttaagggaagtgacaattttattccattccagagaatggacaaactcttaacttttatcaagccacatgcttggctgtgtcattgtttaacttggatattttatgattttacttgaatgtgcctaatggaaccatttgatgtgagaaacaattctttttaatttacagcaaaatattgaataaccattgacaaaaacactattattttttgtaccaaaaatacttaaagacctcagaagcactcttttacttttaagaaattgcttttttgaactttattcagaagcagttatcaataaattccataaaataatgtcattggtatttaaaaatgaatattaatataatgaaatggtttgcctttttgtaggcataataagccaaatacttttttacccaaaataatttttagagaaaatgatgtaatgaaaaattgtaccatgaattaggagcatagttttttccatttaaacgtcaccattacttaaaagatgattgattattgctataccaaatcagatgaactctgttcatcacttttcttctctgtccccaaacaatttggttcattcagactgaaatgtttgtgtcttcaacttattagaatggaagataatgcagatatttctgtgggaaataaaataactaattttgaggtaccaaatagtgcaattgggtaaaacagggtttattcagttgcatctgtctccagtgttgtattgacagctctgggtctttttttgggccagcccttttttgacattgcttccagcagtggaaaatgggcatttgatggcaataggccaaaattattgtgtccagagagtacactttttcaaaatgctcacctactggaagtgtgaattacttgacaatgtatggcttagttgtgttcatgttttgtctacagtagaggtctaatccacaggttacacctatgtttgatatgatataagttctctttgcgtaggccactgggtttctcatgcagtaagctttataaaaactcatttgcactggactgtcatctcattcttgtacaacgtagaattacttgtttacatccaacaaatggttagctagggaaaacagtgcaaactgagtgttagtagtcattttggtccaactgcatgtcaacccttccatttcaatcccagttagaaatgaaaataattactttgaaacttggctttaagagcacatttatcgtacgtcacagtgtatggtgaatatattattaaataatgtggtacttcgctcatcaggcataatgtctaaaatctaatatacataattccattaagtggttgaaggaagcaaataatggaattgtcaattggtcatctggctgtaaggtttgcccttgaactaaaaatgttgtttggggcaagggccagaaatgtggagacatggtttttgttacgcattcttgtattatatgtgactaaatttacaaacaagatacatgtgtaattaaagacccttatggaactggaagacgtcttgtagtgctacattgggtgaaaccgttggtccatttttgtctgtttctatgaagataaaataattgggggccatctagaaatagaaaggcagtgggaagacagattctacggcactgctttcatttaattgggctttaggcactccattcgaatgcagaacctcacctctagttgagaccaagaattggcaaatttgcatgagctcctggaaagagttgctgactttgtatctaagacctgccagggaataccaagagttgtttctacagacttttttttttttttttgtatgggagaagatactgtggcaaccaggaaggaatggaaaaaaaattcttttctctacagcaaattaatgtgaggaagctcctccaatcctctggctatttaaggttcaaaatcaagtgcctagggaaaattccaatggatgattttctgggagctatcttgtctaccttgaggttcctgaacaatgaattcccattaatgagcagtcttcagtattaaaaccactgtcttgtcacctcattttgcattactgtcttccgtggatgtttcagttacaactgtaatgttatttatagaacaacattaatccattaaagctaacctatttttcaatatttatgataatctatgtacatatattgtctgtccatatgtatttgtaaataggttgtatataatgtcaggtttgggtcttgggttcaagtgtatatattcctgtaagtttcttaactgcattttgatgaattcacattatgtaactataagaattgtcccaaaagtacctgtacagaaaattgaatattgaaaaattgacaaattgtgtacaaacactaaaaaaaacttgtttaaattgtatttgcaataaacaacatcaaattttttcatgaaatcttggtacaaattcagatctcttatttaaaatttaaataaggaatacattttcaaaatgcagtaatcaaaatgtgatctagtgtaatgaaataaaatgtgatctagtgtaatggaagacctttgagaacctgggtgtattaactttgtgtatatagtgtaaatatccccactgtactgttagaggccaacaattctagtatggcttgttggcaaagagtgctacaccgtttcaatgaaacaatgtatgtttgttttaactgaactaaaataaatacatgcttaatcctgaaaaaaaaaaaaaaaaaaaaaaaaaaaaaaaaaaaaaaaaaaaaaaaaaaaaaaaaaaaaaaaaaaaaaaaaaaaaaa

SEQ ID NO: 4777 - DNA, 10461 bp, Homo Sapiens
  NM_018979
ccggcccttcgcctctgggcgatgggcgacctgtgaggccggtccccatcgctgggggcgcgtgtgggaggaggcggccgcccgagtgaccgggagccgggccgcggccttccctcgcccgcctcggcccctcccactcctctgccccggggccgccaccgcccgggcgtcggacctggtcccgtgctcgcggtgccgccgccctctgggcctagcccgcccagctcggcgagcggcggcagtgggagccgcgtccgccgcatccgcctcgactcggtgccggcccctggccctcccctcatgactgcggcgcctctgctgccaccgcccgcccggccgccgctcgccgcaggatggatgcggaccgtgcggcgctaacccccgtggctcagctcccgaatcgcccgccttcgagccctcctcgtgagccgcagcagcctcggtgccagcccccgccgcagctgggcccagcggtccgcctgtccctcgttgcggcttgtcggtgctgagtgaggcgtcgtccgggtcggcgcgaacccgcccggccgcggttccctgcagacctctgcgcgggcggctcggcccttcacgcccttttcgttcacgaatccgagcccgctcgcctctctccagcgaaccgaccatgtctggcggcgccgcagagaagcagagcagcactcccggttccctgttcctctcgccgccggctcctgcccccaagaatggctccagctccgattcctccgtgggggagaaactgggagccgcggccgccgacgctgtgaccggcaggaccgaggagtacaggcgccgccgccacactatggacaaggacagccgtggggcggccgcgaccactaccaccactgagcaccgcttcttccgccggagcgtcatctgtgactccaatgccactgcactggagcttcccggccttcctctttccctgccccagcccagcatccccgcggctgtcccgcagagtgctccaccggagccccaccgggaagagaccgtgaccgccaccgccacttcccaggtagcccagcagcctccagccgctgccgcccctggggaacaggccgtcgcgggccctgccccctcgactgtccccagcagtaccagcaaagaccgcccagtgtcccagcctagccttgtggggagcaaagaggagccgccgccggcgagaagtggcagcggcggcggcagcgccaaggagccacaggaggaacggagccagcagcaggatgatatcgaagagctggagaccaaggccgtgggaatgtctaacgatggccgctttctcaagtttgacatcgaaatcggcagaggctcctttaagacggtctacaaaggtctggacactgaaaccaccgtggaagtcgcctggtgtgaactgcaggatcgaaaattaacaaagtctgagaggcagagatttaaagaagaagctgaaatgttaaaaggtcttcagcatcccaatattgttagattttatgattcctgggaatccacagtaaaaggaaagaagtgcattgttttggtgactgaacttatgacgtctggaacacttaaaacgtatctgaaaaggtttaaagtgatgaagatcaaagttctaagaagctggtgccgtcagatccttaaaggtcttcagtttcttcatactcgaactccacctatcattcaccgcgatcttaaatgtgacaacatctttatcaccggccctactggctcagtcaagattggagacctcggtctggcaaccctgaagcgggcttcttttgccaagagtgtgataggtaccccagagttcatggcccctgagatgtatgaggagaaatatgatgaatccgttgacgtttatgcttttgggatgtgcatgcttgagatggctacatctgaatatccttactcggagtgccaaaatgctgcacagatctaccgtcgcgtgaccagtggggtgaagccagccagttttgacaaagtagcaattcctgaagtgaaggaaattattgaaggatgcatacgacaaaacaaagatgaaagatattccatcaaagaccttttgaaccatgccttcttccaagaggaaacaggagtacgggtagaattagcagaagaagatgatggagaaaaaatagccataaaattatggctacgtattgaagatattaagaaattaaagggaaaatacaaagataatgaagctattgagttttcttttgatttagagagagatgtcccagaagatgttgcacaagaaatggtagagtctgggtatgtctgtgaaggtgatcacaagaccatggctaaagctatcaaagacagagtatcattaattaagaggaaacgagagcagcggcagttggtacgggaggagcaagaaaaaaaaaagcaggaagagagcagtctcaaacagcaggtagaacaatccagtgcttcccagacaggaatcaagcagctcccttctgctagcaccggcatacctactgcttctaccacttcagcttcagtttctacacaagtagaacctgaagaacctgaggcagatcaacatcaacaactacagtaccagcaacccagtatatctgtgttatctgatgggacggttgacagtggtcagggatcctctgtcttcacagaatctcgagtgagcagccaacagacagtttcatatggttcccaacatgaacaggcacattctacaggcacagtcccagggcatataccttctactgtccaagcacagtctcagccccatggggtatatccaccctcaagtgtggcacaggggcagagccagggtcagccatcctcaagtagcttaacaggggtttcatcttcccaacccatacaacatcctcagcagcagcagggaatacagcagacagcccctcctcaacagacagtgcagtattcactttcacagacatcaacctccagtgaggccactactgcacagccagtgagtcagcctcaagctccacaagtcttgcctcaagtatcagctggaaaacagcttccagtttcccagccagtaccaactatccaaggcgaacctcagatcccagttgcgacacaaccctcggttgttccagtccactctggtgctcatttccttccagtgggacagccgctccctactcccttgctccctcagtaccctgtctctcagattcccatatcaactcctcatgtgtctacggctcagacaggtttctcatcccttcccatcacaatggcagctggcattactcagcctctgctcacgttggcttcatctgctacaacagctgcgatcccgggggtatcaactgtggttcctagtcagcttccaacccttctgcagcctgtgactcagctgccaagtcaggttcacccacagctcctacaaccagcagttcagtccatgggaataccagctaaccttggacaagctgctgaggttccactttcctctggagatgttctgtaccagggcttcccacctcgactgccaccacagtacccaggagattcaaatattgctccctcttccaacgtggcttctgtttgcatccattctacagtcctatcccctcccatgccgacagaagtactggctacacctgggtactttcccacagtggtgcagccttatgtggaatcaaatcttttagttcctatgggtggtgtaggaggacaggttcaagtgtcccagccaggagggagtttagcacaagcccccactacatcctcccagcaagcagttttggagagtactcagggagtctctcaggttgctcctgcagagccagttgcagtagcacagacccaagctacccagccgaccactttggcttcctctgtagacagtgcacattcagatgttgcttcaggtatgagtgatggcaatgagaacgtcccatcttccagtggaaggcatgaaggaagaactacaaaacggcattaccgaaaatctgtaaggagtcgctctcgacatgaaaaaacttcacgcccaaaattaagaattttgaatgtttcaaataaaggagaccgagtagtagaatgtcaattagagactcataataggaaaatggttacattcaaatttgacctagatggtgacaaccccgaggagatagcaacaattatggtgaacaatgactttattctagcaatagagagagagtcgtttgtggatcaagtgcgagaaattattgaaaaagctgatgaaatgctcagtgaggatgtcagtgtggaaccagagggtgatcagggattggagagtctacaaggaaaggatgactatggcttttcaggttctcagaaattggaaggagagttcaaacaaccaattcctgcgtcttccatgccacagcaaataggcattcctaccagttctttaactcaagttgttcattctgcgggaaggcggtttatagtgagtcctgtgccagaaagccgattacgagaatcaaaagttttccccagtgaaataacagatacagttgctgcctctacagctcagagccctggaatgaacttgtctcactctgcatcatcccttagtctacaacaggccttttctgaacttagacgtgcccaaatgacagaaggacccaacacagcacctccaaactttagtcatacaggaccaacatttccagtagtacctcctttcttaagtagcattgctggagtcccaaccacagcagcagccacagcaccagtccctgcaacaagcagccctcctaatgacatttccacatcagtaattcagtctgaggttacagtgcccactgaagaggggattgctggagttgccaccagcacaggtgtggtaacttcaggtggtctccccataccacctgtgtctgaatcaccagtactttccagcgtagtttcaagtatcacaatacctgcagttgtctcaatatctactacatccccgtcacttcaagtccccacatccacatctgagatcgttgtttctagtacagcactgtatccttcagtaacagtttcagcaacttcagcctctgcagggggcagtactgctaccccaggtcctaagcctccagctgtagtatctcagcaggcagcaggcagcactactgtgggagccacattaacatcagtttctaccaccacttcattcccaagcacagcttcacagctgtgcattcagcttagcagcagtacttctactcctactttagctgaaaccgtggtagttagcgcacactcactagataagacatctcatagcagtacaactggattggctttctccctctctgcaccatcttcctcttcctctcctggagcaggagtgtctagttatatttctcagcctggtgggctgcatcctttggtcattccatcagtgatagcttctactcctattcttccccaagcagcaggacctacttctacacctttattaccccaagtacctagtatcccacccttggtacagcctgttgccaatgtgcctgctgtacagcagacactaattcatagtcagcctcaaccagctttgcttcccaaccagccccatactcattgtcctgaagtagattctgatacacaacccaaagctcctggaattgatgacataaagactctagaagaaaagctgcggtctctgttcagtgaacacagctcatctggagctcagcatgcctctgtctcactggagacctcactagtcatagagagcactgtcacaccaggcatcccaactactgctgttgcaccaagcaaactcctgacttctaccacaagtacttgcttaccaccaaccaatttaccactaggaacagttgctttgccagttacaccagtggtcacacctgggcaagtttctaccccagtcagcactactacatcaggagtgaaacctggaactgctccctccaagccacctctaactaaggctccggtgctgccagtgggtactgaacttccagcaggtactctacccagcgagcagctgccaccttttccaggaccttctctaacccagtcccagcaacctctagaggatcttgatgctcaattgagaagaacacttagtccagagatgatcacagtgacttctgcggttggtcctgtgtccatggcggctccaacagcaatcacagaagcaggaacacagcctcagaagggtgtttctcaagtcaaagaaggccctgtcctagcaactagttcaggagctggtgtttttaagatgggacgatttcaggtttctgttgcagcagacggtgcccagaaagagggtaaaaataagtcagaagatgcaaagtctgttcattttgaatccagcacctcagagtcctcagtgctatcaagtagtagtccagagagtaccttggtgaaaccagagccgaatggcataaccatccctggtatctcttcagatgtgccagagagtgcccacaaaactactgcctcagaggcaaagtcagacactgggcagcctaccaaggttggacgttttcaggtgacaactacagcaaacaaagtgggtcgtttctctgtatcaaaaactgaggacaagatcactgacacaaagaaagaaggaccagtggcatctcctccttttatggatttggaacaagctgttcttcctgctgtgataccaaagaaagagaagcctgaactgtcagagccttcacatctaaatgggccgtcttctgacccggaggccgcttttttaagtagggatgtggatgatggttccggtagtccacactcgccccatcagctgagctcaaagagccttcctagccagaatctaagtcaaagccttagtaattcatttaactcctcttacatgagtagcgacaatgagtcagatatcgaagatgaagacttaaagttagagctgcgacgactacgagataaacatctcaaagagattcaggacctgcagagtcgccagaagcatgaaattgaatctttgtataccaaactgggcaaggtgccccctgctgttattattcccccagctgctcccctttcagggagaagacgacgacccactaaaagcaaaggcagcaaatctagtcgaagcagttccttggggaataaaagcccccagctttcaggtaacctgtctggtcagagtgcagcttcagtcttgcacccccagcagaccctccaccctcctggcaacatcccagagtccgggcagaatcagctgttacagccccttaagccatctccctccagtgacaacctctattcagccttcaccagtgatggtgccatttcagtaccaagcctttctgctccaggtcaaggaaccagcagcacaaacactgttggggcaacagtgaacagccaagccgcccaagctcagcctcctgccatgacgtccagcaggaagggcacattcacagatgacttgcacaagttggtagacaattgggcccgagatgccatgaatctctcaggcaggagaggaagcaaagggcacatgaattacgagggccctggaatggcaaggaagttctctgcacctgggcaactgtgcatctccatgacctcgaacctgggtggctctgcccccatctctgcagcatcagctacctctctaggtcacttcaccaagtctatgtgccccccacagcagtatggctttccagctaccccatttggcgctcaatggagtgggacgggtggcccagcaccacagccacttggccagttccaacctgtgggaactgcctccttgcagaatttcaacatcagcaatttgcagaaatccatcagcaaccccccaggctccaacctgcggaccacttagacctagagacattaactgaatagatctgggggcaggagatggaatgctgagggggtgggtgggggtgggaagtagcctatatactaactactagtgctgcatttaactggttatttcttgccagaggggaatgtttttaatactgcattgagccctcagaatggagagtctcccccgctccagttattggaatgggagaggaaggaaagaacagcttttttgtcaaggggcagcttcagaccatgctttcctgtttatctatactcagtaatgaggatgagggctaggaaagtcttgttcataaggaagctggagaactcaatgtaaaatcaaacccatctgtaatttcgagtgggtggagctcttgcttttggtacatgccctgaatccctcactccctcaagaatccgaaccacaggacaaaaaccacctactgggctctctcctaccctgccctcctcccttttttttacccctctcttttttattttttctttgctctttagaacccagtgaaaaataccagggtactggggtgcaactctttcttatgataggtcattagtgctttaagcaaaagatattagcagctttgactgcagcattagcaattaggaaaaaaaaaaaattaagttccctgcggacatgtaactttgccatcagttttgatgtggaaacactgtgatatataaaatgttgttggacaacagtagttttaagagtaaaatatgaaacgtttaaaaagttccaaaaaaagctagctctgtcctttacttattgagacactttaactttttcctttgtatttccattgtattagataaataaatgtgaatgtaaaattgtataaattactgtacttgaatacttctgtttcccagtgttgcttgctggacattttagtgccttggacttctattgcttctgccattagcatcaacttaccagaccccagatcaataaagggcatgtggaaggaaatcgtaggtccatgtgaccccagcagtccagcagtggttatgccaaagggaaattgaaaaagtatttttttaagtcattcaacaactttgtctagagcaggtgtaagatgagtagggtgggaagttaggttggcatcagtggttaaaaacagaaagttctgtttcgggaatagtgaggagggggtgttgtaacaaaattggacaacttaaaagaatggtgtgtgctgggtgaaagacaaagactaaagaatgaggaaacaaacgtgatgcctggccagtgactgtcatataaacctttcttatttgagctaggcttgaacagacgtgacctagaagaaactgaacataaagagaagggggtggggggctagttttcaagttggggaacctgatagtgaaaagtcacagatggagaaaattgctctcagaaaaactgtttggattgctttcctcttgttgcacatgtaccatgcatttctcagcttggggtactacattttgtggaaagttaatctatctatctttccacatctgaattaatcattctaggaaagaatacttattcctactcatttcctttatgatgtccaaatggttgcaggatcataatctattgtgccacctttatttctagaagtacaactaatatgttcacattttcaaataaataatactccccgtaagtaataactgcaaccaatcagtgttattcagtgctatgcctccttgtaatgggtagttattaattattttcagagctttccggaaatactgtcctaactggctatgtttaggatctttgttatctctgaagacaaagaaagaagctaggactcttaattttggggtgcttcttgactcttagttgggaaactgaaaatatttccaaccttttacccacgtcaatggcatattctgggaatcaccaccaccaccaccactaccacagaaagaggctggaggctcctgtaccctgttcattccttaagggccctgcttcccttagtaagtaagtaagttggtctacggccctaaatatgcaaatgagagctgaaggtttttaaaaggtagaaaggaaaagggcaagggcttccacccctgctttaaaatgatttatttattctctgcttgtatttcttgtggagagagtaaggatagaaccaacaaggggctgagtagctgagaaaggggccacccaagagtgaaacatactttataccagaggagcagtggagcctcatgcagcacattatcatttgttatttgggtttaataataattttgacatcttttcactcatacacaaaaaaagtcagaactggtgttatttactgttgatttcatcctcctgtgtatgaaataacaagcctagaggaatgaactagtgctactgaactgtttaaattatttttgtgttaatagtacactttgagtatctttttccacattaaaaactttctgaattataaatgttttccttacattatttaacaatgtacactgttaaaaataaaaataaaaattcaaactttgggggtttctcagcagccgttaattgtacattttgcactaactctgggtgttgcgcttcttgtaagattgcgctttgtgcttcagtttgttacctttgtagacttatttaatgaaaccattcaaataaaccaaacttgcttttgttgaaaaaaaaaa

SEQ ID NO: 4778 - DNA, 4193 bp, Homo Sapiens
  NM_018981
agaccggcgcgtgaggaacctaccggtaccggccgcgcgctggtagtcgccggtgtggctgcacctcaccaatcccgtgcgccgcggctgggccgtcggagagtgcgtgtgcttctctcctgcacgcggtgcttgggctcggccaggcggggtccgccgccagggtttgaggatgggggagtagctacaggaagcgaccccgcgatggcaaggtatatttttgtggaatgaaaaggaagtattagaaatgagctgaagaccattcacagattaatatttttggggacagatttgtgatgcttgattcacccttgaagtaatgtagacagaagttctcaaatttgcatattacatcaactggaaccagcagtgaatcttaatgttcacttaaatcagaacttgcataagaaagagaatgggagtctggttaaataaagatgactatatcagagacttgaaaaggatcattctctgttttctgatagtgtatatggccattttagtgggcacagatcaggatttttacagtttacttggagtgtccaaaactgcaagcagtagagaaataagacaagctttcaagaaattggcattgaagttacatcctgataaaaacccgaataacccaaatgcacatggcgattttttaaaaataaatagagcatatgaagtactcaaagatgaagatctacggaaaaagtatgacaaatatggagaaaagggacttgaggataatcaaggtggccagtatgaaagctggaactattatcgttatgattttggtatttatgatgatgatcctgaaatcataacattggaaagaagagaatttgatgctgctgttaattctggagaactgtggtttgtaaatttttactccccaggctgttcacactgccatgatttagctcccacatggagagactttgctaaagaagtggatgggttacttcgaattggagctgttaactgtggtgatgatagaatgctttgccgaatgaaaggagtcaacagctatcccagcctcttcatttttcggtctggaatggccccagtgaaatatcatggagacagatcaaaggagagtttagtgagttttgcaatgcagcatgttagaagtacagtgacagaactttggacaggaaattttgtcaactccatacaaactgcctttgctgctggtattggctggctgatcactttttgttcaaaaggaggagattgtttgacttcacagacacgactcaggcttagtggcatgttggatggtcttgttaatgtaggatggatggactgtgccacccaggataacctttgtaaaagcttagatattacaacaagtactactgcttattttcctcctggagccactttaaataacaaagagaaaaacagtattttgtttctcaactcattggatgctaaagaaatatatttggaagtaatacataatcttccagattttgaactactttcggcaaacacactagaggatcgtttggctcatcatcggtggctgttattttttcattttggaaaaaatgaaaattcaaatgatcctgagctgaaaaaactaaaaactctacttaaaaatgatcatattcaagttggcaggtttgactgttcctctgcaccagacatctgtagtaatctgtatgtttttcagccgtctctagcagtatttaaaggacaaggaaccaaagaatatgaaattcatcatggaaagaagattctatatgatatacttgcctttgccaaagaaagtgtgaattctcatgttaccacgcttggacctcaaaattttcctgccaatgacaaagaaccatggcttgttgatttctttgccccctggtgtccaccatgtcgagctttactaccagagttacgaagagcatcaaatcttctttatggtcagcttaagtttggtacactagattgtacagttcatgagggactctgtaacatgtataacattcaggcttatccaacgacagtggtattcaaccagtccaacattcatgagtatgaaggacatcactctgctgaacaaatcttggagttcatagaggatcttatgaatccttcagtggtctcccttacacccaccaccttcaacgaactagttacacaaagaaaacacaacgaagtctggatggttgatttctattctccgtggtgtcatccttgccaagtcttaatgccagaatggaaaagaatggcccggacattaactggactgatcaacgtgggcagtatagattgccaacagtatcattctttttgtgcccaggaaaacgttcaaagataccctgagataagattttttcccccaaaatcaaataaagcttatcattatcacagttacaatggttggaatagggatgcttattccctgagaatctggggtctaggatttttacctcaagtatccacagatctaacacctcagactttcagtgaaaaagttctacaagggaaaaatcattgggtgattgatttctatgctccttggtgtggaccttgccagaattttgctccagaatttgagctcttggctaggatgattaaaggaaaagtgaaagctggaaaagtagactgtcaggcttatgctcagacatgccagaaagctgggatcagggcctatccaactgttaaattttatttctacgaaagagcaaagagaaattttcaagaagagcagataaataccagagatgcaaaagcaatcgctgccttaataagtgaaaaattggaaactctccgaaatcaaggcaagaggaataaggatgaactttgataatgttgaagatgaagaaaaagtttaaaagaaattctgacagatgacatcagaagacacctatttagaatgttacatttatgatgggaatgaatgaacattatcttagacttgcagttgtactgccagaattatctacagcactggtgtaaaagaagggtctgcaaactttttctgtaaagggccggtttataaatattttagactttgcaggctataatatatggttcacacatgagaacaagaatagagtcatcatgtattctttgttatttgcttttaacaacctttaaaaaatattaaaacgattcttagctcagagccatacaaaagtaggctggattcagtccatggaccatagattgctgtccccctcgacggacttataatgtttcaggtggctggcttgaacatgagtctgctgtgctatctacataaatgtctaagttgtataaagtccactttcccttcacgttttttggctgacctgaaaagaggtaacttagtttttggtcacttgttctcctaaaaatgctatccctaaccatatatttatatttcgttttaaaaacacccatgatgtggcacagtaaacaaaccctgttatgctgtattattatgaggagattcttcattgttttctttccttctcaaaggttgaaaaaatgcttttaatttttcacagccgagaaacagtgcagcagtatatgtgcacacagtaagtacacaaatttgagcaacagtaagtgcacaaattctgtagtttgccgtatcatccaggaaaacctgagggaaaaaaattatagcaattaactgggcattgtagagtatcctaaatatgttatcaagtatttagagttctatattttaaagatatatgtgttcatgtattttctgaaattgctttcatagaaattttcccactgatagttgatttttgaggcatctaatatttacatatttgccttctgaactttgttttgacctgtatcctttatttacattgggtttttctttcgtagttttggtttttcactcctgtccagtctatttattattcaaataggaaaaattactttacaggttgttttactgtagcttataatgatactgtagttattccagttactagtttactgtcagagggctgcctttttcagataaatattgacataataactgaagttatttttataagaaaatcaagtatataaatctaggaaagggatcttctagtttctgtgttgtttagactcaaagaatcacaaatttgtcagtaacatgtagttgtttagttataattcagagtgtacagaatggtaaaaattccaatcagtcaaaagaggtcaatgaattaaaaggcttgcaactttttcaaaaacctgttagaatatgc

SEQ ID NO: 4779 - DNA, 1873 bp, Homo Sapiens
  NM_018982
ccccggatctccggcttccggcaactgggctggaccgaaaccggcgcggagcaactgaggcccgagccttctcgggacccgggggacgcctaaccccgcgagatgaggaaactgaggccgcgaggagcgcgcatacagcagagaagcagcagaatcgggaatcaaacccagctctgtctgaccccagagcctgtgcctttaaccactggctaggctgaactgcctttgttcttcactgtccccatcacctctttcaaacctcagcctctccttcctcatcgttacatctctaggctgcacctgctctctaaacattcacacaaaccctgcaaattttcttcctcataattgggagaagactcactggccgaatggcagcagtagatgacttgcaatttgaagaatttggcaatgcagccacttctctgacagcaaacccagatgccaccacagtaaacattgaggatcctggtgaaaccccaaaacatcagccaggatccccaagaggctcaggaagagaagaagatgatgagttactgggaaatgatgactctgacaaaactgagttacttgctggacagaagaaaagctcccccttctggacatttgaatactaccaaacattctttgatgtggacacctaccaggtctttgacagaattaaaggatctcttttgccaatacccgggaaaaactttgtgaggttatatatccgcagcaatccagatctctatggccccttttggatatgtgccacgttggtctttgccatagcaattagtgggaatctttccaacttcttgatccatctgggagagaagacgtaccattatgtgcccgaattccgaaaagtgtccatagcagctaccatcatctatgcctatgcctggctggttcctcttgcactctggggtttcctcatgtggagaaacagcaaagttatgaacatcgtctcctattcatttctggagattgtgtgtgtctatggatattccctcttcatttatatccccaccgcaatactgtggattatcccccagaaagctgttcgttggattctagtcatgattgccctgggcatctcaggatctctcttggcaatgacattttggccagctgttcgtgaggataaccgacgcgttgcattggccacaattgtgacaattgtgttgctccatatgctgctttctgtgggctgcttggcatacttttttgatgcaccagagatggaccatctcccaacaactacagctactccaaaccaaacagttgctgcagccaagtccagctaatgaggaaattctcttttgttttttggagcatggttctttgggaagtggcatccactgcaggaaagcagaatgagcagagccagcagaactgatggagtggcacaaattcccagtgtctggatggtgccacactggcgcctaatcacccgtttaacaagcagaaattaaatgttgctcagcacatgtgtctttcagctcttccttttcacccatggatgatcattgcgagcatgcgctgattggactgaaatgccagggaataggttaggcatgctcagtgccgtccctttgccaccacagtcaaatgacatgcttcactgtggtaccttaatacctgaaatagaaccatggaaaattctgatgtcctctctctgaattatgtacagactacctgggggatcctcttctctccaaatgttagccatcctgaagtagccgaacagtagaaactttggtggggattaaccgggagcttgaaaatttgtctttggtaacctgatactggacagctgaactgaatggctgcaaaataaatacctcacatgatgtctgtgtctgcaaaaaaaaaaaaaaaaaaaaaa

SEQ ID NO: 4780 - DNA, 8537 bp, Homo Sapiens
  NM_018984
aggaggccccgggcccggcccgggcggcggtggcggtggcggctctagctcgagacgtctgtggcgccctcgcaccgcgccgcagccatggccctggtgaccctgcagcgctcgcccacgcccagcgccgcctcctcctcggccagcaacagcgagttggaggctggcagcgaagaagatcgaaaattaaacctcagcttaagtgagagctttttcatggtgaaaggcgcagccctcttcttacaacagggaagcagccctcaaggccagcggagtcttcagcacccccacaagcatgcaggtgatctgcctcaacatcttcaggtgatgatcaaccttctgcgttgcgaagacagaatcaagctggcagtgcgcctggagagcgcctgggcggaccgggtccggtacatggtggtggtgtacagcagcgggcgccaggacaccgaggagaatatcttgctgggagtggacttttccagtaaggaaagtaaaagctgcaccattgggatggttctccgactgtggagcgacacgaaaatccaccttgatggagatggtgggttcagcgtgagcacagcaggaaggatgcacatatttaagcctgtgtctgtccaggccatgtggtctgccctgcaggtgcttcacaaggcctgcgaagtggcccggaggcacaactacttccccgggggtgtagctctcatctgggctacctactatgagagctgcatcagctccgagcagagctgcatcaacgagtggaacgccatgcaggacctggagtctacgcggcccgactcccccgcgctatttgtggacaagcccactgaaggggaaaggaccgagcgcctcatcaaagccaagctccgaagcatcatgatgagccaggatctagaaaatgtgacttccaaagagattcgtaatgaattagagaaacagatgaattgtaacttgaaggaactcaaggaatttatagacaatgagatgctacttatcttgggacagatggacaagccctcccttatcttcgatcatctttatctcggctctgaatggaatgcatccaatctggaggaactgcagggctcaggggttgattacattttaaatgttaccagagaaatcgataatttttttcctggcttatttgcatatcataacatccgagtctacgatgaagagaccacagacctcctcgcccactggaatgaagcgtatcattttataaacaaagcgaagaggaaccattccaagtgcctggtgcattgcaaaatgggcgtgagtcgctcggcctccacagtcatagcctatgcaatgaaggaattcggctggcctctggaaaaagcatataactatgtaaagcagaagcgcagcatcacgcgccccaacgcgggctttatgaggcagctgtctgagtatgaaggcatcttggatgcaagcaaacagcggcacaacaagctgtggcgtcagcagacagacagcagcctccagcagcctgtggatgaccctgcaggacctggcgacttcttgccagagaccccagatggcaccccggaaagccagctgcccttcttggatgatgccgcccagcccggcttagggccccccctcccctgctgtttccggcgactctcagacccccttctgccttcccctgaggatgaaactggcagcttggtccacctggaggatccggagagggaggctctgttggaggaagctgctccacctgcagaggtgcacaggccggccagacagccccagcaaggttccggactctgtgagaaggatgtgaagaagaaactagagtttgggagtcccaaaggtcggagcggctccttgctgcaggtggaggagacggaaagggaggagggcctgggagcagggaggtgggggcagcttccaacccagctcgatcaaaacctgctcaactcggagaacctaaacaacaacagcaagaggagctgtcccaacggcatggaggatgatgctatatttgggatccttaacaaagtgaagccttcctataaatcctgtgccgactgcatgtaccctacagccagcggggctcctgaggcctccagggagcgatgtgaggaccccaatgctcccgccatctgcacccagccagccttcctaccccacatcacgtcctcccctgtggcccacttggccagcaggtcccgtgttccggagaagccagcctctggcccaaccgaacctcccccgttcctaccaccagcaggctccaggagggcagacaccagtggccctggggctggagctgccctagagccaccagccagccttttggaaccttccagagagaccccaaaagtcctgccaaagtccctccttttgaagaattctcactgtgataagaaccctcccagcacagaagtggtaataaaggaagaatcgtcacccaagaaagatatgaagccagccaaggacctgaggcttctgttcagtaatgaatctgagaagccgacaaccaacagctacctgatgcagcaccaggagtccatcattcagctgcagaaggcaggcttggtccgcaagcacaccaaagagctagagcggctgaagagcgtgcctgcagacccagcacctccctccagggatggccctgccagcaggctggaggccagcatccccgaggagagccaggatccagccgcgctccacgagctgggccccctggttatgcccagccaggccgggagtgatgagaagtcagaggccgcccccgcttcattggaaggaggctcactgaagagcccccctcctttcttctaccgcctggaccacaccagtagtttctcaaaagactttctgaagaccatctgctacacccccacctcctcttccatgagctccaacctgacccggagctccagcagcgatagcatccacagtgtccgtgggaagcccgggctggtgaagcagcggacacaggagattgagacccggctccggctggcgggcctcaccgtctcttccccactgaagcgctcacactctcttgccaagctggggagtctcaccttctcaacggaagacctgtccagtgaggctgacccgtccaccgtcgctgactcccaggacaccactttgagtgaatcttccttcttgcatgagccccagggaaccccgagggacccagctgcaacctccaaaccatcagggaaacccgccccagaaaacttaaagagcccttcgtggatgagcaaaagctgacccgccttttgctgcgtcaggctgggcggatattttcatatgatccctccctcactttcactgtggatttggatcgaccccttacatcttgatttcccttaaacgagtgaagtcatcctaacttttcccctactcttgccatagagaggaggagaagaaactaaccaacatgcagcacaagaaggggagctgtcagtcgtgtggcctgggagaaccaggagccgccggccaggagacacaaaactccgctcccaccgtgtcttcaagaagaaccatgttttaggaagaacgtgcacacataggcgcacacatccagactgttcccttcgcatcctgcagaagagtcctggtggtggcagcctcaccgcggcacacgttctagctcattcttggcctcgcagaaaactctcggatggcaacattaagtcctacctctgttctcgctgcgctttttatttttaaaacacacgaatgaccaaggcttgttccagggaataatgctctgtctgaaagcgtttttccaaaaaaagaatttttcgttttgtgttttggttgggaccccagacgtgtcaagacttttaacccgacagccccaagcactgctgagtaaagtcatcagatgagtagtcccacgctgttgttgagctgactctgtgcccgaatggtggtgcaggcgccctgtcctggttgtgttgttacgtgtttgaccagcacaggggtccggtggggaaaatgtatgggttgttctcagttgttgctaatgctgaagtttaaatctcaaggggaagggcccacctgcattgttgagtgtctgctgctgaaacacatgattgtgtttaggtttgaaattgctcaagtgtctggctcaggtggtggttctgagacacatcgtcctgctgagagcccagatgcttaggtccactagggcccatctagggaagggaaaggagatttcagcggcttccccgaaaggaacgggactgtcgggatgcttcccggatgtctacagttgccccttcctgcagtgagattactgcttcctgtttccctccagctcttcccagcagcagtgagggagtataagagggatctgtagtcgctgcctggctctgtgggcggcccctttaagactcaggtgagctcagccagtcccgctgcgccaggcttgaatcaaaggtgtcagcaagctagatgtcaaaacatttcgagagagaggcagcttgcagaaaagcagaaaggttgaattcaggggtcagcaaactatggcatgtggccccgtgagctaggaatggtttttcctctttaagacagggcctggctctgtcacctaggctggagtacagtagtgcaatcatgactcactgcagcatcaacctccctggctcaagcgatggcttttacctttttaaggagttgtaaaaaaaagaaataatatgtgacagaattcatgtggcccacaaagcctgaggtacttactgtcaggccctttgtagaaaaagttgctgacccctggtttgatttgccacacagggctgctcatggccctgtaggaagaaactgggtaaatgtgaagccctctgcctctctgacacctaaggccagacccttccctcctcccgaccacaagctttgccagccccgcactagcctcacctgtgcaggatggagtaggttgcgtacatgggggaaggcaggtgaacacagttggctgaagctcttccacaattccatcttgccctcagctgggtccgccagattaactcagtgaaaccagaaagccttcaaggaccagctgaattctgaaagtgagtgagtgagccatcatcttaacattggccagaactgtgttccccaaagctattctagaaagcaccccaggagggatctgcaggaacaaggctagttcatattttacctagtgagcacagtttttgcaaaaatcctccctccaggactttgtctccttggagtgatttttaaaaatacatacattactttatagggagctgttttcccactagtgtcaattaaaatcaccttaaaaggtgattatccacttattcctaaacccctgtgggttgttccccctttccctcagccaacaaaagcatagcctcaaaaaatatcaagttcggtatgttttgccaaatcaaatttcatgtggtagatcaatttttgtgtcaaaataatcttttaaatttagtgatgacaggcttttgttggttttttaaccacgtctatgtatgagaatgatatatttttgaaaactttaattttgaaagccataatttttcttatctaaagagttggggggtggggtgtggaatctggagagtacaagttggtctttggcttctggcaaacttacccattcatttttggaagcacagctagcatatcaacatccagacgagagcgctggtcccgtccacagagcagagtgaagcattctggacttgatgcttaatagcctggcctggagaaaagggtaaggtttatttttggaaacccagatcagttgcatgtaaacagatggcacatggctatttaaaatgctgtatgatggggccgggcgcggtggctcacgcctgtaatcctagcactttgggaggccgaggcaggcggatcatctgaggtcaggagttctagaccagcctggccaacatggtgaaaccccgtctctactaaaaatacaaaaacttagctgggtgtggtagtgcgtgcctgtaatcctagctacttaggaggctgaggcaggagaatcgcttgaacctgggtggcggaggttgcaatgagccgagatcgcgccactgcactccagcctgggtgcaatgaaactgggagtgaaactccgtctcaaaaaaataaaatgctgtatgaacaagatgagcattctgtcaggtgtcgggacacctgggcaaagacgaattcatgctgtctgtgaaaaggaagtttgcactgtaacatatgccatagcttggcccttgctttgtatgcaaccttagctgatggggaaaattccaaacataagtggcacaggaaagaggcaggcagaggaggcaggggtctgtgctgtgcaagtcactggttttttatgactatcattttcattgaatgcatttgttgaattgggacaaaaggaacattttctaaatcagcttgatactctttataaaaaacagctgaatcttatcttctgcctcacattaattcatgtggcatgccaaaagttagactgaacttttctacatcttcaccttgcattgatacaggaaagtcttctctttaagtcttgctaagtataagggggatagtggtcacgggaagaggagaaccggggctgctctcggatggtaattgacaatgccgatttccatttctttgtcttacggctacttccgagccttctagcaaggtccctggttgcatgtatttcctaagagcagagtttatttctctttacattccctgcttccttgctctccatgcagggaccccagccaacctctgggctgttgaatagctctctgctgggtggcaagcccttctccttggcaccctgttgcttaagcatacagattgctcaccaggtgcacacagacagctgtactgtccaagcccattctgctccaccctgtcctcttcagctaaagagcattccagtaatctaaagcccttttcccctggagaagtccagagtttgcagcagtgtggagctgagcttgaacagaacagaccctcagcacggccctggactaatgcactcttatctgagggcagtccattctagaaggttgatgaatttccctaccactctcctggggaccttttctctctagtgggaacaaatgctacataatttagtcaagatcctattaagtcatctcacctgaggcatctggagagggagttgccttccattggtgggaaattgttggtgccagaatacattttgcccaaaactcttctcattggctggccacctagcagggctcctctaaacacgcaactcagcgaggggacccccttcacctctggcaagagagctgggtagatcagaaacttggtgacacctggctagcacagagcaggctcacttgtcttggtcccactacccagattcctgcagacattgcaaaccaaatgaaggttgttgaatgacccctgtccccagccacttgttttgttatcatctgctctgcagtggaatgcctgtgtgtttgagttcactctgcatctgtatatttgagtatagaaaccgagtcaagtgatcatgtgcatccagacacactgtgtcacctgagccacagagcaaatcaccttaacgatctggaatgaaactgtgaccagtgccgccctgggtggttctggagagactgccgtcttcttgtttggccataggtgctggggccccggcttcagtcactgtctcagacaggagtcccgataagcagatcaccagtcctccactgtccttcctgtcggccttgctgcatgagaagatagctgcttcctccctcttttcctacactgtaattattgttttacaattgagtgccttaataatagtttacaaatactatgtatttatgcaaaactgttaaagtctcatctgttatgattggatacttggtcttgtcagtagtggtcagcattgggttgtgagcttgtcctactccatacgtgtttatcctgctatgcagttttacattgtgtgttcacatctattccaaggagccttgctagaaacaacactggcggttcctgcaggccaggcaggcattggcccatgctgtgtcccataggagccaatgaaagaacgtagcttggtctgctagccagccgtggggtggcgcaggccaggcagcctctgcaccagagtccagcacctgcccattccccagtcacacaatcatactcttctttcatagagattttattaccacctagaccaccctagttttcctctctgttagtgtcctgagctcttttgcaacaaaatgtaggtacagaccaatccctgtcccttccccaatcaggagctccacaccatgagttgtttggttttccagaagctgccagtgggttcccgtgaattgcgttaagatatcgatgattttttttattgtttttcttcttgtttttttaaataatatatttaaaggcagtatcttttgtactgtgaatttgcagtagaagatgcagaatgcactttttttttacttctgttggtgtgtattgtatatagtgtgtgtgcttcttgtgatgaaaataaactttttctttataaattcctgaaa

SEQ ID NO: 4781 - DNA, 1826 bp, Homo Sapiens
  NM_018991
ttttttttccgaacgcccgcagcagggtcagaagggaggtggtcgccctccgtcgtggtctggcgtgtattccgagccttggtgtctggcggtttccgagcgttggtgtctggcggtttccgagcgttggtgtctggcggtttccgaccgttggtgtctggcggtttccgaccgttggtgtctggcacgcgccaccctctcttgctttggttgcgccatgccgatgtaccagacaagaagacaagaaaatgatttgaggacagcttcaatcgcggtgtgaagaagaaagcagcaaaacgaccactgaaaacaacgccggtggcaaaatatccaaagaaagggtcccaagcggtacatcgtcatagccggaaacagtcagagccaccagccaatgatcttttcaatgctgcgaaagctgccaaaagtgacatgcagggatgtccttcctgagatccgtgctatctgcattgaggaaattgggtgttggatgcaaagctacagcacgtctttcctcaccgacagctatttaaaatatattggttggactctgcatgataagcaccgagaagtccgcgtgaagtgcgtgaaggctctgaaagggctgtacggtaaccgggacctgaccgcacgcctggagctcttcactggccgcttcaaggactggatggtttccatgatcgtggacagagagtacagtgtggcagtggaggccgtcagattactgatacttatccttaaacttttctaccctgagtgcgagataagaacgatgggtggaagagagcaacgccagagcccaggtgcccagaggactttcttccagcttctgctgtccttctttgtggagagcaagctccacgaccacgctgcttacttagtagacaacctgtgggactgtgcagggactcagctgaaggactgggagggtctgacaagcctgctgctggagaaggaccagagcacgtgccacatggagccagggccagggaccttccacctcctagggtgaaaccaggagagattgcttgcttcacttgtacaaggcaggaacggtggcatggggtgggggaaacttggagttggaaggtggctaatctttgattctatgtttttgatcctcctggcactccagacctgggtgatgtgcaggagagcacactgatagaaatccttgtgtccagtgcccagcaactcctgcctcagcctcccgagcagctgggactacaggcgcccgccaccacgcctggctaacttttttgtatttttagtagagacgggttttcaccgtgttggccaggatggtcttgatctcttgaccttgtgatccacctgcctcatcatcccaaagtgctgggattacaggcgtgagccactgcgcccagcatgttagacaatttttaattcatcctctctgtgctgttgttttctcagctgtgaaaggaatattctggtggggacaaggttacagagttgctgagagggtctcatgacatgaaggtactggccttggcacagtgcctgggggggcggggactccgcacatgcctgtgatgtcacagttactgtcagttcacagtgaaccttccctccttttcctgttgactttcccacactcctgtaaccctccctccctcccttcttcctctctctctctctcactcacgcacacgcacacacacacacacacacacacacacacactccattcactgtctccatgactctggagtaaactaacgtctcgagttgccattggaagccccattgtcctcattttgttttgttttgtttgtttgagacggggtctcgctctgtcccccaggctg

SEQ ID NO: 4782 - DNA, 2479 bp, Homo Sapiens
  NM_018992
attaaaagccggacgcttccggtggaagggagctgttgcggggcttgctgggatcatggcggagaatcactgcgagctcctgtcgccggcccggggcggcatcggggcggggctggggggcggcctgtgccgccgctgcagcgctgggctcggcgccctggcccagcgccctggcagcgtgtccaagtgggtccgactcaacgtcggcggcacctacttcctcaccactcggcagaccctgtgccgggacccgaaatccttcctgtaccgcttatgccaggccgatcccgacctggactcagacaaggatgaaacaggcgcctatttaatcgacagagaccccacctactttgggcctgtgctgaactacctgagacacggcaagctggtgattaacaaagacctcgcggaggaaggagtgttggaggaagcagaattttacaatatcacctcattaataaaacttgtaaaggacaaaattagagaacgagacagcaaaacatcgcaggtgcctgtgaagcatgtgtaccgtgtgctgcagtgccaggaggaggagctcacgcagatggtgtccaccatgtccgacggctggaagttcgagcagttggtcagcatcggctcctcttacaactatgggaacgaagaccaagccgagttcctctgtgtggtgtccaaggagctgcacaacaccccgtacggtacggccagcgagcccagcgagaaggccaagattttgcaagaacgaggctcaaggatgtgagggacacagtattgacagctgaagaaatgatttacgttttcccgagatgtaatgaactgccatgtccaggaagcttggctgtgagaagaaacctgcttttgatcatttttctagagatctgggtgtgaatccttttttgcctctgaggtgggtggtgagagacgggcccagctgtccaaggccagacgtccccaagttgggggagcacggcggccgggtgggcgctgcctcttgggggggcctcgctctgttttttccaagtgccacgtgggactgaggcagacactcccagtcagcccgctcgatcctgaagatcgtgtgaaggaagcgttcttggtgctacacacagtctggaaaagcagcctgggcttcactggcaggaagcggccgcagccgcgtcagtgtccagcacgtcgtggcctctggtccgaccaccaggccctagtctcggtcagggagtctgctctgcctcccaggcgggatcgctggtttctctcgacctcgcagagctcctgacaaaggcggcttctgcgtcgtcactgcttcccggcgccattccgaggccgggccttcttctgacacgggctccaaccccacctgaccaagcccgggacagtcaaggcttctcaatttgtattttccaggcaagagaactttgtaccccttctctgtgtggatagactccccagcgtttttcctctggaaatgcccacagggcttgccgcgtggagactgatctgttccatccgttagcgcgaggtagcagtgtcgcctcgcccctcccactgcgggctcacggggagctggcgtctgtcagtgccttgtcacgcctggcatagaggttgggctggaggcctgtccactggcttctggagctgaaggtctgcgtcacggtgaaaattcgggatgtttacagagcatcacaaatgcctctctctcgccgctctctcattttctttgtataactatgcagccttccctctctttctgggatgtttgggacttcactcgacctgcacgggctctgcccgacatgccgtgggagctgctgggattcctttagaaaccgctgcccgcatgctttgaaaacagacctttctcagctggctgtggggacctgtcagagtctggggactcggcgtgcagggcgggctccaagcgctttgcttccggaactccggcttcccaaggggtactgtgcagactgaccaccggcctcccgcctgcaggtcagaggctctgacactgtctggtttccaatgcttctggagacttcctgcctaggcctcatcctcctctttgccagtcacctgattaaccaattctccagcattaggacttacctccttctttttgtaaggtctcttgtatgttgttaaatgtttggcttaaacaatttataaaagcctttctagaaggcagacttagccccagcagagcctgggaggaaggcggccgctggggctcctgggcatcctctctggggagctgctggccgcttagcgttgtttgatttttgaccttgacatagtagataggcttgtggtttttttaatttaaagatattaagacttaattcactaaaatttattctaaggggatatttatacttttatacttttttaggtatcgtattttatcagcttacagtttaatgcctaagtttcccctggaaatagcaaataaaattgtgtatttatgaaaaaaaaaaaaaaaaaa

SEQ ID NO: 4783 - DNA, 945 bp, Homo Sapiens
  NM_018997
gcttccggtagtgagaacccttccggtgggctaggtactgagcgcgcgaggtgaggagttgtgcagggtttggggaaaggaaggctggcttggcgagagggcaggtttgcgggctttcgcccccttttccaaagaccaacaaagagtccttccccaactcccaactcaaccccttttggaactatgtgtggtggttgggaccctgtggcgcatccttgtcgctcgtgtccttctcatgcccggcgacgcgtctttgtggtaacgccctgctgccatctcttttcttctctatgcgaggatttggactggcagtgagaataagagacaacgattcacgtctactttctaggatgacttccatgtgctccatctcgcgcgtccctgagcatgttgaatttccaaatcctaaataagccgcgcggtgtagtttgtattatgttgcgtttctctttctgctttcctcgccctttctccatcatcctttaggctctacagagtgaaggtttaaatccaaggtcatggcaaaacatctgaagttcatcgccaggactgtgatggtacaggaagggaacgtggaaagcgcatacaggaccctaaacagaatcctcactatggatgggctcattgaggacattaagcatcggcggtattatgagaagccatgccgccggcgacagagggaaagctatgaaaggtgccggcggatctacaacatggaaatggctcgcaagatcaacttcttgatgcgaaagaatcgggcagatccgtggcagggctgctgaggcctgtgggtgggacacccagtgcgaaaccctcatccagttttctctccatctcttttctttgtacaatcccatttcctattaccattctctgcaataaactcaaatcacatgtctgcaagaaggcctccaaatatagaaacaatcccattagtcaaaaaaa

SEQ ID NO: 4784 - DNA, 7676 bp, Homo Sapiens
  NM_018999
gccgcggacgcgatgctggttgctgcggctcgggcggcggggctggcggggatgtgacgggcggcccttcgtctcaccttccgtcctcgggcccgcaggtcgcagggcggcctgcagctgggccgcggccgaggaggcagcgcgacctccgcacgattctttcaacttttaagaacaaatgcaccttatagctcatggaagaaaaaacacaaatcaagacatttttgggttccaagttgccaaagtatggaacaaaatctgtaagaagtacattgcagccaatgccaaatgggacacctgttaatttattaggaacttccaagaatagtaatgtcaaaagttacatcaaaaataatggctctgattgtccatcatctcattcatttaattggaggaaagcaaataaatatcagctttgtgcacaaggtgtcgaagagcctaacaatactcaaaattcacatgataaaataattgatcctgaaaaacgtgttcctactcaaggaatgtttgataaaaatgggataaagggaggtttgaaaagtgtttctttattcacatcaaagttagcaaagccatccactatgtttgtgtcatctacagaggagttaaaccaaaagtctttttctggaccatctaatttgggtaaattcaccaaaggcacattattaggaaggacttcatattcttcgatcaatactccaaaatcacagttgaatggattttatggaaaccgatcagctggtagcatgcaaaggcctagagcgaactcctgtgccaccagaagcagttctggagaaagcttagctcaatccccagacagtagtaaatctattaattgtgaaaaaatggtaaggtcacaaagtttttcacattccattcagaattcattccttccaccttcatctataaccagatcacattcctttaatagagctgtggatcttacaaagccttatcagaaccaacagctatccattagagtgcctctacggtcaagtatgctaacaagaaattcccggcagccagaagtactcaatgggaatgaacatttggggtatggatttaataggccttatgctgctggtggaaagaagttggctttaccaaatggcccaggtgtaacttctactttaggttatagaatggttcatccctctctactgaaatctagccgatctccattttctgggactatgacagttgatggaaataaaaattcacctgctgacacatgtgtagaggaagatgctacagttttggctaaggacagagctgctaataaggaccaagaactgattgaaaatgaaagttatagaacaaaaaacaaccagaccatgaaacatgatgctaaaatgagatacctgagtgatgatgtggatgacatttccttgtcgtctttgtcatcttctgataagaatgatttaagtgaagactttagtgatgattttatagatatagaagactccaacagaactagaataactccagaggaaatgtctctcaaagaagagaaacatgaaaatgggccaccacaggatatgtttgattcccccaaggaaaatgaaaaagccttcagtaaaactgatgaatggatagatataagtgtctctgacaggagtgaatgtacaaaacatacttctgggaataatttggtttcaccagatacagactacagagctggttcttcgtttgaactctctccatctgatagctctgatggaacatacatgtgggatgaagaaggcttggaacccattggaaatgtccatccagttgggagctatgagtcctctgaaatgaacagcatagatattttgaataatcttgaatcatgtgaccttgaggatgatgatcttatgcttgatgtggatctgcctgaggatgcacctcttgaaaatgtggagtgtgacaatatgaaccgctttgaccgaccagacagaaatgttcggcagcctcaggaaggtttttggaaaaggccaccccagaggtggagtggacaggagcattaccacctcagccaccctgaccactatcatcaccatggaaaaagtgacttgagcagaggctctccctatagagaatctcctttgggtcattttgaaagctatggagggatgccctttttccaggctcagaagatgtttgttgatgtaccagaaaatacagtgatactggatgagatgacccttcggcacatggttcaggattgcactgctgtaaaaactcagttactcaaactgaaacgtctcctgcatcagcatgatggaagtggttcattgcatgatattcaactgtcattgccatccagtccagaaccagaagatggtgataaagtatataagaatgaagatttattaaatgaaataaaacaacttaaagacgaaataaagaaaaaagatgaaaagatccaactattagaacttcagcttgcaactcagcatatctgccaccaaaaatgtaaagaggaaaaatgcacttatgctgataaatatacccaaacaccctggagacgaattcctggtgggtattctgctccctccttctctccttggcagggctccttccaggggatcccacggactgttccaccgcaccgcagacagacctcaagtactacagccttccagcagccttcccagacccacagatcacacccagggaaaactaataaagccacaacgtatcgaggcccgcagtgaatgctcaatccaagacatgcatcagggcggtgcacatccggaagaaagctttacacacgtcttgcaccaagaaagcaactatggtttggaagagcagcctttttcatcaggcccacaattaacaatggatgtggctaagagtacaccttctgaagcaaacttaaacattactgtaaatgctcaagagccttatcatttggcaaacaatcaaattagtgacatgcagtttatacccacttctcttcagacacctcccgagtcaagtacagtagaccaggctaagagagttggaagaaatcagtctccgccagtgggttatatgtctcagcccaagtccttgcagcttttaaagccatccatattgagttctttggtaccgcctccagtttctgaatcatctccaagtaggactcccacttgtaaaaagtcaccaataatcacaacatgtaattcagcaaaacttcagccaacatctagtcaaacaaatcttgcaaataatcagaatctgaaagcatctaagctccgccccccctcaggctctttcaaacaaaaacaaacaaacagcccccaactagagcctcaaagcttccaggccaagacaagcatcccaaggccactaacacaacgaaaagaaatcatgcagaatccaaatggcaatttgcattctggggattgtttggcctctaatcgatattctcgtcttcctaaaccaaagatacattaagtacatagccatcacctgccaatttgtttcttaaaaacaatctcttctgtaatagctttatgtgcagcttgcagcttgctactgtggtggaggttccattgaaagcctgcaaatcttaaattaaaatgtggaagcttctactagtttggctccttcattttatatcctggttgaagtacatgccatttgagcataattatctcaggtaaacacgaaagtttgcttacccatttcagaggcctgccaaaggcccaaatcatgttatccatccctctccacgtcagaaaattcataatattttactgagcaggcaagaagtgtgctttgctggtttagtcctattaaggtctgtatttattgtggttgtcagaacctcaccccttttcacttgtctctcctgtgaatatggctactattttaactaaagatatggtgataatggaagatggtagtctgtaagcagagttctggccagtgttttgtatatttaaaaggtctatgcaaaagctttgtgatgaataaaggagattaggcttttaatggaaagtctatgtaagttttatttttccttgccagggtcagtcagctaatgttactgttgattcatttcccaaattccccagactgaaagtgtttcttattacatataaatcagttatatattcctttacatcttgttttacaaacacatgtgcatgcacacacacatatacacacacataccatttatgtttgtatttgttactgggtaaattttggagcgcttgagatacaccttgaaacctgtacctaaagatgtattcatttgtaacatatgttggtgctagagttttgctggtaattcaggcttgaacccttaggcttgtggatccatgatagccattttaaggttccacagcattatgtctttaattgtaatatttatatttattgattttctgctaatatctgaagactgaaataatgaacttgaaacatttgcacaaaactttgatggggtataaatataccatatatagggattgtaaactattttctatagcaaaacaagttaaaatattttgagaaaaataacaaatttaaataagactatcttgagaaagctggagttcataatattctccccctcccccatctccagtctcctaggtttcccttttctgtgttttttgtttttttctgtttgttttttgagacagagtcttgctccattgcccaggctggattacagtggcgcaatctcggctcactgcaacttctgcctcccgggttcaagcgattctcctgcctcagcctcctgagtagctgggactacaggcatgtgccaccatgcctggctaatttttttgtatttttagtagagatgagatttcaccttgttggtcaggctggtctcgaactcctgacctcaagtgatccacccacctcgtctatggtgtatttttgaaagacaattttttaaaggtagatttgggaaaaaaatagaattgaagatgggaaattttgttttattaaaaaggtgctagaagatgtttcaaagacaatattcttattttaatacgctgtagaaggtaggtgtggaacctccatgctaccatgtgcacaaacctaattatgctttgggtcacttgtcagttcagtaaatctgccttcctcttctcccaaatcatgtcatctttaggttgttcacctgcagctgctttaaatgaattagtatctttcagatagataaccttacaaggagaatgtttgttttgagcagctgaccaaaaatatatcaaacaggattatggccaaaaagtcactcaaatttctagagattcctttaaaagatgtatgttgatgaaattgcccctttataagaaaaacaacagcaagtcttttagtagaaatttgaaagaagtgtttgctaccattttgacccattattcccttacctatcagatgaatttgccattcactggatagaaaccattcttggatttggtaagaggtgagcaagacaaatcttgtaccatactcttatgtaccagcacttctgatggagaagcagtgaagttcagaacgttcttcacatagtccagatactgttagagtcaggcaaatcagcaaagcactttgttatggagatgacccatgatggctgcagttgtaagtgggcatacatgttctatcattttgaaggagaaagaaaaccgttctcacatgttgcaaatatgtgaatcatactatattcccctaaagtaaaaccagtgacttagtggtttttggtttatttagaagttggtttagacccttatgaaacattatttacgagttggccttatccttaagggaaaagttctaaatttttaaatttatttttaattccctagtctgagggaaatgtctttattgtccattacataaaaatgttgactccagtaatttatttttctctattttttcctccatgtatttactccatttttctctattttttccttccctgatggatttgcagaaatgttaaccaattagctcaacttttctctacctttgttgagtcttaatcttttagaagataggcttatcgtatatttatgaagcataatatattaaaagaaaacaaatctaggatgcttgcatgacataaagtatttgcctgcagttttcattaaaaactgcaagaatatcatgcttgtctgcttcttagtaaatgttaagtctgaaatggaagtgaggatgtaactctactgaataatcaaagatcatcttagatttggcttgatctgtgtttattgcttctattaatgtaaatcaactctgtgccaaatcctcctccacaaaccatttattgtcttagttctagtggtatcaatgaagatagttacagtatatgaattctaagtcctgaggaagaaattttatggggtttgttaagtttcacattcgtgaaagaggaaattagtagagtattcagactttgatatttggctgttaatgggatgcatatcaaatttttaaaagaaggcttggcctaaggagtttattggtacaggtgcagatgattttaaggcattaaaggattatagagttatgtcatttagactgtttctaataactgagaccatctaacatttttcttttggagtctcatttttatttgtgcaatattttcaggcatataggctactgttcattgtatttatatatatattagaatttactaagtactttaacaagtaaaaatctgaatatgaaagaaaatatcagatttgcactttaaatgagcttaattgcttgaagttgtgcctgaaatatcgaattgcctcctattgggtgtggctttgttgaaataaatttgtaattgttgctgtttgaagatatcagtacagctgttcacagaaatatattcccagcatgtcacttttccattaaagcactaagttttctttgaatgttccattgttccgataagtattttacttttttctcagtacatcagagagagcgtgatccccctacagctgtcacttccaaatgttcctgtagcataaatggtgttacagacactgaggtgcactcttggtttctgagcagagttgtcatactggtttcctggtctctagggcactggggatgtactttgaaatcaccgaacaggcttgcaattaagatcaataaggctgcagcaccatttcaatttactttccatcttacccagtagtttttgtgtttttaaattcgtttgggtggttatgtttgcatgcttaagcacacatttgaaaattaattatagctgtactacccgatgtttttccttggggatgatggccttgttcctttttaaattctgatgcttgaattctattttctagtgatttttcacatctccctttaagtttttgctgcagcaatttgagagagtacttttgattaaatgattctgatggtgggcaccaatctacaactatgtcattaactgaagatacatgttttaatcttgttgggaataagcttacccactttctccttggtaaagcgtttacttaacaaaataatacccgagaatgtaaggtctctaagtcattactaacaaagagcaaaaataatatctgcagtattgtttttcccattgattttaagtcagtttagagtacaaactgtatattagaatttgcctgtaaaatgaattctaaaaagcagatgtaaagtctctcctgaaaatgttggcatagtaaataaaaataaagttcataattataaaagtt

SEQ ID NO: 4785 - DNA, 10092 bp, Homo Sapiens
  NM_019001
cggcggagccccggcggggcgtttggtttcggtttggccctgactgggattagtgttgacgatcgaaatgggagtccccaagttttacagatggatctcagagcggtatccctgtctcagcgaagtggtgaaagagcatcagattcctgaatttgacaacttgtacctggatatgaatggaattatacatcagtgctcccatcctaatgatgatgatgttcactttagaatttcagatgataaaatctttactgatatttttcactacctggaggtgttgtttcgcattattaaacccaggaaagtgttctttatggctgtagatggtgtggctcctcgagcaaaaatgaaccagcagcgtgggaggcgttttaggtcagcaaaggaggcagaagacaaaattaaaaaggcaatagagaagggagaaactcttcctacagaggccagatttgattccaactgtatcacaccaggaactgaatttatggccaggttacatgaacatctgaagtattttgtaaatatgaaaatttccacagacaagtcatggcaaggagttaccatctacttctcaggccatgagactcctggagaaggagagcataaaatcatggaatttatcagatccgagaaagcaaagccagatcatgatccaaacaccagacactgtctttatggtttagatgctgacttgattatgcttggattaacaagtcatgaggcacatttttctctcttaagagaagaagttcgatttggtggcaaaaaaacacaacgggtatgtgctccagaagaaactacatttcaccttctacacttgtctttaatgagagagtatattgactatgagttttcagtattaaaagaaaagatcacatttaaatatgatattgaaaggataatagatgattggattttgatggggtttcttgttggtaatgattttatccctcatctacctcatttacatattaatcatgatgcactgcctcttctttatggaacatatgttaccatcctgccagaacttgggggttatattaatgaaagtgggcacctcaacttacctcgatttgagaaataccttgtgaaactatcagattttgatcgggagcacttcagtgaagtttttgtggacctaaaatggtttgaaagcaaagttggtaacaagtacctcaatgaagcagcaggtgtcgcagcagaagaagccaggaactacaaggaaaagaaaaagttaaagggccaggaaaattctctgtgttggactgctttagacaaaaatgaaggcgaaatgataacttctaaggataatttagaagatgagactgaagatgatgacctatttgaaactgagtttagacaatataaaagaacatattacatgacgaagatgggggttgacgtagtatctgatgactttctggctgatcaagctgcatgttatgttcaggcaatacagtggattttgcactattactatcatggagttcagtcctggagctggtattatccttatcattatgcacctttcctgtctgatatacacaacatcagtacactcaaaatccattttgaactaggaaaaccttttaagccatttgaacagcttcttgctgtacttccagcagccagcaaaaatttacttcctgcatgctaccagcatttgatgaccaatgaagactcaccaattatagaatattacccacctgattttaaaactgacctaaatgggaaacaacaggaatgggaagctgtggtgttaatcccttttattgatgagaagcgattattggaagccatggagacatgtaaccactccctcaaaaaggaagagaggaaaagaaaccaacatagtgagtgcctaatgtgctggtatgatagagacacagagtttatctatccttctccatggccagaaaagttccctgccatagaacgatgttgtacaaggtataaaataatatccttagatgcttggcgtgtagacataaacaaaaacaaaataaccagaattgaccagaaagcattatatttctgtggatttcctactctgaaacacatcagacacaaattttttttgaagaaaagtggtgttcaagtattccagcaaagcagtcgtggagaaaacatgatgttggaaatcttagtggatgcagaatcagatgaacttaccgtagaaaatgtagcttcatcagtgcttggaaaatctgtctttgttaattggcctcaccttgaggaagctagagtcgtggctgtatcagatggagaaactaagttttacttggaagaacctccaggaacacagaagctttattcaggaagaactgccccaccatctaaagtggttcatcttggagataaagaacaatctaactgggcaaaagaagtacaaggaatttcagaacactacctgagaagaaaaggaataataataaatgaaacatctgcagttgtgtatgctcagttactcacaggtcgtaaatatcaaataaatcaaaatggtgaagttcgtctagagaaacagtggtcaaaacaagttgttccttttgtttatcaaactattgtcaaggacatccgagctttcgactcccgtttctccaatatcaaaacattggatgatttgtttcctctgagaagtatggtctttatgctgggaactccctattatggctgcactggagaagttcaggattcaggtgatgtgattacagaaggtaggattcgtgtgattttcagcattccatgtgaacccaatcttgatgctttaatacagaaccagcataaatattctataaagtacaacccaggatatgtgttggccagtcgccttggagtgagtggataccttgtttcaaggtttacaggaagtatttttattggaagaggatctaggagaaaccctcatggagaccataaagcaaatgtgggtttaaatctcaaattcaacaagaaaaatgaggaggtacctggatatactaagaaagttggaagtgaatggatgtattcatctgcagcagaacaacttctggcagagtacttagagagagctccagaactatttagttatatagccaaaaatagccaagaggatgtgttctatgaagatgacatttggcctggagaaaatgagaatggtgctgaaaaagttcaagaaattattacttggctaaaaggacatcctgtcagtactttatctcgttcttcttgtgatttacaaattctggatgcagctattgttgagaaaattgaggaagaagtcgaaaagtgcaagcaaagaaagaataataagaaggtgcgagtaacagtgaaaccccatttgctatacagacctttagaacagcaacatggagtcattcctgatcgggatgcagaattttgtctttttgaccgtgttgtaaatgtgagagaaaacttctcagttccagttggccttcgaggcaccatcataggaataaaaggagctaatagagaagccgatgtactatttgaagtattatttgatgaagaatttcctggagggttaacaataagatgctcacctggtagaggttatcgactgccaacaagtgccttggtgaacctttctcatgggagtcgctctgaaactggaaatcagaagttgacagccatcgtaaaaccacaaccagctgtacatcaacatagctcaagttcatcagtttcctctgggcatttgggagccctcaaccattcccctcaatcactttttgttcctactcaagtacctactaaagatgatgatgaattctgcaacatttggcagtccttacagggatctggaaagatgcaatactttcagccaactatacaagagaagggtgcagttctacctcaagaaataagccaagtaaatcaacatcataaatctggctttaatgacaacagtgttaaatatcagcaaagaaaacatgaccctcacagaaaatttaaagaagagtgtaagagtcctaaagctgagtgttggtcccaaaaaatgtccaataagcagcctaactctggaattgagaactttttagcatctttgaatatctccaaagaaaatgaagtacagtcatctcatcatggggagcctccaagtgaagagcatttgtcaccacagtcatttgccatgggaacacggatgcttaaagaaattctaaaaattgatggctctaacactgtggaccataagaatgaaatcaaacagattgctaatgaaatccctgtttcctctaacagaagagatgaatatggattaccctctcagcctaaacaaaataagaaattagcatcttatatgaacaagcctcacagtgctaatgagtaccataatgttcagtctatggacaatatgtgttggcctgcccccagccagatccctcctgtatccacaccagtaactgaactttctcgaatttgttcccttgttggaatgccacaacctgatttctcctttcttaggatgccacagacaatgaccgtttgccaagtaaaattatctaatggcttactggtacatgggccacagtgccactctgaaaatgaagccaaagagaaagctgcactttttgctttacaacagttgggctccttaggcatgaatttccctttgccttcacaagtatttgcaaattatccttcagctgtaccacctggaaccattcctccagcctttcccccacctactggctgggatcactatggaagcaactatgcattgggggcagctaatataatgccttcgtcgtctcatctctttggctcaatgccatggggaccatcggtgccagttcctgggaagcccttccatcatactttatattctgggaccatgcccatggctgggggaataccagggggtgtgcacaatcagtttatacctctgcaggttactaaaaaaagggttgcaaacaaaaagaactttgagaataaggaagcccagagttctcaagccactccagttcagactagccagccagattcttccaacattgtcaaagtaagtccacgggagagctcatcagcttctttgaagtcctctccgattgctcaacctgcatcttcttttcaagttgaaactgcctctcaaggccatagtatatctcaccataagtcaacaccaatctcttcttcaagaagaaaatcaagaaaactggctgttaattttggtgtttctaaaccttctgagtaaatttggctcttagaattaagttaatttcttctctttccatctacctttttataaatacatatctatgtctcataaaaattagaatgtactattttaaaataatatgtgtaaattgaaatttttttcatttttaagttatcaggcacttttcatgctgtttaaaagactgtgtatcaaattgtgcactttaagtatgtgcagtttgttgtatgtcaattatacctcaataaatctgtaataaaaaactaaattaaaccttgcattaaaataatatcacagtatcagtggactaaacattaaaatgtaccactctaatcattggcctcatgattgaagcatcctgaactatgaattagacatcagttagcaataataagcattttttacactatcattgaggaataattacatggagcatgaaatttgggcctccagtataacttactgaatgtggattttatttctctttttaatgatgtaagaaaattgtcaggagaatggctcttatttatgtgtgttttaacttatgctttgttgcctctgagggtctttagacctgctgtgaaaggatcacatttgttgtggtgctgccagttttgctttattctaaattttgtaccaaagcaactttagaataatcagaatatttcatctaactgcttagaactataaatagcattctaaatttgagtaaatacaattttttaggttactcaagaaccagcattagtaatttctagtaaaattgtttcaaaatctacagggtacaatgattacaaattaatcttctaacaaaataaaatatgaaatattagtcatgttaattaataaactgtattattttgtatagctttttatttgcttacctgacattttatgagagcttcatagttggtcggtatgtagtgcttcttgggactgaagaaattctaattgttgtttaagttccaaggtgtgctacaatataggaggcacagtcatcagtttgtgacatacattatttactgcctatttcattctgattctatatttttagctttatgctgaactgttcaatgatgctgggattctctctttgcatgtcatatgtgaatgtgtggttcaagctgtaactgttgaaattattttagaatttatgacgatttctcagcagggcctatgtttatatatatatatatatttattctttagtttttgtgatatgcttatatttttaaggaagtaagttatagcatacttttttaaaagtaggaaccacaatctttatatggagcagcttgttatatctgattttcatgtaactcattggaaactctgccatgactcttaaagtagtcttacttgttttttaaaatgctggtattaaactaaatggactcctttcactaactgctgatttcagagtttaaatgttagcaggatatttgtgtattagcagtgccttcagtataagagagaaatattcattatctgtcatttatcatagtcgtataagtttccatgattttattttctgttattttcataagttcagatgtttatcagttcccaacattgtttctttatctgtagtgggatcttgagtaatgaggctcaagtaaatcctcaatgtgtataattattgcctcataaactctctctttgtttttaaaggaaacatctattatggtaatacaaagaaaagttaaattgtgacagtaatgttatattaacctcttcctactttaaagtgtgaaatgtttcacctcagctgtacaaactccagcattgagaatttgcctcactcattactcctgtgtgacagttatataaatagcatgcagctcacatctgttttagagcatagaagaagcggcacctgccatcttctgaaaactccaaagggaaatttcagtagacatagtgcactaaacccataaggatacttgaccaatatttgagcacagcaagctgacagttctatacagataggcagtgaaagagttttattttccagccaggcgcagtggctcaaatcccagcacttcgggaggctaaggcaggcggatcacttgaggtccggagttccagacaagcctggccaacatgatgaagccctgtctctactaaaaatacaaaaattagccgggcgtgatggcacatgcctttagtcccagctactcgggaggctgaggcatgagaatcatttgaacccgcgaggcagagtctgcagtgagccgagattgcaccactgcactccagcctggagagcagagcaagactctgtctcaaaaaaaagaaaaaagttttattatccttactttttttttaacattattattctaaaggtcaaaactgagaagagattaagataggagagagctccataatggctggatagtggtcaggcattctctattcttttccccctgtagacccattctaaatgtgggcctgaggtcaatgggagatgtgccctccctatggaggatgtaagaagcagaggccatttctgccccatgttgaggaaacaatctgttgatagacctggaatttagagtatatctgaaaagcagttggacttcaagaaatttaaaattctctctttgagatggggtggactaagaccacccccaaagtttaaaaatatgctcattcaacttgaatcttctgaggactttttgtgaaaatggtggactgtttagggcataggacagattccccaaattgctttatgcttccacataactagagcacttcaatctatttaagcctttgtctcctaactgaaacattatttctaaatatttctattcaataagttttttcttttttgagcaacttaagtgaattttgaagattgctccttccagtctcgttccttttcacattttcctgcattacctaataattacctcagcgttagaatttgaatgtattaattgatttaaacatcatgtagactaaagtcttaaacatctaagactcagttgtagttgcagaaaaaaattaaagtcacctctactgaaccttggtttcaatttaagatttttcttgcttttcaaaggggtaactaataaagattgaagggtttttttcccgattggtggaggaatgaagaactattgatgcaagtttttttattgtttctttctatgatcaggtacctgctttcattttagactgctacttccaaactaagctagattcttggttttaatgagaggaggcagagagagggaggcagatggaagaagaaaaacagttaaataagacatacccagtcactgcatttttggactataccgtatctttctagcacaaggaaatagataaactgtaaggtcttttttactcactttttatttatgtgttctatttgtgttagtcataactgtttatagtggttgtctaatttttacttttattatatgagatagagctgtgcagatcttcactcaagttagttctgtcacgcttcttcccattatttagagcacagttttttaaagcaactgtacaatttctcagccttatgagcttgctgtatttcttggtatcatgttgcttccaaattttgtttttactgtagaagacaattaatttattgtagagaagtggctgtgaaagtcgttctctgtctttaaaaatcaattgcagaagttcatttgtcatttttctagagataaattatagtactcaaactggcagtgctcagtatatacattttgtaagctttgtcagtgaaaccatcagttttgcaggagcttcctttcctagtcaagataaagcttaaaattccagaaattaatgtcgttcggactgactttattcatatttccatcaaacttctccaatacagtaagagatagtgttgaaccagcatcaagtctccagaaacatggcagagcagacaggccgttaagtttcacagacatcatagatccttttcttaaagaagaaaaacatgtataaaatagttttagtagtccaaaatgtcaactatctgtagctgcttttgtgtgtgtgtcagtgaacaaataataatgccttgctcaatcaatgcattcagccatctcaagtgcaatttgtgaaggagactatggtttccaaaagatacatttttttacaaagttaaacctgtaaaaagtctttttttttttccctccagccgtacaccaactgcacttggttgtttcagcagttggtatactattaaattgtccaggccaaataggtttctgtagctgttttagtaatttgaagccaaattctcatgctgtttctcattaaaaagaatgagaatttggtccatagttagctttaagttctctcttcctttctttcccttacagttaagggtttggtgggggatggggaggttgttttcgttttttggatttttttgtcttttggctttaagtatcatattttcttttgcctgtatccaactgcttctttgagtattttcatctagtttaatgtgagtaatagatgctgtgctgtcattgaagtgttcaacattttgttcatttaaacaaaagtgtaattcatacatatatagatacatatcttaattgatttctcaactattttataagtaactggaatttttcattagatcttatacagagaagtattttattaaaaattcaaaagggaagacttttatgtgctcattttgtaatttttgattttaaatatctttacattgtctgccaattaaagtgttttaaacttgcattggaatggactccgaatgtatttttgtggtgttacgttatccgtagatttctagcatgaagttagcctcacgatgctgtgcaaaggattttaaaatatgagagtcactgaaagagtttaaacatctgttcatgttaaatgctctatggattttaattaaagacttgagaatgattttataa

SEQ ID NO: 4786 - DNA, 1709 bp, Homo Sapiens
  NM_019006
aaacagcggacggaggggccggcggtggcggagccggagcaagcaggggttcggcggcattacctgtacccattcaccggcggctaccggcggcggcgcgcagcgtgtcaggcggagagacccgccgccaggaatgaatctgaagtctgctgcagtaaaacacagaaggctttaaaatgttttcttgcataaaattcaaaacttttaagtagctgcttatgagaatagggaaggcagaaagctaatgtctgtctcaagatacaggacagctgtttgctcatcaacctcaactgtgtgtgcaactgaggaacatggctcaagaaactaatcacagccaagtgcctatgctttgttccactggctgtggattttatggaaaccctcgtacaaatggcatgtgttcagtatgctataaagaacatcttcaaagacagaatagtagtaatggtagaataagcccacctgcaacctctgtcagtagtctgtctgaatctttaccagttcaatgcacagatggcagtgtgccagaagcccagtcagcattagactctacatcttcatctatgcagcccagccctgtatcaaatcagtcacttttatcagaatctgtagcatcttctcaattggacagtacatctgtggacaaagcagtacctgaaacagaagatgtgcaggcttcagtatcagacacagcacagcagccatctgaagagcaaagcaagtctcttgaaaaaccgaaacaaaaaaagaatcgctgtttcatgtgcaggaagaaagtgggacttactgggtttgaatgccggtgtggaaatgtttactgtggtgtacaccgttactcagatgtacacaattgctcttacaattacaaagccgatgctgctgagaaaatcagaaaagaaaatccagtagttgttggtgaaaagatccaaaagatttgaactcctgctggaatacaaaattcttgagcatctgcaaactaaaaattgacttgaggttttttttttcctagtcattgggaatgtagagcagtgtatcttgcatgtcatcggaagaatagatttttgttttggttttgttttgaaaatgactctgaacatttatttccattgcaatttctgtggctgaggagacttaaactttacaagtattatccttttaagatcattttaattttagttgagtgcagagggcttttataacaaacgtgcagaaattttggagggctgtgatttttccagtattaaacatgcatgcattaatcttgcagtttattttctcattgtgtatgtatatatcgcttttctctgcagcacgatttctcttttgataatgccctttagggcacaactagttatcagtaactgaatgtatcttaatcattatggctgcttctgttttttcattaacaaaggttattcatatgttagcatatagtttctttgcacccactatttatgtctgaatcatttgtcacaagagagtgtgtgctgatgagattgtaagtttgtgtgtttaaacttttttttgagcgagggaagaaaaagctgtatgcatttcattgctgtctacaggtttctttcagattatgttcatgggtttgtgtgtatacaatatgaagaatgatctgaagtaattgtgctgtatttatgtttattcaccagtctttgattaaattaaatgaaaaaaaaaaaaaaaaaaaaaaaaaaaaa

SEQ ID NO: 4787 - DNA, 5730 bp, Homo Sapiens
  NM_019008
cctccgcctccactcgccctcgtgctcccttcagccccttcgcagctccgtgcgcaaggtcgtgtcccggaagtgaaggggccatgttgatgggtgacccggggagaggtacccggccagaggcgagtcctgcggagtggtagcgcgcacggcctgcggtgtgacacccagcccctgccagtcccccatggccccgtggagccgagaggcggtgctgagtctctatcgggctctgttgcgccagggccgacagcttcgctacactgatcgagacttctactttgcctccatccgccgtgaattccgaaaaaatcagaagctagaggacgctgaggcccgggagaggcagctggagaagggcctggtctttctcaacggcaaattggggaggatcatttaggatcctccaagggaaagaggacaaaggtgccttctgtagacactcctgctctcttccatccccatcttacagatgtattaagaagcctcagatgagcaatggcaggcgctggtgagcgcaaaggcaagaaggatgacaatggcattggcacggccattgactttgtgctctccaatgcccggctggtgctgggggtgggtggagcggccatgctgggcatcgccacgctggcagttaagcggatgtacgatcgggcgatcagtgcccctaccagccccacccgcctgagccattcggggaaaaggagctgggaagaacccaactggatgggctccccacgactgctgaacagggacatgaagacgggcctgagccggtccttgcagacccttcccacagactcctccaccttcgacacagatacattctgcccgccccggcccaagccagtggccaggaagggccaggtagacttgaagaagtcacgactccgcatgtccctgcaggagaaacttcttacttactaccggaaccgggcagccatccctgctggagagcaggctcgggccaagcaagctgctgtggacatatgtgccgagctccggagcttcctgcgggccaagttgcctgacatgccgcttcgggacatgtacttgagtggcagcctctacgatgacctgcaggtggtgacagctgaccacatccaactcattgtgccccttgtgctggagcagaacctgtggtcatgtattcctggtgaagacaccatcatgaatgtccctggcttcttcctggtgcgtcgtgagaatccagagtactttcctcgtgggagcagttactgggaccgctgtgtagtagggggctacctctctccaaagacagtcgcagatacatttgagaaggtagtggctggctccatcaattggccagccatagggtccctcttggactatgtgatccgcccggccccacccccagaagccctcacactggaggtgcagtatgagcgtgacaaacatctcttcattgacttcctgccatcagtgaccctcggtgacacagtcttggtggccaaaccacaccggctagcccagtatgacaacctgtggcggctgagcctgcgtcccgcggagacggcacgcctgcgggctctggaccaggctgactcgggctgccgatctctgtgcctcaagatcctcaaggccatatgcaagtccaccccggctctgggccacctcactgccagccagctaaccaatgtcatcctccacttggcccaggaggaggctgactggtctccggatatgctggccgaccgtttcctgcaggccttgaggggacttatcagctacttagaggctggagtcctgcccagtgccctaaaccccaaggtgaacttatttgcagagctcacccctgaagaaatagacgaattaggatacactctgtattgctcattgtctgagccagaggtgctgctgcagacgtagggcaggtgaaggccaaagcgggtgttggtggtcaggccctggattctccgttagatacacttggctacctagttggtgcctcacagggttcctgctgcctggtgtcttgctgatcatcaccctggtcacttcatgctgattagaatgacatctctttcgtctcctattttgttacccaactcttcctatttttgttaccaatcactgtgctctctgccgccccctggctccaggctaatttttctggaatgaattgagaaggtggcgtgctggcctgagctgatggaccacttggtgttttgcgttttggcccatgtttgctgcctctatctggtctgccttgcccgtttgcctgttcctattcagtgtcttttctattttttcctctctcgttcatgccttctgttttgctcttgtccctggagcatatctgcctaattaagatgttgccttttagttgaatgccactgaagagctgtgatagcatgtttcaaagctgaactctacagagcgagtgctgagacagtatttagggtttctgggagtgaggctggtagaagagttggcctttgaccacggttcctggagtagaagtccatcctccccccaacctcctgacccattcataaatgctgagaatgtctctcatgggaacactgttaatgacccacacaggataagctgaatgcaaagttatttgcaggttgaatttcttggtggctattagcagaagtgcagagtagggaaccagagctggttaagggcctagtgaagggtttgtgtgcccagtgtctgctcgtcatctgtggctgcaggggtcagacagacaaggatggggactgccagggcaccacttcatcatgaatgctggttttcacaccttttccttattttattgccaatcaggacaaggccttgaaggaacgcagccttagacatcaggtgaggatgatggaggtagacagtcgactgaatgtcagctggaaaatccagtcactagttggggtttggtggccatgttttctacccagacaggccctgcttttctaggatgtggccttagagcaagaacagacccaacagccagcccttcatcctccagcgtctgccataggaatgtgagaggggtgtttgctgagcgctccgggcacggccagagggcaagtgagcatgcacggacctcttccccctgtcctgtttctcacccagcacctggggagatcggtgctaccaaggaagagagcacacagataagacagaggggaggaggtgggcatttcctacattcctccttgtttgccgctgctgagattgcagtatttattgcaatgtaaatgtatcctgaaggtggggaggaatgtttaatctaccatgtccgtgtgtcatcttggtttgtgtttttccctgtttgtagcaagactctgatgataattctgtttctcatctgcccattcagtattttgttttccttccgtcaagttgtcttattttttcaatgactacctctccatcattgaggttctggtgaagctctctgcagctgtctcattccttcccaacgatagtaacaggaaatgactctttagcatcgatacctcaacatcaatttagggtagagattcctgcccctcttttgtcacagattaggaaattgagaactagggttaaccttgactatatttagaggtctttttgcctcttttccccttaacaaggatttcttatggtggtttcagtttcatttgcataaaggtattgagagggaacaaaaaacataaagctgagaatcttgagagagctcatctaccctgtctgttggtcagactcaaatgagagttaaaaaaaaaaaaaaaaatctgtatgcctgagtaccatcctggatgaatctagaaggtatggggtagagcttgacagggttcctgtgtacccactgggtatccgttagaggtaagggagaggagaggattgatagagtgttgcaaaagtatagattattcattgagataaaggatttggtttccctgccatgagtattaaaaaaatttaagttttcccaagcttgcatctctgaccaaatttcacataaaacattggaaggaggctgggtgcggtggctcatgcttgtaatcccagcactgggaagctaaggcgggtggatcacttgaggtcaggagttcgagaccagcctggccaacatggtgaaaccccgtctccacgaaaaagataaaaataagctgggcgtggtggcaggcgcctataatcccagctactcgggaggctgaggcaggagaataacttaaacccgggaggcggaggttacagtgagctgagatcgtgccactgcactccagcctgggtgacagagtgagaccctatttcaaaaaaataaaaattggaagaagagcttaaaaaagataagattttaaagagtcccaagttatttaagttgagtgtaattgtcatttaaggaaggcaaatgagtttatcatccttcttaaagagcatctcttttaactgttggacaaaaccataactttgtcattttacaaggaagaacctcttaagaagtcctcagaaccagaagcaatgtgaactctcagcgctggtcctggtgggtttgctgaccatgactgggcaagccgttctttttgctgccatcttcctcatcataaagtgtggaacataggcaattgctttgagattcttggatagaagaggacaacattctgcacctgcccccttttttaaatctttggggaaagatgagtaactttccccactactctgccttcctgttcagtaactcttacttttgcctgaagtaacagcatcttctacttctccatctagagatttttgtgtgtgtgccatcaaggttagcaaactttatacgtagcctaacacttaaaaaatgcactcattatcttaaacctaataaattccagagtttattttggttctcctctgttgcccttcctaaaaaatgagctgaagatgacagtatttttctttacatgcttggttatgacttttaaagttttatttaaataaatgttgaagctcaagtttaaagaagcgttgcagaggcccacggtctcctgggtcccggccacctgtccatattccacatttgctgactgtgctccctgcactccactcaagttgagagttcaaatagtcttgaaggggaatcagcttcaggatggaaggacccaggagaggccccgaggtgggagggttctgtaaatacagactactgcgagtgtccagagctctctgccatgatacttccttgggactgacttggctgagaacgtgttctgtcagaggatttgttagaactctgcccttttgtctgaaactcaaggccaaggagaatgataggagacttaggacagagctgacccttgcaccaggctgggaggctgcagcccttttagatgccacttactgtaagtggccagaataccagagaggtgggttccatggtcaaatgcacagtaggtgtttacctttacatttggatcaccttgtagtctttaaattcttggtccctgaggccaagtccacaacttgccttctagtcacttgcctgcccgcagtggtggtggatgtgttagctggtagatttggaatcagtcaccagtctttctgtactgtcttggttagctctatataagtaggggcagcttagccctgaggcccagagacctgctgtcctttttctccttgagggaggaaataaaactgcggaatacaatgtccttccatagcatgggaagaagaaaataaacatctcctttccaacaaaaaaaaaaaaaaaaaaaaaaaaaaaaaaaa

SEQ ID NO: 4788 - DNA, 3665 bp, Homo Sapiens
  NM_019009
gcagtggggcggtgccgggggcggggcgcggcggctgtcagctgactgtggcggcggcggcctcgaggtgacaactgtctccgtcgcaggctccggcgggggcgcaggaggtcgcccggcgcgtcactgtcgggtcggcgagccacgggggccgccgcagcaccatggcgaccaccgtcagcactcagcgcgggccggtgtacatcggtgagctcccgcaggacttcctccgcatcacgcccacacagcagcagcggcaggtccagctggacgcccaggcggcccagcagctgcagtacggaggcgcagtgggcaccgtgggccgactgaacatcacggtggtacaggcaaagttggccaagaattacggcatgacccgcatggacccctactgccgactgcgcctgggctacgcggtgtacgagacgcccacggcacacaatggcgccaagaatccccgctggaataaggtcatccactgcacggtgcccccaggcgtggactctttctatctcgagatcttcgatgagagagccttctccatggacgaccgcattgcctggacccacatcaccatcccggagtccctgaggcagggcaaggtggaggacaagtggtacagcctgagcgggaggcagggggacgacaaggagggcatgatcaacctcgtcatgtcctacgcgctgcttccagctgccatggtgatgccaccccagcccgtggtcctgatgccaacagtgtaccagcagggcgttggctatgtgcccatcacagggatgcccgctgtctgtagccccggcatggtgcccgtggccctgcccccggccgccgtgaacgcccagccccgctgtagcgaggaggacctgaaagccatccaggacatgttccccaacatggaccaggaggtgatccgctccgtgctggaagcccagcgagggaacaaggatgccgccatcaactccctgctgcagatgggggaggagccatagagcctctgcctcgatgccgttttgcccccgctctttggacacgccgacccggcgctccccaaggaatgctgtcccaacaagattcccgtgaaagagcacccgtgtcgccccctcccgtggacttctgtgccgccccgtccacacctgttcttgggtgcatgtgggttttcggttcctggcggtccaggacggggcgggggctcccctcccatctcgtgctgggaggtctcagcgcgctctcctgtccctgggacgtgcgtctctccttctcatgccgttctggaaaatgctcttgctgtagagagcagctgcttctgccagggtgttggaggtggtggagcgccttccgattccattcatggcattttgtgatgtgatgtaattggaatagagctgttgatttaaggcacacacaatccctcacactgtgggttttttttagaacttcccagacgaaaactcacgcccttgccctaacgcgctttgctgtgagcctggcccctgcccagggcttgggtctggtgagctgagcagcttcctgtggatggtgtggggccggcctctggcctggctcacctggccactgtccagccagccttgtgacagactccggcctgaaggcagaatgaacccacacctggagtgaggaagggggcctggcacggttggccaggctctgcctgattgccagccagcgggcatctgaagccgggtccttcgcccgccggaggctgccgtccgtctctcctgctgcgctcgtgccagctccgtgggtgtcctcccagggagcttctcttctcaacaggccttgcgaggctggggtgagaggtgatagaggcagcactgtgcatgattccgagagggtgtggtggcactgccagccgactgctgacagcttgggagctgctgtgcccaggacgtgggttcagcgtgggcgaggaaagcctggcgagcgtggccctgtaaaagctttctgaggcgggaggcgctcacttacctctgactgcctgggcgctgcgtgtagcatcttggcctacaggacagattttaggtgacacctggttatgacagtcagaaatttgagaagcttctcacaagtgatgcactttaaataatctgcatgccattgagacacctgcatgtctggtgtttgtggttcaagtgtcttgccgccggccttcggatgtaaacccactgataacggacagaaagagaatgcccacaagtgggtcttctgtggaagatgcagaaggaggaagttagtgcttacattttagtctttttctccctcaaaaaaataggttaagtttcagtgccagctagaaaatactgctttctgccatcgattgggggtggtttttgtcaaatatactgttgataaatatttatttttgtaaacttgaagtgtgtggtggccgtgggggagggacatgctggcagcaggcgccttcttcagctgtgggtcctaaaggcctttgatcctttgaagaagaaagacatggtatttgttcagcagacgccgaccactcagacggaggggcccctgggattccctgtctcagatggcctggtcttacgcctgtgtagatttcttctccattgggaatgaaggtgtcaggcgggactggaacgttctagatggtatgttccgtgatattaacaactctaacccaggacagaccacaagccacactcagaggcctcactgtgctgggggcttcggtgtccaggcgcccaggtgtggccaccagcaccggtttctgccttcgcgttgctggggtgcagtgagactgccacacgcgtgcacatgtggctctgtgggtgtctcctagagaggacgtggcccctgctgccagcccttgagcagcccgtgtgggggcccgagggacccacacagtgggggccagcctcgctggagggagagcaaccctttgccgatgaccacgcttgccgccatctcttagttttctttttcacaagcgctttatttttttaatagacaaatcacattttgcaaggcctttaattaaataagattcttctttccttcattttatgctttatttcctgtttgaaggcttactgtagaagtggcttactgtagaagcagcttgctgagcccctccgagcggtccccagaattagctggttcacaacccccaccctcccccgcccccgcctgtgtcaggtgtggatgaggtcgtcacactcagaaggacaggcttgtctgccagctcacaaggggaggctgcagtgggtttgggagctgggtttaggcccctggtgtctgagggcccaggccttgccagcctctgctgctcctgctcctgggtttgaagatgcaggccgatcgccagctccgtggcagcggtcactaaggacagcctgactgtgccatcttggagcctcaggcggggctccggagatagaagacaggtcgccggaggctccccctcctctcctctcccctctgcagatgctccctgggcgctaccctgcagggtgccaggcaggagtggtctcagaacgtgcgcttctgattattttactggggtccattgtccagatttttctttgattgtaaaatatatttttactttttagtcttctaatttaataaatgatccatataaaaatagagaaataaagtcctttaagggaaggtttaccaaaaaa

SEQ ID NO: 4789 - DNA, 1563 bp, Homo Sapiens
  NM_019013
cgcagagtttcaaatcggctgcggtgggcgaggagcagctgtgctgcggctgtgctcggccttagtggtgtcggggtctagtggacagagaagactcttggccaggcagatggcttctcggtggcagaacatggggacctccgtgcgccggagatctctccagcaccaggagcagctggaggacagcaaggagctgcagcctgtggtcagccatcaggagacctctgtaggggccctggggtccctgtgcagacagttccaaaggaggctgcccctgagagccgtcaacctcaacctccgcgcagggccctcctggaaacgcctggaaaccccagagccaggtcagcagggcctccaggctgcagctcgctcagctaagagtgctttgggtgccgtgtcccagagaatccaggagtcctgccaaagtggcaccaagtggctggtggagacccaggtgaaggccaggaggcggaagagaggagcacagaagggcagtggatccccaactcacagcctgagccagaagagcacccggctgtctggagccgcccctgcccactcagccgcagacccctgggagaaggagcatcaccgcctctctgtccggatgggctcacatgcccacccattacggcgatcaaggcgggaggctgccttccggagcccctactcctcaacagagcccctctgctctcccagcgagtctgacagtgacctagagcctgtgggggcgggaattcagcatctccagaagctgtcccaagagctagatgaagccattatggcggaagagagtggtgacatcgtctctctcattcatgactgaggaagtgcctgcaggaaacaagccctgtctgaccgccaaggcttcatactcaaggatgtctatgcttccccgtgagcttcctggaaaaaacccccgggagtcgtcagtacccctgggccactgctaacaagcacctaacaaggggcccagagccccctgctccagccacatctggacccatcagtgactgcctgccatagcctgagagtgtcttggggagaccttgcagagggggagaattgttccttctgctttcctaggggactcttgagcttagaaactcatcgtacacttgaccttgagccttctatttgcctcatctataacatgaagtgctagcatcagatatttgagagctcttagctctgtacccgggtgcctggtttttggggagtcatccgcagagtcactcacccactgtgtttctggtgccaaggctcttgagggccccactctcatccctcctttccctaccagggactcggaggaaggcataggagatatttccaggcttacgaccctgggctcacgggtacctatttatatgctcagtgcagagcactgtggatgtgccaggaggggtagccctgttcaagagcaatttctgccctttgtaaattatttaagaaacctgctttgtcattttattagaaagaaaccagcgtgtgactttcctagataacactgctttctcataataaagactatttgcatttgaaaaaaaaaaaaaaaaaaaa

SEQ ID NO: 4790 - DNA, 5427 bp, Homo Sapiens
  NM_019014
agatgcgacgaggttagcggggcccgaccactccttggcttcccaggggtgagcctcgcgagttaggagttgggtagagagtcagcccggggcccggcatccgctttttcgttgaagcaacgactttggccggatgactccccagggtcggcatcagcgtgggactgggaacaggtgaagggaaacagaagagagcctgagaagaccgctctcctccgatcctaattgactgagccaatgagagccaaagaggtcacatgctcaactgggcggggagcgggtttccacctgcggcatctttcgcgagcggggagatgagtggggcggaatatgggagaaagggagggcccgccacgctctggctggacacggccttaatcggcccgttcactcgacgtttttggttctacgttgaccccgagaaaccgaaaccgcagggcctagggcgggtggaacgagagggaactacatttcccagcaggctgcggaaacgggactgcggccactacttccggcgtgtaccgagagactggcgtccggcgtgtaccgagagactggcgtccggtgtgcaggtggccacatggatcctggcagccggtggcggaacctgcccagcgggcctagcctaaagcacttgactgacccctcttatggaatcccgcgggaacagcaaaaggcagcgttgcaggagctgacgcgggcgcacgtggagtccttcaactacgctgtgcacgagggtctcggcctcgcggtgcaggctatacctccctttgaatttgctttcaaagatgagcgtatctcttttactattctggatgctgttatcagtccacctacagttccaaaagggaccatctgcaaagaggccaatgtttatccagcagaatgccggggccgaaggagtacctaccgtgggaagttgacagctgatatcaactgggcagtgaatggaatctcaaaaggaatcattaagcagtttcttggctatgttcccatcatggtgaaatccaagctttgcaacttacgtaaccttcccccacaagccctcattgagcaccatgaggaggcagaggaaatggggggctattttataatcaatggcattgaaaaagtcatccgaatgttgattatgcctcggagaaattttcccattgcaatgataagaccaaaatggaaaaccagagggcctggttatactcagtatggagtttcaatgcactgtgtgagggaagaacattccgctgtcaatatgaacctccactacttggaaaatggcactgttatgttgaactttatttaccgaaaagaactgttctttcttcctttgggatttgcacttaaggcacttgtcagcttttctgattatcagatctttcaggagctcatcaaaggaaaagaggatgattctttccttaggaactctgtttctcagatgttaaggattgtaatggaagagggttgttcgacacaaaaacaggtccttaactacctaggtgaatgcttcagagtaaaactcaatgttcctgactggtacccaaatgagcaagctgcggagttcctgtttaaccagtgcatctgtatccacttgaaatccaatactgaaaagttttatatgctttgtctcatgacgcgaaagctctttgctttagccaaaggagagtgcatggaggacaatcctgatagtttggtgaaccaggaagtcctcacaccgggtcagctcttccttatgttcctgaaggaaaaactggaaggttggttagtgtctattaaaatagcttttgataagaaggctcagaagaccagtgtttccatgaacactgacaatttgatgaggatttttacaatgggcatagaccttacaaaaccatttgaatacctttttgctactgggaatctgcgttctaaaacaggtcttggcctcctacaagattctggactttgtgttgtggctgacaagctgaacttcatacgctacctctcccatttccgctgcgtgcacagaggggctgattttgccaagatgaggaccaccacagtacgcaggctgctgccagagtcctggggcttcctttgtcccgtgcataccccagacggggagccctgtggcctgatgaaccacctaactgccgtatgtgaggttgtcacacagtttgtgtatacggcatctattccagctttactgtgcaacttgggggtcactcccattgatggagctccccaccgatcatacagtgagtgctaccctgtcctgctggacggtgtcatggttggctgggtggataaggatcttgctccaggcatcgcagattctcttcgtcattttaaggtgttgagagagaaaagaattcctccctggatggaagtggtccttatacccatgacaggaaaaccaagtctgtacccaggattgttcctttttaccactccttgtagactggtacggcctgtgcagaacttagcattgggcaaagaagagctaattggaactatggaacagatcttcatgaatgtcgctatctttgaggatgaagtttttgctggagttaccacacaccaggaactctttccacacagcctgctgagtgtgattgccaacttcatccctttctctgatcacaaccagagtccacggaacatgtaccaatgccagatgggtaagcaaactatgggctttccacttctcacttatcaagaccgatcggataacaaactgtatcgtcttcagactcctcagagtcccttggtgagaccctccatgtatgattattatgacatggataactatccaattgggaccaatgccatcgttgctgtgatttcttacactggctatgatatggaagatgccatgattgtgaataaggcctcttgggaacgaggctttgcccatggaagtgtctacaagtctgagttcatagacctctctgaaaaaattaaacaaggagatagtagcctggtgtttggcatcaaacctggtgacccacgcgttctgcagaagttagatgacgatggattgccgtttataggagcaaaactgcagtacggagatccgtattacagctacctcaacctcaacaccggggaaagttttgtgatgtactataagagtaaagaaaattgtgttgtggataacatcaaagtgtgcagtaatgacactgggagtggaaaattcaagtgtgtttgcatcactatgagagtgcctcggaacccaactatcggagataaatttgccagtcgccatgggcagaagggcattttaagcagattgtggccggctgaggacatgccttttactgagagtgggatggtcccagacattctgttcaatccccatggttttccatcccgcatgaccattgggatgttaattgagagtatggccgggaagtctgcagctttgcatggtctctgccatgatgctacacccttcatcttctcagaggagaactcggccttagaatactttggtgagatgttaaaggctgctggctacaatttctatggcaccgagaggttatatagtggcatcagtgggctagaactggaagcagacatcttcataggagtggtttattatcagcgcttacgccatatggtctcagacaaatttcaagtaaggacaactggagcccgagacagagtcaccaaccagcctattgggggaagaaatgtccagggtggaatccgttttggggagatggaacgggatgcgcttttagctcatggtacatcttttctccttcatgaccgcctcttcaactgctcagatcggtcggtagcccatgtgtgtgtgaagtgtggcagtttactctctccactgttggagaagccacccccttcttggtctgccatgcgcaacagaaaatacaactgtactctgtgtagtcgcagtgacactatcgatactgtttctgtgccttatgtttttcggtattttgtagctgaactggcagctatgaacatcaaagtgaaactggatgttgtttaacttgatgttgaccttttggattaagaggactatcagattaaagcaaaatgtaattttaattcaatgaagatatcattaccaggttactcttgagatttttcaacggtgttagaactctcaaccaagacctgaaaaccaagtatgcaaggtttctgaatctctctggtagattaactattgacaatgattttctgttatctttgttcaaaaagttcatgtcttctcaaaatatgaaatattgataaatggaagagcatacggtgacaagtctcctttccaaccccaggttccctacaccctgctctcagcaggcagtgagtgtcacacacctgttaatccatcttgagcaggacagtactatacaaatagaatgcaagctgtaatgtaattttatattttcttatagccacgttgaagtaaaaacaaacaggtacagtgttttttaccagctttatagaagtacagttgttacatatttaatgaatacaatttgatgggtctgactatatgcacacacctttgataccatcaccacaatcagggtaataaacatacctgtcatctccacaagtttcctcctgcccctttgttttttgctttttggttgctgttgagtttttgttttgtcttctgtggtaagaacacttaactcaagacctaccctcttaacaaatctttaagtgcacgatatagtattgttaattccaggcaccatgttgtacaacagatctttagaccttacttgtcttgcataactgaagctttatacctgttgaacaactctccatttccctggcccctagcaaccacccttctaccctgtttctatgagtttgactattacagatatctcatatagtgggatcatgcaatatttgtcctgtgactggcttatttcacttagcatagtgaaataagattcatccattttggaagccaggcatggtgctgtgcatctatagtccctgctatttgagaggctgaggtgggaggatcatttgagtgcaggagttcaaggacagcctgggtaatataggaagaccctgtcttgaagaccctgacctcaagtgatccacccacctcggcctccgaaagtgctaggattacaggtgtgagccactgtgcctggcctccggtgagtattttatatttagtctacacttccatacttggcttttttctgcttttatattgatctgctttcatagcagtgtgtagagtgccacttatgttttctttcttgtgtacagtattttattgtatggatttaccatcccctgtgtatttaagttgttccattctttggccattataacttttttctgcaaatattctggtgacttatctttggccattataaactgttgataatagatcatcttgtatatacttctgcaattataagatgttttttgatgatgtaaaaaaaaaaaaaaaaa

SEQ ID NO: 4791 - DNA, 7064 bp, Homo Sapiens
  NM_019018
tccccagcccgcctcagggaagcgagcccgggcgccggcgggcggccgtcgcgtctgacagaccactgcagaccacgggccgaggcccagcgcccgtccgcagcgcggccggcatggcggcgacaaggagccccacgcgggcaagggagcgggagcggtctggcgctcccgccgcaggaagtgaccaagttcactcctggatgctagctacaagccaagccttagacactgtctggagaatggcaaaaggctttgtgatgttggcagtttcatttctggtggctgccatctgctacttccggaggctacatttatattcagggcacaagctgaaatggtggattggatatctgcagagaaaattcaaaaggaacctcagtgtggaggcagaggttgatttactcagttattgtgcaagagaatggaaaggagagacaccccgtaacaagctgatgaggaaggcttatgaggagctattttggcggcatcacattaaatgtgttcgacaagtaaggagagataactatgatgctctcagatcagtgttatttcagatattcagccagggcatctcttttccatcatggatgaaagaaaaggacattgttaagcttcctgaaaaactgctgttttcacaaggttgtaattggattcagcagtacagttttggtcctgagaagtatacaggctcgaatgtgtttggaaaactacggaaatatgtggaattattgaaaacacagtggactgaatttaatggcattagagattatcacaagagaggaagtatgtgcaacacccttttttcagatgccattctggaatataaactttatgaagctttaaagttcatcatgctgtatcaagtcactgaagtttatgaacaaatgaagactaaaaaggtcattcccagtctttttagactcctgttttccagggagacatcctctgatcctttgagcttcatgatgaatcacctgaattctgtaggcgacacatgtggactagagcagattgatatgtttatacttggatactcccttgaagtaaagataaaagtgttcagactgttcaagtttaactccagagactttgaagtctgctacccagaggagcctctcagggactggccggagatctccctgctgaccgagaacgaccgccactaccacattccagtcttttaagtccgctgggggccgaacagcagtgctcaccagtgacggtggtcacagttgcaataaagtctctctctgaaaccaaagctagcatttcagcatggaaggaattaggaccttttcttcaggattacaggtacactggatgcagccatgcatggatggtttttctttatttttcagtgatttcctctgaagcagctgcactgatacatttgggagttggtggcttgactttgtccataaggggcgtggccacttcacatgatggcgggcctttaagagcacaaagaagtttaatatggacaacaacaggaaaaagcaagaagaaaacaagtagggaaaaacagctaacctggagagaaagaatttctttaacctttatgttcttcattaaaaatcttatcttggactgatttgagggatttttagaaacatggccttattttatataagcattaccttcccaggaatctttgttgtatattaatttttgataaccatttgattaactttaaaattaagtatatgtgtgtatatatacatatgtatgtttatatacacacatgtatctgtatagttttatatatacatatatacacatagacatacagagaaccactactttgtaatagtgtacagtttgttttatatctctttactttttttgttactattttatctggccagcttaatagttttatttagattttttaaaattctgtagattaaagcaaatgacagttattgaactatcacaaaactattaaactgtggtacatttaatgtgtatttaatgtgtggaatctcattatggtaggcagaataatgccctatgctccccaaagatgtctgtgtctgaatcctcagagccgtaaagggctaaatgggttaaatgggaaaggagaattaaggttgcaggtggaactgagatgctaatccaatgatgctgaaatagggagatttttctagattctccaggtggacgcagtgtaatcagaatggttcttaaaagtggaagagggaattggaagagtgtcagagtcagaggggaatgtgaaatatggaagaacggttagagagagatgcaccattgctggctttgaagatggaggaaggggccataagccagggagttgcaggcagcctgtagaattgagactggaaaggaaacagaaacttccccatagcctccagaaggaacgcagccctgccaacaccttgattttagcccagtgaagcctgtgttggacctctaatctgcagaactgtaagataatagatttgtgtttaagccactaagtttgtggtaatgtgttgtagcaacagaaaactagtattctcaggctagtttttggtcgtctttattttggaaatacttttctagtttaatttgatagttttttttttggaggtactttgctagtctgttttgagtttcagtacataagaataatttttaaaatcttgctaattatatattacttcaaagtcacaaatccctttctaagaatgacttacttcacgagatatttagcactatcattttcccagatgttcatattatttctgcaataaattaaaagggagtgtgtcaaatgctgtcatgtctgaaattagcattcatattcttttgcaatggggatgatcagtcgtgtgtactacatgaaccatgtctgatggtagcttgttcccactgtcattttgttttctggttgaagattaatgagctcagccacagaaacaagagttcttcattgacctctacagtccctgcctgtttggaaacatctatggttttgtataacccctgtcatttaactgacagtgttagaagatatccccctgatgtgttactgtaaccaagaaagcatgaacgttaccctttctggtgacagcctgccatgggctgctgtggctgatacttatagaattgttgctccaaaattttggctccacttgagctgtccagaagtgtacctgacatttgtgtattaccactcaccttggatctccttactagtgtaattatttccacatcaatccaggactgaaaggaaaaattttttcaccaggattggcagcctgtagctctgtgacctcagtcaacccatcatgttgtgttgtgggcggggggcaagaattctttagagaaccaagttgcgagaaagatttcaatccagtgaaagtaaaaagtaagaagacatttagatagttgctatattttgggaagatgtcaaaacaggtttttagggaggaggtatgaggtgttgtgttgttttgtttgtttttattcagttgtataatgaatataacaaattaagtagccagaaggagctgcatgtaaattagcaccacttttaaatgtcaacaataaatttgaggtgagcttcctgggtgatgccaacatttaaatgtctttctaaccgtatatgttttaaatggtgagagaactatagcaaaaatggaaacataatgccctcgtcgttttttgattttaggataagtttctctctcaaattttggccttacgtgtccatactgaggggttgtatgcatattagtacaaggctgacttttactgtggtaaaatacacataacatatagtttatattttaacaatttttttttttgagacggagtttcactctttttgctcaggctgcagtgcagtggcacaatctcggctcactgcaacctctacctcccaggttcaagcgattctcctgcctcagcctcccgagtagccgggattacaggtgcccaccactacgctcgactaattttttgtgtttttagtagaaacggggtttcaccatttagccaggctgatctgaactcctgaccttgggcgatccgcctacctcggcatcccaaagtgctgggattacgggtgtgagccactgcgcccggccctaacaatttttaagtgacagtgacattaagcatattcacattgttgtgcaaccctcaccaccatccaccctcagaactttttaaaatctccaagactgactttttttcaaagcaggcaactttaattccctacctggtatctggattccttttccttttcatgctatcttttcatcatacctcttctaatctgagtatttcctctgggcttaaaagagcctcagtggagaagtacaacctaagagggagttaggtacaacctaggagggagtcaggaggagagagttaggttagttagtacaacctaagagggagttaaatggatcaggaaaatcgtgttttatctccaaagtaaaatgataactatgggtggcttctgggctcaatttagaatattatcattgaaaagtccccaagaaactattaattcagagccaccctggtgagttgaatttcttgaatgtcttcatggtcttgaaccaaagtcatttccacccaagggagagtcaggtgaaagtccccagggccctctctaggggaccggagacctccagactaagctggtggaggatgggctcaacctccatgagagaagagcagccaggatcagggggcattaacgttaattttcccaggacttttctgcaaatgggtattggatggaaatatttgttctcagtcagatgagtttctcctattttagtgagaccaaagaaagacaattttaattgtgtccaagctgacttttttgaatgctctggaaatgttggaattccacatcaaagtacgtaactgttttaaactgataactaacccaatatgtgaaaatatatgcaagcatgaataaagggttgactaattccagaattagcaataattttctcttaaatagcaaatttctaaagctgtatgattctctttgcaagaatgtttttcacactgcttaataagaccagttaatgtgtaaaacagaaaaaagtatatatatatcatatgtcttttcatgcatctgaaactttaactgtctatagggttgcttgtcatagttgaacattatttaattaacttattgactatatatgggtatacttttctctatagccattcacttttttaaagttttaattatttaattgacaaattagctattcattttccttcaaatcctgtttttatcacaatgtccattttacagctagacacaaaatttagtgggtccaaattgttcaatcacttctatgttatttgttcagaatagtggatctttgcttaattcacttctgttttaatcccatcatattcctttaggccaagaaaaggaaagctgatttggattatatttatgcttaatatcaacatggtttataagtggacagaaaaacactcactcacgtattcagccacgtatggtctggagtgctctgtagaacagcccgaagtgtacaccatgtctctgcacttgaagctcatggaatgtgttggaggagactcaagctccatgtgggaacagtgtggcccaagagccagcatggaggagggctgtgtgagcagactgctatagaatgctaaagttataatcctagctggtgtctcgttctgtttaaaaaaatcaaatttctgtatgtaattgacgtattggtccttatagtcagtaccatcaggtcttagattgttaagtcattttgctgccaccagaccagtgagagtcactcacttatttgtaatgattcttgggaagtttagtcaagagaatatccttgaataaagaagtacatgttttaagtattttcatcgtagtctagatgggctgtaaaacccatttccacacgagtataaatttaaaacagaaacatcaaggtgtcagcaatcatgattttgttttgcttgttcacaagtttgaaaaggtgcatgaggcaccaatcagtgacactggaatgctttaaggatggtttgtgactttaccccattgtgccttatcatttgtcagcaaacttactgggccaaacacaaatggctgagacactcctggcccatttcttgtcatcgctgccatccccaaagacagactctgggaaacaacttgggaactgcttcaagtccatgccaggtcatggcttcgtccgcctcccagcatgtacctggacttcctttgggtgccggcttttctgctggactaagattcatggaaagaaccccagggcaaggtgaggagaagcagctggtacagactgatgacgaaggagaggaccagaaaagctgcttgggtgtggtggaagtttcagtgtaatgtgattcctagtaggcacatctgtgactcccttaaataaaaagggccagagatgaggggacgcctggtgaaaatggtgtttgttgtaacatcttggtatcattgtgggtaagtagaacaaatatttacatctgttatgaaaagctacctttagccgtagataaacattaaaaggaagactcagccccagagtatatttgatctattggttaactcatctgtcagcaaatggttaagtaagtaaaattaatttttccatttggtgtgtatttcacagggtaacaatgaagtgctccaatctgcttgtgagaccagttagattagtagttgcagttgagaccattcctcctgtatgtctttacaagcaaattgaaacgacatgctcttctttgtactatacagaaggacacaccacagatcctctttttaaagcaggtaataaagtagctttttccttttgaaacatcattgtaaaacagtgctttttaaactatccatggtaaaggatgagttttaaaaattctaatcctttgcaggttggtagttttataaatacgataaaaatatagcaccaagattagattgttataaaagtttctaaacactttcagtttctgtacttaatcttgcagtgtggtaataaagacttctacactttagtagcactaaaaaaaaaaaaaaaaaa

SEQ ID NO: 4792 - DNA, 2478 bp, Homo Sapiens
  NM_019023
agctttccagttctgctttaggacccgccccccagcacgctcctcgacgctgcgaggtcccgccccgcgtgctggccgcggtaaaagtggtagcagcggaggcgagcggagggtttcccgcggcggagtctcactctgctgcctaggctgagtgcagtggtgtgatcgaggcgcactgcagccttgacctcctgggctcaagcgatcctcacctcggcctaccgagtagctgggactacaggcacgcgccactacactcggatttctgacagtcagacttgtccacaagaactcaactggcaaggctgcttttctgtgctaaaactggggagctagtgggcaccatgaagatcttctgcagtcgggccaatccgaccacggggtctgtggagtggctggaggaggatgaacactatgattaccaccaggagattgcaaggtcatcttatgcagatatgctacatgacaaagacagaaatgtaaaatactaccaaggtatccgggctgccgtgagcagggtgaaggacagaggacagaaggccttggttctcgacattggcactggcacgggactcttgtcaatgatggcggtcacagcaggtgccgacttctgctatgccatcgaggttttcaagcctatggctgatgctgctgtgaagattgtggagaaaaatggctttagtgataagattaaggttatcaacaagcattccaccgaggtgactgtaggtccagagggtgacatgccatgccgtgccaacatcctggtcacagagttgtttgacacagagctgatcggggagggggcgctgccctcctatgagcacgcacacaggcatctcgtggaggaaaattgtgaggccgtgccccacagagccaccgtctatgcacagctggtggagtccgggaggatgtggtcgtggaacaagctatttcccatccacgtgcagaccagcctcggagagcaggtcatcgtccctcccgttgacgtggagagctgccctggcgcaccctctgtctgtgacattcagctgaaccaggtgtcaccagccgactttacagtcctcagcgatgtgctgcccatgttcagcatagacttcagcaagcaagtcagtagctcagcagcctgccatagcaggcggtttgaacctctgacatctggccgagctcaggtggttctctcgtggtgggacattgaaatggaccctgaggggaagatcaagtgcaccatggcccccttctgggcacactcagacccagaggagatgcagtggcgggaccactggatgcagtgtgtgtacttcctgccacaagaggagcctgtggtgcagggctcagcgctctatctggtagcccaccacgatgactactgcgtatggtacagcctgcagaggaccagccctgaaaagaatgagagagtccgccagatgcgccccgtgtgtgactgccaggctcacctgctctggaaccggcctcggtttggagagatcaatgaccaggacagaactgatcgatacgtccaggctctgaggaccgtgctgaagccagacagcgtgtgcctgtgtgtcagcgatggcagcctgctctccgtgctggcccatcacctgggggtggagcaggtgtttacagtcgagagttcagcagcttctcacaaactgttgagaaaaatcttcaaggctaaccacttggaagataaaattaacatcatagagaaacggccggaattattaacaaatgaggacctacagggcagaaaggtctctctcctcctgggcgagccgttcttcactaccagcctgctgccgtggcacaacctctacttctggtacgtgcggaccgctgtggaccagcacctggggccaggtgccatggtgatgccccaggcagcctcgctgcacgctgtggttgtggagttcagggacctgtggcggatccggagcccctgtggtgactgcgaaggcttcgacgtgcacatcatggacgacatgattaagcgtgccctggacttcagggagagcagggaagctgagccccacccgctgtgggagtacccatgccgcagcctctccgagccctggcagatcctgacctttgacttccagcagccggtgcccctgcagcccctgtgtgccgagggcaccgtggagctcagaaggcccgggcagagccacgcagcggtgctatggatggagtaccacctgaccccggagtgcacgctcagcactggcctcctggagcctgcagaccccgaggggggctgctgctggaacccccactgcaagcaggccgtctacttcttcagccctgccccagatcccagagcactgctgggtggcccacggactgtcagctatgcagtggagtttcaccccgacacaggcgacatcatcatggagttcaggcatgcagataccccagactgaccactcttgagcaataaagtggcctgagggctggggttctgaaaaaaaaaaaaaa

SEQ ID NO: 4793 - DNA, 6792 bp, Homo Sapiens
  NM_019024
ggtggggcatccgggtctcttggtggctgcttctacccccggagctcagctgatcttcccttccagactacgaggtgtgaatttcaaacttccgtaatggagttagcccacagtttattgctaaatgaagaagctttggctcaaatcaccgaagcaaaaagaccagttttcatctttgaatggttgcgatttcttgataaagtcttggttgctgccaacaagaccgatgtaaaggaaaaacagaaaaaacttgttgaacaattaactggattaataagtagttcacctggaccacctacacgaaaattattagctaaaaatctcgcagccctttatagcattggggatacttttacagtttttcagacacttgataaatgcaatgacattatcagaaataaagatgacactgcggcctacttaccaacaaaattggctgcggtggcttgtgtcggagcattttatgaaaaaatggggagaatgttgggcagcgcatttccagaaacggtaaataatctattgaaatctctgaaaagtgcagagtctcaagggcgaagtgaaatcttaatgagtctacagaaagttctaagtggactgggtggtgcagcagcttcctcccatcgtgatatttacaagaatgccaggtctctcttgactgataggtcaatggctgttcgatgtgcagtggccaagtgtctactagaactacagaatgaagctgtatttatgtggactgctgaactagaaaatatagccactctctgctttaaggctttggaaaactcaaattatggggtacgagtggcagtgtctaaacttttaggaacagtcatggccacagcattaatgccaaaacaggcaacagtaatgcgtcagaatgtgaagcgagcaacatttgatgaagtcttagaactcatggccacaggatttctgcgtggagggtcaggtttcttaaagagcggtggagaaatgttaaaagttggagggtccgttaatcgtgaagtgagagttggagttacgcaggcgtatgttgtttttgtgacaacattgggtggtcagtggttggagcgcagctttgccacgttcctgtcccatgtacttgatctggtttcccatcctcgggcaacacaaacacatgtggaggctgtgtactccagacgatgtgtttcctttatcctaagagctactgtgggcagtttgctaggtgaaaaagcccagattgcagctgccaaagaaatctgccaagctattggaaaacaaatgaaagccgtagaagcagtagtgaatgacacaagtggagaaaacaaatctggcgcagcagacattgcagcaagccagcatgtgatggtctgtgccctccaggaactcgggagcctggtgcagagcttgaatgccaccgcatcccctcttattcaagaagcatctatagggcttttggagattgtgacttcagtgctgcttcatccaagcatggctgcccgacttgctgctgcatggtgtttgcgctgtgtggctgtggcattacctttccagctgacaccatttctagacaggtgtgcagaacggctcaacaacttgaagacctcaccagaagctgtcagtggatatagttttgcaatggctgctttgttaggtggagtacatcagtgtcctttgggcattcctcatgccaaaggaaagatggtagttagtattgctgaagatcttttacgaactgctgcccaaaatagcaggctatctttacagcgcacccaagctggctggcttttacttggagcacttatgactttaggaccatctgtcgttcgttaccatctgcccaagatgttgttattgtggcgaaatgttttcccacgttccttaaaggaattggaagctgagaaggcccgaggcgattcttttacctggcaggtaactttggaaggtcgtgctggagctctatgtgccatgaggagcttcgttgcacattgtcctgagctactaactgaagatgtgattcgaaaattgatgacccctattgaatgtgccatgactatgatgtcacacattccatctgtaatgaaagcccatggagctcatctgaaagctagtgctgcaatggtccgtttaagactttatgatatcttggctttgttacctccaaaaacttatgaaggatcttttaatgcacttcttagagaactggtagcggaattcactttgactgacaactcagccaacacaactacttccctcctcagatccctctgccattatgatgatagtgttcttcttggttcttggcttcaggaaactgatcataaatcaattgaagaccagctccagccaaacagtgcctctggaagtggggctctggagcatgatccttcctctatttatttacgcatacctgctggagaagcagtacctggtcccctccctctcggagtctcagtcattgatgcttctgtggccctttttggtgtagtgtttcctcatgtttcttataaacaccgattacaaatgttggatcactttgctgaatgtgttaaacaagctaaaggtgtccgccagcaggctgtgcagcttaacatatttactgctgttcttagtgcactaaagggcttagctgaaaacaaaagtactttaggacctgaggaagttcgtaaatctgccctgacactggttatgggtcctctggacaacccaaaccccatcttacgttgtgcagcgggggaagctcttggaagaatggctcaggtggttggagaagcaacttttattgctagaatggcccaatatagctttgacaagttgaaatcggctcgagatgttgtatctaggactggtcattcattggctcttggttgtttgcatcgttatgttggtggaataggctcaggacaacatctgaagaccagtgtcagcattttattggctctagcacaagatgggacatcccctgaagtccagacttggtctcttcattcacttgctttgatagtggattctagtggtccgatgtatcgtggctatgtggaaccaacattatctctagttcttaccttgctgttgacagttccgccttcacatacagaagttcatcagtgtttgggtcgatgcttgggtgctataataactactgttggccctgaactacaagggaatggagcaacaacttctacaattcgttcctcttgtttggtgggttgtgcaataacacaagaccattcagattctcttgttcaggcagctgccatatcttgccttcagcagcttcacatgtttgcaccacgacatgtcaatctatctagccttgttcctagcctttgtgttcacttatgtagttcccatttgttacttcgacgagcagctgtggcatgtcttcggcaacttgcacaaagagaagcagcggaagtatgtgaatatgccatgagcctggcaaaaaatacaggggacaaagagagcagtagtgccaatgtcagtccttttgcccctggggttagttctcgaactgatatccattgccggcaccaaggtgttaatataacagaaactggtcttgagggacttctttttggaatgctagaccgggagacagatcgaaaattatgttctgatattcatgacactttgggacatatgctttcttcgctggcagtagaaaaactttctcattggctaatgctttgtaaagatgtcctggcagcttctagtgatatgagtactgcaactctcttaagtagtggaaaagatgaagaagctgaaaagaaagatgagatggatgatgataccatgtttaccacgttaggtgaagaagataaatcaaagccctttgtggcccctcgctgggccactcgagtatttgctgccgattgcctgtgtcgaatcatcaatttgtgtgagaatgcagaccaggctcactttgatcttgccttggcacgttctgctaaacttcgaaaccctacaaatgacctcttggtacttcatctctctgacctcattcgcatggcattcatggctgcaactgatcatagcaaccagctgcgaatggctgggctccaggcgcttgaagacattatcaagaagtttgcgtctgtgcctgagccagaatttccaggtcatgtgatactggagcagtatcaggctaatgtgggagctgctctaagaccagccttttcacaagatacaccatcagatataatagcgaaagcttgccaggtatgtagtacatggataggaagtggagttgtcagtgatctcaatgatctccgtcgagtacacaatcttcttgtttcttctctggacaaagttcaggctggaaaaggatcttccagccagctgtaccgagagagtgccacgaccatggaaaaactggctgttctcaaagcttgggcagaggtatatgtggtcgctatgaatattaaaaaggaagcagagtcaaaaccaaaaagagcaattaaaaatactgacgatgatgatgacgactgtggtaccatcgatgaactgccaccagatagtttaataacactggtacaacctgaactaccaacactcagtcgcctgtggttagcagcattaaaagattatgcactcttgactttaccagccgaattttctagtcagcttcctccagatggtggagcattttatacccctgaaactattgatacagctagacttcactatcggaattcctgggccccaattctccatgcggtggcactttggttaaatagcacaggatttacgtgctcagagtctacagaagcagcagcaatatctggtttacaaaaacgttctacatctgtcaatttaaaccaggcatcaggagcagtgggtagtgctaaatctttgccagaaattaacaaagacagaatgcatctgattttaggtgtgagtatacagtttctttgttcccctagacctgaggagcccattgaacatgttacagcatgcctgcaggccttacataccttgctagactccccttatgctcgagtccatattgcagaagatcagctgataggtgttgagttgctgagtgttttgcaccgccttctattgacctggaatccatcatctgtccagctgttggttactggagttgtacaacagatagtaagagctgctcaggattatttgcaagagaaaagaaacactctaaatgaagatgatatggaaaaagaggcctgtaccgtattgggagaaggaggtgacagcggtggtctcattcctggaaaatctcttgtgtttgcaactatggagctgctgatgttcattttagtacggcatatgccacatctcagtaccaaggtgtcagactctccaagtcacatagccactaaaactcgactatcagaagaaagtgctcgtttggtggcagccacagttaccatactctctgatttaccatccctttgttcacccgctggatgtatgacaatcctgcccacaattctgttcttaattgcaagaatattgaaagacacagcaataaagtctgcagataatcaggttcctccaccagtcagtgcagctcttcaagggattaaaagtattgtgacactttcaatggccaaaactgaggctggcgttcaaaaacagtggacagctctgattcgtagcacgcttgcttgcatcctggaatattctcaaccagaagactctgtacctacacctgatgaagtaagcatgctaacagcaattgcactcttcctgtggtctgctagtaatgaaataataggagtccagtcattacagaatggctgcatgaacagatttaaaaatgcattaaattcatgcgacccatgggttcaagccaaatgttaccagcttctcctctcagtcttccagcattccaatcgtgccctttcaactccttatattcattcattagctccaatagtggttgaaaagctaaaagctgttgaaagaaacagaccagccagtaacatagagcttttagcggttcaagaaggaataaaagttcttgaaacactggttgctcttggtgaagaacaaaacagagtccagctacttgctcttttagttcccactttgatatcttacctgctggatgaaaattcttttgcctcagcaagttcagcttccaaagatcttcatgagtttgcactccagaatttaatgcatattggacctctgtatccacatgctttcaagacagtaatgggggctgctcctgagttgaaagtgcgtctagaaactgccgttcgagcaagccaagcgagcaaagctaaagcggctgccagacaaccagcccccgccatacattctgcaccaacaattaagctaaaaacaagttttttttaatttgtaatttcatttatttgtatttatgttgtcaactagcccctaattagtgatggccactgtatcattccaggctacctatgggttctgttttatttgtatattggtattatagtgcttccaagtaggttaagtgaaataatgctcacaccacttattgatttttaaggagtgattttttttatcatgtggtgaatatgttttcattttcctcctaataatgtttctcttttgttaacttatttatttttcaaacactgagccatagtcttaaatttaaatgctaaaaacaattgtatcatgtagtcgggcagcctattgatactgtcaggggaaaaaaatgggtcagaactcagcatctgtcatgaaaaaaatcaattgaaaaacaagcagattttaaattttgaagtaatcaaaataatggaaagtgtctgttttgtggtgtatatactatgaataaaatcacagcattttctaagc

SEQ ID NO: 4794 - DNA, 4504 bp, Homo Sapiens
  NM_019027
agtcagacccaggaggagtgaggtcaattgccctttagtcccaggactaaccggaagcttctgcaacaggaggacattgaaaataagatggaacccatccacataaggatttgcctcaaagggcactgcaaaaattgaacagaggaatcccaaggaagctgcctgaatttgcctgtatactctcgttctgcgacttataaaggaccagacaaatcaaattagtggttttggtttccgccagctgtggatgcctttgacattatgaccgcagaggattccaccgcagccatgagcagtgactcggccgccgggtcctccgccaaggtgcccgagggcgtggcgggcgcgcccaacgaggcagcactgctggcgctgatggagcgcacgggctacagcatggtgcaagagaacgggcagcgcaagtacggcggcccaccgcccggctgggagggcccgcacccgcagcgtggctgcgaggtcttcgtgggcaagatcccgcgcgacgtgtacgaggacgagctggtgcccgtgttcgaggccgtgggccgcatctacgagctgcgcctcatgatggactttgacggcaagaaccgcggctacgccttcgtcatgtactgccacaagcacgaggccaagcgcgcagtgcgtgagctcaacaactacgagatccgcccgggccgcctgctcggcgtgtgctgcagcgtggacaactgccgcctcttcatcggcgggatccccaagatgaagaagcgcgaggaaatcctggaggagattgccaaggtcaccgagggcgtgctggacgtgatcgtctacgccagcgcggccgacaagatgaagaaccgcggcttcgccttcgtggagtacgagagccaccgcgcggctgccatggctcgccgcaagctcatgcctggccgcatccagctgtggggccaccagatcgccgtggactgggccgaacctgagatcgacgtggacgaggacgtgatggagaccgtgaagatcctctacgtgcgcaacctcatgatcgagaccaccgaggacaccatcaagaagagcttcggccagttcaaccccggctgcgtggagcgcgtcaagaagatccgcgactacgccttcgtgcacttcaccagccgcgaggatgccgtgcatgccatgaacaacctcaacggcactgagctggagggctcgtgcctggaggtcacgctggccaagcccgtggacaaggagcagtactcgcgctaccagaaggcagccaggggcggcggcgcggctgaggcagcgcagcagcccagctacgtgtactcctgcgacccctacacactggcctactacggctacccctacaacgcgctcattgggcccaacagggactactttgtgaaagtagccatccctgccattggggctcagtattccatgtttccagcagctccagcccctaaaatgattgaagatggcaaaatccacacagtggagcacatgatcagccccattgctgtgcagccagacccagccagtgctgctgccgccgcagccgcggccgcagccgccgcagccgctgtcattcccactgtgtcgacgccaccacctttccagggccgcccaataactccagtatacacggtggctccaaacgttcagagaattcctactgccgggatctacggggccagttacgtgccatttgctgctccagctacagccacgatcgccacactacagaagaacgcggcagccgcggccgccatgtatggaggatacgcaggctacatacctcaggccttccctgctgctgccattcaggtccccatccccgacgtctaccagacatactgaggctggtgaccagcacgaagacagaccacacaaacaccactgaaggaacgcttgactatttatgaagaaggaacatgttggattcacacatgcaacctgaaagtgaagaatgttagcagatttatttctgaattattttatatacatgaagttttcactagttttttaagactattttcaacttagcatgcctacgttcatacatttccaaaagacttgcaatggttcgtgccttcattccatcttttaaaaatttgtatgctgtactacatttgtatagaggtttttgttgttgtttttttaaggatatattttcagtatgaaggttattttcttaacttctgcactccagagatttctattttgtagtaccttcaataatatatcaactatatattaaaaaagcacacttgaggagctagggaactattttgaaaaatatatacaatatttaaagatacaaacagtagtgcttaaaaatactacataaagcattattttaaaggttatactggaaagtgcaattttaaaatgagtaaaacctctgtatttctgctggcattaagggttgatggtgttaccatgtatcatcatggcggtactattttttaaaagaaattaaacactggatctctccttaagccaacattgaaaagacttgccgcacttctgagtccaaacactggaaagctctcctttgccaccgttagccggggctcattctccatgtgccttagccttaaacatgcccccactcccacatctctcaccctgtcccctcctccccagattcccaatcccaccgcaatgtttggcaagcctaggactgataagtagctctgatagaggagctggtggcttttatacttcttcctgggtttttgttggggtttgttgtttcgttgttttttgtttttttttttgtttggttggggaagtattgtcttctacgtgtgctattttcagtagcagagtaagcacaaggttttaatcgagttgcataagacacctttgcatagctatttaattgcccaatgtaaaactttaatgccatttctaatgcttttattcatttttgaagtatgagtttgtagggacaaagaatgtatgttatcgtagacaagacccccagagactcttttcagcagaaagttatgcttctagttgccttaccatgtttcttgcaaaactgtccatggtcctcaagggtgttggaaacattatgtttattaaatgggcctctcttcctttgctgtgcacttgatgggtgaactggattggggtgtgcacatccaggaggaggaggagagacctgtagaagtttaaagatagtttgtaaatatcttctaatgcttgtttttagtccttttatgttggagaagttcatggtatgtagtttaatgcaaaatgaaaccattttatttcaatgttattaaaaaggtttgttttattaggaagttaatgtattgttgcagtgttttgtgcctgtttaaaggcttttgtttagcagagtgaatgtaaaatacagtaaaatgttaagattgtcatctactttttaaaaaaaaatatcaacttggaattgttttttaaaggctcaatcaaggaagtgaggtgtgcaataaggtagcaagtaaaacgcagttgcgtttttatgtcatgttagagatccatacaattttccactcacgggatttttgttgatggctgaattcttgtggattcataagaggatcatgcccttagcaagtacttttgttttgttttaaattaagagattcccaaatgcctttttccccctcatcttgaaatgagatgagtttttatgtgtaagcaatatttatttaactattctataaaattattgagtgcctactgaggcctttaagcaccgctaacattcctttccatcattcttttaaatgacataaaataattgtgcaatgttcctgatgatgtaccccacaagctgcattcaaactcaaatctgtgggaatgagtgactcgacaaaatgtaattcggatcagatcctcatcccctgactgtgtgaaaaaagtactctccttctagtgaaggattgtcacagagtttcactggatgaaactatgacccagtattcttactgtattttacatatgcctgtaaattatttgcaaaaaagaagaagaagaggaagaaagaaaagaaagaaaagaaagaaagaaagaaagaaagaaagaaagaaagaaagaaagaaagaaagaaagaaagaaaaagaaagaaagaataaaaaaaaatgataacatggcaaccaccaaactcccttaaaaacaaacattggtgacatggccaattaagtatcagtgagcctcctatctgggacttatctgttcctattgtttcaaaaccatttcatgtacactactgaggtaagtttataacttgaaatgtgaactttttttttttttagtgttaagaacaaactatataaatgtaaaaaaaaagttttagagttctgttttcaaacattgctagtggtttagttaactttagctgctttatatttgaaaagcttttatttagatcttgctccatttacagtacattcttaggatgtatgtagtaaataaagctttctttaaagcaatcgcaagaccttattttaaattgtgaaaaaaaaaaaaaaaaaaa

SEQ ID NO: 4795 - DNA, 1779 bp, Homo Sapiens
  NM_019029
gtgactgggtggggctgcctcacttctgcctgatttgggaagcgctgcaaggacaaccggctggggtccttgcgcgccgcggctcagggaggagcaccgactgcgccgcgtaagtgccgcctgccctgcgtgggtcgtgccagctcagcgggacaggtcctcgcctcggtccctcggacttagggagcgcggggcagaccctgagagatggttggtgccatgtggaaggtgattgtttcgctggtcctgttgatgcctggcccctgtgatgggctgtttcgctccctatacagaagtgtttccatgccacctaagggagactcaggacagccattatttctcaccccttacattgaagctgggaagatccaaaaaggaagagaattgagtttggtcggccctttcccaggactgaacatgaagagttatgccggcttcctcaccgtgaataagacttacaacagcaacctcttcttctggttcttcccagctcagatacagccagaagatgccccagtagttctctggctacagggtgggccgggaggttcatccatgtttggactctttgtggaacatgggccttatgttgtcacaagtaacatgaccttgcgtgacagagacttcccctggaccacaacgctctccatgctttacattgacaatccagtgggcacaggcttcagttttactgatgatacccacggatatgcagtcaatgaggacgatgtagcacgggatttatacagtgcactaattcagtttttccagatatttcctgaatataaaaataatgacttttatgtcactggggagtcttatgcagggaaatatgtgccagccattgcacacctcatccattccctcaaccctgtgagagaggtgaagatcaacctgaacggaattgctattggagatggatattctgatcccgaatcaattatagggggctatgcagaattcctgtaccaaattggcttgttggatgagaagcaaaaaaagtacttccagaagcagtgccatgaatgcatagaacacatcaggaagcagaactggtttgaggcctttgaaatactggataaactactagatggcgacttaacaagtgatccttcttacttccagaatgttacaggatgtagtaattactataactttttgcggtgcacggaacctgaggatcagctttactatgtgaaatttttgtcactcccagaggtgagacaagccatccacgtggggaatcagacttttaatgatggaactatagttgaaaagtacttgcgagaagatacagtacagtcagttaagccatggttaactgaaatcatgaataattataaggttctgatctacaatggccaactggacatcatcgtggcagctgccctgacagagcgctccttgatgggcatggactggaaaggatcccaggaatacaagaaggcagaaaaaaaagtttggaagatctttaaatctgacagtgaagtggctggttacatccggcaagcgggtgacttccatcaggtaattattcgaggtggaggacatattttaccctatgaccagcctctgagagcttttgacatgattaatcgattcatttatggaaaaggatgggatccttatgttggataaactaccttcccaaaagagaacatcagaggttttcattgctgaaaagaaaatcgtaaaaacagaaaatgtcataggaataaaaaaattatcttttcatatctgcaagatttttttcatcaataaaaattatccttgaaacaa

SEQ ID NO: 4796 - DNA, 2451 bp, Homo Sapiens
  NM_019034
ctcttggctccgctagtgcccggcgcgccgccgccagtgctgcgggctccgggcaatggatgcccccggggccctggcccagaccgccgcccccggtccgggcaggaaggagctgaagatcgtgatcgtgggcgacggcggctgcggcaagacctcgctgctcatggtgtacagccagggctccttccccgagcactacgccccatcggtgttcgagaagtacacggccagcgtgaccgttggcagcaaggaggtgaccctgaacctctacgacacggccgggcaagaagactatgaccggctgcggcccctgtcctaccagaacacccacctcgtgctcatctgctatgacgtcatgaatcccaccagctacgacaacgtcctcatcaagtggttccctgaggtcacgcatttctgccgcgggatccccatggtgctcatcggctgcaagacagacctgaggaaggacaaggagcagctgcggaagctccgggccgcccagctggagcccatcacctacatgcagggcctgagcgcctgcgaacagatccgagctgctctctacctggaatgttccgccaagtttcgggagaatgtggaggacgtcttccgggaggccgccaaggtggctctcagcgctctgaagaaggcgcaacggcagaagaagcgccggctctgcctgctgctctgacccagggcagacagacctcacgacagcactgacagggcccgggggcccaggtgccgattgcaccagggaggctgccccatcccgaccctccagctcatggtgtctggggcctgcggctagactcttggaacattctggaactctctcctttcctggctggggctctgaccacaaactcccctccaggctgcccctgggacatggtggtgatgtgggtgcaggagccagtgtctgttgtcgggactcgcaagtgccctcatcacagccacccccaccacgagtgtctccccagtgcagactcaagttatgcttgaaatgaaaaagtctatctggtagtgggtaaacgtagacctggcactgttccacgcgggcgccccaagcctgccactcctgtgtccctgcctccctgggctcccgagataggcaccactgtatcctccagctccttccttccttcccccaggaacacggaggccaccgagggggctgggcctatcaggaggacacaggctgcagcctggcacccacccctcccatctccaccccacatggaagacttgtcttcaacttggccactgtctttgcagagctgggcacatgtgcccagggggcagaaaaaatggcttctcagttgttaaaagtataccctggaccacccatctgaccatctccttaaggtttcacccaaagcccccagtgtcagagacttgggatgggaagaacagtcggctcccagtgtggtcatgagcaagttttctgtggactgttccccccactgtggtaggacaggactggcccacttagtcctcaagctcccaacctgctgtccctcaagccccgcttctaccagcctgtggagttcaggaggcgagacatcctggcctcctttgagaactgatgggatctaccccctgtccacgcgggacagtttctcagaactggttcatagaccacctgtgtcaccaacagccagatacctaatccctgagcctcctttgggaaggtctggggccgagggtctgggaatttttttttttttttttttttgggacagagtctcattctgtcactcaggctagagtgcagtggcatgatcttggctcactgcaagctccacctcctgggttcaagcgattctcttgcctcagcctcctgagtagctgggactacatgcgcacaccaccacgtccggctaatttttgtatttttagtagagacagggtttcaccatgttggccaggctggtcttgaactcctgacctcgtgatccacccgccttagcctcccaaagtgctgggattacaggcgtgagccaccgtgcccggcccaggacttttaaaacaagcatcccaggggattccggtgcctaccagaagtcgcaagctgcttggctctggagggcgcctaggagtcggtgtcgcctaagatgggataatggcttcaggcaactcctagccttccccatatctcctgcctcagcccccctggcccagtgctggggcgtcagctaaacctgagcttccaagaagtcaggttgccaaaggaaggagccttctgagaccctccccaacccacccaggttcccaaggccctgccgtaccctggggaatcaaccaaggagttcttgttctcgaagaaccccaggcctcatgatggtctacggtagaggtccaacaactacagcctgtgggccacatctggccacagcctgatttgtaaataaagttttattggaacacagcaaaaaaaaaaaaaaaaaa

SEQ ID NO: 4797 - DNA, 948 bp, Homo Sapiens
  NM_019037
atggcggacctccggaaaccgtagattccgggcggtcggagccgccgggagctgtagttctcccgcggctcagagaagtaggcagagagcggacctggcggccgggcagcatggcggggctggagctcttgtcggaccagggctaccgggtggacgggcggcgcgccggggagctgcgcaagatccaggcgcggatgggcgtgttcgcgcaggctgacggctcggcctacattgagcagggcaacaccaaggcactggctgtggtctacggcccgcacgagatccggggctcccgggctcgagccctgccggacagggccctagtgaactgtcaatatagttcagcgaccttcagcacaggtgagcgcaagcgacggccacatggggaccgtaagtcctgtgagatgggcctgcagctccgccagactttcgaagcagccatcctcacacagctgcacccacgctcccagattgatatctatgtgcaggtgctacaggcagatggtgggacctatgcagcttgtgtgaatgcagccacgctggcagtgctggatgccgggatacccatgagagactttgtgtgtgcgtgctcagctggcttcgtggacggcacagccctggcggacctcagccatgtggaggaagcagctggtggcccccagctggccctggccctgctgccagcctcaggacagattgcgctgcttgagatggatgcccggctgcacgaggaccacctggagcgggtgttggaggctgctgcccaggctgcccgagatgtgcacaccctcttagatcgagtggtccggcagcatgtgcgtgaggcctctatcttgctgggggactgaccacccagccacccatgtccagaataaaaccctcctctgcccacacaaaaaaaaaaaaaaaaaaaaaaaaaaaaaaaaaaaaaaaaaaaaaaaaaaaaaa

SEQ ID NO: 4798 - DNA, 1584 bp, Homo Sapiens
  NM_019040
agagttcctattgggttaacactggaggctctaagatggcggcagtggcaacctgcggtagtgttgccgcgagtactgggtctgcagtggcgacagccagcaagagcaacgtcaccagtttccagaggaggggtcctagagccagcgtgaccaacgacagcggccctcgactggtgtccattgcgggcacgcgaccgtcggtgcggaatggacagctgctggtatcaaccgggctcccagccctagaccagctcttaggtggaggtttagccgttggaacagttcttctaattgaggaggataaatataatatttactcacctttgctcttcaagtatttcctggcagaaggaattgtcaatgggcatactttgttggttgcatctgctaaagaggatcctgccaacattttacaggaacttccagcaccattacttgatgataaatgtaaaaaggaatttgatgaagatgtatacaatcataaaacaccagaatctaatattaagatgaaaatagcttggcgttaccagttattacccaagatggagattggaccagtatcatcttcaagatttggtcactattatgatgcatcaaaaagaatgccacaagaactaattgaggcttcaaattggcatggattttttcttccagagaaaatatcttcaactctcaaagtagaaccctgttctttgacccctggctacacaaagctgcttcagtttatccagaacatcatttatgaggaaggatttgatggatccaatcctcagaaaaaacagagaaacattttaagaataggaattcagaatcttggctcacctttatggggagacgatatttgctgtgcagaaaatggtggcaacagtcacagccttaccaagttcctctatgttctccgtggtcttctgagaacctctctttcagcctgcatcatcacaatgccaacacatctgatccagaataaagccattattgcccgtgtcacaaccttgtcagatgtagtagttggtctggaatcatttattggttctgagagagaaactaacccattgtataaggattatcatggattgattcatatacggcagattcctcggcttaataacttgatctgtgatgaatcagatgtcaaagacttagcttttaaattaaaaaggaagctattcaccattgagcgactgcatttgcctccagacttgtcagacacagtgagccgctcaagcaaaatggatctggcagaatccgccaagcggctgggcccaggctgtggcatgatggccggaggcaagaagcacctggacttctagggattcctccttagtcgctgcatgcagaattctatgacactctaattatgattgctaatagcttatgtaaatatttttcttaacaatttgaccctccactccttgaaaaacacaggattataaaatggtgccgccatttctcattttttaactttttacagaactagcacagcagaaatacttttaaatttttccttcatgctctagagaaaataattttatttttaaataaacgccaaaaaatgtcaaaatctcaaaaaaaaaaaaaaaaaaa

SEQ ID NO: 4799 - DNA, 3484 bp, Homo Sapiens
  NM_019042
gtgcgagcccggccgccggtgagtcggctggagcgcatctggtcctccgcgcggaaagcgctgcttttgcctggccgccctagccgctggctcatccaagtggccttcgccgctctcttgcgtcccaaccagagcgctggccacctcgccgcccagctcacgccgcgcccgcgctcccaggctccgggttttcttaaatgttttcttggagccttaaagatggagatgacagaaatgactggtgtgtcgctgaaacgtggggcactggttgtcgaagataatgacagtggagtcccagttgaagagacaaaaaaacagaagctgtcggaatgcagtctaaccaaaggtcaagatgggctacagaatgactttctgtccatcagtgaagacgtgcctcggcctcctgacactgtcagtactgggaaaggtggaaagaattctgaggctcagttggaagatgaggaagaagaggaggaagatggactttcagaggagtgcgaggaggaggaatcagagagttttgcagacatgatgaagcatggactcactgaggctgacgtaggcatcaccaagtttgtgagttctcatcaagggttctcgggaatcttaaaagaaagatactccgacttcgttgttcatgaaataggaaaagatggacggatcagccatttgaatgacttgtccattccagtggatgaggaggacccttcagaagacatatttacagttttgacagctgaagaaaagcagcgattggaagagctccagctgttcaaaaataaggaaaccagtgttgccattgaggttatcgaggacaccaaagagaaaagaaccatcatccatcaggctatcaaatctctgtttccaggattagagacaaaaacagaggatagggaggggaagaaatacattgtagcctaccacgcagctgggaaaaaggctttggcaaatccaagaaaacattcttggccaaaatctaggggaagttactgccacttcgtactatataaggaaaacaaagacaccatggatgctattaatgtactctccaaatacttaagagtcaagccaaatatattctcctacatgggaaccaaagataaaagggctataacagttcaagaaattgctgttctcaaaataactgcacaaagacttgcccacctgaataagtgcttgatgaactttaagctagggaatttcagctatcaaaaaaacccactgaaattgggagagcttcaaggaaaccacttcactgttgttctcagaaatataacaggaactgatgaccaagtacagcaagctatgaactctctcaaggagattggatttattaactactatggaatgcaaagatttggaaccacagctgtccctacgtatcaggttggaagagctatactacaaaattcctggacagaagtcatggatttaatattgaaaccccgctctggagctgaaaagggctacttggttaaatgcagagaagaatgggcaaagaccaaagacccaactgctgccctcagaaaactacctgtcaaaaggtgtgtggaagggcagctgcttcgaggactttcaaaatatggaatgaagaatatagtctctgcatttggcataatacccagaaataatcgcttaatgtatattcatagctaccaaagctatgtgtggaataacatggtaagcaagaggatagaagactatggactaaaacctgttccaggggacctcgttctcaaaggagccacagccacctatattgaggaagatgatgttaataattactctatccatgatgtggtaatgcccttgcctggtttcgatgttatctacccaaagcataaaattcaagaagcctacagggaaatgctcacagctgacaatcttgatattgacaacatgagacacaaaattcgagattattccttgtcaggggcctaccgaaagatcattattcgtcctcagaatgttagctgggaagtcgttgcatatgatgatcccaaaattccacttttcaacacagatgtggacaacctagaagggaagacaccaccagtttttgcttctgaaggcaaatacagggctctgaaaatggatttttctctacccccttctacttacgccaccatggccattcgagaagtgctaaaaatggataccagtatcaagaaccagacgcagctgaatacaacctggcttcgctgagcagtaccttgtccacagattagaaaacgtacacaagtgtttgcttcctggctccctgtgcatttttgtcttagttcagactcatatatggatttcaaatctttgtaataaaaattatttgtatttttaagtttttattagcttaaagaaataatttgcaatatttgtacatgtacacaaatcctgaggttcttaattttagctcagaatataaattagtcaaaatacacttcaggtgcttaaatcagagtaaaatgtcagctttacaataataaaaaaaggactttggtttaaagtagcaggtttaggttttgctacattctcaaaagacagcaggagtatttgacacatctgtgatggagtatacaacaatgcattttaagagcaaatgcaacaaaacaaatctggactatggataaataatttgagagctgccacccacaaatataaatacagtactcatgctgactgaaataataagacatctacaaatttataaacaaaaagtgattgtcattatcctgcttatgtactagattcaggcaagcattatagactttttggttgcggtggcttttgcatttatattatcaatgccttgcaggaacgttgcattgataggcccattttatttttttattttttttttcgagacaggatctcactctgtagcacaggctggattgcagtgcaatcctgcaattctcaatcttgcactgcagcctcgacctcccaggctccagtgactctcccacctcagcctcctaagtagctgggagtacaggcgcgcaccaccacgcctagctgatttttgtatttttttgtagagacgggggtttggccatgttgccgaggctaactcctgggattacaggcatgagctgtgctggccgggtttttttttcttgatgtaaacgtgtacagctgttttattagttaaggtctaatttttactctaggtgccttttatgttcagaactctttccactggactggtatttgctcaaaaataaataatggtagagaagaaaactataaaaatggacaaggctttcttctatcagtagcgtttaccctttgtcaccagtggctttggtatttccatgtctggcattgcataaacttctctggtgtgaaaggataaatatgcctttctaaagttgtatatcaaaattgtatcaatttttattttctatgatttctagaaacaaatgtaataaatatttttaaaatctcctttctactggttatgtaaataaatcaaataaatatatcaaaa

SEQ ID NO: 4800 - DNA, 2659 bp, Homo Sapiens
  NM_019043
tctcagtctttggtggaaccatcactaggccccaatcccttagtccctcttgcgtcgaggctgcaaaatggttccattcgccaggagacgctcctgagagaagggcgcgcgcggcacaggggccttccttgcacctcggagcaaagcagctcggatagcgccacacgtctgcgcgctgcgtgggaagggcagggctgacagcacttcctccccggggcagcgacctggagcccgggtgcggcagtctgcaccgcgcgtcgctttcccggccggagtctcgccgccttcccgcgccccgcagcgccccgcagagcagtcgagatgggtgagtcaagtgaagacatagaccaaatgttcagcactttgctgggagagatggatcttctgactcagagtttaggagttgacactctccctcctcctgaccctaatccacccagagctgaatttaactacagtgtggggtttaaagatttaaatgagtccttaaatgcactggaagaccaagatttagatgctctcatggcagatctggtagcagacataagtgaggctgagcagaggacaatccaggcacagaaagagtccttgcagaatcaacatcattcagcatctctacaagcatcaattttcagtggtgcagcctctcttggttatggaacaaatgttgctgccactggtatcagccaatatgaggatgacttaccacctccaccagccgatcctgtgttagaccttccactgccaccaccacctcctgaacctctctctcaggaagaggaagaagcccaagccaaggctgataaaattaagctggcgctggaaaaactgaaggaggccaaggttaagaagctcgtcgtcaaggtgcacatgaatgataacagcacaaagtcactgatggtggatgagcggcagctggcccgagatgttctggacaaccttttcgagaaaactcattgtgactgcaatgtagactggtgtctttatgaaatctacccggaactacaaattgagaggttttttgaagaccatgaaaatgttgttgaagtcttatcagactggacaagagacacagaaaataaaatactatttttggagaaagaggagaaatatgctgtatttaaaaacccccagaatttctacttggataacagaggaaaaaaagaaagcaaggaaactaatgagaaaatgaatgctaagaacaaggaatccttacttgaggaaagtttctgtggaacatctatcattgtaccagaactggaaggagctctttatttgaaagaagatggaaagaaatcctggaaaaggcgctattttcttttacgggcttctggaatttattatgtacccaaaggaaagactaagacatctcgagatctggcgtgttttatacagtttgaaaatgtcaacatttactatgggactcagcataaaatgaaatataaagcgcccactgactattgctttgttttaaagcacccccaaattcagaaggagtcccagtatatcaagtatctctgctgtgatgacacaagaacccttaaccagtgggtcatgggaatacggatagccaagtatgggaagactctctatgataactaccagcgggctgtggcaaaggctggacttgcctctcggtggacaaacttggggacagtcaatgcagctgcaccagctcagccatctacaggacctaaaacaggcaccacccagcccaatggacagattccccaggctacacattctgtcagtgctgttctccaagaggcccagagacatgctgaaacatcgaaggataagaagccagccctcgggaaccaccacgacccggcagtgccccgggccccgcacgcccccaagtccagcctgcccccgccccctccggtgcggaggtcctccgacaccagcggcagtcccgccacgcccctcaaggccaagggcacaggcggcgggggcttgcccgccccacccgacgacttcctgccgccgccgccaccgccgccgcccctcgatgaccctgagctcccgccgccgcccccggacttcatggagccgcccccagacttcgtgcccccgcccccgccgtcgtacgcagggatcgcgggctcagagctgcccccgccgccgccgccgccgcccgcgcccgcgcccgcccccgtccccgactccgccaggccgccccccgcggtggccaagaggcctcctgtgccccccaagaggcaagagaacccagggcaccccggcggagcaggaggcggggagcaagatttcatgtcagacctcatgaaagctttgcaaaagaagagaggcaacgtgtcctagggacgggcatgatgagtgttccagagggagaagcatcgctgaccccgagcgcaggttttgctagcagattgccctgacatcttgttcatttcagataaaatgtgatgggaaacttctcactgatgtgctcaagtacaggcataaccattaacccagtagagttcagaatatctgcccaaatgtacatatcgttcccatgtattttaacctaaatggaatgtatcttcccttccaagctgcctaaagcgctgttttaggttcatttattttattatgttcagaagcatcaaataaaagttaaacgtttttccggaaaaaaaaaaaaaaaaaaaaaaaa

SEQ ID NO: 4801 - DNA, 6946 bp, Homo Sapiens
  NM_019044
atgctctgcccggctgcggcgcttcgggcaggcggcggcggcggcggcggcggcggcagagggagtttccgctttgtactccaccccggtagcagctccgcggcagggacagcttcctccggacgcttggcgggcttcgctctcgccttacgacagcccggtcggatcatggggttgcccagggggccggagggccagggtctcccggaggtggaaacaagagaagatgaagaacaaaatgtcaagttgactgaaattctggagctcttggttgcagctgggtatttcagggcaagaattaaaggcttatcaccctttgacaaggtagtaggaggaatgacttggtgtatcaccacttgcaactttgatgtagatgttgatttgctctttcaagaaaactctacgataggtcaaaaaatagctctgtcagaaaaaattgtctcggtcctgccaaggatgaaatgcccacaccagctggagccccaccagatccaggggatggattttattcacatatttcctgttgttcagtggctggtgaaacgagctatagaaacaaaagaagagatgggtgactatatccgctcctactctgtatcccagttccagaagacttacagtctccctgaggatgatgacttcataaagagaaaagaaaaggccatcaagacagttgtggacctctcagaagtgtacaagccccgtcggaaatacaaacgccaccagggagcagaggagctacttgatgaagaatctcgaatccatgctacacttttggaatatggcaggagatatggatttagccgccagagcaaaatggagaaggctgaggacaagaaaacggcacttccagcagggctgtcagctacagaaaaagctgatgcccacgaggaagatgagcttcgagcagctgaagagcagcgtattcagtcgctgatgaccaagatgaccgctatggcaaatgaggagagccgtctcaccgcaagctccgtgggccagattgtgggactctgctctgctgagatcaagcagattgtgtccgagtatgcagagaagcagtctgagctatcagctgaagaaagtccagaaaaattaggaacctcccagctacatcgccggaaagtcatttccttgaacaaacagattgcgcaaaagaccaaacatcttgaagagctgcgagcaagtcacaccagcctacaagccagatataatgaagccaagaaaacgctgacagagctgaagacttacagtgagaaactggacaaagagcaagcagccctcgagaagatagaatccaaagctgatccaagtatcctacagaacctgagagcacttgtagccatgaatgaaaatctgaaaagtcaagaacaggaatttaaagcacattgtcgagaggagatgacacgactacagcaagaaattgaaaacctgaaagctgagagagcaccacgtggagatgaaaagaccctctccagtggagagccgcctggtaccttgacctctgcaatgactcatgacgaagacctagacagacggtataatatggagaaagagaaactttacaagatacgtttactacaggctcgaagaaatcgagaaatagcaattttgcaccgcaagattgatgaagtccctagccgtgccgagctaatacagtatcagaagagatttattgaactctaccgccagatttcagcagtgcacaaagaaaccaagcagttcttcactttatataataccctggatgataaaaaggtttatttggaaaaagagattagtctgctgaactcaattcatgagaacttctcacaggccatggcctcccctgctgcccgggaccagtttttacgtcagatggaacagattgtggaaggaattaagcaaagtagaatgaagatggaaaagaaaaagcaagagaacaaaatgagaagagaccagttgaacgaccagtacttggagctgttagaaaagcagaggctatactttaagactgtgaaagagttcaaggaggagggccgcaagaacgagatgctgctgtccaaggtgaaagcgaaggcctcctgaacatccccagccgtggctgtatgtcattgattttacttttaagcaccgtatatcacctacaagatcatgaaatggttctgaaagcgacagtagagagatgcagttgtgatgatttcaacaacctggatgttttctttctcctctttgcttccattcatctctgttggctgctgttgatggagtcagacagtaaacacgtggcttggataacacccatcatcctatgaagaatatagggagtacttgttctctgttgattcaacttttatgtctccagtaacattgcgcttatgaaggtacctgtatttgtatggactctgaataaagaagaattcatttgtttagcaagtattagttcagcaaccactgagaaataagcactgaggaagattcagagacgtgtaaaacacagttcctactgcacaagtacccagcaggtggcccagggaggcagatacagcacacttgaccgcagaactgggctatccaagatgtttttcagtaaacagaaggcatttagctgaaatgatcagcccatgtagtgttggtcacttgggcctttcacctgccatggtaccttttgttcccagctcctccaggtgccagccagcaggcttggtggtgacagcaactggaacgaaagttcagtgttgttttaatttttatacgttactcaagttgatttctcagaaaattgaaaacagaccttgtgctgaggacacgtcaataaaaattataccttcccctgccccaatgttcatgtgagtcacagcatgcagaggggctgtgcatccccctcattgaaggcacatttgatgaggctacgctgcagatgggtcatggtctgagccaggagagagatagacactgttccctgcactcaaggcaagtagggtgtcaggaggaagagcagtagggtttgcagagatccagggaaacttcctggaggaggcagcatttgagccctatctaaagggagaatcggatgttgataggaagactgttttaaatgaaaatacactatgattaaaaacccaagagagtgcagaggagtacaaggcatgcatgttgggaaaggagggaataagctagtctctgcaggaggcttcagagacccgtctgggaagtagggctgagactaggctttggagggccttgaagggcagctgagggttgattttaatccttggaaatgaccagtgcagatcaaacatggagctcctgctgccctggtcctcaggagtctggtaactcagtcatgttctgtaggtttgtgctccattttgcataaatcttgcaaacataccaggtggcaggtttgcacagtaacacaaaagcttaaacatgtcaagcaagtggggcattcagcagccacagaaatgtgttcatttttagtccctaatggatgtgattaagcagggctgatgtgtacagatttaaaaacacacacacgtgctggattaaaaacagccactggtttcagtgccagggccagcaaggcctacctgagccaggcggaagcagcagcttgcaaatagaaactgccacctgcgagcgcttcttgggtcatgtgcagctccacctcagctggtccctgagccgtggtcatgtgggggttttgaagggctaagttgaagcaagtaattgcaaaagaacaggtggcactctgagggcaggggaaggagacagaagtttgactgcgtttgaaattatttcagtcagggaaacatctgcgttgtcttgttaagcagcttgtaggcccacccctggctaactgaactttgtgagcagttggggcagttatttgaatatttgtccaaaggtggtagggaggcagatgacattctggggttactggagtccacctctgtgctgatggggaaagtatggcatgatgaatccaaagcaaccagtaattctttttgaaagtgcaggcatttattttgagctgtatttcataggagtttcatttggtttggttttggtatagagaggtgtccatagatctctattccctttttttttttatcgacaaggcctactacggataaatcagtttttgttgcctgaatacactttgaattagactacagaagccagtttgagctcaaatttcacacttgctgcagacaactctcagtgtggacagtgcctttctgagtaattaggatgttacatgactttttggtgaagccgtatagggtaaggagatgccccaaggcccctgatcatttcagaagccacctggagcaccagaaggggtcatcttcccagggctatggctctgtgtgcttagacagacatagtatggaattgtgctctaagcccacaggcttctccggagttaaaaggaagcaagaacatccttaagttactttttcaaaatatgcgcttcaggaggaaccaggtttccccaggagagagaggctccctgctcaatcagcacagggagttgctagcgggcaggctgcccagtgctgtggaatctccgccagcctctgggttgggggctccctcccacttcttgcttcttatggagtacatgggactgctctgctttaagccgcgatcagagctgttgtgagcaggacaagattgcgtgatcacgaggtgcgtggggagatgctaggacatttgttgatgtctttgacctgtgctccgtctctgttggatgactgggttagctaacaccactagagggaggtacagaatgttaaacagtcgtcagagtcacactgagggttgttttaacagagggcaaattcccagtttgtcaagcatatctctgttagagtccgaagttcatggttttaatggttctagctcgtagcccttaatattttcaggatagctgggtcctgccagtgtccgctgagtccatcagcacaaccagaaggtccagggtccaggcatgggaagcattctctgacaataccgagccctcgggacctcctgaaaccttgagcagaggctggagaagaccttcagacagtccttttactacctcacaaagtgccatgcccgggacctcagacctcagggttgtgacgttgttgatgttgtcaggccccagtacgtctctagtgaccgaagcagacctgcctgaaagggcactccggacagtgagccctggctctaacctgtgccctcatatttctgctgcctcatatggtcttgtttgcccactctgtaggtgactgatcaccctaaaagggaggtaggtatctagcagtagcacagttactttgagcctgaccacttgttctgaagtgcagatgttgaaacatgcattgaggaagaacactttaaggaagcactttatgatttactcatggctggtgttggcctcaaagtaaaagaacatcttaatgcagaacagtacaataaagagccccataggatggatgccatcatctgtccccatggttgggattgccaaggaaagtgccttgttctgtgcatcttcagaatcccccaggccctctcttgatccttttcatgaagtccagagcattccttctattacaggctgaagatgcattgtaaaaggtaatgctataatagtattccctcttctcaataaatgtgcaaaactggagaatctggtgctgatctgcagcatacttgacaacacagggaataccgtggatgttccacgccagccttacatccgtccccattgcctgcccatgtccagtggccctgcgcaacaaaagtaagggcttgtcttaccacactctccccagcatctagctcaaggtagatgactgactgggaaattccggttggataaaatggcttttccacattgcaactttgcatctctattaggaaaatttagattgaacctttcctctacttgatgcttagtttgagaacagttttcacaactttagagggtctctctcagagtatgttatactgtaaccttgaagtttgagatgaaacaaggtgtcagaggttttgaatctttcaaaggaattgccttttacagatttttttttttattccctaagaagggaaaaagagagggaagaactacactaatgttagagataaggtatgttttggctcaaaatgtgtcatgaacctaaaggtaacttgatgggcagaaatgtctcagccatgtgaaccaagaagtgggaccacagtgcaaggctgtgggtggcagcactagatacggtggtggcaggagtgtgacatgtaggcactccatgggggacagctggacggtgtctatcaaaagtgcaaatgcataagctctttgaactagcaatgctactcctaagaattgtacctgtgtacaaggtacttgtgtacaagagtttttgttgaaacattgtaatagcaaaaagttggagagtgccaccaatacaggggaatggttaaatacattatggccagcttaaacaatggaatagtttgtagaaatttaaaacaatggatcctgtgtgtgtgtactaccatagaatgggccccaagatgcatgattaagtgaggaaaaaagcccatggtatcctaatgtttggaatggagaaagtgtgtagatgtatgtgtgtgcatatgttttcacacagacgtatacacgtgtatatcatatgtccacctgcatatgcctaggatgtctctgggaggatatctagcagcccggcagcctgaattgcctctgggaagaggggtgggaatgacttttcaatgtacaccttttgtaccttttgaattttgtaccatgtacatgtattatctattaaaaaatagttcttaatttttaatttggtatacttttcttaatagaaccaaaatggaagaaaattctgattctctaaatctgctttcttaaagataaagcctttgattcaaaagtaaaaaaaaaaaaaaaaaa

SEQ ID NO: 4802 - DNA, 2646 bp, Homo Sapiens
  NM_019046
ggctggggcggccctgaggacgcgtgcggggcaggtcacgcttgggcctggctgcctcaggagccaccctgcacggcgccgggcgaggctgtgcgcgccctcccggaccctccactttggggctttgcggtgtagcggcgcgccccactcccttacgtgttcagtcccgaatcacgtacgggccgctgcagctccaggacggcggacgccagcgctctcggatccccaggcccctccgtgctcatcccggaccgctccgtccctgaggaaaaaccgccccgtgcccggaaccgcggcttctcccacgcggggcaggccggggctgtgagggggcagcccgcctgcggactaggccgggggtttgaggaggcggctctgccggggacaaagccgggggcgtgaggggcggttctgccgggttcggggcgcgcggggcaggttgcgtgaagaggcggaaagtcccactcgccctcggcttctccctgcccggccgccggtgtcccgcccgccgcctccccgcgcagcccggcccgacccgcggcgatggcccagcccggggacccgcggcgcctctgcaggctggtgcaggagggccggctgcgcgccctgaaggaggagctgcaggcggccgggggctgcccggggccggccggggataccctcctgcactgcgccgcgcgccacgggcatcgggacgtgctggcctatctggccgaggcctggggcatggacatcgaggccaccaaccgagactacaagcggcctctgcacgaggcggcctccatgggccaccgagactgcgtgcgctacctgctgggccggggggcagcggtcgactgcctgaagaaggccgactggactcctctgatgatggcctgcacaaggaagaacctgggggtgatccaggagctggtggaacatggcgccaatccactcctgaagaacaaagatggctggaacagtttccacattgccagtcgagaaggcgaccctctgatcctccagtacctgctcactgtttgcccaggtgcctggaagacagagagcaaaattagaaggactcctctgcatactgcagcaatgcatggccatttggaggcagtcaaggtgcttcttaagaggtgccaatatgaaccagactacagagacaactgtggcgtcaccgccttgatggacgcaatccagtgtgggcacatcgacgtcgctaggctgctcctcgatgaacatggggcttgcctttcagcagaagacagcctgggtgcccaggctctgcacagggcagctgtcacagggcaggacgaagccatccgattcttggtctctgaacttggcgtcgatgtagatgtgagagccacatcaacccacctcacagcacttcattatgcagctaaggaaggacatacaagtacaattcagactctcttatccttgggagctgacatcaattctaaagatgaaaaaaatcgatcagccctgcatctggcctgtgcaggtcagcacttggcctgtgccaagtttctcctgcagtcgggactgaaggattctgaagacatcacgggcaccctggctcagcagctcccaaggagagcagatgtccttcagggctctggccatagcgcaatgacataaggatgtttccaagaggaggcaataaagtgcatgagttgctgggagcctgagcacctttcgtttttcggctcagagaaagccaagtgcaacttgcttcagtcatcctgaacctgagttcaaccaaccgcagccacctacgtttgaccccagcgagatcaaagttgtatatctgaggtgtaccagtggtgaagtcagtgccacatctgcactggcccccaaggtcagctccctgggtctgtctccaaaaatggttgctgatgacatcaccaaccattgactggaagagtctgaggatgatagtgaaactgaccagccacagcagacaggcccagattgaggtggtgccttctgcctctgccctgatcgtcacaaccctcaggaaccaccgacagaaagaaagaaacacaaaaacatgaaacacagtggtagcaccacttctgatgagattgtcaacattgcctaacagatgcagcagcagtctttagccagagaactctctggaaccattaaagaattcctgggggccggttgcggtggctcatgcctgtaatcccagcactttgggaggccgaggcgggaggatcatgaggtcaggagatcgagaccatcctggctaacgtggtgaaaccccgtctcttactaaaaatacaaaaaaattagccaggcatggtggtgggcgcctgtagtcccagctactcaggaggctgaggcaggagaatgctgtgaaccctggaggcagagcttgcagtgagccgaatatgcgccactgcactccagcctgggcaacagagcaagactccgtctccaaaaaaaaaaaaaaaaaaaaagaattcctggggcctgcccagtctgtgagctgccatgttgatagtatcacagatgataccaacagtgaagctgtggaatgcccagctagttaaagaatgcaaaggaaaatattttcacaaagggttatctgataaccaaaaaaaaaaaagacatttcatctaagccacttaaaaaaaaaaaaaaaaaaaa

SEQ ID NO: 4803 - DNA, 2068 bp, Homo Sapiens
  NM_020186
ctgtgattggctgaagctcagctacttgtcacaagaatatactctcagttgcagttaatttacatactaagttaggttgcagttccctacatagcaactcagagtagggaggaaattttaggccaaatttaatttaaattatgttggagcatgaccaaagttggtcatgaccagaagctgaacacagatatggaagctaacacaatatccagtggagagagattgtggtagagtacatggggcgaaatggttgatttctgcatttttgttggtgacgccatcaggatttgctgaagaaccaaacgtgtgacaggaaaggacaacacaaggagctgccagctttggaaaccagttctactctcagtattaccttcgcaaaagatagagctttgtaaatttctagattcctcgttcttattatcctagactatttaaccagaatctccagggtcgtggtcctggaaacaatacgtttaaaactcttcccaaggatccttcagcagccaacttgactttggctaaggagtccgccagctctgggctcacttgggttgtttgcaaggaagagcccatgcccagagtataaattgggagaacagcgctgtgcaaagagcgtgggttggtgagctagtggatggcgagattaatctcactctgatccctaaagcagggtgcagtaatactctaaatgcctcaaatgggttgggaaccatggaaggaatcccggaggagcccgatcttaacgaagcttttctcaggcctttggtaggaggacagaaacgaagttgaatgaaaaagacagtggagtgggactgagaaatgacaacggcccaccacagacctctctctttcaaggcctgtgtcgtcaggacgcaggccagaagaagccacgacgaggcgcaggcgcgactccacgagggccacgcccctcctagagaaggaccgacccgttttccgcccgcagcggagcttgggtttccgggaggacctgattgtgcaagggaccaaaccggatagaggtcgcgcgccctctttcgtctgccttccggttcactaatacgcaagttcgcagaagtgcgggaacgcgccgtccctctgcgcaggcgcagtcggcggtcggcgtggggcgctatgccggggcggcacgtttctcgagtccgggcattgtacaagcgcgtcttgcagctgcaccgtgttctgcccccggacctcaaatccctgggcgaccagtacgtgaaagacgaatttaggagacataagaccgttggttctgacgaggcacagcgtttcttgcaagaatgggaggtgtatgcaacagcgttattgcaacaggctaacgaaaacagacaaaattcaactggaaaagcatgttttggcaccttcctcccagaagaaaaacttaatgactttcgtgatgaacaaattggacagttgcaggagctgatgcaagaagccacaaaacccaataggcaatttagtatttctgagtctatgaaaccaaaattttagtctatacaacaaagcttaataagacatgcaaaaatttagaacccctactttaactgtcattggtttttgaaatatatttaagctttgaaaacacctgttattaatgaaatactcttttattttggatattatgattgcagtatatggatcaagatcactagtgacaattgaaaaaaactattggaataatagcacttgtatgaaattcagttttggaactaaacagcaaatttctagaattttgctgaaaatgttttaaaatgctattctcatccagccatattagtcttctggcttttctttagcttcatcaaataagcatgttgtgataatgatagatgtacaattccaacaaggttattattttttaaatacattgtcattctgaacattttatcacttctagtttaataatacatacatgatttttcttctgaatgtctcttctccctgcatcactgttcattcacaatgaaaggttaggaagaagctttaaaattcactattttactatcaatcatttgtataataaactatacaaagtataaaaaaaaaaaaa

SEQ ID NO: 4804 - DNA, 1638 bp, Homo Sapiens
  NM_020187
ggccaaagcggagcggagcgggggtgaggagagtcgagggaggtgacgcgcgctgccggggcgaggttgcgaggggcggtgttgaagaatgtgtgggcgaacatcctgtcacttacctagagatgttctcacgagagcttgcgcctaccaggatcggcggggccagcagcggctcccggagtggagggaccctgataagtactgcccctcttacaacaagagtcctcaatccaacagcccagtgcttctgtctcgactgcactttgagaaggatgcagactcatctgagcgtatcattgctcccatgcgctggggcttggtcccttcttggttcaaagaaagtgatccttccaagctgcagttcaatactaccaactgtcgtagtgataccgtaatggagaaacggtcatttaaggtgcctctgggaaagggaagacgctgtgtcgttttagcagatggattctatgagtggcagcgatgtcagggaacaaaccagaggcagccatacttcatctattttcctcaaatcaagacagagaagtcaggtagcattggtgctgcagatagtcctgagaactgggagaaagtctgggacaactggaggctgctgacaatggccgggatctttgactgctgggagcccccagagggaggagatgtcctgtattcctataccatcatcacagtggattcctgcaaaggcttgagtgacatccaccacaggatgcctgccatattagatggagaggaggcagtttctaaatggcttgactttggtgaagtctcaactcaggaagctctgaaattaatccacccaacagagaacatcaccttccatgcagtctcttctgtggtgaacaactcgcgaaacaacactcctgagtgtctggctcctgtcgacttggtggtcaaaaaggagctcagggcaagtggcagtagccagaggatgttgcagtggttggccacaaagtcacccaaaaaggaagactcaaaaacacctcaaaaggaagagtcagatgttccccagtggtccagtcagttcctgcagaagagtccactccccaccaagagaggcactgcaggactcctagagcaatggctgaagcgggagaaggaggaggaacctgtggccaagcgtccttacagccagtgacacaggactttcagagaccaaggccagggtctgctgcactgctgttctgataataggttcttaacattgtatgtatatgtgtttgctttgggaggaggtggcactgtgttagttgacagttgtgggctcatgtagtcttttttgccatgagtaggagcccctagtggggctggtggacagctttggaagaggtgtcctgctgctgttaccagccatgtgggccccataggggcactgcgcctgctgccctttcctggcagggctggtggagtcttccctcaaagcatgccttacccagctgggaagtctctgccctgatctggtactccttgtagtaagctgttttctgctcagccactgggctctttcacttttttagttcttaaaaatttatttttaagttctaaaataaaataaaaataagttcttaaaatttatttttttcctgaataaattgtatttggtaaaaaaaaaaaaaaaaaaaa

SEQ ID NO: 4805 - DNA, 2948 bp, Homo Sapiens
  NM_020189
cggaaatgcgtgttctagctttctgtgtgcttaggtgcccgagctactgagggtctaagtccgggcagccgaagagtgtggtaggtaacggtcctcagcgcaagggtcatttcgtcgctgggaagggacggccctcgcccgcggtgatggtggttagcaagatgaacaaagatgcgcagatgagagcagcgattaaccaaaagttgatagaaactggagaaagagaacgcctcaaagagttgctgagagctaaattaattgaatgtggctggaaggatcagttgaaggcacactgtaaagaggtaattaaagaaaaaggactagaacacgttactgttgatgacttggtggctgaaatcactccaaaaggcagagccctggtacctgacagtgtaaagaaggagctcctacaaagaataagaacattccttgctcagcatgccagcctttaagattgaattagattgtgttgttgtggttttatttctgaaagtaaaacttgccataaattagaaaacaatttcccaaaataaaatccttttttgtatgatggtatacagttttcagtaatgatgtatacattgtattgatttttttccctaaatgtgttattttaataaatatctcatgaatgagtttgaagtttgcttggattttgaaatgaatgggactttgtctttattactaattcaccaaatttgttgagcgcaaaagcaattaatgtagtttaagtatttagtatgtacagttctctgtgttaacagctgagaagtaagcaaccttttctgactgcatatggtgtattcctcttttgagtccccataatattttataaattgtaatgccccatcttgtactacagttgtcttattcgtattgtttataaactttgagggttaggactgggtcttactcatctttatgtgccttccttatgcttcaaagaatttaccatctaatggaagagaacatttgcaagttggctccataccaagctccttccacatactctactcatctgaactttgaatgcagaatctttaaattgcaaccccacatactaaggtcaagaaagaacttaatgggaattaatctccacccattagctttaccctgacatcaggattgccaaatccaatggactcttgtctattcttacgtgacttctgctggaaaatgcgaatgttgaccatcctgccacttggaactctcttcccactcctcacattgcttttgctaccactggaagttccttctgtttcttgtggagtaccttttgctgtctgggacttgtagataatggtgtttcctagggctccctccagggccctctgcctcactaactggatatacttttcctgagcaaatcccaggaaacttgcgtcagaccgtgacttcaaatacaggttgataaatgctaaactgtctccaaaccagacttcatcctagcctccacacccagacacccaactgctatggatcaactttttagaatatcctcacttcaaactgaccttacctaaaataatgactttttcccccaataattgcccctgctatattccttatttctgaatggtacctcctagctatatagattatctgaggagcttactgaaatgctgattctgaagataaggggcatggctttaagattctgtatttctggcgagtacccaactggtgctcatgctgctgattgagaaccacttctgaatatagcaaggctgtaaattatccactacgtgccctcgtaattgtcttagttcaagcccagattattgtagtagacttagtatttctttgccttagttgatctgtgacccctccaatatctattccacactgttgcctaagtggccttagtaaaattcaagtctggttattttattcccctgcttggaatttctcaatgtagaatgaaactcattcagcattaacacataggcccttcttgatctgacatcgtgtttctctagttagactaaagaatccccactatgaagttgtttcatccgtaagtacctttgaacccagaagccccctttctcatatgtttctcattcctgtttgcccttcagagttcagctttagttgctaaaacattcagacatccctctgacttagatcccccactactgtttttctgtgagaagcagctatgcataattcctcttcaacacagtagttcttgaaattttgcaggcctctcctggaaaggaggaaatgacttctctgactttgtatgatgcttatttgtggatgaatgggcaagggaaaaaatgaaggaacaagtgaatgaacagtatgggagtatgagaaaaggtataaattgggtatagttgagaaaaggattcaaattgatctttggttcgagagacaatttcatctttctgatgaatttaaagtgtagtctttgaaccagctgggcttaattatgtaaagttttgagcctgagataagcacacaatcacaaaacctacccaaacaagttttttgtttcacttcatctcttataaaacaatgttctaaagtaagtgatagggatgctcatcattctgctacctattatcacaatgaaaacaatcataaatagtacacaggaaaggtgagaaatagcggatagttcttatttcatagtactgtatatggaaataaaccaaatttgctcatagagatactattttattacctcaaaaatatataaaaatgaaaacgttatgaaaatattttaaaatgggatttaaaaataattgagaacatcacagcaatttagaatactaaagagcatagctttaaaatgatagtgctgagaactccccacctctaccccaccacctgtaggcttctttgacaacttacaaatgttctctagtttgtatctagaatcacttatatctttcaaataaaccaactttgtgaacatcttgaaaaaaaaaaaaaaaaaa

SEQ ID NO: 4806 - DNA, 1155 bp, Homo Sapiens
  NM_020191
tgataatcatggcgcccctcggaacaactgtattgctgtggagcctcttgaggagttctccgggcgtggaacgggtctgtttccgggctcgaatccagccctggcacggtggcctgctccaaccgctaccttgctctttcgagatggggctgccacgccgccggttcagctccgaggccgcagaatctggtagcccagagaccaagaaacctacatttatggatgaggaagttcaaagcatactcacgaaaatgacaggcttgaacttgcagaagacttttaagccagctatacaagaactgaagccaccaacctataagctaatgactcaggcacagttggaagaggctacaagacaggcagttgaggcagctaaagtacgattaaaaatgccaccagttctggaagagcgagtaccaataaatgatgtgttagctgaagataagattttggaaggaacagaaacaaccaaatatgtgtttactgatatatcatatagcataccacaccgggagcgttttattgtcgtcagagaaccaagtggcacactacgcaaagcctcttgggaagaacgggaccgaatgatacaagtttatttcccaaaagaaggtcgtaaaattttgacaccaataattttcaaggaagaaaatcttaggactatgtatagccaggacaggcatgttgatgtcctcaatctctgctttgcccagtttgagccagattccacagagtatatcaaggttcatcacaagacctatgaagatatagataaacgtggaaaatatgaccttttacgttcaacaagatactttggtggaatggtgtggtattttgtaaataataaaaagattgatggtttgctgattgaccagattcagagagatttaatcgatgatgcaaccaacttggtccagctgtatcacgtgctccatccagatggccagtcggctcaaggggccaaggatcaggctgctgagggaataaatttaatcaaggtctttgcaaaaacagaagcacagaagggagcctatatagaactaacactgcagacttatcaagaagcactcagtcgccattctgcagcttcctaaaaatattttaaaaatacatttattttactaaaaaaaaaaaaaaaaaaaaaaaaaaaaaaaaaaa

SEQ ID NO: 4807 - DNA, 907 bp, Homo Sapiens
  NM_020192
gtaattgcctcggtgatgtcgtgggttcaagcagcctccttgatccagggccctggagacaaaggggacgtgtttgacgaagaagcagacgagtcgctcctggcgcagcgggaatggcagagtaacatgcaaagacgagtcaaagaaggttatagagatggaatagatgctggcaaagcagttactcttcaacagggcttcaatcaaggttataagaaaggtgcagaagtcattttaaactatggacgactccgaggaacattgagtgctttgctctcctggtgtcaccttcataataataattcaactttgatcaataaaataaacaatcttctggatgcagttggccagtgtgaagagtatgtgctcaaacatctgaaatcaatcactccaccgtcccatgttgtagatttattggactccattgaggatatggacctttgtcatgtagttccagctgagaaaaagattgatgaagctaaagatgaaagactctgtgaaaataatgctgagtttaacaaaaactgtagcaagagccatagtgggatagattgttcatatgtagaatgttgtagaacacaggagcatgcacattcagaaaacccaagccccacatggattttggaacagacagccagtttagttaaacagctgggcctatcagtagatgtattacaacacctcaaacaactataaaattaccttcccttttctaatgaaaataatgttcagaacatttggtttcctaacaatcgaaatttgtactggtttctgcatcaaacacctcaactgtagggttaccctttatggaagtttgaaattaacactattgtcttcaaaattaacactattaaatgtaatataagcctttaaaaaaaaaaaaaaaaaaaaaaaaaaaaaaaaaaaa

SEQ ID NO: 4808 - DNA, 2032 bp, Homo Sapiens
  NM_020194
gttactttttaaatggacaaaagtggctctcaatccagcacatgcacattgaagcaagttaaaggatttaatatgaagcacagaagcagatagtgccaaatagcaagcagtagttgttacacatttctggaaaagcagtgtccgtgttgttatgtacacctccaaaaaaagttcaaatgtgtaggggaattgttgtgtaaagtaaactgaactgcagggtagcagtattttaatagctattatagacctgtatttactgtatttaaatgagtaaaggaacaagcagtgacacatcactaggaagggtgagcagggcagcatttccttctcccactgctgctgagatggcagaaattagtcgaattcagtacgaaatggaatatactgaaggcattagtcagcgaatgagggtcccagaaaagttaaaagtagcaccgccaaacgctgacctggaacaaggattccaagaaggagttccaaatgctagtgtgataatgcaagttccggagaggattgttgtagcaggaaataatgaagatgtttcattttcaagaccagcagatcttgaccttattcagtcaactccctttaaacccctggcactgaaaacaccacctcgtgtacttacgctgagtgaaagaccactagattttctggatttagaaagacctcctacaacccctcaaaatgaagaaatccgagcagttggcagactaaaaagagagcggtctatgagtgaaaatgctgttcgccaaaatggacagctggtcagaaatgattctctgtggcacagatcagattctgccccaagaaataaaatttcaaggttccaggcaccgatttctgcaccggagtacactgtgacaccatcgccacaacaggctcgggtctgtcctccccatatgttacctgaagatggagctaatctttcctctgctcgtggcattttgtcgcttatccagtcttctactcgtagggcataccagcagatcttggatgtgctggatgaaaatcgcagacctgtgttgcgtggtgggtctgctgccgccacttctaatcctcatcatgacaacgtcaggtatggcatttcaaatatagatacaaccattgaaggaacgtcagatgacctgactgttgtagatgcagcttcactaagacgacagataatcaaactaaatagacgtctacaacttctggaagaggagaacaaagaacgtgctaaaagagaaatggtcatgtattcaattactgtagctttctggctgcttaatagctggctctggtttcgccgctagaggtaacatcagccctcaaaaatactgtctcaacagctggaaatataaaagatttgcaaacttctttgtttctgtctctgcattgtatgccattttatagtccacaccctgaaaatgtatttcttccagaaagtctggaggaaggacctatatttgtagaagtaaaggtatattctgtcactcagctgtattcacgtctgagcagttctgcagtaacacctgcttaaaattctccctttgcatgttttgtaaataggctccagttttgttttttaaaaggaatttattttttgcctcatcagtccacccaactgattctgaatgggagagagtctgtagagaattgattcagaaaagtgtctgtgaaagaaaaacaattattttgtcctgtttctcaaacagtgttaagcagttttgttaatagacatttttgcatcgacacttcaacattaacactttgaaagtcatggtctggtgccagatttaagaaactcgaaccacctaatatttcataaccttcttcattaggtacttgtacagattaatttctaacattgcagcagtttcatatgtgtgcaatatgtgcattctttcattttagttttgcacttggttttctataaagtacgtttttactcagttcatgcgtgaacaatttaaaaaacgacagaataaggtacaaatgtagtgtatttaataaactgtcaaccaaagaaaaaaaaaaaaaaaaaaaaaaa

SEQ ID NO: 4809 - DNA, 1247 bp, Homo Sapiens
  NM_020195
actttacgcaggcgcgttaggtcctagtcgctatgcgtgtgcttgtgggtggcgggacaggcttcattgggacagccctaacccagctgctgaatgccagaggccacgaagtgacgttggtctcccgaaagcccgggcccggccggatcacgtgggatgagctcgctgcatcggggctgccgagctgcgatgccgccgtcaacctggccggagagaacatcctcaaccctctccgaagatggaatgaaaccttccaaaaagaggtaatcggcagccgcctagagaccacccaattgctggctaaagccatcaccaaagccccacaaccccccaaggcctgggtcttagtcacaggtgtagcttactaccagcccagtctgactgcggagtatgatgaagacagcccaggaggggactttgactttttctccaacctcgtaaccaaatgggaagctgcagccaggcttcctggagattctacacgccaggtggtggtgcgctcaggggttgtgctgggccgtgggggtggtgccatgggccacatgctgctgccctttcgcctgggcctggggggccccatcggctcaggccaccaattcttcccctggatacacatcggggacctggcaggaatcctgacccatgcccttgaagcaaaccacgtgcacggggtcctgaatggagtggctccatcctccgccactaatgctgagtttgcccagaccttgggtgctgccctgggccgccgagccttcatccctctccccagcgctgtggtgcaagctgtctttgggcgacagcgtgccatcatgctgctggagggccagaaggtgatcccacagcgaacactggccactggctaccagtattccttcccagagctaggggctgccttaaaggaaattgtagcctaagtaggtcgtggcaagggcctgaggcctgttcctcacaggcttccaggttaggcactgtgaataggctcagctcctctagagagctgaagccatctggttcttagattcctctcccagtcctctttcccattgttctgttgctccaccttattgtctcaaggccgtaatctcatcaggttgggacattaatcttttcaactccttgtaagatttcccagtttggtttctctacatgtcctgcagctgccccacttctcctttacgctgtgtagagaatgctctgcagtttaggcaataaaaataaattgtctcactaaaaaaaaaaaaaaaaaa

SEQ ID NO: 4810 - DNA, 1689 bp, Homo Sapiens
  NM_020197
gggcacagccggcggccgcgccccgccgccaccatgagggccgagggcctcggcggcctggagcgcttctgcagcccgggcaaaggccgggggctgcgggctctgcagcccttccaggtgggggacttgctgttctcctgcccggcctatgcctacgtgctcacggtcaacgagcggggcaaccactgcgagtactgcttcaccaggaaagaaggattgtccaaatgtggaagatgcaagcaggcattttactgcaatgtggagtgtcagaaagaagattggcccatgcacaagctggaatgttctcccatggttgtttttggggaaaactggaatccctcggagactgtaagactaacagcaaggattctggccaaacagaaaatccacccagagagaacaccttcggaaaaattgttagctgtgaaggagtttgaatcacatctggataagttagacaatgagaagaaggatttgattcagagtgacatagctgctctccatcacttttactccaagcatctcggattccctgacaatgatagcctcgtagtactctttgcacaggttaactgtaatggcttcacaattgaagatgaagaactttctcatttgggatcagcgatatttcctgatgttgcattgatgaatcatagctgttgccccaatgtcattgtgacctacaaagggaccctggcagaagtcagagctgtacaggaaatcaagccgggagaggaggtttttaccagctatattgatctcctgtacccaacggaagatagaaatgaccggttaagagattcttatttctttacctgtgagtgccaggagtgtaccaccaaggacaaggataaggccaaggtggaaatccggaagctcagcgatcccccaaaggcagaagccatccgagacatggtcagatatgcacgcaacgtcattgaagagttccggagggccaagcactataaatcccctagtgagctgctggagatctgcgagctcagccaggagaagatgagctctgtgtttgaggacagtaacgtgtacatgttgcacatgatgtaccaggccatgggtgtctgcttgtacatgcaggactgggaaggagccctgcaatatggacagaaaatcattaagccctacagtaagcactatcctttgtactccctcaacgtggcctccatgtggttgaagctagggagactctacatgggcctggaacacaaagccgcaggggagaaagccctgaagaaggccattgcaatcatggaagtagctcacggcaaagatcatccatatatttctgagatcaaacaggaaattgaaagccactgaaactatgcagcatttcagttttcatttaaacacttagttcagaaaccttaaaggatttgaatatttcaaattgcacacgtcactccagcatctctgtaaaataattggaatgaaaatacttcttgcacttaaacactgcacatgccgtactttgaggttagtctgaatcttgaactttaataccaaattaattttgaatgcttttgtttcctaagagataatggcatggtttcatatgttatactttggacagacagagttttaaaaatggaattattttttctttcatgcctcttgtaatgttctgaacaaacttgaatgatgaaagtattaaagagatatcagtatttaaaa

SEQ ID NO: 4811 - DNA, 1271 bp, Homo Sapiens
  NM_020202
accgtagcgacgccgcggtccgccggatctccagcgctcagtccgcgccgcaggtggtgcttgtctgcagagtcatgacctctttccgcttggccctcatccagcttcagatttcttccatcaaatcagataacgtcactcgcgcttgtagcttcatccgggaggcagcaacgcaaggagccaaaatagtttctttgccggaatgctttaattctccatatggagcgaaatattttcctgaatatgcagagaaaattcctggtgaatccacacagaagctttctgaagtagcaaaggaatgcagcatatatctcattggaggctctatccctgaagaggatgctgggaaattatataacacctgtgctgtgtttgggcctgatggaactttactagcaaagtatagaaagatccatctgtttgacattgatgttcctggaaaaattacatttcaagaatctaaaacattgagtccgggtgatagtttctccacatttgatactccttactgcagagtgggtctgggcatctgctacgacatgcggtttgcagagcttgcacaaatctacgcacagagaggctgccagctgttggtatatccaggagcttttaatctgaccactggaccagcccattgggagttacttcagcgaagccgggctgttgataatcaggtgtatgtggccacagcctctcctgcccgggatgacaaagcctcctatgttgcctggggacacagcaccgtggtgaacccttggggggaggttctagccaaagctggcacagaagaagcaatcgtgtattcagacatagacctgaagaagctggctgaaatacgccagcaaatccccgtttttagacagaagcgatcagacctctatgctgtggagatgaaaaagccctaaagtttatgtttctaatgtgtcacagaataggacgatatgattctacaacataatcaactccctattaaattctttaatgaagattttttttttaattcggccttgtccttcctaggttctctattgagatgagaaagcctcattatgctgacattttccacgccacattaaatagttaaaaaggatgcagcctggagccagagagcagaaagctgggctggttctgaagcttcttccatacttaagttgcctccaagcagtttgtgaaagtatcagatcttggtatcctggtgattgattcacctaatataaatatatttgtgtcatgaacctcttatcccgttgctggagttgtaatctccatca

SEQ ID NO: 4812 - DNA, 1745 bp, Homo Sapiens
  NM_020230
gtgtctccatagcaaccgctccatctgattgcccctccccgctcccagaggccacctagtgcgcaggcccgcctgatgtcgtcccacgccgtgccggctctcaggcgccggaagtgagctgcgcagcgccggaagcggcggacgcaggaggcctcgtggaggacacagcagcatgggacagtcagggaggtcccggcaccagaagcgcgcccgcgcccaggcgcagctccgcaacctcgaggcctatgccgcgaacccgcactcgttcgtgttcacgcgaggctgcacgggtcgcaacatccggcagctcagcctggacgtgcggcgggtcatggagccgctcactgccagccgtctgcaggttcgtaagaagaactcgctgaaggactgcgtggcagtggctgggcccctcggggtcacacactttctgatcctgagcaaaacagagaccaatgtctactttaagctgatgcgcctcccaggaggccccaccttgaccttccaggtcaagaagtactcgctggtgcgtgatgtggtctcctcactgcgccggcaccgcatgcacgagcagcagtttgcccacccacccctcctggtactcaacagctttggcccccatggtatgcatgtgaagctcatggccaccatgttccagaacctgttcccctccatcaacgtgcacaaggtgaacctgaacaccatcaagcgctgcctcctcatcgactacaaccccgactcccaggagctggacttccgccactatagcatcaaagttgttcctgtgggcgcgagtcgcgggatgaagaagctgctccaggagaagttccccaacatgagccgcctgcaggacatcagcgagctgctggccacgggcgcggggctgtcggagagcgaggcagagcctgacggcgaccacaacatcacagagctgcctcaggctgtcgctggccgtggcaacatgcgggcccagcagagtgcagtgcggctcaccgagatcggcccgcggatgacactgcagctcatcaaggtccaggagggcgtcggggagggcaaagtgatgttccacagttttgtgagcaagacggaggaggagctgcaggccatcctggaagccaaggagaagaagctgcggctgaaggcgcagaggcaggcccagcaggcccagaatgtgcagcgcaagcaggagcagcgggaggcccacagaaagaagagcctggagggcatgaagaaggcacgggtcgggggtagtgatgaagaggcctctgggatcccttcaaggacggcgagcctggagttgggtgaggacgatgatgaacaggaagatgatgacatcgagtatttctgccaggcggtgggcgaggcgcccagtgaggacctgttccccgaggccaagcagaaacggcttgccaagtctccagggcggaagcggaagcggtgggaaatggatcgaggcaggggtcgcctttgtgaccagaagtttcccaagaccaaggacaagtcccagggagcccaggccaggcgggggcccagaggggcttcccgggatggtgggcgaggccggggccggggccgcccagggaagagagtggcctgagcccaagccgcaccggagcagcggctggattgaacgccccagattggggcccgagatgtggccctcggtttcctttcataaaggagttgtgtccccagcccttccactccagtaaagaactgaattggccagggaaaaaaaaaaaaaaaaa

SEQ ID NO: 4813 - DNA, 1973 bp, Homo Sapiens
  NM_020231
ggggcatctttgtgcggggccgcgcttccgccagcgccgcagcggggaatctgcagtaggtctgccggcgatggagtggtgggctagctcgccgcttcggctctggctgctgttgttcctcctgccctcagcgcagggccgccagaaggagtcaggttcaaaatggaaagtatttattgaccaaattaacaggtctttggagaattacgaaccatgttcaagtcaaaactgcagctgctaccatggtgtcatagaagaggatctaactcctttccgaggaggcatctccaggaggatgatggcagaggtagtcagacggaagctagggacccactatcagatcactaagaacagactgtaccgggaaaatgactgcatgttcccctcaaggtgtagcggtgttgagcactttattttggaagtgatcgggcgtctccctgacatggagatggtgatcaatgtacgagattatcctcaggttcctaaatggatggagcctgccatcccagtcttctccttcagtaagacatcagagtaccatgatatcatgtatcctgcttggacattttgggaagggggacctgctgtttggccaatttatcctacaggtcttggacggtgggacctcttcagagaagatctggtaaggtcagcagcacagtggccatggaaaaagaaaaactctacagcatatttccgaggatcaaggacaagtccagaacgagatcctctcattcttctgtctcggaaaaacacaaaacttgttgatgcagaatacaccaaaaaccaggcctggaaatctatgaaagataccttaggaaagccagctgctaaggatgtccatcttgtggatcactgcaaatacaagtatctgtttaattttcgaggcgtagctgcaagtttccggtttaaacacctcttcctgtgtggctcacttgttttccatgttggtgatgagtggctagaattcttctatccacagctgaagccatgggttcactatatcccagtcaaaacagatctctccaatgtccaagagctgttacaatttgtaaaagcaaatgatgatgtagctcaagagattgctgaaaggggaagccagtttattaggaaccatttgcagatggatgacatcacctgttactgggagaacctcttgagtgaatactctaaattcctgtcttataatgtaacgagaaggaaaggttatgatcaaattattcccaaaatgttgaaaactgaactatagtagtcatcgtaggaccatagtcctctttgtggcaacagatctcagatatcctacggtgagaagcttaccataagcttggcacctataccttgaatatctgctatcaagccaaatacctggttttccttatcatgctgcacccagagcaactcttgagaaagatttaaaatgtgtctaatacactgatatgaagcagttcaactttttggatgaataaggaccagaaatcgtgagatgtggattttgaacccaactctacctttcattttcttaagaccaatcacagcttgtgcctcagatcatccacctgtgtgagtccatcactgtgaaattgactgtgtccatgtgatgatgccctttgtcccattatttggagcagaaaattcgtcatttggaagtagtacaactcattgctggaattgtgaaattattcaaggcgtgatctctgtcactttattttaatgtaggaaaccctatggggtttatgaaaaatacttggggatcattctctgaatggtctaaggaagcggtagccatgccatgcaatgatgtaggagttctcttttgtaaaaccataaactgtgttactcaggaggtttctataatgccacatagaaagaggccaattgcatgagtaattattgcaattggatttcaggttccctttttgtgccttcatgccctacttcttaatgcctctctaaagccaaaaaaaaaaaaaaaa

SEQ ID NO: 4814 - DNA, 1141 bp, Homo Sapiens
  NM_020232
agggactcaaaggaccctcccgcgccccgcgaggctccggggtctcgggcttccgccttcttgctgccctcgttcttgccagggccgcggttagtccctgctggccaccccactgcgaccatgttcgttccctgcggggagtcggcccccgaccttgccggcttcaccctcctaatgccagcagtatctgttggaaatgttggccagcttgcaatggatctgattatttctacactgaatatgtctaagattggttacttctataccgattgtcttgtgccaatggttggaaacaatccatatgcgaccacagaaggaaattcaacagaacttagcataaatgctgaagtgtattcattgccttcaagaaagctggtggctctacagttaagatccatttttattaagtataaatcaaagccattctgtgaaaaactgctttcctgggtgaaaagcagtggctgtgccagagtcattgttctttcaagcagtcattcatatcagcgtaatgatctgcagcttcgtagtactcccttccggtacctacttacaccttccatgcaaaaaagtgttcaaaataaaataaagagccttaactgggaagaaatggaaaaaagccggtgcattcctgaaatagatgattccgagttttgtatccgcattccgggaggaggtatcacaaaaacactctatgatgaaagctgttctaaagaaatccaaatggcagttctgctgaaatttgtttcagaaggggacaacatcccagatgcattaggtcttgttgagtatcttaatgagtggcttcagatactcaaaccacttagcgatgaccccacagtatctgcctcacggtggaaaataccaagttcttggagattactctttggcagtggtcttccccctgcacttttctgatctaatttctgttttataccttatacccaaaacacttactaccaacacagctgttaaacattctatacaaaaaaattgtatgatctggtattaggaaattactttcacagtaaatatcaaagaaaaaagattaagggtctctttgccatgcttttcatcatatgcaccaaatgtaaattttgtacaataaaattttatttcctaagtaaaaaaaaaaaaaaaaaaa

SEQ ID NO: 4815 - DNA, 2750 bp, Homo Sapiens
  NM_020234
gtctggtccgtgcgcgatcacggcccggcgcgtggctcgggctcgggcggagctggagacgtgtggagctgttcgaggactcgcgggtgtgcagggatgcggtttaatattttcatgtgattcctaaaagaatctgaggctcaagaaaagagggcatcttaatatcctgcactttcagtcattgagggcatgatcacaaagatcaaagccatttttaggcagtgcacctatgatatgtgttttagaaatagccgttaaactttggtttgaatgaagaatgtctctcaatccacctatatttctcaaacgaagtgaagaaaatagttcaaaatttgtggaaacaaaacagtcacaaactacttccatagcttcagaagatccccttcaaaacttatgtttagcatctcaagaagttcttcaaaaagctcagcaaagtgggagatcaaaatgtctcaaatgtggtggttccagaatgttctactgctatacatgttatgttccagttgaaaatgtacctattgaacagattccacttgtgaagcttccattgaagattgacatcattaaacatccaaatgaaacagatggcaaaagtactgctatacatgcaaaactcttagcacctgaatttgtaaacatttacacgtatccgtgtattccagaatatgaagaaaaggaccatgaagttgcactcatttttcctggacctcagtctatctcaataaaagatatttcttttcatctgcaaaaaaggattcaaaataatgttagaggcaaaaatgatgaccctgacaagccatcttttaaacgcaaaagaactgaagaacaagagttctgtgatttgaatgacagcaagtgcaaaggcacaacactgaaaaaaattatatttatagatagcacctggaaccaaacaaacaaaatattcactgatgagcgacttcaagggttgttacaagttgagttgaaaacaagaaaaacttgcttttggcgccatcaaaaaggaaagccagatactttcctttctacaattgaagccatttactactttctggtagactaccatactgatatattaaaagagaaatacagagggcaatatgacaatcttttatttttctattcttttatgtaccagttgataaagaatgccaaatgctctggagataaggaaacaggaaaacttacacattagtttttaacaagccacttatgtctttttattttgctaacattaataaacttatatttgtgctttgttttttcttaagaaataatcatatataatgcctgtaagaccatttgaaaaaattccagtttcatatatatcacttcatatttcttgaaggaaattgtatctgggggaatttttcagagatactgttgattgaaaaacttacttcagaagttatttgctcagtgaaacctcagtttcattactacattttaatatagtgtgttatgtctctgtgattagatataacatattccattagatctaattagctatttatttcaacatctttatatcttttcacctgtactcatgaccacctttagaagtaaatggggttacaatctgctggctgaaaaataggtcataagtgatttttcttgaggttagtagcaaacataggcagaactagaattagaattctggtatctagggctgtttctttaagtcctaaggttgttaaaagcagagactctggagctagactacctgaatctaaatctcagcctttctgcttatcagccatgtcattttcttccatttgtacaaagcaggcaatactgagcaactaccttataggaataactgagttaatatctaaggggctttcagcagtacctgaaatatagtaagtgttacatatatgtttactctttttattttatttggaattgtgaactgataataattgaagcctacctgctagtggccatctctgctgccaggtgaaaagagcctgacttagaatgaagtcagcgaaggaaagcagagtggagagaaaaagagagactgagtcctgatgacatcatttatttacctagacctagctgcttgtgaatagagccctactgtgctgaatagcttctgtctgctcttttctattctgctccctgctctgtgaggtaggttcctttgctctcttgcttttggttgggttcaacaaatgggaagcaccagtgggagattagaagttgagaggaaaatgaaatgatgttatttatttccctggctcctttcctgccatgtcatcatcagttggctgtgttcctctactaaatagtaccttatcaggaatcctatctcttctgttcccaagcagttaccccagttacctcactaggtttagttcctgctccctccctttaccccttttcacttagggttggtaatagcttacagttattactagccccagtatagttcactacaacttgttgctttacctaaaccctgctcatacatttgtaaatactgtagttgttttattacactcttctcaaatgtccccacttgaaatagccttctatttcttttggggactctgataaattcacctgtttgggtgaaataatagcacatttcctgaagtatatacagtgggacacatgatgttttatgggggaaagagttcttggtgaaattagtttgctgtacattacgttgtttccctcccagggattcagaaggcaaaacatattaaaggttctgaaaagtcctgaaataaacattttgaacttta

SEQ ID NO: 4816 - DNA, 8824 bp, Homo Sapiens
  NM_020235
aaaatgagtgttttcagtctctccgggttgcatgtactgtatgtggagcagtgtacagtgaagcggaggcagagcggctccgcgagcttctctccactttcccatagagaaaccctgactggccgctgagggctagctacacacacgccctcacgcccggcgagcccgcgaggtcactatcatatgacaaaggctttgccgcagttcatcttcctccctgtgtactttccatttgccttcctggaatcctgctgcatcacagaagctggaagttctgatgttccactgaaatcacaatggaaagtcttgacttgactggtcacagtaatgaaaggcagtaatagaaataaggatcattcagcagaaggagaaggggttggaaaacgaccaaaacgaaagtgtcttcagtggcatccattgctagcaaagaaacttcttgatttttcagaagaggaagaagaggaagacgaagaggaggatattgataaggttcaacttcttggggccgatggcctagagcaagatgttggtgaaactgaagatgatgaatcaccagagcagcgagcccggagaccaatgaatgcatttcttttattttgcaaacgccatcgctctcttgtacgtcaggaacaccccaggcttgataaccgaggtgctaccaagatactagctgattggtgggctgttcttgatccaaaggaaaagcagaaatacacagacatggccaaggagtataaggatgcatttatgaaagcaaatcctggctacaaatggtgtcctaccacaaacaagcctgtgaaatccccaacacccactgtcaatccacgaaagaaactttgggccttcccatctgactcttcaagagacttgccaagccccaagaaagcaaagactgaagaaatgcctcagcttaactttggaatggctgatcctactcaaatgggaggcctgagtatgctgctgttagctggagaacatgctcttggcacaccagaggtatcctctggcacatgcaggcctgatgtttcagaatctcctgaattacgtcagaagtcaccattgtttcagtttgccgagatatcttcaagtacgtcccactctgatgcttctacaaagcagtgtcaaacatctgccttgtttcagtttgcagagatttcttcaaacacttcgcagttgggtggtgctgagcctgtaaaacgctgtggaaagtctgcactctttcaactggcagagatgtgcctggcatcagaagggatgaaaatggaagaatcaaagctaataaaagcaaaagaatccgatggtggaagaattaaagaattagagaagggaaaggaagaaaaagaaattaaaatggagaaaacagatgaaactaggttacagaaggaagcagaatttgaaaaatcggctaaggaaaatttaagagattctaaggaattgagaaattttgaggcattgcaaatagatgacataatggctataaaaatggaagatcccaaagaaattagaaaggaagagttagaagaagatcacaaatgtagtcattttcctgatttttcttattctgccagtagcaagataataattagtgatgttcccagtagaaaggatcatatgtgccatcctcatggaattatgatcattgaggatcccgcagcattaaacaagccagaaaagctaaaaaagaaaaagaagaaaagcaaaatggatcgacatggaaatgataaatccacacccaagaagacttgcaaaaagaggcagtcttcggaatctgacattgagagcgtcatatataccattgaagccgtcgcaaaaggagactggggcatagagaaacttggagatacccctcgcaagaaggtccgcacatcctcaagtggcaagggaagcattttggatgccaagccaccaaagaaaaaagtgaaatcaagagagaagaaaatgtcaaaggagaaatcctcagacaccaccaaagagtcaagacctccagatttcattagtatttctgctagcaagaacatttctggtgagacaccagagggtataaaagcagaaccattgacccctatggaagatgcactaccacccagcctatcaggacaggccaagcctgaggacagtgactgtcacagaaaaatagaaacttgtggttccaggaaatccgagaggtcttgcaaaggtgctctttataaaaccctggtgtctgagggcatgctcacctctctgcgagctaatgttgacagaggaaaacgaagctcaggaaaaggaaactcctctgatcatgaagggtgttggaatgaagaaagctggacatttagtcagagtgggaccagtgggagcaagaagttcaagaagacaaagccaaaagaagactgtctccttggctccgcaaagctggatgaagaatttgaaaaaaaattcaacagcctccctcaatatagtcctgttacatttgaccggaaatgtgtacctgtcccaagaaaaaagaagaagactggaaatgtgtcctcagaaccgactaaaaccagcaaaggaagtggggataaatggtcaaacaagcaactcttcttggatgccattcaccctacagaagccatattttcagaagacagaaacaccatggagcctgttcataaggttaaaaatatcccatccattttcaacactccagagccaacaacaacgcaagaacctttggtgggcagccaaaagagaaaagcaaggaaaaccaagattacacaccttgtcaggacagcagatggccgggtatcaccagcaggaggtactttggatgacaaaccaaaggaacaactgcagaggagtctccctaaagcaactgagacagactgcaatgacaaatgctcacacaacaccgaggtcggggagacgcggagcagtactccagaaatgcctgccgtgtctgcgttctttagcctcgctgcgctggctgaagtggcagccatggaaaatgtgcacagaggtcagaggtcaactccgctcacccatgatggacagccaaaagaaatgccgcaggctcctgtacttatttcctgcgctgaccagtgaagcgccctttcattgtaaaacattgtgctttacctactaccctagccttgtctttaccgagggatgctagtgagtccaagtggtggaaaatatagactgcaaacaagtgcttgttgccccacacggcccagattcacttgaagcagaagttagcatcctgggccagtttgttctctcagaacccagaatctttgagggtaaggttatctgtctgatactgagcagaaacagaatgatcctggagctttgctttctattgaaggcttttgacggtaataggtggtaacttggtaaaaggctgcctttactgtagctcacccagcatctcttttaccaaccagagagtgtgaaactagtttcatatattacctagttattctttcaaaacaaaacaaaaaaaaaacaaaaactgacgcactgcactagttattattagatattcttagtcttttttgtacatggagatttaagtttaagatggtttatataataggttatacctacatttatattgtagaataaatattaaaaagcctgttccagagactcccaagcagcctgggcaggcagatgtaccattgttagtggtgtatgctcggcctcgtggtccatatattctgcacttttatatttgccaccagaatggtagtttgctggcaaaaaaaaaaaaaaaagagagagagaaaaaattacaactcttacaatctgaatttttttcttagccttgagtgaccaagaagaatttgcttgaggcaaattgtggcaaatattttcccagacaggggaagagtcctgcagattacagattactggtgttttcatgccttgaggattcttttatttttacataggggtctaagtgaccaatggattgttcatacaaacaaaaaaaaagacaaaaatattattcagaagtgaccttagtattacttcactattctaaacacattgaagacactcacttcatgtggacttggagctacagaccttttacatccatcacagattggctggacgggttgcaattgctatgcacagcctgattggcactgcaggtttttagagccattttgagtttgtgttgtttaggaggtactgagtcaatgatgagggaggtatgcctgaccagagtgggactctcagtcatagatccacctgcaagtctctgtttcctttttgtgttttgttgcttttgaacataaaaccaaccatacataagcagcgccaagtggattaactggcttagaacattcaacatattgacttaaccacctgacattcacagtgtcttgtttcctagcaacagatgcaaagtgataaatcaaaattagtctgaggctacagattttacagggtatttgttctatagcacaaagtatttccccactcttgcgtcacagcacaaactaccaaattttaattattggattccagcaataatttttaatggttttcaaactggcggaattttgacagtgctagttcgagtttgaagcttttgaattagatctctaaatggtgacagtttacatggttttatctagctttcttatttatacttgactgaattgtaatgattttttttctaattgtaatttgacgtaatagccatacaaaaaatgactctattcatactaggtttagcttctcatggttgtagatattacttcagttccggtgctggaaaatatgtacaacatactaacaggattgaaaaaaaaatagaggtttttcttcttgtttttttttccaaagcaggtaaagagggtagcaaagcatcggaatgatgtgctcaaaaatgcatattcctggtggggatggaggaagaaggcattagtaaaaggttaatcaaacgttacaacttaaccccattcatgtaggaataaatcaagtgagcagttccagacttttgcataatatttttactatgatgctgttttattaatattttctaaatttcaaaacaaaaagtgaatgtttgaaattgctgggtcccgatgttggtggctgttggagttttggaccactcgctagcagtgatttgaagattataattagctaaaatccaaaacaaaaaaccaacaacaaaaattgtatggtgcggaacatgcaccttgacaatggtactaacttgttattctatagaacacgttagaatagatctatttttgccagagcaccctccttcagtcctccgattacatttcactagagttccttacgagattgctgtatattcctgggaccttttttaaaaaaaaaaaaagcaaaacaaaagattactttttttctatgtgattaatatcttacttgatctgcttttcctaaacctcagtggcttttcccttaggcagggttgggggtgggagggcaacttactggagatgactgttttcagatactttaaaacaaacctttttgtagaaatgcttaatttttaagcggttaggcactgagagtagcagaaatcctgcaaagctttatagttccttagactcaccttgtcgattctctgagtaaagtcttgatttcaataattgtgcttctcatgccctgaaactgctggagaggagtgttgttattttcaggtaacaacattcgttagcacaaatatttcagaccaatattagtgctctccaccccaccttttgttatcattttcatttcatttctctcattcttttttattttggaaaatcatattgctatagtgtgtactttaatctgccagcagataccatctacactaacatttgtcccacagcatcctcaagagaaaaagttgttgcaccttatatatatctcaagcaaaccaaaatatgatgctcttctgctttgttttattctaaattgttgtatcatatctttctgaaaccattctgaatttagttgaaattatcaatatttatgcttttaaccttaatttctggattcaagcctgtatataaatcttttgaaaaaaaattgtcctagcccttctctgcgatgctggaagtagaagattgcgtctcagatggagacgcagtactgttccagttttctttagccttttatttatttagttattctgggtatttcctatgtaattttgaagtgtgtagagtatattatagtaactgaagctgcagctgtaagaagctgagtgaaagaaaaaatactgtaagacatccttaaagtttttatttgtttgggtactgtatatgagatcaggaaaaagaaaaatgtcccacagccacattggaaatacaggttcttgtccccaaattaggttagttcccagattttagatcaaaactgttaattcattaaaaccccttttaaaaggtaaattctactgttgtaattccgatagtctttttcccacaaatatcagaaatatatttatttaattctgtcagatgagctttctaccgatgccatgtcccaaagccatgttaaaataattcccacgttatcattgtgattctacttcctgccactaaaattgctggagaaacaaaataatgatggaacactatgaacaaaaaggagcatctgaactggtctggttatttagaatccaatgtgttcaaatccttttgttttcttattaagtcagatgctactgtaagtcagataaaattttgtttgcactctgcagtctttggctcaatgtatggaaatgtttgcacctatgtaaagtcacaagctaattacaaattgctacagaacaggagtaagctgaaaactgaatgccatgttttgtttataaggtggggaggggagggaaaataccaaaaaactctgttccaagtttggcatttgacattaatgtgaagcagtgggaccatgctgcctgctaaactactgtatgaatcgtaaatgttctgaagacgagcagctggaggctggaggatggcattccatacagcaaaggagaagcacccaccacttcatctgggaaaaggaaggaaattgcaggaggcctggagccatcatttgtaaaggggatgttgcggggtgtgatgctgttgaggagattcaccttcaattgcactgctccacagagccctcatataaggccaatcctaatgggctacctcggctttaaaagttaatttcagtaagtcctgtttcaaaagtttgtctttttttgcttctaccttcagtgccactattttccactgcagtgttttgacttcacaaactgcctcctccagagagaacaatgtattgctgaaaatgggcagtagaagcaaatgctgttgttacatttgacctataaagtattcagagtgactgctaggtagaaattaaaacttagctttcccaaatagctccttattttgcaccttataaaaagtatactaattgttaattagatgttgcttttgtttatacaagcattcccaaagaactagatttggattttgttttgagtttttggatttttaaaaattatcttatttagattgactaacagcatacttacaattttaaaagaagctgttgttcagttcatcttaccagatgtgtctggcgaagtattcagggtttgatggactgctttactttcgtttggaagtgatagctaagtttattatactctatattaaacaactttgttcatttcactgaggaccttatcttccttatatttcagaacaaagaagcaacaagcgtgaataaaaagacaaatgtatttgactccctcataatccccatctgtatgtgctacccttccttcaaatatataaatgtgcatcttttttttaaaaaaaaaaaaaaaaaaggttcctcttctggccaaatttgatctatggtggtatgattcatactgttaaattgagagaggaaaccttgtggttaaaaattatatggctgctgttttctttttgcagtcagtggtcaaaactgatcatgtgcttaaatcgatttttatgcacagaactagttattgtgaacattactgctccctccaaagatttcctgataacttgggccagaggtggttactgagtaacaaggatctaattcaatgcctcaaaactcttccacccacaatgcaaatcttacctcacaagctctaacctaaatcacagagacatgcatgtttcatgcattaacactgatttcgctctgtggcccaccagaggggtgggctcatgtcccctgactcctcacatgagtgcctcagctctaagagccgtggaacggggggtagggaaggtttgcgatctggagctcagcaactggctcagcaacgttttctccatttcattagcactaaacaagtctcttgctctcaggaatttgtcagaaaaaagaataaaatcacctgagactccacataccagattataaactcttctcgtaggtttgaattgcttactcacatgtcataaattaaccacagcttcatttgaccaccaggtctaaagtctgttgacagtttcagcatgactgaatcgctcattttttttttttgctttcagaaattggcttggttctctttagagttggtgtaaacatgccatgtaataaatgatttccacttaatggtacaacagaattattgctttcttagatgtatgtgtagtaaaagtcaatatacacatttatataatttctttcttcaaaatcttatacctaatttgatatttctaaaaattgcacatgtaagtcatgtgtataacatgctaaagtactttaactgtgatcttaaaactgaataaaaatatttaataaaactttgaaatattttaaaaaaaaaaaaaaaaaa

SEQ ID NO: 4817 - DNA, 4857 bp, Homo Sapiens
  NM_020242
gcggcctccatgcgggcgtcaacgtccgatccaagcgccaaattcaaatttgcggccatcttgagcgggcggaattcagtcgcgcgcggtgcagtcgggaggtggaggcaccggctgcattgttttcgggatcgaggggtgagggcgctatggcacccggctgcaaaactgagttacgcagcgtgacaaatggtcagtctaaccaaccaagtaatgaaggtgatgccatcaaagtttttgtgcgaattcgtcctcctgcagaaagatctgggtcagctgatggagagcagaacttatgcttatctgtgctgtcctccacgagtctccggctgcactccaaccctgagcccaagaccttcacgtttgatcatgttgcagatgtggataccactcaggaatctgtattcgcaactgtggctaaaagcattgtggagtcttgcatgagcggttataatggtaccatctttgcatatggacagactggctcagggaagacatttactatgatgggaccatctgaatctgataatttttctcataacctgagaggagtaatcccacgaagttttgaatatttgttttccttaattgatcgtgaaaaagaaaaggctggagctggaaagagtttcctttgtaagtgttcctttattgaaatctacaacgagcagatatatgatctactggactctgcatcggctggactgtacttaagggagcatatcaagaagggagtctttgttgttggtgcggtggagcaggtggtaacctcagctgctgaagcctatcaggtgttgtctggaggatggaggaatagacgtgtggcatcaacatcaatgaacagagaatcgtctaggtctcatgccgtctttacaattacaatagagtcaatggagaaaagtaatgagattgtgaatatacggacctccctactcaacctggtggatttagcaggatctgaaaggcaaaaagatacccatgcagaagggatgagattgaaggaagcaggtaacataaatcgatcattgagctgcctgggccaagtgattacagcacttgtcgacgtgggtaatggaaaacagagacatgtttgctacagagactccaaacttaccttcttactacgggattcccttggaggtaatgccaaaacagccataattgcaaatgttcatcctggatccaggtgttttggggaaaccctatcaacacttaactttgctcaaagagccaagctgattaaaaacaaggcagtagtaaatgaagacacccaaggaaatgtgagccagctccaagctgaagtgaagaggctcaaagaacaactggcggagcttgcttcaggacagacaccaccagaaagcttcctgaccagagacaaaaagaagactaactatatggagtatttccaggaagcaatgttattctttaagaaatctgaacaggaaaagaagtctctgatagaaaaagttacccaattagaagacctcaccctcaaaaaggaaaaatttattcaatctaataaaatgattgtgaaattccgagaggatcaaataatacgcttggaaaagctccacaaggaatcccggggaggttttctgcctgaggagcaggatcgtttgctctcagaattaaggaatgagattcaaactctgcgagaacaaatagagcaccaccccagagttgcaaagtatgctatggaaaatcattccctcagggaggagaatagaagactgagattattagagcctgtgaaaagagctcaagaaatggatgcccagaccattgcaaaactagaaaaagctttctctgaaataagtggcatggagaaaagtgacaaaaatcagcaaggattttcacctaaagctcagaaagagccatgtttgtttgcaaacactgagaagttaaaagcacaactcctgcaaattcagacagagctgaataattcaaagcaagaatatgaagaattcaaagaacttactaggaaaaggcagctagaattggaatcagagcttcagtctttgcaaaaagcgaaccttaatcttgaaaaccttttggaagcaacaaaagcctgcaagcggcaagaagtttctcagctgaataaaattcatgctgaaacacttaagattataactacaccaaccaaggcctaccaacttcattcccgaccagtaccaaaattaagccctgaaatgggaagctttggctctctatacactcagaattctagcatattagataatgatatattaaatgagccagttcctcctgagatgaatgaacaagcttttgaggccatttctgaagagcttagaacagtgcaggaacaaatgagtgctcttcaagccaaactggatgaagaagagcataaaaacctaaagcttcagcagcatgttgacaaactggaacatcattctacccaaatgcaggagcttttctcatcagaaagaattgattggaccaaacagcaggaagagcttctctcacagttgaatgtccttgaaaagcagcttcaagagactcaaactaaaaatgactttttgaaaagtgaggtacatgacctgcgagtagtccttcattctgctgacaaggagctttcttcagtgaaattggaatatagttcattcaaaacgaatcaggagaaagaattcaacaaactttccgaaagacacatgcatgtacagcttcaattagataatctcaggttagaaaacgaaaagctgcttgagagcaaagcctgcctacaggattcctatgacaacttacaagaaataatgaaatttgagattgaccaactttcaagaaacctccaaaacttcaaaaaagaaaatgaaactctgaaatctgatctgaataatttgatggagcttcttgaggcagaaaaagaacgcaataacaaattatcattacagtttgaagaagataaagaaaacagttctaaagaaatcttaaaagttcttgaggctgtacgtcaggagaaacagaaagagacggccaagtgtgagcagcagatggcaaaagtacagaaactagaagagagcttgcttgctactgaaaaagtgatcagttccctggaaaagtctagagattctgataagaaagttgtagctgacctcatgaaccagatccaggagctaagaacatcggtctgtgagaaaacagaaactatagacaccctgaaacaagaactgaaggacataaattgcaaatacaactctgctttggttgacagagaagagagcagagtgttgatcaagaagcaggaagtggatattctggatctgaaagaaacccttaggctgagaatactttctgaggacatagagagggatatgctctgtgaggacctggctcatgccactgagcagctgaacatgctcacagaggcctcaaaaaaacactcggggctgctgcagtctgcccaggaagaactgaccaagaaggaagccctgattcaggaacttcagcacaagctaaaccaaaagaaagaggaagtagaacagaagaagaatgaatataacttcaaaatgaggcaactagaacatgtgatggattctgctgctgaggatccccagagtcctaagacaccacctcactttcaaacacatttggcaaaactcctggaaacacaagaacaagagatagaagatggaagagcctctaagacttctttggaacaccttgtaacaaagctaaatgaagacagagaagtcaaaaatgctgaaatcctcagaatgaaggagcagttgcgtgaaatggaaaacctacgcctggaaagtcagcagttaatagagaaaaactggctcctgcaaggtcagctggatgatattaaaagacaaaaggaaaacagtgatcagaatcatccagataatcaacagctgaagaatgaacaagaagaaagtatcaaagaaagacttgcaaaaagtaaaatagttgaagaaatgctgaaaatgaaagcagacctagaagaagtccaaagtgccctttacaacaaagagatggaatgccttagaatgactgatgaagtcgaacgaacccaaactttggagtctaaagcattccaggaaaaagaacaactgagatcaaagctggaagaaatgtatgaagaaagagagagaacatcccaggagatggaaatgttaaggaagcaggtggagtgtcttgctgaggaaaatggaaagttggtaggtcaccaaaatttgcatcagaagattcagtacgtagtgcgactaaagaaggaaaatgtcaggcttgctgaggagacagaaaagttgcgtgccgaaaatgtatttttaaaagaaaagaaaagaagtgaatcttgaggattccggtcagctacctaggcatcaccttgtttgaagatgtttcttctcttttacaagtaagacctactcctggccacttaggagagctgaatttatggaccttaattattaaatgtttataaggtggtggtaaccacctcaagtttctgatgaacattctgcatccatatacaccctgtgacagtcagcagtctgctattaagtggcctacttcaaggctttgaatcaacttaagggaaaaccttttgtctttgtaaaaataaaagcctgtagctaaggtttacagtggacattagccagatcattttcttcttagattatgccataatctcctttgattcttatggaagttctaacaatatatggtggttccaacacctgcagtgagtttaatgactgacttagtagcaggtacaagaagcaaacttgttaatatagattatttttgtattcttactttaggtattttcttgagcattttccatgactgtaaataaagccattttttaagataataaaaaaaaaaaaaaaaaaaaaa

SEQ ID NO: 4818 - DNA, 1396 bp, Homo Sapiens
  NM_020243
tcctttccgcttccggtgtcccctacagtcatggctgccgccgtcgctgctgccggtgcaggggaaccccagtccccggacgaattgctcccgaaaggcgacgcggagaagcctgaggaggagctggaggaggacgacgatgaggagctagatgagaccctgtcggagagactatggggcctgacggagatgtttccggagagggtccggtccgcggccggagccacttttgatctttccctctttgtggctcagaaaatgtacaggttttccagggcagccttgtggattgggaccacttcctttatgatcctggttcttcccgttgtctttgagacggagaagttgcaaatggagcaacagcagcaactgcagcagcggcagatacttctaggacctaacacagggctctcaggaggaatgccaggggctctaccctcacttcctggaaagatctagattgttattgctgtttgagctgtctcagtgggataagtttgaaattcaagtgtttgaactgctgataatttggatttttttttttttttaactttggcacattgatctatctaaacctggtggggagaattatccccacattgtctcatggaaagactcaacttgcaactgtgccctccacactatccttacttctgtctccactctgataccagagtgcagccatgcagatggttattccagctctggtcacccgactcctttcaccaaattgctcctaactggaagatctcactttccccttgtggggtaggaaccgatgccagtgggagggatgtgcccctgaccattaacgactgttttttttttttttttttaaagaatggagttgttggggcaggacatgcacacaatgtgaaacagacaaaatgcattacacctgtagtgtaaagtggccactatgaatccctatgtatgagaggagggaggcaggctgcagcttcagccacagaatggggactatggaagacagcaggagctcatttcctctgcacattttggctgttagacctgtgtgtgtgtttaaaaaaagagaagtcagtgctcactttttgtatttaaatattaaaaatgattccaactgaaagtgtcatcctaagtaccttgaaatgagaccacgtcagagacatgtactgcccctcacattttctcacctaaaccagcagcacctccatcttaacagccataggcccaaattgtttccaagtgaaaattcatttttagccaagtacttcatagcaatctttgccctgaatttaggcagtcactttgagatccatcagcctaaaacaaaggattgggtctatgtacttctttagtctataatgacactgtgtaattataaagtatttgtagggaaaaaaaaaaaaaaaaaaaa

SEQ ID NO: 4819 - DNA, 1567 bp, Homo Sapiens
  NM_020244
cgccccacccgcgagccgcagccgcggccccacagcttctggggctggggccccggcagccgggcaggccggcctgacctcgacctccgccgtgcgggcccgaccggtgagtccagcccggcagtcgcaggacccggccgccagcctctccctccacctctccctgcccccagcgccaggcgcgggctgcgctcggtggcggcggcggggccctcaggcggccatggcggcaggcgccggggccgggtccgcgccgcgctggctgagggcgctgagcgagccgctgagcgcggcgcagctgcggcgactggaggagcaccgctacagcgcggcgggcgtctcgctgctcgagccgccgctgcagctctactggacctggctgctccagtggatcccgctctggatggcccccaactccatcaccctgctggggctcgccgtcaacgtggtcaccacgctcgtgctcatctcctactgtcccacggccaccgaagaggcaccatactggacataccttttatgtgcactgggactttttatttaccagtcactggatgctattgatgggaaacaagccagaagaacaaactcttgttcccctttaggggagctctttgaccatggctgtgactctctttccacagtatttatggcagtgggagcttcaattgccgctcgcttaggaacttatcctgactggttttttttctgctcttttattgggatgtttgtgttttattgcgctcattggcagacttatgtttcaggcatgttgagatttggaaaagtggatgtaactgaaattcagatagctttagtgattgtctttgtgttgtctgcatttggaggagcaacaatgtgggactatacgattcctattctagaaataaaattgaagatccttccagttcttggatttctaggtggagtaatattttcctgttcaaattatttccatgttatcctccatggtggtgttggcaagaatggatccactatagcaggcaccagtgtcttgtcacctggactccacataggactaattattatactggcaataatgatctataaaaagtcagcaactgatgtgtttgaaaagcatccttgtctttatatcctaatgtttggatgtgtctttgctaaagtctcacaaaaattagtggtagctcacatgaccaaaagtgaactatatcttcaagacactgtctttttggggccaggtcttttgtttttagaccagtactttaataactttatagacgaatatgttgttctatggatggcaatggtgatttcttcatttgatatggtgatatactttagtgctttgtgcctgcaaatttcaagacaccttcatctaaatatattcaagactgcatgtcatcaagcacctgaacaggttcaagttctttcttcaaagagtcatcagaataacatggattgaagagacttccgaacacttgctatctcttgctgctgctgtttcatggaaggagatattaaacatttgtttaatttttatttaagtgttatacctatttcagcaaataaaatatttcattgctta

SEQ ID NO: 4820 - DNA, 11123 bp, Homo Sapiens
  NM_020245
gaaattttaatttattattcccccctttttttcctgcatctataggataatattgtaaaatagcaattgaaaccaataatcattaaataaatatcaaggaaaatccaagcaaagctttctttttgttggactagtggtgtggtgtttggagacagtctctgaatgtgaacaggaaagcacccatcagcaaaacacgatcactctctagggagacagctgggggaatctgactctggcttctgcttttgttttaagggattaacttccctgtcaagtccaagaagacttgcgtatgagaagattacctgatggacttaattctaagattagcttttttcatcaagatggaaaaagatctttaggagcagaaaaggggagtgctaactgggggagcgagaagggagacgagcaaaagaaacaaaatcttgccacgtggctctgttttgtcagcaagaggatttaagactcacccagggcaaacactgggaccactgtaagagcgctggaacattctgcctcttgagtgaaggggccttctttctagcctctatggcactgaggggtgcgccggctggtggaggagtagtccgatggagccctgcgttccccggggacacagggccaagctttgaggtggaaagtttctggttctgaaacaacaaggagagagtctgtttttcttcctaaaatttggactcttgtctgcacaaactctggtctgttttgcacggtttgtgtgcctttttttccctttatgcaatctttttcagctttagcagcagaaatttgtctagttcaggaaacatgctagagggtggcttcagaaggaagatgatcctgtgtattctgtctctgcatccgaacttttgaagagaaaaattcgagctagagggattcttaaagccttaagttacttgaaatctatgtatttgcaaccctttgtctctggaatcatattacactaaactggaatctcaggctgaatgagaataaccaagtggagtaaaaagaagaaaaccgtttcttgatcaccacttaattaacgatgctctttctccaaaggatcagcacgttcttcctctgagaacttgaaaatacaaatggaccccatgtttttttaagcattaccttttcttagaagactgccatcatcttttatagaggaattttttcactatgcattcagtggatctttataaaatactgaccttctaattagattcaggtcagtcttaattaaagggggaaaaaagcaacgcaagccaaccacaaaaacacatataccaatgaaagaaattggtttaaatttcacagcattaacattactttttaagtaaaacagttcattgaagaaagtatgtatgcagcagtggaacatgggcctgtgctttgcagtgactccaacatcctgtgcctgtcctggaaggggcgtgtccccaagagtgagaaggagaagcctgtgtgcaggagacgctactatgaggaaggctggctggccacgggcaacgggcgaggagtggttggggtgactttcacctctagtcactgtcgcagggacaggagtactccacagaggataaatttcaacctccggggccacaatagcgaggttgtgctggtgaggtggaatgagccctaccagaaactggccacgtgcgatgcggacggaggcatattcgtgtggattcagtacgagggcaggtggtctgtggagctggtcaacgaccgcggggcgcaggtgagtgatttcacgtggagccatgatggaactcaagcacttatttcctatcgagatgggtttgtcctggttgggtctgtcagtggacaaagacactggtcatccgaaatcaacttggaaagtcaaattacgtgtggcatatggactcctgacgaccaacaggtgctgtttggcacggccgatgggcaggtgattgtcatggattgccacggcagaatgctggcccacgtcctcttgcacgagtcagacggtgtcctcggcatgtcctggaactacccgatcttcctggtggaggacagcagcgagagcgacacggactcagatgactacgcccctccccaagatggtccggcagcatatcccatcccagtgcagaacatcaagcctctgctcaccgtcagcttcacctcgggagacatcagcttaatgaacaactacgatgacttgtctcccacggtcatccgctcagggctgaaagaggtggtagcccagtggtgcacacagggggacttgctggcagtcgctgggatggaacggcagacccagcttggtgagcttcccaatggtccccttctgaagagtgccatggtcaagttctacaatgttcgtggggagcacatcttcacactggacactctcgtgcagcgccccatcatctccatctgctggggtcaccgggattcgaggctgttgatggcatcaggaccagccctgtacgtggtgcgtgtggagcaccgggtgtccagcctgcagctgctgtgccagcaggccatcgccagcaccttgcgtgaggacaaggacgtcagcaagctgactctgcccccccgcctctgctcctacctctccactgccttcatccccaccatcaagcccccaattccagatccgaacaacatgagagactttgtcagctacccatcagccggcaacgagcggctgcactgcaccatgaagcgcacagaggacgacccggaggtgggcggcccgtgctacacgctctacctggagtacctgggcgggcttgtgcccatcctcaaagggcggcgcatcagcaagctgcggccagagttcgtcatcatggacccgcggacagatagcaaaccagatgaaatctatgggaacagcttgatttctactgtgatcgacagctgcaactgctcagactccagtgacattgagctgagtgatgactgggctgccaagaaatctcccaaaatctccagagctagcaaatcacccaaactcccaaggatcagcattgaggcccgcaagtcacccaagctgccccgggctgctcaggagctctcccggtccccacggttgcccctgcgcaagccctctgtgggctcgcccagcctgactcggagagagtttccttttgaagacatcactcagcacaactatcttgctcaggtcacgtctaatatctggggaaccaaatttaagattgtgggcttggctgctttcctgccaaccaacctcggtgcagtaatctataaaaccagcctcctgcatctccagccgcggcagatgaccatttatctcccagaagttcggaaaatttccatggactatattaatttacctgtcttcaacccaaatgttttcagtgaagatgaagatgatttaccagtgacaggagcatctggtgtccctgagaacagcccaccttgtaccgtgaacatccctattgcaccgatccacagctcggctcaggctatgtcccccacgcagagcatagggctggtgcagtccctactggccaatcagaatgtgcagctagatgtcctgaccaaccagacgacagctgtagggacagcagaacatgcaggtgacagtgccacccagtacccagtctccaaccggtactccaatcctggacaggtgattttcggaagcgtggaaatgggccgcatcattcagaacccccctccactgtccctgcctcccccgccgcaggggcccatgcagctgtccacggtgggccatggagaccgagaccacgaacacctgcagaagtcagccaaggccctgcggccaacaccgcagctggcagctgagggggacgcagtggtctttagtgccccccaggaggtccaggtgacgaagataaaccctccacccccgtacccaggaaccatccccgctgcccccaccacagcagcacccccgccccctctgccgcccccacagcccccagtggatgtgtgcttgaagaagggcgacttctccctctaccccacgtcagtgcactaccagacccccctgggctatgagaggatcaccaccttcgacagcagtggcaacgtggaggaggtgtgccggccccgcacccggatgctgtgctcccagaacacctacaccctccccggcccgggtagctctgccaccttgaggctcacggccactgagaagaaggtccctcagccctgcagcagtgccaccctgaaccgcctgaccgtccctcgctactccatccccaccggggacccacccccgtatcctgaaattgccagccagctggcccaggggcggggggctgcccagaggtccgacaatagcctcatccacgctaccctgcggaggaacaaccgtgaggctacgctcaagatggcccagctggccgacagcccgcgggcccccctgcagcccctggccaagtccaagggcgggcccgggggggtggtgacacagctcccagcgcggcccccacctgccctgtacacctgcagtcagtgcagtggcacagggcccagctcacagcccggagcctccctggcccataccgccagcgcctccccgttggcctcccagtcctcctacagcctcctgagcccacccgacagcgcccgcgaccgcaccgactacgtcaactcggccttcacggaggacgaggccctgtcccagcactgtcagcttgagaagcccttgaggcaccctcccctgcctgaagctgctgtcaccctgaaacggccacccccttaccagtgggaccccatgctgggtgaggacgtttgggttcctcaagaaaggacagcacagacttcagggcccaaccccttaaaactgtcctctctgatgctgagtcagggccagcacctggacgtgtcccgactgcccttcatctcccccaagtctcctgccagccccactgccactttccaaacaggctatgggatgggagtgccatatccaggaagctataacaacccccctttgcctggagtgcaggctccctgctctcccaaagatgccctgtccccaacgcagtttgcacaacaggagcctgctgtggtccttcagccgctgtacccacccagcctctcctattgcaccctgccccccatgtacccaggaagcagcacgtgctctagtttacagctgccacctgtcgccttgcatccatggagttcctacagcgcctgcccgcccatgcagaacccccagggcactctccccccaaagccacacttggtggtggagaagccccttgtgtccccaccacctgccgacctccaaagccacttgggcacagaggtgatggtagagactgcagacaacttccaggaagtcctctccctgaccgaaagcccagtcccccagcggacagaaaaatttggaaagaagaaccggaagcgcctggacagccgagcagaagaaggcagcgttcaggccatcactgagggcaaagtgaagaaggaggctaggactttgagtgactttaattccctaatctccagcccacacctggggagagagaagaagaaagtgaagagtcagaaagaccaactgaagtcaaagaagttgaataagacaaacgagttccaggacagctccgagagcgagcctgagctgttcatcagcggggatgagctcatgaaccagagccagggcagcagaaagggctggaaaagcaagcgctccccacgggccgccggcgagctggaggaggccaagtgccggcgggccagtgagaaggaggacgggcggctgggcagccaaggcttcgtgtacgtgatggccaacaagcagccgctgtggaacgaggccacccaggtctaccagctggacttcggggggcgggtgacccaggagtccgccaagaacttccagattgagttagaggggcggcaggtgatgcagtttggacggattgatggcagtgcgtacattctagacttccagtatccgttctcagccgtgcaggcctttgcagttgccctggccaacgtgactcagcgcctcaaatgaagagactggtgtggggaggagagagatgcagagagcctttggaagaggtcttcggagatgccagaggagccctctaggggtccgatgcctgggaggaccagaagccaacagcaaaactggaaaagcccggcaggcccaggagagggcgctgacctgtggtcgtcatttatttggttgggttttattaccttttattgtctgttcttcttttcttctttcatttcagtggcatttggaagcaaagagtgctaggcacctgctgttctttcaggaaacagcttggctgtggtaatgctctactgggcccttcagaatgaagacagtctgccttagagcctgctattcttttagacatagggaggatgcattatcctgtattctcctccaacatcaccactagcgtaaaagcaaaaagcttttacaaaacacagccaaaaattctcaagatgcaggttcttggggaatgggatggggacagcatttgatttacactgattatgttactccccaaaaggtgacttaattaataaagggcatttgggcagacacactgtgttggaccaacaaagtaggctctttacaggggtgttctcaccaggtagaaatgcgatttgctcactgaggatgttggggaagggacgaagggtaaagaagaaactgcacgtatacacaggttcacatcactctgcagacagcaatgtgactcagcgtgtgacttgtagcagcagtacgagggctacactcctctgctgaggatgtctacattgaaagcctccactagtttcatcgtttgtcaaagttccgtaggatcagtgatggtcattcagcatgactggttctgggagaaggtgagagacaaaaatggaaagatcctggcctgtggtagtggtagcagttttctcaaataatgtggtgacagtcactagatcctcacatgctgagaaacagcctctactctctctgccccttttactttttaatctggaatgcattactgtaaacatgatctttcccatgagataccatgttctatgccttcccattctaaaagtgtggacaacgcttgatttgaaaccactccttttctcctcttggctacattaaaattcagttgactacaaatgctttctatcaaattagaaatgtaaccaaaaaaatgttaagtgttcaccagggtattaaaatacagaggagtatggtcaaatctttgacaaaattttcatgatcttctctaacaaaaaaagttgtttattaactgtacagactgtttactaaggagctaaaccactgagaaaacgttattaaaattgtaatacctaggtagttggttgatcacagtttgttaattgtataaaaaaaaattacctagaatatctcttcccacttcctcgtcctcgtgagaacctgtgggcagtattcaagccctgatgacaaaacccagtgttttttgttgttgttttttgttgttgttttttgtttttgtttttgtttttctcagtcttacctgtgatgttgtttaggatcaggcccctctcctgggcctgctgtgcaggagcacaggaactatctgctggcgttgggttccaaatttgcattttatttggaaacagacaagtagaagatgctacagaaaagtattttcaaatttaaacgttttttaatcccctgttttagttaaaaaattggaaaagaaaccgacccatttttttcccagatcaagatgacatgacatcactcccaattctctccaaaccccagagaaatactgacgaagttttctgatgtggcaaaggatatttcccatctaataccagtttctcatttatatttaacgtattggacctgatatttttagtgggtgcattcttccagaaagaattcagcaatgttatcagaattaattcttttatatgagtttatgtagcttgatatggtgtttcagtgcttattggttgtgcaataatggttatagcctgttagataatctaaatgcaattcccctgttttgtcgtttaggagataattatttatcttgcttttcatagtgttcttaggaattattttgttgttacgttttggtgagttatacccattttatttatttagaaaaatagtatctttgttaacgacttacatggtcacagtatattttgctgcaagaaataaagaggatatgatagaaggtttttttttttttttttttttttttttgagacggagtcccactcttgtcgcccaactagagtgtagtggcacaatctcggctccccacaacctctgactccagggttcaggtgattattttgcctcagcctcccaagcagctgggattatagacacccgccaacacgccaggctaatgtttttgtatttttaatagagatggggttttgccatgttggccaggctggtcttgaactcctgacctcaggtgatccgcccgcctcggcctcccaaagtgctgggattacagacgtgagccaccactcccggcccatagaaggttttttgctggataatttgtaacttttctaattgggaaaaaattcctattaatcacttaaaaatttttttttgtattttgtgttattgattatatacaaaggagactttttttttgagataacactcaaatagtattctcttcttttgaaaattttatttttatctgaaaataacagttgatctgaaataaaaaggggagacctattagaatgagagtagccaaggaaagagttactaggtaataagcttcactttttgtgttctaattgtttttgagatataaagaccctgaaaaagcccattttagaacctgtttaataagagcaaatataggggaaaatctttgaaatgaaagctacaaatacatgtgagaagaaaaaaatggatttttttagcaaataattaactaagcttctaaatgcctagctccctcccccaaaggcgctttcccccgatggaggcacaggcttctgtctcggatgtttggcgcacgtgagtttgtatgagtttgtaccggagtgaccccggcagccactgcccacctcccctctacccaggggcctgaaaagaggggctgccctcctgcgccaaggcagacacaagctgcgggctgtgcggtcctagtagtgtgacgtttcagttaatagtggtggtcttattttcaactatgctttcattcagtcagtctctgttgactaaatacgacgaaaattcatactttatgcaggagatttctaaaaatttaatgtttattaatagtttatgaatatcaagatacctcattgaatccctaaatttaaaagcagtccagtaaaaggttaactgtataaagaatctatgactttttgagggaagtgtgatatattaacaaatataaccaattctaaatttgttttagctctaacctcatcaaaccaaaggcacagatttgtgtacaatatacccattgaatgtatatcctgagaaaaattggggccaaagaagcaggaaaatctcaaagctctaatggcagcataaatcaaagaatttcacaggctagtgtttttatccatagccattgctcccttgtcaagtgtctcacaaggacatggaagaatgtgttatgttcatcttgtaatcatagcaaaaagtctgcaaaccccagggtcaagcctgctctgccacagggttggatggtgaccttgggcaagtccctggggctggctaggcctccacttgtccatctgtgaaatgaaaggatcagcctggacagccctctaaactcccttacagctctcagcctaagagcgcagcactgaacagcctcatcattccacttttcatgggaaatatatttcacaccattgcctttgtgtagagaaatatttcttttcctgtgttaatgagctatgtactgaatataaaccagtgcatttaaagtaatatcttttgtgcacctctaaatgtgtttggaattgtgtttgttctcatagaatatacaaaagtactgattctaggtaagaaggagtctccacgggtgtgccctgctcagctggatgtccatgagaacagccatgaaataagtcactacttgtccccaaaaccacaggaatatatacctaggtcacctcaaattcctgagtgtgctctgccatgttacacggtcttcaaattgaaaaggtttcttgaaaaggaaagtttggcccagcaactggagaaggagtccatggtgtcgctgtgtgcctgtatcatttggccaagtcaatggttgtaagcaaagttagtggagacaaaaatgtgtccaaaatgtcgtttgagttcctgggatttctgtaatagcacacaactcagaactcttcagcatttgtgtgattccttacctctggctgataaaactctaatgggttgtggcttactttgtttccattttctttggctttgtgcaatttttgtgtaactttacttgtacctatattttctgtttacagttctttttaaggggaggggtagggttctaagatcttgttgtttattgtagataaaaattttttcgtgttgtagaaaagcatgggttatgcgtttgactgaaaaagacactgtattatttaccaaaggggtattgtttttgcatttgtttataaatgcattattttggtactgtaaatttggacataatttctgagtttattactactggcattttctttttcccttttttttttttttaaccgtaagtgcacgatgcaggtgcataggccccagaccaaactagaccaccagcatgttcatgtccagacctcggcagtggcgtgcactgcttgtgcacctcagttcctccagtgttggtttgtttgttttttaattcagcatcctgctggttttactttccaagcaagatctgttgcgactcccaaatgcgttttaatgagctcatccttatttgcctttcttcttacgtattttgtgtattagattgtgcaggagatattctagaaggcattaatggtttgcattcaaaacgatgtggtttgtccaagttattttctgtctttattactgagacggattaatctccttatttttttcttgatgatttgaagttgtaagagttgtccagctattgcttaataaaattttgcagatcaaaaaa

SEQ ID NO: 4821 - DNA, 3308 bp, Homo Sapiens
  NM_020246
tcccggtagccgcagctgtcttttccggcccccgtgcactctccgcccgagcggagccccccggctcgcggggatcgcccccgagcgctgcgtcctgcgggtcacctaacccatttgtggcttcctctacctgtgctcagccatggccagcgagagctcacctctgctggcctaccggctcctgggggaggagggggttgccctccctgccaatggggccgggggtcctggaggggcgtctgcccggaagctgtccaccttcctgggtgtggtggtgcccactgtcctgtccatgttcagcatagttgtttttctgaggattgggttcgtggtgggtcatgctgggctactgcaggccctggccatgctgctggttgcctacttcatcctggcactcaccgtcctctctgtctgtgccatcgccaccaatggagccgtgcaggggggcggagcctacttcatgatcagccgcacactggggcccgaggtcgggggcagcattgggctcatgttctacctggctaacgtctgtggctgtgccgtctccctcctggggctggtggagtctgtgcttgatgtcttcggggccgatgccacagggcccagtgggctccgggtcctgccccagggctacggctggaacctgctgtatggctccctgctgctgggccttgtgggtggggtctgcaccctgggagccggcctctatgcccgggcctcattcctcacattcctgctggtctctggctccctggcctctgtgctcatcagttttgtggctgtggggccgagggacatccgcttgactcctaggcctggccccaatggctcctccctgccgccccggtttggccacttcaccggcttcaacagcagtaccctgaaggacaacttgggcgctggctatgctgaggactacaccacgggagccgtgatgaattttgccagcgtctttgctgtcctctttaacggctgtacaggcatcatggctggggccaacatgtcaggggagctgaaggaccccagccgggcgatccctctgggcacgatcgtcgccgtcgcctacaccttcttcgtctatgtcctgcttttctttctctccagcttcacttgtgacaggaccctgctgcaggaagactatgggttcttccgcgccatcagcctgtggcccccactggtgttgatcggaatctatgccacagcgctctcagcgtccatgagctcgctcattggtgcctcccgcatcctccatgccctggcccgggatgacctctttggcgtgatcttggcaccggccaaggttgtgtcccgagggggaaacccctgggcagctgtactttattcttggggcctggtgcagctggtgctcctggctgggaagctgaacacactggctgctgtggtcactgtcttctacctggtggcctatgctgccgtggacctgtcctgcctgagcctggagtgggcctcggcccccaacttccgccccaccttcagcctgttctcctggcacacctgcctgctgggggtggcctcctgcctgctcatgatgttcctcatcagtcctggcgcggctggtggctccctgctcctcatgggtctgctggctgccctgctcaccgcgcgaggaggccccagtagctggggctatgtcagccaggccttgcttttccaccaggtgcgtaagtatctgcttcggctggacgtccggaaggatcacgtgaagttctggcggccccagctgctgctcctggtggggaacccccggggcgccctgcctctgctgcggttggccaaccagcttaagaagggggggctgtatgtgctgggccacgtcaccctgggagacctcgactccctgccctcggaccctgtacagccgcagtatggggcatggctcagcctggtggaccgtgcccaggtgaaggcttttgtggatctaaccctctcaccctccgtgcgccagggggctcagcatctgctgcgaatctccggcctcggtggcatgaagcccaacacgttggtcctaggtttctacgatgacgctccaccgcaggaccatttcctgacggacccggctttctctgagcctgcagacagcaccagggagggcagttccccagctctgagcaccctgttccctcctccccgggctcctgggagcccccgggccctcaatccccaggactatgtggccacggtggccgacgccctcaagatgaacaagaatgtggtgctggcccgggccagcggggccttgccccctgagcggctgagccgggggtctgggggcacctctcagctgcaccatgtggacgtgtggcccctcaacctgctgcggccccggggtgggcccggctatgtggatgtctgcggcctcttcctgctgcagatggcaaccatcttgggcatggtgcccgcttggcatagcgcccggctccggatcttcctgtgcctggggcctcgggaggcgcctggggcggccgaggggcggctgcgggcactgctgagccaactgaggatccgggctgaggtgcaggaggtggtgtggggcgagggggccggggctggggaacccgaggcggaggaggaaggggactttgtgaacagtgggcggggagacgcagaggcagaggccctggcacgcagcgccaacgccctggttcgggcccagcaggggcgcggcacaggaggagggccgggtgggccggagggtggggatgctgagggccccatcacagccctcaccttcctgtacttgcctcggccgccagccgatcccgcccgatacccccgctacctggcgctactggagactctaacccgagacctgggccccacgctgctggttcatggggtcactccagtcacctgcactgatctgtgatgcccctgcctccagggctaggtagagagggcccaggcaggcggcctatcctgatccttggaggaggaggaagaggaggccactgtggcccgtggccctgcccttgggacgtggagcccaggggaggtttgaaggggatcctgggcttgggcatcacgcccacctcctttggcagagggaccccagcacactaactctgggtggctgtccccaccgtgcaggggagggagtccgcagcctcccttcactggtgccttgatgctaggggccaggcctcctctgtgactctgggctacctcagtttccccattttggccagactcaccggcccactggggtggtgatgttttcgttctgttttatttttctaactctgctgaccatgaataaaagaccaaaacactacaaaaaaaaaaaaaag

SEQ ID NO: 4822 - DNA, 2932 bp, Homo Sapiens
  NM_020247
agcggcccgcggggcggggcttgtgagctggggctcccccggagcgggcgagttggtaaacagatccggagcgcgtggcgggcgtcagcgcggtggccagcgcgcagaggcgggcgcggaggcggctagaaggtgaccgcggatcccagcttcctgcagccagccctgaaggatggctgccatattgggagacaccatcatggtggctaaaggccttgtcaagctgacccaggcggccgtggaaacccacctgcagcacttgggcatcggaggggagctgatcatggcggccagggccctgcagtccacggctgtggagcagattggcatgttcttggggaaggtgcagggtcaggataaacatgaagaatattttgctgagaacttcggcggcccagaaggggagttccacttctcagtcccgcatgcagccggagcctccacagacttctcttcagcctccgctcccgaccagtcagcgcccccatccctgggtcatgcccacagcgagggcccagctcctgcctacgtggccagtggaccctttagagaagccgggttccccggccaggcctcctcccctctgggcagggccaacgggaggctctttgcaaaccccagagactcattctctgccatgggctttcagcgaaggttcttccaccaggaccaatcccctgttgggggcctcacagccgaggacattgagaaggcccggcaggctaaggctcgccccgagaacaagcagcacaaacagacgctcagcgagcatgcccgggagcggaaggtgcctgtgacgaggattggccggctggccaacttcggaggtctggccgtgggcctgggcttcggggcactggcagaggtcgccaagaagagcctgcgctccgaggacccctcagggaagaaggccgtgctgggttccagtcctttcctgtccgaggccaatgcagagcggatcgtgcgcacgctctgcaaggtgcgtggtgcggcactcaagctgggccagatgctgagcatccaggatgatgcctttatcaacccccacctggctaagatcttcgagcgggtgcggcagagcgcggacttcatgccactgaagcagatgatgaaaactctcaacaacgacctgggccccaactggcgggacaagttggaatacttcgaggagcggcccttcgccgccgcatccattgggcaggtgcacttggcccgaatgaagggcggccgcgaggtggccatgaagatccagtaccctggcgtggcccagagcatcaacagtgatgtcaacaacctcatggccgtgttgaacatgagcaacatgcttccagaaggcctgttccccgagcacctgatcgacgtgctgaggcgggagctggccctggagtgtgactaccagcgagaggccgcctgtgcccgcaagttcagggacctgctgaagggccaccccttcttctatgtgcctgagattgtggatgagctctgcagcccacatgtgctgaccacagagctggtgtctggcttccccctggaccaggccgaagggctcagccaggagattcggaacgagatctgctacaacatcctggttctgtgcctgagggagctgttcgagttccacttcatgcaaacagaccccaactggtccaacttcttctatgacccccagcagcacaaggtggctcttttggattttggggcaacgcgggaatatgacagatccttcaccgacctctacattcagatcatcagggctgctgccgacagggacagggagactgtgcgggcgaaatccatagagatgaagttcctcaccggctacgaggtcaaggtcatggaagacgcccacttggatgccatcctcatcctgggggaggccttcgcctctgatgagccttttgattttggcactcagagcaccaccgagaagatccacaacctgattcccgtcatgctgaggcaccgtctcgtccccccacccgaggaaacctactccctgcacaggaagatggggggctccttcctcatctgctccaagctgaaggcccgcttcccctgcaaggccatgttcgaggaggcctacagcaactactgcaagaggcaggcccagcagtagggctgcgggccacgcccaggccggctccgcgggaactctctccctcagacaggccaaaaaccagtagcgaggtcgtggtgatgctctttttaactcctttgcccaataaggggggtggctgcctggagccccgtagccagcgctttccacggtttctgttgctaaatggttgtagggtgagaagtgcaagaatgaagatgaagccccactgctcggtcagtctgcctccgtgtgtcctctgaaataagcagatgaagatgaaagggcaactttgttttcttctttttcctgatgtgaatgttaagcagaagggagagagtccttactcccttccaatctctgttcagtgcaaaacccagaaacatgaacagatacgattgtgggattttatcatctgtgtagtaggtgtgtgtatgtgtttctagagtgagatttgtgttttctgcccttttcctctccagccgatgggctggagctgggagaggtgctgagctaacagtgccaacaagtgctccttaagcctgcgaggcccaggcctgtggggctggttctcacctttgacagctgaatgttcctaaagaactgctgccccacagtgagggtgggagcagcggaacagggaatgccagacacaggctcgctgctgctggaaggcggggtgggacttccttcctctgtccggagaggcacaggtgtcaccagttccagccaaaggctcctcacaggcgctgtgaatttttgtacaagtcttgtaattatcgaatcaacaacttgtttcaatttaataaaaatgctcatgggaagtgctaaaaaaaa

SEQ ID NO: 4823 - DNA, 2995 bp, Homo Sapiens
  NM_020248
ggtgactctcggagcgggaggcggaggctgaggcggccgctcctgctgctgctactgccgccgccgcagcggctgctcgggctgagcacgccccggaacaggccgccgcgcgctgcgcgccggacccgctgcccctgccggcccggccgggtcgggcggcccagggaccgacagacttgacaacggtgacagcactggggcggcaccttcctacttctgcccagccacagccctcccctcacagttgagcacctgtttgcctgaagttaatttccagaagcaggagtccccagagccaggcagggggatgaaccgcgagggagctcccgggaagagtccggaggagatgtacattcagcagaaggtccgagtgctgctcatgctgcggaagatgggatcaaacctgacagccagcgaggaggagttcctgcgcacctatgcaggggtggtcaacagccagctcagccagctgcctccgcactccatcgaccagggtgcagaggacgtggtgatggcgttttccaggtcggagacggaagaccggaggcagtagctgcaaagcccttggaacaccctggatgctgttgagggccaagagatctgtgtggctcctgggccggctgagtggcagcagccccccttgccccacctcccccttcccctacccaaccctgccctgccccaccccacctcacagctactcagtggggctggcatcaagggagacaccagtggtgcgtttataattggcttaaagggatggacttgtgattggctgcaggaagaaacttttttattttttaaatcttgaccaacagaaaccttttatttttatttctgactcttattttttaaaaaatttgcgcctcggtatctggcttccctggaagctctccgagctctggtgctttagttaggtcatttttttagaaatgtgaagaggtctgattggctgcttaaactggaaaggatctgtgattggctggttaatgggaaacggtttttttctttggctgcaggtgttctgctgatatcaacagcttccctattttgaatgcagaaaacagggtctgggacattagtcgttatatttgacttgaaaagaaagaaaccaagtgcgctttgcaatatttattacacaaagaacttgctgctgccttcacatttggggtttgtgtttgattggctttcgatgcgtgtgtttggtttcccattggttcacctgtgactcctgttgccatggattcacccccctctgctgccggctctgggcctgagggtccacctggagagtacatttgctttaatgagtgcacctgcctccaccagcaaggggaccccgagaaccctgagcagggtccacagctggaaagttgggcccctgaggagctttgtgtcgtcttgaacgagcagcccagggcctagaggtaaccgttaggcgggatttatgtgcactgcctgcatgagctggcaaccagccagcgtcccttggtgagaaagggattgctgaggcaccgtccaggccccaccggccaggccgcgcccagcagaggcgtactacccagctctgtcctcttggccatccttctgtgtaccacttcctgaggcctcattttgggggtcatcttggaaaggggaggagcttctcccagtgtgagaccccaaagactctggaggtcatctggcggaggtctctgggagcccagaacccacataaaagccccagcttggctcacaaggcccaggagacctccagctaaacaccaacccctgacctaccccagccaggctcctacctgtctgctgccagcacagtaggtcccggccagctctggagttctctcatcggaggcccatgccctccactccactgcctttggaagggtctctctccaggtcagcctggaagggacagtatcgtttgtttatgaaatgccactgggacagctggctgggccttcaccaagcaagtcccttcagactggcccttaagccaaactcaggcccagaattgcagttcagaatggcagtcctggaggcagggggtgaggggcaggtctagtgttcctgcaccaaacctaagtccttccacctgccacccccttccctgggagggaggtggtcctcctatctccctggctcactggcaggtgtgggatctggggagagcggctggagaaagatgcagtcctcaggaagggggccgccaccctcccctatgctggtagatgctgaggcccctaggtgcccagggccagtgggaccctctcagaaccaaatctttcccctttctcggggcttggggctcgggccgtaggggctcctgagtgtcatgaagtgcacaggagccaaatgaccgagccctggagagccccatggtgggtaggtggttcgtgctgtgctctggcaccatcagcctgttccagaaggaggattcgagcatcaggctaagaccctgtgtcctccaccatgcactcacccctagccctggttagctgacagtcagctgtggggaacacagctacaaccctaccctggcagggacctgagagcatctcaggaggggcagcgcatgtgtgcatgtgctgtgtgagtgagcacacccgtgtgcacactcatacacatgtgcacacacacgcactctccccgctcaggggcctggaggtctggctgagcccctggggaaaggtgagttctttcatctccctcctccaggtcggagtgcctggagtcaggtgtcgaggccacattgctggctgccccctctttgtagctcctataaagggcccacacctggtggatacctggttgagtgtgtggtctctgccccagcctgtccttgtcacgatcacaggccttgcttttgtaacaatgatgaccccggcctgtctcatcttctgaagaggaaaagtcaaagtgttgctgtggctccatatttcaactaaaaatatatctgttggagaaagaaattaacaataaagaattttcataggtt

SEQ ID NO: 4824 - DNA, 7515 bp, Homo Sapiens
  NM_020251
acaccccgcgcggttccacgcccctggccgcggcccgggcgctgcgctgctcgacgcggcgggcggcgggcggggaccgggggcgggggcggcggcggcggccgggagagcggaggaggcggagcagggagccgggagcgggctggcccgcgctcctcctgctggctggggattttccagcctgggcgctgacgccgcggacctccctgcgaccgtcgcggaccatgggcgacaaagggacccgagtgttcaagaaggccagtccaaatggaaagctcaccgtctacctgggaaagcgggactttgtggaccacatcgacctcgtggaccctgtggatggtgtggtcctggtggatcctgagtatctcaaagagcggagagtctatgtgacgctgacctgcgccttccgctatggccgggaggacctggatgtcctgggcctgacctttcgcaaggacctgtttgtggccaacgtacagtcgttcccaccggcccccgaggacaagaagcccctgacgcggctgcaggaacgcctcatcaagaagctgggcgagcacgcttaccctttcacctttgagatccctccaaaccttccatgttctgtgacactgcagccggggcccgaagacacggggaaggcttgcggtgtggactatgaagtcaaagccttctgcgcggagaatttggaggagaagatccacaagcggaattctgtgcgtctggtcatccggaaggttcagtatgccccagagaggcctggcccccagcccacagccgagaccaccaggcagttcctcatgtcggacaagcccttgcacctagaagcctctctggataaggagatctattaccatggagaacccatcagcgtcaacgtccacgtcaccaacaacaccaacaagacggtgaagaagatcaagatctcagtgcgccagtatgcagacatctgccttttcaacacagctcagtacaagtgccctgttgccatggaagaggctgatgacactgtggcacccagctcgacgttctgcaaggtctacacactgacccccttcctagccaataaccgagagaagcggggcctcgccttggacgggaagctcaagcacgaagacacgaacttggcctctagcaccctgttgagggaaggtgccaaccgtgagatcctggggatcattgtttcctacaaagtgaaagtgaagctggtggtgtctcggggcggcgacgtggccgtggaactgcccttcaccctaatgcaccccaagcccaaagaggaacccccgcatcgggaagttccagagaacgagacgccagtagataccaatctcatagaacttgacacaaatgatgacgacattgtatttgaggactttgctcgccagagactgaaaggcatgaaggatgacaaggaggaagaggaggatggtaccggctctccacagctcaacaacagatagacgggccggccctgcctccacgtggctccggctccactctcgtgcactcggatgcttactcgtcttcttcctgttctggtttcttttcccctttgttcttccagtttctaccagggggccccgtgggcttccagatcacggtgatgaacctctggcctcaggattggccccacatcaccacgccaacaggaccacagcgcactggctccaccccatctctgccatctccactcccctccttttcatgctgtctcccagaaaagctgccagggctctggccttggaattggacttgagatggggagcagacaggggaggatggggaatgtgggacacggtgtggtgggcatgagggcttggaggggtggggatgagggctcaagacacgagagaagatgtccacggtcccaggtggttaacaaagttctggcagctaaaagatgaccgcgttgaaggccacctccttctggctgggaggggcagaactgtggacagattctcaatgcctttttgaagttctgacccaccaaagaccttctgccttcaccctcctccccacctgatgtccctctgtgtctgatagtgatgttggtgaaagttcgtagaccccaggagtagagaaaagcaactggactgactttcttaccagcagttacctagactgaggcaagctgtgtggactcacccaagtatatttcagtactgtcaggctgtgacatcttagctaccttgtatttcaagtgcatggccctgtctagagatatgcacagagagaaaagcagagggagggagggagggggtcttcagcaagcaccagcccccagcagagtgagctgaagctcctgaggagggttcccgaaggggggcgctcagagatgggggcagggggcggggagaggagagtctgccttatgtcccttccttgtggacttcacatggtcatgcaggaagtgaggatgggtgtccagcgggggccgaggccactagtatcctcctgcttccccctgccattctccagggctggactgaccctatggactgggagagagtgcctgaggccaccatgccacagtcaaagggggtcctatctcagaaggtggcagcatccactgagatatcctcacccgaagggaaggaggctgctgggtagcaaataagccccttcttttcttggtgagttgatgacctccaatagctcccagtgtcatgggtacccagtacgcattagctggtgttgggttgattgagacctggggcagttcctggggcaagaagccagatgggagatgagatagaaagtgttaggagttatcctctttgcctggcctttgagaataacttactgtgtgactttgggcaagttccttccccactctgggcctcagtttctcacttgggaaagcaaggagtttgaccagatgatcacaatgggccttcctagctctggccaccaagaatttgtgaacattagagctcctggtctggtgggtagagccagagctgctgactggtctctctgcctccagaggggatttattggacctcagaggtggcagggccctatggagcaccaactgccctcaaccccaccctgtgcccaagactgggaagggattgatgtcaggctgtggccataggtagcatgagttgcccaaggagggacagagcatatctttgctgaggcttggctgaggggcttatgatagggcttgcagtacctcacagccccctgtgggcacagacaccctgaggtttacccaggcaaatatattgattagcaggacaagggctctctcctcagtttctgctcccttccatctctctcccatacttgtctgaaaagggagacaaaaaatcttatacaagtggcatctcaatcctttccagtccagcacctcctggggcaggcagtgtgacttatttcctgtggtgaaatcacctgtttcacaagcctggcagcgcgacttctgagtctcatgaccactcaacccaagggacccctccccagaccagaaccaagtcagctgggggctgtcgtactaccctgtccagtcttgagggcctagttgcaggtcccccaggcatccagcccctcctagagcttgctgggcaggctgcacctcatctgggcaggcgcagagctgatgaaatgctggagcaatgcatggcaaacatatgccctccagtgtcttctgaaacctttggggctgacacaagatcctttagtgtttgggatgacctctttcctgcagacttcttcccctatccctaactcatgcatggaaaacgtttgtcaggctggtttcccgagcctcctgcacctcaacatcacgctcacccttttgggtttagcccagtgttatttagcaaatttctccagctgcagggaaggatcagagcactatcttttttttttttttttctcctggagccaggactgcacaaggcaatggccaaatttagttgaattcagcctaccatcctttgctgatgactcagctctatgccaagtactggagccacagagatgggtcagtcccagcccctgtcctcaggaagcccatggtcagggaaacgttgtagggataagtaatagagggcagttgccttcagggctcctggtggctgctggtccctatggtgccttgatgtgaattagaagacggtgccctttccaggtggattcagacctacactagaacgcacagctttgggagtgacacacaggttggattttagcaccccttgccccttggccagaggtgccctgctgcacggccatacgctgcagcctcgagggacacacaggccaaagtgtttccttcagcctcttcctggagaggaagccgcaggtcatgtttccaagcttctggtcaactccaggcaccacctcccagcccccaaacatggccgagccagtgcttctctgcagggcccctttcctttctggagtcagcctgcccaggtgataccttgaagtgaaactaggggtgggggagcctcactaggccccaggcaccatcccacagtactggcggtttctctgccaagtgtttggggcctgcactggccaagccatccgtcactgggactttgcagtgtgccctgtgggtggcgtgtggacaccggtccgggcaggaaggaaaagcatgccccggtgaaaacccaccgagcagagagccagcgggacctcctcagcattccacccaggggaagagttcagtccccatgaagataaggactgagttatttggctgcacctctcctcagcctcaaagctcagacctgctagagtgggttcacctggctgttggttctgtgggagagttcctgacaagctggttcctacatggtgcagtgaaaggaactctgtcctggaagtccccaatgccgcctctcagtcctgcctgtcaccaaccacctggggggcttgggcaagctactcaacctctggggctcaatttccctaactgtaaaatgggattgtaatcccttccctgcctgacgcaggaattgttatgaggcccagatgagatgaaagtcagcggtcagggctctgtaagttgaaaatggctggatgtgtgtggccctgccactgcagggatggcccaaggtcacacagaaagtttgctgcaggaggagccctccccaccagtcttcatcgcttgccctgcttctcacttaggcagatgtcaaccagaatgagatacagccaatttggctttgatgacccagctgagagggaaatttagatacaattcaggaatatcatgcccaaaaatagtggtcccagcaaccaggacacagagggaagacctggatattgtcagtgattggtggagggggacatcttggaccctcctaggcctggtgtcacatctcccatctctcagaccccacagaggccaaggggccttggctctgacccaggttaaagagagccaccagcccccaggctcagggagctgaaaccacccatccgcagaaatctaagggcaaggagaaatagaaattgtctgttccttcccttcaaagtgtaaggcctcttccaggagcaactggagccaccacagcttctcagtgacattgggagggcttcgggcccaggaaaaacccaagccttttgtcctgagagccgagccacagcggatgcagtggcgtcagcatcccagagcggcagcttctctcctgcctgtcactggggactggttgctctccacccatccaggaggaaggggttaggtcccagtcttacactcttatagggtctcatggacataggcctatgcctgttctgatatctataattttttaaactcaaaaggaccaaaacactcctgaaccctcatctatacggcctgcactgggcttggtgtttcctcctggcccaggcagctccatctcttctgccattcctcctggacgaaagtggcaggaccccacctctaccacttccccacagggtcactgcacagcggcttcaaagacacgccctgttgaaggggaaacatcctccccccatcacactccaactcgtcaccccaaaagggaagtcaaagcacaggtccgtggggcctatggtttgtagacactgacacagtggttttcaaaccaggtgctgcggaacccctgatattccacagagctttgtcaggggatgctaaagtgggaagatgggagtggaggcaaaggataggtttccagccctcctcccatttccgccgccaccagaataactctgcttttatctgtcttgcctactgagatttcattttcaagctttctttgaagaagaacttcaaaccaccatctcgaggtttgatcttagaccagccagcacaggttctattcttgctgttcatgttggaatggctccagcgttccagtacaaagtgtctttgtgttggaacttgggtcacagacccaggcacaagcatttatacacacacacacacacacacacacacacacacacacacacgtacatagttgatggtttttctagccaacccaccctgaagctctggccaaggtttgatttggacagggacctggtgctcagtggggatgggtcgtgaccctgatattggcccatgaagcatggggagctctggagcaaggaaacaggctcaatcccccactgaggacttgtgtctgcacccctatctggcaccccactttcctggcctaggcccaagggacacagcaggagaagcagtgtgataggagagaggctagggttaaattcatctttacacagcgccggatggatggaaatcttggctcacataaaagacagactcagggaggattttatgacaaaagtccctcctttgagggcaggattcccccaggaatcctggacactttagtgagaactggaccagcccttggcacaaaaccctgcctgccctgtcccccactcccaccccccagggaattctaggtgaaaatgtgaagctcagggcacagcaagcgcatgacacgggtgtattacattcggtccgagtgtgtccttagtttccctgtgtgcaaaatggggctagtccaggctcttcccacctcactgggacaattgcaagggtcataggagaggtgggtatgataggtggtcatatgaggtggtgagtatgagaggtgggtgcctcacaaactcggggtatggtcctgacctgcatggcagatgagcagagcacttgggaacgagcataggaagtgccatcttcccgggcatctctgctcagtgttaaggtctagccacagacactgtgggacctgcctcttcctatggaatgggggcctgcatgggttgtgtcctggggcaggagtgagggatggctgggaagaatctccaggtctgtggcccttgtgttgagtgattattttgtgacactctcattcctggaccacctgccaggtttatctgttatacctgtggcattcttattatgtcagacaagttattatagttcattcaactctaacaaatgaacaaaagaacaataaataggaggccattaaaggtcttttgtggcagaggaaaaaaaaaaaaaaaaaa

SEQ ID NO: 4825 - DNA, 953 bp, Homo Sapiens
  NM_020300
agtccctgcattgcgcgcgacccggcggcgggacaggcttgctgcttcctcctcctcggcctcaccattccagaccaaaattgaaaaaatggttgacctcacccaggtaatggatgatgaagtattcatggcttttgcatcctatgcaacaattattctttcaaaaatgatgcttatgagtactgcaactgcattctatagattgacaagaaaggtttttgccaatccagaagactgtgtagcatttggcaaaggagaaaatgccaagaagtatcttcgaacagatgacagagtagaacgtgtacgcagagcccacctgaatgaccttgaaaatattattccatttcttggaattggcctcctgtattccttgagtggtcccgacccctctacagccatcctgcacttcagactatttgtcggagcacggatctaccacaccattgcatatttgacaccccttccccagccaaatagagctttgagtttttttgttggatatggagttactctttccatggcttacaggttgctgaaaagtaaattgtacctgtaaagaaaatcatacaactcagcatccagttggctttttaagaattctgtacttccaatttataatgaatactttcttagattttaggtaggaggggagcagaggaattatgaactggggtaaacccattttgaatattagcattgccaatatcctgtattcttgttttacatttggattagaaatttaacatagtaattcttaagtcttttgtctgatttttaaagtactttcttataaatttggatcatgttatgatttgtaacattcacacaacacctcacttttgaatctataaaagaattgcacgtatgagaaacctatatttcaatactgctgaaacagacatgaaataaagaatttaaagaatcaaaaaaaaaaaaaaaaaaaaaaaaaaaaa

SEQ ID NO: 4826 - DNA, 2114 bp, Homo Sapiens
  NM_020311
gagagatgtgggttacaaagctgccatctagaggctagaggctcctttctgcagtgtatataatgcaagtctgcagccagcagagctcacagttgttgcaaagtgctcagcactaagggagccagcgcacagcacagccaggaaggcgagcgagcccagccagcccagccagcccagccagcccggaggtcatttgattgcccgcctcagaacgatggatctgcatctcttcgactactcagagccagggaacttctcggacatcagctggccatgcaacagcagcgactgcatcgtggtggacacggtgatgtgtcccaacatgcccaacaaaagcgtcctgctctacacgctctccttcatttacattttcatcttcgtcatcggcatgattgccaactccgtggtggtctgggtgaatatccaggccaagaccacaggctatgacacgcactgctacatcttgaacctggccattgccgacctgtgggttgtcctcaccatcccagtctgggtggtcagtctcgtgcagcacaaccagtggcccatgggcgagctcacgtgcaaagtcacacacctcatcttctccatcaacctcttcggcagcattttcttcctcacgtgcatgagcgtggaccgctacctctccatcacctacttcaccaacacccccagcagcaggaagaagatggtacgccgtgtcgtctgcatcctggtgtggctgctggccttctgcgtgtctctgcctgacacctactacctgaagaccgtcacgtctgcgtccaacaatgagacctactgccggtccttctaccccgagcacagcatcaaggagtggctgatcggcatggagctggtctccgttgtcttgggctttgccgttcccttctccattatcgctgtcttctacttcctgctggccagagccatctcggcgtccagtgaccaggagaagcacagcagccggaagatcatcttctcctacgtggtggtcttccttgtctgctggctgccctaccacgtggcggtgctgctggacatcttctccatcctgcactacatccctttcacctgccggctggagcacgccctcttcacggccctgcatgtcacacagtgcctgtcgctggtgcactgctgcgtcaaccctgtcctctacagcttcatcaatcgcaactacaggtacgagctgatgaaggccttcatcttcaagtactcggccaaaacagggctcaccaagctcatcgatgcctccagagtctcagagacggagtactctgccttggagcagagcaccaaatgatctgccctggagaggctctgggacgggtttacttgtttttgaacagggtgatgggccctatggttttctagagcaaagcaaagtagcttcgggtcttgatgcttgagtagagtgaagaggggagcacgtgccccctgcatccattctctctttctcttgatgacgcagctgtcatttggctgtgcgtgctgacagttttgcaacaggcagagctgtgtcgcacagcagtgctgtgcgtcagagccagctgaggacaggcttgcctggacttctgtaagataggattttctgtgtttcctgaattttttatatggtgatttgtatttaaattttaagactttattttctcactattggtgtaccttataaatgtatttgaaagttaaatatattttaaatattgtttgggaggcatagtgctgacatatattcagagtgttgtagttttaaggttagcgtgacttcagttttgactaaggatgacactaattgttagctgttttgaaattatatatatataaatatatataaatatataaatatatgccagtcttggctgaaatgttttatttaccatagttttatatctgtgtggtgttttgtaccggcacgggatatggaacgaaaactgctttgtaatgcagtttgtgacattaatagtattgtaaagttacattttaaaataaacaaaaaactgttctggactgcaaatctgcacacacaacgaacagttgcatttcagagagttctctcaatttgtaagttatttttttttaataaagatttttgtttcctaaaaaaaaaaaaaaaa

SEQ ID NO: 4827 - DNA, 1699 bp, Homo Sapiens
  NM_020312
agcgacgacttccgccctccttagggccgtggtcccgtagctaccggtcgcgtcgccgtgggcgacgtgcccgcttccaaaatggcggcggcggcggtatctggtgcgcttggccgggcgggctggaggctcctgcagctgcgatgcctgcccgtggcccgttgccgacaagccctggtgccgcgtgccttccatgcttcagctgtggggctaaggtcttcagatgagcagaagcagcagcctcccaactcattttctcagcagcattctgagacacagggggcagaaaaacctgatccagagtcttctcattcaccccccaggtatacagaccagggcggcgaggaggaggaggactatgaaagtgaggagcagttgcagcaccgcatcctgacggcagcccttgagtttgtgcccgcccacgggtggacagcagaggcgattgcagaaggagcccagtctctgggtctctccagtgcagcagccagcatgttcgggaaggatggcagtgagctaatactgcattttgtgacccagtgcaatacccggctcacacgtgtgctagaagaggagcagaagctggtacagttgggccaggcggagaagaggaagacagaccagttcctgagggatgcagtggaaaccagactgagaatgctgatcccatacattgagcactggccccgggccctcagcatcctcatgctccctcacaacatcccgtccagcctgagcctgctcaccagcatggtggatgacatgtggcattacgctggggaccagtccactgattttaactggtacacccgccgagccatgctggctgccatctacaacacaacagagctggtgatgatgcaggactcctctccagactttgaggacacttggcgcttcctggaaaaccgggttaatgatgcaatgaacatgggccacactgccaagcaggtaaagtccacaggagaggcactggtgcaaggactcatgggtgcagcagtgacgctcaagaacttgacaggtctaaaccagcgtcggtgagaggaaggggtataagctacaatgcctagaagagaatgagcggacagattgaaagagctttgaaaagtataaggtgccatccacataacctggtgttcacgagaacacactaaaggactcctgagtcactaccacagccacctggaaaccacaaggcatttgatgctaccgttctggtcagggattgggctgcttcttcagttcctaataccagaccaagcctcctgatgcctttctgcactgcaactgtgtgattgaaaaatgagatgttcatccaagcagtcaagccacagaaacccagcatgtccctgtcacaatctcatgggcaccttgatcatgtcttaaccttcccttaaccttggggctcccaagccagagtcaaggtctgacgccacctcaaggtgacagctcatctccagcacagcacaggcgtgtgcacacagaggtgttccttgcagccccctccctctcaggtgtcctgagatgctgttcctgggagccccctcagaaaactgcctcacctgagacaagtgcctgctggacagaggtgtgattccaggcctggtgtcacatgacaccagcatgcattgcaggattattagtgtattttgagtctgtaaaaataataaatatgtttgaagtagtttcccaaaaaaaaaaa

SEQ ID NO: 4828 - DNA, 2106 bp, Homo Sapiens
  NM_020313
accacggccctaaggagggcggaagtcgtcgctccgtggagcctcctcctctcgcgagaggcgcaaggcgtggagtcgacggctggagagaagccgggagcgagcccaggcggcagtcttgattcccttttggccagcagtttttaggtctgtcagtactgcactgcaagaatggcagattttgggatctctgctggccagtttgtggcagtggtctgggataagtcatccccagtggaggctctgaaaggtctggtggataagcttcaagcgttaaccggcaatgagggccgcgtgtctgtggaaaacatcaagcagctgttgcaatctgcccacaaagaatccagctttgacattattttgtcaggtttagtcccaggaagcaccactctgcacagtgctgagattttggctgaaatcgcccggatccttcggcctggtggatgtctttttctgaaggagccagtagagacagctgtagataacaatagcaaagtgaagacagcatctaagctgtgttcagccctgactctttctggtcttgtggaagtgaaagagctgcagcgggagcccctaacccctgaggaagtacagtctgttcgagaacaccttggtcatgaaagtgacaacctgctgtttgttcagatcacaggcaaaaaaccaaactttgaagtgggttcttctaggcagcttaagctttccatcaccaagaagtcttctccttcagtgaaacctgctgtggaccctgctgctgccaagctgtggaccctctcagccaacgatatggaggacgacagcatggatctcattgactcagatgagctgctggatccagaagatttgaagaagccagatccagcttccctgcgggctgcttcttgtggggaagggaaaaagaggaaggcctgtaagaactgcacctgtggccttgccgaagaactggaaaaagagaagtcaagggaacagatgagctcccaacccaagtcagcttgtggaaactgctacctgggcgatgccttccgctgtgccagctgcccctaccttgggatgccagccttcaaacctggggaaaaggtgcttctgagtgatagcaatcttcatgatgcctaggaggttcctgacatgggacccatctgctcctccagccaactcctgtccctcacatcccaccatggtggctcctcccacctcctctggatttgttcactctgagatctgtttgcagagtgggtgcttagcagacagagtgaagctggctggggggcacagtggtgtgtagtgctgctgtgtatcaaaagaccaaggtattatgggacctggtttcagaatgggatgggtttcttcacctcatgttaagagaagggagtgtgtcctgaagaagcccttcttctgatgttaaaatgctgaccagaacgctcttgagcccaggcatcgttgagcattaacactctgtgacagagctgcagacccctgccttgagtctcatctcagcaatgctgccaccctcttgtctttcagagttgttagtttactccattctttgtgacacgagtcaagtggctcacaacctcctcagggcaccagaggactcactcactggttgctgtgatgatatccagtgtccctctgcccccttccatccccaaccacatttgactgtagcattgcatctgtgtcctgttgtcatttatgttaaccttcaggtattaaacttgctgcatatcttgacatatcttgagattctgcatgtcttgtaaagagaggggatgtgcatttgtgtgtgatgttggatagtcatccacgctcagtttggaccattggaggaacttagtgtcacgcacaaatggggctattcctacgcttagaatagggcttgtctgcccactttagaagagtccaggttggtgagcatttagagggaagcagggcagaactctgaacgacaatacgtctctctgagcagagacccctttgttcttgttatccacccatatggacttggaatcaatcttgccaaatatttggagagattgtgtggatttaagagacctggatttttatattttaccagtaaataaaagttttcattgatatctgtccttgaaa

SEQ ID NO: 4829 - DNA, 3894 bp, Homo Sapiens
  NM_020314
atagaaactacggcactctggccgtggccgacgttgctcctccgaagcatggcgccggcgggagttgtaacccgggctgtccggagcggggagctgcccctcacaagcatggcgtcagctgaaaatgaagcctgtgctgtgcggagcgtcgcctgcccctcacaagcatggcgtctgcagaaggtgctgtgcggccgctgcggggcggccagctgcccttcacaaacatggcggccgaggggtgcggggagtggcggggtaaggatgggaagccgagcagacggccccagaacaagcggtcatgtgactgggaagatggccgtctttccttggcactccaggaataggaactacaaagctgaatttgcatcatgccgactggaggctgtaccattggagtttggggactatcaccctctgaaacccataactgtcacagagtcaaagacaaagaaagtgaaccggaaaggaagcacttcttccacgtcctcctcctcctccagctccgtggtggacccgctgagcagcgtcctcgatgggactgaccccctctccatgtttgcagccactgctgaccccgcagccttggcagctgccatggacagctccagaaggaaacgtgatagagatgataactccgttgtaggatcggattttgagccttggaccaacaaacggggagaaatccttgcccggtacaccactaccgaaaagctgtctattaatctgtttatgggatctgaaaaaggcaaagctgggactgccacattggcaatgtcagagaaggtgcggacccggctggaggagctggatgactttgaggagggttcccaaaaggagctgttgaacttgactcagcaggattacgtgaaccgcatagaggagctcaaccaatcgctgaaggatgcctgggcctcagaccagaaagtgaaggctctaaaaatagtcatccagtgttcaaagcttctttcagacaccagtgttattcagttctacccaagcaaatttgtccttatcaccgacatacttgatacatttggaaagctcgtgtacgagcgcatcttttccatgtgtgtggatagccgcagcgtcttaccagatcacttttctccagagaatgcaaatgacacggccaaggaaacatgcctaaattggtttttcaagattgcctccatcagggaactcattccaagattttacgtggaggcatccatcctgaaatgtaacaaattcctctccaaaacgggaatttcagagtgcctgccccggttgacatgcatgatcagagggatcggagacccactagtgtcggtgtatgcccgtgcctacctgtgccgggtgggaatggaagtggccccacatctcaaagaaaccctaaataagaacttttttgacttcctccttacgttcaaacagattcatggggatacggtccagaaccagctggtggtccaaggagtggagctcccatcttacctccccttgtacccgcctgccatggactggatcttccagtgcatctcctaccatgcccccgaggctctgctgaccgagatgatggaaaggtgtaagaaactaggaaacaatgccttgctgttgaattctgtgatgtctgccttccgggctgagttcatcgccacaaggtctatggatttcattggcatgattaaagagtgtgatgaatctggtttccccaagcatcttctttttcgatcactgggattaaacttggccttggctgatcctcctgagagtgaccgacttcagattctcaacgaagcttggaaagtcatcactaagctgaagaacccacaggactacattaattgtgccgaagtgtgggtggaatacacctgcaagcatttcacgaaacgagaggtgaataccgttttggcagatgtcatcaagcacatgactccagatcgtgcatttgaagattcctacccccagcttcagttaataattaagaaagttattgcccacttccatgacttctcagttcttttctcagtggaaaaatttctgccgtttctggacatgttccaaaaagagagtgtgcgggtggaggtttgcaaatgcatcatggacgcctttatcaagcatcaacaagagcccaccaaggacccggtcatcttgaatgcccttttgcatgtttgcaagaccatgcatgactctgtgaatgcactcactcttgaggatgagaaaagaatgctgtcatatttgattaatggatttataaaaatggtttcctttggccgtgattttgaacaacagctgagtttttatgttgagtccaggtcgatgttttgcaatctggagcctgttcttgtgcagttgattcatagtgtgaaccggttggcaatggagacaagaaaagtaatgaaaggaaatcattccagaaagacagctgcatttgtccgggcctgtgttgcctactgcttcatcaccatcccctccctggcgggcatcttcacacgtctcaatctctacctgcattctggtcaggtggccttggccaaccagtgcctctcccaagctgatgcttttttcaaagccgctataagccttgttccggaagttccaaagatgattaatattgatgggaagatgcggccatcggaatcgttccttctggaattcctctgcaatttcttttctactttattaatagttccggatcatcctgaacatggggtcctgtttcttgttcgagagcttctcaacgtgatccaggactacacctgggaggacaacagcgatgagaaaatccgcatctacacctgcgtcctgcatctcctctccgccatgagccaggagacgtacctttaccacatagacaaagtggactccaacgacagcctctacgggggagactccaagttcctggcagaaaacaacaagctgtgtgagacggtgatggctcagatcctagagcatctgaaaaccctggccaaggacgaggccctgaagcgccagagctcgttgggcctttccttctttaacagcatcttggcccatggggacctacgcaacaacaagctcaaccagctctccgtcaacctgtggcacctggcacagaggcacggctgtgcagacaccaggaccatggtgaaaacgctagaatacatcaagaagcaaagcaaacaaccagacatgactcatctgacggagctggccctcagactccctctgcaaacaaggacctgacccccgggcccatccccaggctcagggactctggtgccaaatccagaaagatctgctctgctgccctgaactcttacggcaatttaggtttctcatttttcttttctttttacatatgtacaaattgttttaagctttggcctctatccaggttattctgacaatgaagaaatgggagttgtcagagcattaaaatgcaatcttcactaagaagcagtctctgtgttgtctttgcacaagtggccttcggtctactcagcccgatctgatgggcctttttagcaagagagaaacaagaatgcaagtaacatctttcttctctggaaggtgtttgttttttcatagtttagaaataaggactttaaaagtggactgcttttcaaagtgccactgttccagacccattccattccagactttgtaccttaaagttagagcacacccaaagtctggaactgtgttacctgaacccctatggaggatttataaaaggcagaaatagcactccattaactctttttcctatcaaaagcagctcttgattggacttagaatctgtgttggtggatcaaaggagaaagcgaggtcaaatttgagattctctgtggcttcagtatacagtaactgaataaatgtcctgaaggagcatttatgttcatgactgttcatttaattacttctgactgt

SEQ ID NO: 4830 - DNA, 2072 bp, Homo Sapiens
  NM_020315
cgccgtgcccgcggagagagcgcggcgcgggaggccggcggccggccggctgcatggcgcgctgcgagaggctgcgcggagcggccctgcgcgacgtgctgggccgggcgcagggggtcctgttcgactgtgacggggtgctgtggaacggcgagcgcgccgtgccgggcgccccggagctgctggagcggctggcgcgggccggcaaggcggctctgtttgtgagcaacaacagccggcgcgcgcggcccgagctggccctgcgcttcgcgcgcctcggcttcggggggctgcgcgccgagcagctcttcagctccgcgctgtgcgccgcgcgcctgctgcgccagcgcctgcccgggcctccggacgcgccgggcgccgtgttcgtgctgggcggcgaggggctgcgcgccgagctgcgcgccgcggggctgcgcctggccggggacccgagcgcgggggacggcgcggccccgcgcgtgcgcgccgtgcttgtgggctacgacgagcacttctccttcgccaagctgagggaggcgtgcgcgcacctgcgcgaccccgagtgcctactcgtggccaccgaccgtgacccatggcacccgctgagcgacggcagccggacccctggcaccgggagcctggccgctgcagtggagacagcctcgggacgccaggccctggtggtgggcaagcccagcccctacatgttcgagtgcatcacggagaacttcagcatcgaccccgcacgcacgcttatggtgggtgaccgcctggagaccgacatcctctttggccaccgctgcggcatgaccactgtgctcacgctcacaggagtctcccgcctagaagaggcccaggcctacctagcggccggccagcacgacctcgtgccccattactatgtggagagcatcgcagacttgacagaggggttggaggactgagcccactgcacctgcagccacaggcccacccctccccactccctgatcccgtaggtggaggcgatgggtcacgagccatgttaagcacaaccggctccttggtccagttctgcaccggggtggggctgggacccggggaaggtttgagggcccttgcaaccccctcccagcagtggctgggcactctttgctgccccagaagctggtcccctatggattcatcttggcctgacccagccaggtggccttatttcttccctgtcacctcccctccttgaaatctgggccctggtgcctgctgaagattccctctatccctgagtacttagtcttctcccccttccctggggcttctagagctctctctgcccctcaggtcctggcccttgggtccttgtcaaccagaggtctagggaaccacaacccttattgtcctgggtggaccaatccaaaggctaagtgatagtgactcatcaatgttgggtcctgtggggtaccagtttaggttcctaagtaatagtgaccctttcacgtcctggagcccgagtggaccaatcggaagcctaagtgacgatgaccctcgcatgtcctaggtccctgggtggacccatcaggaccccaagtgatagtgacccagtggtcttttagatcctcagtagaacagtccagaagcctgagagacagtggccccttgataatctgggtctcacgggaccagctaggggtccaggtttcagtcagtaaataagagtggtccacgtcctaaagacacctctcctttacaaagacttgtgatgctctggggcttctgtggccaagccccaccctttcctggtcatggtacccgtacagcgttgatggccacagctcgaaggggggctttcgtgtccccctgtgcggtcagtgttttcagtaccacctctctcccgtgcccacttggctatttacttatttatttattgtgtgccagtgatggtgggtgggggctgggccttccccgccacctccacccctgttgtgacctgtccttccgtacttaataaagtgcgcgtgggagtgttaaaaaaaaaaaaaaaaaaaaaaaaaaaaaaaaaaaaaaaaaaaaaaaaaaaaaaaaaaaaaaaaaaa

SEQ ID NO: 4831 - DNA, 2567 bp, Homo Sapiens
  NM_020319
caatgacaggcggcaggcggtgaccgccgcagggcctgcggagaccgtccgcctggctcgcccgagctcgcccgctgtccgccagcccgcgggagggaggagagaagcgaagcgtttccgcggttggctactcagtgtcttggtctcaagttgcctcattgcggctggcgttcccaatacagacgcatcgtttcttttttaatactccctaagaaagggaataaccttcaagctggcgggagcaatggttcacataaagaaaggcgagctgacccaggaggagaaggagctactggaagtcatcgggaaaggtactgtccaagaagctggaacattattatccagcaagaatgttcgtgtcaactgtttggacgagaatggaatgactcctctaatgcatgcagcatataaaggaaaactcgatatgtgcaaattactactgcgacatggagccgatgtaaattgtcatcagcatgaacatggatacacagccctcatgtttgctgcactttctggtaataaagacatcacatgggtaatgttagaagctggtgctgagacagatgttgtcaactctgtgggaagaacagcagctcagatggcagcctttgtgggtcaacatgattgtgtgaccataatcaacaatttctttcctcgagagagactggattattacactaagccccagggactggataaagagccaaaactgcccccaaagttggcaggcccgctgcacaaaattatcaccacaacgaatcttcatcctgtcaagatcgtgatgcttgtaaatgagaatcctctgctgacagaagaagcagccctgaataaatgctacagagtgatggatttgatttgtgagaaatgtatgaagcaaagagacatgaatgaagtattggctatgaagatgcattacataagctgtatctttcagaaatgcattaacttcttaaaagatggagagaataaactggacaccttgatcaaaagcttgttaaaaggccgagcttctgatggctttccagtgtatcaagaaaagatcattagagaaagtatcagaaaatttccttactgtgaagctacactcctccagcagctggttcgaagcattgctcctgttgaaattggttctgatcccactgcattctccgtccttacccaagccatcactggccaggtgggttttgtggatgtggaattttgcactacctgtggagaaaagggagcaagtaaaagatgttcagtttgcaaaatggtaatatattgtgatcaaacctgccagaaaacacactggtttactcataagaaaatctgtaagaatctgaaggacatttacgaaaagcaacagttggaggctgccaaagaaaagagacaagaggaaaaccacggcaaacttgatgtcaattctaactgtgttaatgaagagcaaccagaggctgaagtaggtatctctcaaaaggattccaatcctgaagattccggggaaggaaagaaagaatctcttgaaagcgaagctgagttggaaggcttacaggatgctcctgcagggccacaggtgtctgaggagtaaaagccagagcaagtgccagtgtggatgatcctcaccctgcaagaagctggaaaactcctaggaatgcattgtcctcaccttgttatacctgcgtggcaccatggcaggattccacatttcatagaatacaggttttcaagcaaacccctgttgaccatgccctaatttcctattgatttctgttctataattgaatggatattcctatggaaaattttttgtttcaaaatacaggaaaaacattcctattacctttctgaggctggctttccagcaattgtttcaaaggaaaatagatccccttaaagaaaaaatacaggctttagggaacaaagggacaagcagaacaggtgtggaagagagattttcaggaagggaaaaatttatagctacagagggtagttagaaaaatcataacttatatgtgaataaaatacatataagcagcatttacggtagtggcattctacttattaagatgcaatgaaatgaagaaaggctttatgttcaaggacctttgccatagttcagctaattgtagttttatatagaaatgatcctgaacactctgaacttgacgtagtcctgcggtgatattctatctgcagtatttgtacctccagaatggcagatccctcagcaggaacaaaggcatattgacggttctctcagcgtatgcattaaaaaaggtacttcctgaaacttttgattcaataatgactaaacatactatgtacacaattactgtaaggctaattcacgtgccatactccacctgaaagcctgagttatcttgctataagcttttcatggagcacttcctttccagaaactgatttgtaactcatttagagaatgtcctggcgtcggtttttagcatatgtggtatttaaacagagctagaatgtgatgtctgaagataatgctgcatttctgggtttcttgtgtggattttaaaataaattgtgcctacaaatataaacaaaaaaaaaaaaaa

SEQ ID NO: 4832 - DNA, 1848 bp, Homo Sapiens
  NM_020320
ataaggaggtggggcgaggccggaactggcggactgcggcgcacttccgtagaggtggacatggcgtgcggctttcgccgcgctattgcttgccagctttccagagtgttgaatcttccaccagaaaacttgatcacatcaatatctgcagttccaatttcccaaaaagaagaagtagctgattttcagctttctgtggattctttattggaaaaagacaatgaccattcaagaccagatattcaagttcaagccaagagactagcagagaagctaagatgtgatacagtggtgagtgaaatcagtactggtcaaaggactgtaaatttcaaaataaacagagagctcttaacaaagacagtgctacaacaagtaattgaagatggctcaaaatatggattaaaaagtgaacttttctctggacttccccagaagaagattgtggttgaattcagttcacctaatgttgccaaaaaatttcatgttggacatttgcgttctaccatcataggaaattttatagcaaatctcaaagaagctttaggacatcaagtaataagaataaattaccttggcgattggggcatgcagtttggtcttctgggaactggcttccagctgtttggctatgaggaaaaactgcagtccaatcctctacagcatctctttgaagtttatgtacaagttaataaagaagcagcagatgataaaagtgtagcaaaagcagcacaggagttcttccaacgattggaactgggcgatgtgcaagcactttcactgtggcaaaaatttcgggacttgagcattgaagagtacattcgggtttacaagcgtctgggagtatattttgatgaatattcaggagaatcattttatcgtgaaaaatctcaagaggtcttaaagttgctggagagtaaaggactcctactgaaaacaataaaaggaacggctgtagtagatctctctgggaatggcgacccctcctcaatttgtactgtaatgcgaagtgatgggacttctctctatgcaaccagagatcttgcagctgctatagatcgaatggacaagtataattttgatacaatgatatatgtgacagataaaggacaaaaaaagcattttcagcaagtattccaaatgctgaagatcatgggatatgactgggcagaaaggtgccagcacgtgccctttggagtagtacagggaatgaagactcgaagaggagatgtcactttcctggaagatgttttaaatgagattcaattaaggatgctacagaacatggcttcaattaagacaactaaagaactcaagaacccacaagagactgcagagagggtcgggctcgcagcactcattattcaggacttcaaaggtttactcttatctgactacaagttcagctgggatcgtgttttccagagtcgcggggacacaggagtcttcctacagtacacacacgcccgcctccacagtttggaagagacttttggatgtgggtacctgaatgacttcaacactgcttgtttacaagagccacagtctgtttcaattcttcagcatcttctcaggttcgacgaggtgctttataaatcatctcaggactttcaacccaggcatatcgtcagttaccttctaactttaagtcatcttgcagctgtggcacacaaaacactacaaataaaagatagtcctcctgaagtggctggggccagacttcatcttttcaaagctgtccgttctgtcctagccaatggaatgaaacttcttggaataacacctgtatgtaggatgtaatttccattaaaatggcttttaaaatgtcaagtgaaaaaaaaaaaaaaaaaa

SEQ ID NO: 4833 - DNA, 7555 bp, Homo Sapiens
  NM_020338
cgggcgccggggagagcgggcggccgggcggcaggcgggcgagcagcgatcgggcggccgagcgagcgagcaacgccggcgcagcgcggtgaccccagccccagccggcgcggagcaggagccggagccgagcggatctcggcgccctcgctgcgctcctcccggcccgagcctgccctacccggcggtggcggcggcgcgtcctccagcggcggcagcggcgctcgcagcgcccggactcacggcagctgtgttctgatttcgtactactgctggggctgccacctcctcctccagacgctctcagcagacttgagtcctggtccttctgcagaggcctgagcaggaggaagaggaggaggcccgttggcgtcggaccaatgctgcaaggggtgtgaggagaggagccgctgtttttcactgagctgccataccccgaaagcaggatggagctggagtgaggtggaggggccgcaagctgctgaccggcgtgtggaacactggtggtttgcagatcactgaggctggacaacgttcatggctctcgggtagaacctagtgaaacggccagaatgaattctatggacaggcacatccagcagaccaatgaccgactgcagtgcatcaagcagcacttacagaatcctgccaacttccacaatgccgccacggagctgctggactggtgcggagacccacgggccttccagcggcccttcgagcagagcctgatgggctgtttgacggtggtcagtcgggtggcagcccagcaaggctttgacctggacctcggctacagactgctggctgtgtgtgctgcaaaccgagacaagttcaccccgaagtctgccgccttgttgtcctcctggtgcgaagagctcggccgcctgctgctgctccgacatcagaagagccgccagagcgatccccctgggaaactccccatgcagccccctctcagctccatgagctccatgaaacccactctgtcgcacagtgatgggtcgttcccctatgactctgtcccttggcagcagaacaccaaccagcctcccggctccctttccgtggtcaccacggtttggggagtaaccaacacatcccagagccaggtccttgggaaccctatggccaatgccaacaaccccatgaatccaggcggcaaccccatggcgtcgggcatgaccaccagcaacccaggcctcaactccccacagtttgcggggcagcagcagcagttctcagccaaggctggccccgctcagccctacatccagcagagcatgtatggccggcccaactaccccggcagcgggggctttggggccagttaccctgggggtcctaacgcccccgcaggcatgggcatccctccgcacaccaggccgcctgctgacttcactcagcccgcggcagccgctgcagcagcggcagtggcagcagcagcagccacagctacagccacagccacggccactgtggcagccctgcaggagacacagaacaaggatataaaccagtatggaccgatgggtcccacccaggcgtataacagccaattcatgaaccagcccgggccgcgggggcctgcctccatggggggcagcatgaaccccgcgagcatggcggctggcatgacgccctcggggatgagcggccctcccatgggcatgaaccagccccggccgcccggcatcagcccctttggcacacacgggcagcggatgccccagcagacctacccgggcccccggccccagtcccttcctattcagaacataaagaggccataccctggagagcccaactatggaaaccagcaatatggaccaaacagccagttccccacccagccaggccagtacccagcccccaaccccccgaggccactcacctcccccaactacccaggacagaggatgcccagccagccgagctccgggcagtacccgccccccacggtcaacatggggcagtattacaagccagaacagtttaatggacaaaataacacgttctcgggaagcagctacagtaactacagccaagggaatgtcaacaggcctcccaggccggttcctgtggcaaattacccccactcacctgttccagggaaccccacaccccccatgacccctgggagcagcatccctccatacctgtcccccagccaagacgtcaaaccacccttcccgcctgacatcaagccaaatatgagcgctctgccaccacccccagccaaccacaatgacgagctgcggctcacattccctgtgcgggatggcgtggtgctggagcccttccgcctggagcacaacctggcggtcagcaaccatgtgttccacctgcggcccacggtccaccagacgctgatgtggaggtctgacctggagctgcagttcaagtgctaccaccacgaggaccggcagatgaacaccaactggcccgcctcggtgcaggtcagcgtgaacgccacgcccctcaccattgagcgcggcgacaacaagacctcccacaagcccctgcacctgaagcacgtgtgccagccgggccgcaacaccatccagatcaccgtcacggcctgctgctgctcccacctcttcgtgctgcagctggtacaccggccctccgtccgctctgtgctgcaaggactcctcaagaagcgcctcctgcccgcagagcactgtatcacgaaaatcaagcggaatttcagcagcgtggctgcctcctcgggcaacacgaccctcaacggggaggatggggtggagcagacggccatcaaggtgtctctgaagtgccccatcacattccggcgcatccagctgcctgctcgaggacacgattgcaagcatgtgcagtgctttgatctggagtcatacctgcagctgaattgcgagagagggacctggaggtgtcctgtgtgcaataaaaccgctctgctggagggcctggaggtggatcagtacatgtggggaatcctgaatgccatccaacactccgagtttgaagaggtcaccatcgatcccacgtgcagctggcggccggtgcccatcaagtcggacttacacatcaaggacgaccctgatggcatcccctccaagcggttcaagaccatgagtcccagccagatgatcatgcccaatgtcatggagatgatcgcagccctgggccccggcccgtccccctatcccctcccgcctcccccagggggcaccaactccaacgactacagcagccaaggcaacaactaccaaggccatggcaactttgacttcccccacgggaaccctggagggacatccatgaatgacttcatgcacgggcccccccagctctcccaccccccggacatgcccaacaacatggccgccctcgagaaacccctcagccaccccatgcaggaaactatgccacacgctggcagctctgaccagccccacccctccatacaacaaggtttgcacgtaccacaccccagcagccagtcagggcctccattacatcacagtggggctcctcctcctcctccttcccagcctccccggcagccgccacaggccgctcccagcagccatccacacagcgacctgacctttaacccctcctcagccttagagggtcaggccggagcgcagggagcgtccgacatgccggagccttcgctggatctccttcccgaactcacaaatcctgacgagctcctgtcttatctggacccccccgacctgccgagcaatagtaacgatgacctcctgtctctatttgagaacaactgagggccacccggtcggggccatccctccacactctgcatcctaccccacctacccaacacacttttccacctgggagcctgtgccctcagaccgccccgcaccagagccacgggctgtggggcggggagccctcccccgctgcagccctctcagaacagaggggtagggagggtgcaccagtgcaccaggaaggctgtgtgggtctggagcccacgtcccacctccacacccttggcttgggcccatgcccagcgcaggcctgaagaccaccctcccgagaggaaccagcccggtaagagggcacacgctgatgcggcttcccggtccctccgcgtgtgccgattccagatgaccttccagtgtccccaaggttcttccatcttctagactgtaaccctgcctccctgcttcctggtccagagcctccctccagtgactgtggagcctgagaaggcccccgggccccagcatgggccccgagccttggaggagcactggcagttggtggcagtgagaccagcccacccaccaccacccaccacagaaaagcacaaacctctgggaaagacaacgtctctcgggggccaggggtcatcggtttgacccctgacctataagccaagataccccataaacacactcagaaagcagagaaaaaggacaagagtctgtgtttgagagggggtctgccattcctgcttggggactggtggggaagagggccaggacatcttctgagccaggacgtccctgaggctccacctccaagctcagacagggcccaggcttggggaacagagagagcaggtgtacacccaaccaaagtgattgtgcccttggttggggggcgcgggcatataacctgtcagaagcaaacaggagcggcaacttctaactttgctccaagccactctctttttaaacagcaacaatttaaagctatgaagtcacctggagaaaaggaacgttgctcttggacagcaagcaaaccatttctctccgtctgttctgtttttctcctagtccctctcctgccacctctccaagacttccgtgggacacccacttccctctgtcctagttctctttgtccaatcagatggcaagggcagtgcgtggaaaggccggggaggtgcagaaaccagagcccagggcaatggtgtctgtccagcccctccctctgtccctgtgctccaagctgcccccggctgcagcccaggccatggacatgtgcaccagtatgtacctgcaggcatgggggggaggggggcgtgtttctgggcctgccccagacactgcccttggctgccagcctaccctgcctgcactcctccaccatcacaatctcacccaaactcctgctcactcaagcaaaagcagcctctggccttccctccaccgctttgctccatctggcttaccactctccagggcctcctggggagcctgtcctgtgttcactttgtttcaggctggtctgtgccccgtgagccacatggcctagggtgatgccaggttgtcccgtcactggggtcccatctgtaaattctttgcgcccttcccggctgctgcctggggccctttcctgctctcccgtccgctgtgggtggtccccagctctcctctgtgggttttaccggaaaggtggccccagctgttgacttccagtcactgtcccagacggcacaaggttttctgtaggaaagctgccattgccccggccccttttcttcctttgtcccgttgtcgaggttttttcaaatagcgtgttgttcagtatgcaaatcaattattttaagaatcgcttttgtaaatatctttgtgaatattttagtatcgtctttgataatattcaacattttcatgacctggttatagcctttgctggtgtttttaaaatacctggactcaatgacaaagaccgagtcttctttttttttaaacaaaaacaaaaaaagcaaccagggctatttgtacagttgaaggggtgaacagaatgggcggctgtgctgggagttggaagaccgggcagcccgctatttagagccatccctcagtcagctggcagggacaagccaacgccaggtagcatgtggccacccttgcccagtgtctgtggcctggcaagtggccacgccctgtgtcagaccatctgggaattaagctccagacagacttacagatgccttccttaggagttcttgcttcttgcgttgatactttgccccagaaaggcctgggattcattctggttcttatcagggtgtgtccacactctgctcacaggtggatccacggctttccagtgcggagagtcgagatgctccctgcagcccaggccccgggcacctcctgcaaccatctctgggctcagcacctgaggcgggtttcctgggtcccctctccagcaagcctccaccagcaagctcggcccagagcttcccttccggctggctctgaaccgtgcgtggtgcctacagcctgcagtctggagacaagctcttccggagtgctctgggagccaggccagggtgtgagggaggtgcagaggcatccggggcgggagcaagccccaggttgtgacaggtgcaggtagacaacgcccataaacagagatggtcctgaactctggagagatccttccctgatcctttcggacgactacttggagccataagtaacctcagcaaaaacgaggcctctgcaagccacttttccatgccaagcatccacccggcccacaggcatgtttctgccgccactccgcaagatggacagggagccagcaggcaggcgggaagggccaagtacaggcaatcacccccatcttcttggtttgaagctttatccatgtatcatgttccgtgtagccattttattttttaagaaactgctaatactttctccctaatggaagccctgatcccccagagagctacaggtctgctcccgacgggcctcgggcctgacccgtccacacagggccgtgtcaacagcagcgactcaagggacgtgtgtacatatgtaaatgagaaatagagacgtgtcaacagatgcattcatttctcttggaatgtgtattgtttttattttgcgaaacaaaacaaaacaaaaaaaaaagcttggaactccatcacgtggaaaaactagatcctgttggttatagcatttgtgagttctccacgtctgtctctctcgctcatgtaatatactctgaccctgagtggaaaggggtttttgttctgtttttattttacctacatgtactatttagcttcagtgtactagtcctgccacctgtgtatttttagggtgctatggaaataatgaaaagaaacggggatttcagaagaaaattgtaaccaaattcatactttgtataatttttgatatcatgatcacaggtgattcacacgtacacacataaacacacccaccagtgcagcctgaagtaactcccacagaaaccatcatcgtctttgtacatcgtatgtacaatgcaatcatttcatactttaaactggtcaaaaaactaattgtgatttctagtcttgcaaagctgtatgtagttagatgatgtgacaacctctaatatttatctaataaatatgtattcagatgaaacctgtatattaggtgttcatgtggttattttgtatttaaagatcaaattatttgactattgctagacatttctatactctgttgtaacactgaggtatctcatttgcccatgttaatttttttctaaataaattgacaaaaacaaaggtttggcg

SEQ ID NO: 4834 - DNA, 5337 bp, Homo Sapiens
  NM_020342
gagtggaccttgtacgccgcaagcgtagcagggtgtcagacgcgccggtttctgcgacgcagttagcgcagtctgctttggtgaatacacgatttggtgcagccggggtttggtaccgagcggagaggagatgcacacggcactcgagtgtgaggaaaaatagaaatgaaggtacatatgcacacaaaattttgcctcatttgtttgctgacatttatttttcatcattgcaaccattgccatgaagaacatgaccatggccctgaagcgcttcacagacagcatcgtggaatgacagaattggagccaagcaaattttcaaagcaagctgctgaaaatgaaaaaaaatactatattgaaaaactttttgagcgttatggtgaaaatggaagattatccttttttggtttggagaaacttttaacaaacttgggccttggagagagaaaagtagttgagattaatcatgaggatcttggccacgatcatgtttctcatttagatattttggcagttcaagagggaaagcattttcactcacataaccaccagcattcccataatcatttaaattcagaaaatcaaactgtgaccagtgtatccacaaaaagaaaccataaatgtgatccagagaaagagacagttgaagtgtctgtaaaatctgatgataaacatatgcatgaccataatcaccgcctacgtcatcaccatcgtttgcatcatcatcttgatcataacaacactcaccattttcataatgattccattactcccagtgagcgtggggagcctagcaatgaaccttcaacagagaccaataaaacccaggaacaatctgatgttaaactaccgaaaggaaagaggaagaaaaaagggaggaaaagtaatgaaaattctgaggttattacaccaggttttccccctaaccatgatcagggtgaacagtatgagcataatcgggtccacaaacctgatcgtgtacataacccaggtcattctcatgtacatcttccagaacgtaatggtcatgatcctggtcgtggacaccaagatcttgatcctgataatgaaggtgaacttcgacatactagaaagagagaagcaccacatgttaaaaataatgcaataatttctttgagaaaagatctaaatgaagatgaccatcatcatgaatgtttgaacgtcactcagttattaaaatactatggtcatggtgccaactctcccatctcaactgatttatttacatacctttgccctgcattgttatatcaaatcgacagcagactttgtattgagcattttgacaaacttttagttgaagatataaataaggataaaaacctggttcctgaagatgaggcaaatataggggcatcagcctggatttgtggtatcatttctatcactgtcattagcctgctttccttgctaggcgtgatcttggttcctatcattaaccaaggatgcttcaaattccttcttacattccttgttgcattagctgtaggaacaatgagtggagacgcccttcttcatctactgccccattctcagggtggacatgatcacagtcaccaacatgcacatgggcatggacattctcatggacatgaatctaacaagtttttggaagaatatgatgctgtattgaaaggacttgttgctctaggaggcatttacttgctatttatcattgaacactgcattagaatgtttaagcactacaaacaacaaagaggaaaacagaaatggtttatgaaacagaacacagaagaatcaactattggaagaaagctttcagatcacaagttaaacaatacaccagattctgactggcttcaactcaagcctcttgccggaactgatgactcggttgtttctgaagatcgacttaatgaaactgaactgacagatttagaaggccaacaagaatcccctcctaaaaattacctttgtatagaagaggagaaaatcatagaccattctcacagtgatggattacataccattcatgagcatgatctccatgctgctgcacataaccaccacggcgagaacaaaactgtgctgaggaagcataatcaccagtggcaccacaagcattctcatcattcccatggcccctgtcattctggatccgatctgaaagaaacaggaatagctaatatagcctggatggtgatcatgggggatggcatccacaacttcagtgatgggctcgcaattggtgcagctttcagtgctggattgacaggaggaatcagtacttctatagccgtcttctgtcatgaactgccacatgaattaggagattttgcagttcttcttaaagcaggcatgactgtaaagcaagcaattgtatacaacctcctctctgccatgatggcttacataggcatgctcataggcacagctgttggtcagtatgccaataacatcacactttggatctttgcagtcactgcaggcatgttcctctatgtagccttggtggatatgcttccagaaatgttgcatggtgatggtgacaatgaagaacatggcttttgtcctgtggggcaattcatccttcagaatttaggattgctctttggatttgccattatgctggtgattgccctctatgaagataaaattgtgtttgacatccagttttgacctttcccagtaatcactgttgattacgagaatgttaccatgcagctttgcatctgttccttgtactgtatgcacattgctcaaaggaaagtcagtggcttgcactacttacaagtttcatagatttgagcctaaccacaagaggctggtgcttagtactgttttccctgcacgtaggggtcttttaaaaatataaagcttgtgataaagagaggagaatatgggactccatgaaccagtgttgatatgtttgattaagacttttcacaaaataatcatataaaacactagtctctttattagtagaaacttctgtggctatgcagaaatagagatcgaaccaaaaaaaatcatttaaactttaaaaatattttaaatggactttggggagacattttttgtgtgttttaagaatgaattgtagtgctctttaattcagctacatatattcatgtggtgatagggatcaacttgacacaactttgaaactgcataaagtagacataggaactagaggaaagctcaggctgcattagagtatgaatttagcattgggaaaagcccttattcttgaatctagagttactatttttgtatatatttgcatagtgtttaaacctgcagcctaaactactgaaatttgtgattgtatgtttgtgtgagcttcagtttaatgaaagattcataatggttctttgtattattataatacttggtgttggggtgttctttctgttttgttttttactttaattttgttttgattttttttttttttttttggcgggggtaggtgagggtttggagcatgtggtctttttaaaaaattgtaaccctctagaaaatatcaaagaaatgaaccagacgtggtttaaatagttgattttcctattttaacagtaccaactagttaattgggaaatgtaagttctgaatgttcacattgctttaccagtttggcactggaaccaagagcacatgtcgtggctggctacaaggttgtaaagcagaaaatcgaagtttaccatgtctgtaatgtgtacatgaagtgtcaatttagaacagttactaggataaactccattattgccatggctgtcatggtacccaagtgacttggaagatgcatttaaattactcagctgaaatcacttgatcatcttgtgccaagatatgctgttggtgcctgatagggattagtcttttaggtgccctgttctcctaccataattgtgaatgatttgtgagaagtgcaagccatgtttatcctgaatttttacttaataatttgtattactagtcatatgcatgtagctttctgtttacatcctatgccacatggtcttcatttatgccaggtaaactgtatttgaactatgtgcagctagctttgttttaatctgcttggcaaccagtgtagctgctgtaacaatctatcttattgttcaaatatataagagccaaactcttttccattccatctaaaatgttttcatttagtactcttctttcctcctactctatgaacttcaaaacaaaaacaaaactttgagagcagcacatgcatccaggtatttatagattattgccagtgtcttttctgtatgctataagcaagggagcttaggtgttatttctttaatttatgcttgaatctgaaaaattatttctgacttactccatggcctccttataataagtagaagttttatatataattaattttcagcattgggcactgaattaggacagtcctcatctcattgcttggcccttcaagcaacctagctaaaaggtgctgatattttatttagtactgccaacttcaagtgatttagatatctatctatctagatttctgaaccaagatatatttatagttcacttttgggtttttatacccacggtaggattctgcattccagcattaaatctgcttcattttagaacctttataaaagcaatagctggaatatactcccagttttaaaataaatgcctgattgatttaaagcaagtaggttatgctgaagtatataaagaagttttatattctctcaaaaatggtattatctttctttatttgctagattcttacaaatcttttaagagggctgtaacagttgctgctagtattagggttccacatcattctaatgtatagtttcaagtcttaatagacaatctgaattccactacatttcttttggctccaacattccttttagcttgaccagtctaatttaaaatgtgtttgttggaggtcattaacgttacttgtacaatgctgtcactgtgtgacatccatatgaattttggtatatatcaatcaatcaatcaatcacattgcattcaatcaatcagctgtgattgattgattatgcttagaaatactatagtaactagatgcagtgtgaattttttccattaacaaacaaacaagtcagtggcttaaatgtgattatggtcctgcaaggtgattcttgctaaaatatctaaacttttgttttgttttaactgaatcattttttaacttaaaaagctggaaaatatcaaatgctgttttttttttttcattgtcaacagtggtgtgtcattttatgtatgttcctaatgcttatggaactcctccaaaataaagttactcaaagagagcaaataaaaaaaaaaaaaaaa

SEQ ID NO: 4835 - DNA, 9453 bp, Homo Sapiens
  NM_020343
gcggcggcggcggcggcggcagcagcggggctgggggcggcgagtggcccgcgcgacacgcgccggcctcgaccctatgctttgattcgcgtggcgcaggcgcctactgccccgccggcggggcccgggcttcctgccgcgggatgttctcccgaaggagccacggggatgtgaagaagtccacccagaaggtgctggacccgaagaaggacgtgctgacccgcctgaagcacctgcgggcgctgctggataatgtggatgcaaatgatcttaagcagttttttgagaccaactattctcagatatatttcatcttctatgaaaattttatagcactggaaaatagtttgaaattaaaagggaataataagtcacaaagggaggagctggactccatcctcttcctttttgaaaaaatactgcagtttctacctgaacgaattttctttcgatggcattaccagagtataggctcaactttaaagaagcttctacacactggaaattctattaagataagatgtgaaggaatcaggctgtttcttctgtggcttcaagcacttcagacaaactgtgcagaagagcaggttctgatttttgcttgcctggtgcctggtttcccagcagtcatgtcatccaggggcccttgcacactggagacactcatcaatcccagccctagtgtagctgatgtaaagatatatccagaagaaatcactccactcctaccagccatatcaggggagaagattgctgaggaccaaacctgcttttttcttcaaatactgttgaagtatatggttattcaggctgcgagcttggagtggaagaataaggagaatcaagatactggttttaaatttctttttacattgtttcgaaagtattatcttcctcatttatttccatcatttactaagttaacaaacatctacaaacctgtacttgacatcccccatttgagaccaaagcctgtgtacattactaccactcgagacaatgagaacatttacagtacaaagattccatatatggcagctcgtgttgtttttattaagtggattgtaaccttctttttggaaaaaaagtatctaactgcaacacaaaacactaaaaatggagttgatgtattgcctaaaatcatccagactgttggtggtggtgctgtgcaggagagagcgcctgagctggatggtggtgggcccacggagcaggacaaaagccattctaacagcagcaccttgtcggaccgaagactcagcaactccagcctctgtagcattgaagaagagcaccgaatggtgtatgaaatggtacagcggattctcttgtcaacacgaggttatgtcaacttcgtgaatgaagtatttcaccaggcatttttgttgccttcctgtgagatagctgtaacaagaaaagtagttcaagtgtacagaaagtggattctccaggacaaacctgtgttcatggaggagccagatagaaaagatgttgcccaagaagatgctgaaaaattaggattttccgagactgatagcaaggaggcctcatctgaaagttctggtcataaacgatcttccagttggggacgcacatactccttcacaagtgcaatgagcagagggtgtgtgacagaggaggaaaatacaaatgtgaaagccggcgtccaggctttgttgcaggtatttttgacgaactctgcaaacatctttttgttggaaccatgtgctgaagttcctgtgctcttgaaagaacaagttgatgcttgtaaagctgttttgattatttttaggcgcatgataatggagcttacaatgaataaaaagacatgggaacagatgttgcaaatactactcaggataacagaagctgtcatgcagaagccaaaggataaacaaataaaggacttgtttgcccagagcttggcagggttactatttaggacgctcatggtagcttggatccgagcaaacctctgtgtgtacatttctcgagagctctgggatgactttcttggtgtgctgtcctccctcacggaatgggaggaacttataaacgagtgggccaacattatggactccttgacagcagtgcttgcaagaaccgtttatggagttgagatgacaaacctacctctggataaattaagtgaacaaaaggaaaagaagcaacgaggcaaaggctgtgttctagatcctcagaaaggaaccaccgtggggaggtccttttctctcagctggcggagccacccagatgtgaccgaaccgatgcgatttaggagtgccaccacgtctggagcaccgggagtggaaaaggcaagaaatattgttcgccaaaaagcaactgaagtggaggagtgtcaacagtcagaaaatgcacctgcagccggatctggccatctcacagtgggacagcagcagcaggtccttcggagcagcagcacctccgacatccccgagccgctgtgctcagattcttctcagggtcaaaaggcagaaaacacacagaattcgagttcttcagagcctcagcctattcaagagaataaaggacatgtgaagagagaacatgaaggaataacaatcttagttcgaagaagcagcagccctgctgaattggatttgaaagatgatttgcagcagacacaaggaaaatgtagggaaagacagaagagtgaaagtaccaacagtgacacaactctgggctgtaccaatgaggcagagctgtccatgggcccatggcagacctgtgaggaagacccagaactgaatactcccacagatgttgtggctgatgctgatgcccgtcattggttacaactgagtcccaccgatgcttcaaatttaacagatagcagcgagtgcctcacagatgactgtagtataatcgccggggggagcctcactggttggcacccagactctgctgctgtgttatggcgaagggtcttggggatcctcggagatgtgaataacatccagtcacccaagatccatgccagagttttctgctatctctatgaactctggtacaaactagcaaagatacgggataatctagcaataagcctggataaccagtcttctccatctcctccagttttgatcccaccactcagaatgtttgcatcatggctgtttaaggcggcgacactgccaaatgaatataaggaaggcaaactacaagcctacaggctgatctgtgccatgatgaccagacgccaggacgttctgccaaactcagatttcctggtgcatttttaccttgtgatgcacctgggattaaccagcgaggatcaggatatcttaaatacgatcataaggcactgtccaccccgctttttctccctgggttttcctggcttctcaatgctggtgggggacttcatcacggccgctgccagggtccttagcacagacattttgacggcgcctcgttcagaggctgtcactgtcctcggctctctggtctgctttccaaatacctaccaggagattcctttactgcagtcagtgccagaagtaaatgaggccattacaggaactgaagatgtcaagcattacctcataaatattttactgaagaatgccacagaagaaccaaatgaatatgcaagatgcattgctgtttgctcccttggggtctggatatgtgaagagcttgcacagtgtacaagccaccctcaggtgaaagaggccatcaatgtgataggagtaactctgaagtttcccaacaaaatcgtggcccaggtagcttgcgatgtccttcagttgctggtttcctactgggagaagcttcagatgtttgaaacctctctgcctcggaaaatggcagaaatcctcgtggccacagttgcttttcttttaccaagtgcagagtactcctcagtggaaacagacaagaagtttattgtgtccttgctactctgcctcttggactggtgcatggcattgcccgtgagtgtccttctccaccccgtgtccacagcagtcctagaggagcagcattcggccagagcccccttgctggattatatctacagggttttgcactgctgtgtgtgtggctcaagcacgtacacccaacagagtcactacatactgaccctggctgacttgtcatccacggattatgaccccttcctgccactggcaaatgtgaagagctctgagccagtccagtatcattcatcagcagaattgggtaacctgctgactgttgaagaggagaagaagagaagaagtttggagttgatccctttgactgctcgaatggtgatggcccacctggtgaaccacctggggcactaccccctcagtgggggccctgccatactgcacagccttgtcagcgagaaccatgacaatgcccatgtggaaggctccgagctgtcctttgaggtgttcagaagtccaaacctgcagctgtttgtatttaatgatagcaccctcatctcctaccttcagacacccacagaaggaccggtagggggatcaccagtgggctctctctctgatgtgagagtaattgtgagggatatctcagggaagtactcttgggatggtaaggttttatatggacctttggaaggctgcttagcacccaatggaagaaatccttcatttctgatttcgagctggcatcgtgacacatttggacctcagaaagactcttctcaagttgaggagggggatgatgttcttgacaaattacttgaaaacattggccatacaagtcctgaatgccttttaccgtcacagctaaatctaaatgaaccttccctaaccccatgtggcatgaactatgaccaagagaaggaaatcattgaggtcattttgcgccaaaatgctcaagaggatgagtatatccagagtcataacttcgattctgcaatgaaagtcaccagccaagggcagccctccccagtggagccccgaggacccttttatttctgcaggttattgcttgatgacttgggaatgaattcttgggacagaaggaagaattttcatctattgaagaaaaattcaaaattattgagagagctgaaaaatttggactcccgccagtgccgtgagacacacaaaatcgcagtgttttacattgctgaaggtcaagaagacaagtgttcaatcctctctaatgaaagaggaagccaagcatatgaagactttgttgctggacttggatgggaggtggatctctccacccactgtgggttcatgggtggccttcagcgcaatggcagcaccgggcagacggccccttactatgctacctcaactgtggaagtgattttccatgtttccactcgaatgccgtcagactcagatgattccctcaccaaaaagcttcgtcacttggggaatgacgaggtccatatcgtctggtctgaacactccagagactaccgcaggggtattatcccaactgcctttggagatgtttcaatcattatttacccaatgaagaatcacatgttcttcatcgcgataacgaagaaacctgaggttccattttttgggcctctgtttgatggagccatagtgagtgggaagctgctgccaagccttgtatgtgccacgtgcatcaacgccagcagggctgtgaagtgcctcatcccactctaccagagcttctatgaagagcgagctctgtatctcgaagcaataattcagaaccaccgcgaagtaatgacattcgaggatttcgcagcccaagtcttttctccctctcccagctactccctcagcggaacggattaaaacacgtaaaggtctcatttcaatatttgagcaaggggccctggcctccagtctgagtgctgacctcgaagagcccctgagtgaggaggagacagaacaccctctcctgcctctgccccgagccactaaacccagaatctccaggaaatttcgttgctgtactagtgccctcagcaggtcttcccattagtggacttctgaagcccatggtgaatcccactaccgtgtctcagatgggactcaaactaggctgtatcatcttgtcctgaaacctcacaaaccttggacttccaaagaagaaaagaaaaagtcaccaaaaaccagagatgaacccactgacacgtgggcactggtgtggctgctctgggcagatgacagcaggaaaagattctgcgctttcagggagggggcagagggcagcttgcttctgcaccccaagttgtttcttctcatttatgaacccaagcatgattcacaaaggggctggcaaaacaattgtctaattgaggaatctgatctgcattgattttgctagttccttttatgttaggatttatggtttactcaaaaatttcatcatcatggaaattggctttccccggggtcttttgcccaggagaagttttacctcagttgtccagtgttttcccacatggtacctgacgcccgctaactaagcagaggctctcctcaccacgcagaggcgcttcaggtcatgacagtgatgcccctatcttagaacactcagaagattccagaaatacagggtcctgtccttgcataagttcctgcaggacaggaagtgtcccaaggctcaaaacaacacagaccacatccacacaaaaggcgcatgccggcttcaggcgctaggctgagacgggtaccccccgaatggccttgtgcctccaaaagcctcacgctgcaactttgctgctcctgtctgttgcccagagaggcctcacacaggcctcagaaatgtttcttgtcacacaaagcttttggtagccgattccaagcgagggatttaatccttacatttttgcccatttggctccaaggaaggcttattagacctgtttttttgttgttgttgtttttttttcttaaaaacaaaatgaatgaatgaatgaaaagagaagcaatggtgagccctctcctgctggggcgccctgggtgggccttgcccgtcctgcagcagagaaatcagtcagcagcgaagagctgctggcgcaggccccaggctgtgtcctggacccttgacctgcctcagagctagaggtttgctccaccccgcacttcacttgggaagtaaatccaagaagcttaccagagtccatcgccactgcgcaggctttgttctcacagcggccaggtacagagcaacgccctgcagtgggaagggacagcagcacgagagacgcagcccctaactcagggcttatgatgggtgggctggtcctgggaaaggcgggccctgtgcgggaggcctccccaccttcctgtgccctctgccctctgcccttgcacacacttgttaccttcaggctgcttggccacccaggcctgaagaagccttctgaggctctcaccccatcagaacggccattttcactgaggagccagttttttccatttgccatggagctggtttggctggaacctggcctttgtagggaaaacggggagactcaggagccagactcactcttgggacaaatgagaaagagctgagccagtcgttcctgtcggaagggcgggcctgctcatcctggcgagaatttgcttttctgctttataggggattgcaggccaggcccactgacaggagcaccttgagaaccacctgaacagaagagaatgagggtgccccaaagtggaaggaagcttctggcccctgggccgttttgggaagggcccaggatactcacgggggctgaagggcaatgtgaagagtgactgcaagtcctggcattttctgtggtgtcagcaaatgcccctttattttaaatgattccagacatctgggcagcatagcttggccaccatcactcaggcttgatcctgctgttgagctgctcctgtctcctgtttacctcactcctgttgggaaggccatcgcatgctcctaggctccagagtcccctgtaggtctctaccagcaggtcgcctctgggagaacgtttcatcttcaggctctagaaactcctgttgcggaattgctggctttagtagaaaagatatgtcaggatttagaaatcgtattgaactctcctggacttctgctccatgatttcattttgctttcacgaaccagcgatccctaccttggggtgggaaattcaattgtaggcagcaaataactcaaccctcctgtaacccctgaggattataacgaccccatgacccccgatgacagccagcagtttggtgactagagttttttgagcctgccattctcagtagcagctttggtctggagatggaacgtggagcagggaatctgacagccacgtttctcgtgatcacgtggactggagttgtttttgttatctggggtggaaaattgcaatgatcaagtttcttttttattttttttttacttagaaaagcaaatattgtgtttttgtaataaatccctttcagcaaaattgcggaggatcattcatccactagggccccacctgaggcacagcgctgactcatcacggtggtaccagtaggtcagccatctggaaacagaagtggccctaattgggccaaaatgtggtaagactcgctggcctcaggcagggccaggccagttccctcacttctctgcacacctattcccagattccatccagagcaaagctgatgtttatcgtctcattgtacttaggctttcgtactttaaaaaattatgactttttaaaaataagccttcagcagacagaagtgaagaaatttagcctgggttgcctcagcaacaaagtctgcggttcctaagagccacatgttggggaagtggggtgacccaaacttggtgacataggttgattgatcagaccctcagccttacaagcaagagctcatgcagatccacagagccatgcacatcctgtcttcctgaccttcctcaggtggcaccacctgcgccccatggacctgctgtatcggtgtcatgtggaggtctgatgaatcctttaaaacctaactgtgatgtcgtaaatgtaactgtgctacctttatatctactgaagggcagcgtctgcatccgagggaaattcaacatgaaacaaccatcgttttagttgcactcagtctgtccatatgacatacacatgaagtgaatgtttccttatgttttcaggtctacaatgtttagtacatgtaaataaggaaaaaatttgataaatatggtaaattaagttatagcgtgtcatttgattcttattttgctgtctcttgttatttaattttcctaatgctccacatctaggttccttcctaggtggtgggaacaccttgcagacgtgtgtgcaccaggacacaccgcggcccaggcagccacaccgagaaagcacacatctccactgatggcagccacccgactctccagttaacctcttttactctttaattctgatttactgtgatgatttaataaagtggaaacacagcaaaaaaaaaaaaaaaaaaaaaaaaaaaa

SEQ ID NO: 4836 - DNA, 2013 bp, Homo Sapiens
  NM_020345
agttccggcatcgcgcctggtggcggagttctgccgagtggggcgccgcggccgctattgtcccgccccctgctccgcaagattcgagcctgagcggcctgggcgtctcgagaggtgagagagttggcggcgaggtctcggcggctaagcgagcgtcggcgactgtctctccgcgagaggaggcaagttggggtccaggctccaaagccggtggccgcgtaccgcggtggagccgctgtctttgaggtctgaggagagaacagacagagtctagctctttcacccaggctggagtgaagtggtgcaatctcagctcagtgcaacctccgccccctgggttcaagtgattctcctgcctcagcctccccagtagctgggattacagtgatatcctgagagaagatgggaaagggctgcaaggttgtggtttgtggattgttatctgtggggaaaactgcaattttggagcagctcctttatggaaatcatactattggaatggaagattgcgaaacaatggaagatgtatacatggcttcagtagaaacagaccgaggagtaaaagaacagttacatctttatgacaccagaggtctacaggaaggcgtggagctgccaaagcattatttttcatttgctgatggcttcgttcttgtgtacagtgtgaataaccttgaatcctttcaaagagtggagcttctgaagaaagaaatcgataagttcaaagacaaaaaagaggtagcaattgtggtattaggaaacaaaatcgacctttctgagcagagacaagtggacgctgaagtggcacagcagtgggcaaaaagtgagaaagtaagactgtgggaggtgactgttacagatcggaaaactctgattgaaccattcactttattagccagtaaactttctcaaccccagagcaaatcaagctttcctttgcctgggaggaaaaacaaagggaactctaattctgagaactaaaaatcagtaatttccacaattgtatgttgaatagtgattgcctttaagtgtctgtgaacatggagtaatattactatttaaaataggccatttgtatctacctttggtccttaggaaaattcctaaggaagtcaattaatgcactttagatgttaaaagtatttgggctaaggttattattgcctgatatgaaataatatattcttattctcattgtttgaaacctgtctttgaaattagcacctttgttatttatgttgtacttgtgaaaacagtaaaatagtttggatagttatgcaaatgcacctatgtgtaacttccccccaaccccaagctgtttcggaagatatcataatcattctgtgtaacattatgcaaacttctaagcccaaacatgactttgtttttaaaaagttcattaatctaatgtctaggattataaaacatttttttgtgtctaaattggacccaaaacattgaacagtttggggtagtaagctaaatttcatcttgtggagattttgctaaacagactaagacccatgatttagctttgctcaaattagaatgtttagcatgagttgaggtaccaggtagtgttaagtaggttcatcacgctctaaggccgttttttccttagccagacccctgttgatagaccagatacttgagggcaaactgtttgctcctcctcttgaaaatgattaggcacttaaggacagtaaagctgtattttctggaaggaagactgtatcttctggaatagttttctagaaaactagtcatatacaataaaagtatcaaaaatattgggctctaatttgatctgacttagatgtctgagtttgtgttgtttctctaaagattttggcaagactcaagcaatgtggctgactgtaactttattaatttaaaaggtaggaagtaagctacttagtggtttcacctgtgaaataactattttgactgaaatgtaaaataagctattcaacaaagaacatattaaaacatcaaaaaaaaaaaaaaaaaaaa

SEQ ID NO: 4837 - DNA, 3312 bp, Homo Sapiens
  NM_020353
cgagacggggaagccgcgcgcggggaaggagggtccaggcgtgccggacccgcccccagaacccgcgcctagccctcccttccgcgcgcttactttgtttataacttgaaaaatcctctccgtctcccttccctgcctcctttcctttccctttcctctgccagtacaactagacccggcgtctggcgtccccggtgcccagcattctgcggggcaggcggattaattggaattcttcaaaatgtcaggtgtggtacccacagcccctgaacagcctgcaggtgaaatggaaaatcaaacaaaaccaccagatccaaggcctgatgctcctcctgaatacaattctcattttttaccaggaccccctggaacagctgtccctccacctactggctacccaggaggcttgcctatgggatactacagtccacagcaacccagtaccttccctttgtaccagccagttggtggtatccatcctgtccggtatcagcctggcaaatatcctatgccaaatcagtctgttccaataacatggatgccagggccaactcctatggcaaactgccctcctggtctggaatacttagttcagttggacaacatacatgttcttcagcattttgagcctctggaaatgatgacatgttttgaaactaataatagatatgatattaaaaacaactcagaccagatggtttacattgtaaccgaagacacagatgactttaccaggaatgcctatcggacactaaggcccttcgtcctccgggtcactgattgtatgggccgagaaatcatgacaatgcagagacccttcagatgcacctgctgttgcttctgttgcccctctgccagacaagagctggaggtgcagtgtcctcctggtgtcaccattggctttgttgcggaacattggaacctgtgcagggcggtgtacagcatccaaaatgagaagaaagaaaatgtgatgagagttcgtgggccatgctcaacctatggctgtggttcagattctgtttttgaggtcaaatcccttgatggcatatccaacatcggcagtattatccggaagtggaatggtttgttatcagcaatggcagatgctgaccattttgacattcacttcccactagacctggatgtgaagatgaaagccatgatttttggagcttgcttcctcattgacttcatgtattttgaaagatctccaccacaacgttcaagatagagagacacagcaagccatcaactatggttaattttgaaaaatggaaaagttggattgggcttacagtcagcactcagttatttgcaagtgtatttctttgctttgtagagtatttttattgggtgttaactttgacagctgagagtgggcttgcaagaacacaatctaaaagtgtgtttcaattgagtatctctctagtagaataggagttcatcctgaaaagctgtgactcattaacccagtaaacatatacaaagtaagcttaaaacactataaacatgagataagggaaaatgaatccagagttctcatattaataggtagtgaaacaataaggctttttagagcagactttgttggcataaaataacctggcttctatccctaaccctttcctacctttcctctccgtcaacatgtcctcatactgaagacaaacttgtttcaatgatagtcttcatttttaaaaacaaaaaggcaggcagacagaaataatgatgttttcttgcactaagaaggtactacttgtacacatatatcaaaacctcattctgcaaagtttttgaaggtttcaatgggaaatttgattttattacaaaataaaacattttttaatgttaaagtttatatattccatgcttgttttctcattcactggcatggatgatcaggagctgcctatatatgaaggcagaatcagactatcaggaaaggagctggccagggccacagccagtcaagatctctgagcaacttagagacattggtgtcattatatgaagcttgcatttaatacatttatacataatacatttgtacatttaattcataacgtctcttggtcacagatgccttatatataaaataagttgccagatctctaagattgcctagtacacctttgtatctcatttgatgtgatacccagaagagatcattgttttttgtttttgtttttgtttttttcaagaagatccttcgtgatcaccatgctgttctcatggtaagaactggagttatgtttttaaatttggaaatatgacattttatgtagcactttataaaaagtgaaagcgacaaattccaccgctgcttaatactgctttgcttctttttattgacatgatagataaatatgtatctacacagagtaataataataaaacacagtaaacattctatttctctatggtctacagcatgccagtaaataatatgtaggaccaataataaattatcaattacacatttttgtgttaactaattaaaagcatagtgtataagtgagtacactctaattaacttgcttctgttgcactttagttttctacctgcatatggactgcattttttttttttaacacagtcagtatgtagaatgggatgtattcttctgctgctgcttattaaataaagaaagcctgagtgttcttagatggggttattctgagatgagggtcttagcctacagttctttttgaaatgaaaggtgctttgttttttaattatattcatcttttcagggtaaatttgtttttctgagtttctcgtaatgctcatttttacatgctgctactagcttttttttttaaaaaaagtaaaagttgctgctttctaaaatattaattgccttatatttgaaagtgccattgcaatcgtaagtagactatgtatttcctataatgatgtctgatatttaaataggaaatcagacaaacaatattcagaaagtttaagcatataaactttttatttttaacttgcctaaatccctgtattccaaaacctgctgcatcataataaatatatctatatatatttagcataagacgtgatatttttaatttcttttttaaaaaattatatttgtctcttagagttaaaattttctttatataatattgtcatatgtcatagttttaatacaattcacatgatttctatgtttcttaatgatattttgttgtgtaaaattgatcggattgattaaaaaacaaattctctggaatttgtgcgttcatgctttttcgtattctttatggcttttaaataaatatacaatggttaatagtaaaaaaaaa

SEQ ID NO: 4838 - DNA, 8564 bp, Homo Sapiens
  NM_020354
cttccggctgggcaaggggccgcggggagcagctcgggactgaaccgagaggtgccgaaggaaccggcgggccgcttgatcccgctgcagacgtaggagatgcctgggacaaggaggccaccttctcagggcaaaagaaaaagaaggtgacaggcgttgagaccaccgaagggaacccatggctaggatcagtttttcctacctctgcccagcctcctggtacttcactgtgcccacagtgagtccatttctccgtcagcgggtggcattcctgggactcttcttcatatcctgtctccttttacttatgttaatcatagactttcgacattggagtgcttcattaccacgagataggcaatacgaaaggtatttggctcgagtaggggagcttgaagctactgacactgaagacccaaatctgaattatggacttgttgttgactgtggcagcagtggttcccggatttttgtttatttctggccaagacataatgggaacccccatgacttgctggacatcaaacagatgagagaccgcaacagccaaccagtggttaaaaaaatcaagccaggaatctctgcaatggcagacactccagaacatgccagtgattaccttcgtcctctgctgagctttgctgctgctcatgtgcctgtgaagaagcacaaggagacccctctttacatcctctgcacagcaggcatgaggcttctccctgagaggaagcagttggctatcttggctgacctagtgaaagatttaccactggagtttgacttcctcttttcacagtctcaagcagaagtgatctctgggaagcaggaaggggtttatgcatggattggaatcaactttgttttgggaagattcgaccacgaggatgaatcagatgctgaggctacccaggaattggcagcaggacggagaaggacagtagggatactggatatgggaggagcctctctccaaattgcttatgaagttcctacctcaacctctgtccttcctgcaaagcaggaagaagctgccaagatcctgctggctgagttcaacctgggctgtgatgtgcaacacactgaacacgtgtacagggtttatgtcacaacttttctgggtttcggaggcaactttgcccggcagcgctacgaagaccttgttctgaatgaaactcttaacaaaaacagattgcttggtcagaagacaggtctgagtcccgacaatccatttctggatccctgcctgccagtgggactcacagatgtggtggagaggaacagccaagtcttacatgtccgaggaagaggagactgggtgtcttgtggggcaatgctgagccccctgctggctcgctccaacaccagccaggcctcactcaatggcatatatcaatcgcctattgacttcaacaacagcgagttctacggcttctctgagtttttttattgtacagaggatgtgttgcgcattggtggccgctaccatgggccaacatttgccaaggctgctcaggattactgtggcatggcttggtcggtactaactcagagattcaagaatggcctcttttcatcacatgcagatgagcatcgactcaaatatcagtgttttaaatcggcttggatgtaccaagtcttacatgaaggattccactttccctatgactacccaaacctgcggacagcccagctggtgtatgaccgagaggttcagtggacgctgggagccattctatataaaacacgattcttaccactcagggatcttcggcaggaaggtgtccgacaagcccatggtagctggttccgtctctcctttgtatacaaccactatctcttctttgcctgtatcctggtggtgctactggccatcttcctataccttctgcggctacgccgaattcaccaccgacaaacacgagcctcagctccattggacttgctgtggcttgaagaggtggtgcccatgatgggagtacaggtggggccgtgaggctggaccaggactagagaagcttgagcacccccgagttgctgctcattgaattcctccactttcttatatagcctcagatgctgtgatgtctgaccttgtggatatttgcccttggaatttctactttactttctaccgtaattccttctccgtacccaggtcttctctgagagaagctataatttaatctgtgaggaactaaatgacaggagattggtgctaatacgggggaccaagctttgtccaagtgaagcaggcttcgactccttctgagaggtctggtgtgttcctagaatctcaccttttcttcccttgctaaagcatgaagtttggcatttggcacactggaagcctggttgaaatgaaatttgtagcatctgatacaaagccagagacattctagcaagtgcagcagccccttctttctctgtaacagagatatcatttatgtggagatccacaacctttaacagggatccaagatctttgcagttcaatcgaccacataggaatttccaggcaccaaaatgatataacttccttgcttccttgacaaagaagccatcatgggtgtgatccaagatccctgtcgtagtgttgatgatgttagtacatgattttaaaggttagaaccccttctaaatgaatggtctgtggaagattttagtatcttatctgatgcctggtatgatgaggatagaaaatttttccatttttatgtgcctcacaggctgtttgggcattaattttgctttttgagccttaagtgtgttagtaggatggagaaactgtgatggggactgggaacctggatttgtctgattttaggtcactgttccctgggcctgtttttgtgagcccttacacaggaagatataaagagagttctttcatttcactgctaaaatcagtatgtagtatggggaatgtatttgggttgtttttaaagaaaaggggaacagaatcaggagagtgggcaaaggcaataaaatcaaagttcttattaattatttctgagaaatagaagtttctcaatttatgactcttggaatgtctgaaagggagcaaatttggaatagatcaatctgttaataagccatctggcaactttcagaacctctattaagagactgctgagtcacaaacagcacttccattaatgaagcgagaggaaaagccataataattacatcttcacccactacccttccagagctttgcttctcctccacatttagccattaaattgcatgaggatttctcttcatcagggtccgcatggaatctttcttatattttaccctttcctacatgtagccttgaatgtcctttccacgaatatgctcccacggctgggagcattttcttttcttttcgtcacctttgatttttgggattagattaataggggaaaaagtccctggctttaaagaaaacaaaagtagaattcttcaaaaataaatttcatactgggaacagaaaggaactaaatgcttcataaaacagggaaaaagaaattaagatcatcctagaaataaactaagataaaaataagtatactgacccttggttggtagataaaaagatgaccagtcttgtattgttttaaaattagataaacatggattaagcatgcaaagactctgttcctttttttttttcttggagacagggcctcacgctgtcacccaggctggagtgcagttgtgcaacatcatggctcaccgcagcctcaacctcctgggctcaaacagtcctcccaactcagactccagagtagctgggactacaggtgtgcgccaccacactcagctaattttttattttatttttttagagatggagtctgtgttgtccaggctggtctcaaactcttgggctcaagcaatcctcccacctcagcctcccaaagtgctgggattacaagcatgagctactgcacctgccctctgtttcctttggaaatctcttacctttcattagggtttctttcatagcaatttcctttggtttttaagacttctacattgctttttcttttattatctgtgctccgtgaaccttatgaatgctgcttaaaaataatgtcaaaatatgttttagctgcctactcaggtaacgttttcttttgctctcatcttggtttccatatactatttttggttttttgtgagatctaatcaatgatctagtcagaagctacttcactggctaacagtgatcatgttcatgtgctaaaaatgaacttgaaacacggaagtagtggttggtccagtttgaaagctcttattagtattcttcatcctggctgtaataatagccattatttgttatgcctttgttatgtagcagacactcttaaggattttatgtgtattattcaaattgctattactgttctttttatagttgagaatctcaggatacctacatttatcactttttcaatatatatgtatttcttattcttattttgtcttggagtgtttaatgtgttatttcctgttcattactttaatattatggtatctaggcttgtctttattaccatgagcaaggtctccaggagttccacagtactgaaggaaaattttgtcatatccctcagaagaactgaatatttattattggtatgggctcctttgtttattctcttctcccaattaatagattttaaatgaaatcttattagctagaaacaaaagccacttactccttgctgagagccaattacttaaatatatttcttccttataataaaataatttgcttctaggagcagaaatctatcttgccataccctttggtttttaaagatttctcttctatttgcatttctgcactttggtggttctcccatgaagataattatggtgtcataaaattcacattccactggttcctttgaatcttaccaaccactcttgttaacagagacaatgaacctgaactgttttaggactcttgttattactgagacaggtcacaaacatcaaaataggagtccgtggcttgtagtgatgctttttagtcttgtgatagcacaatccatcactttccccaaaattcttgtcatagaacataatgaaaaatatgtaaaatacccatttatgtggcatttcattcacttaagttgcagttaactctaagccaaattataccattttttctctctgtactttagctccttgaatttccttaatctgggaaacttttgttcccacaccaaggaacaaattcagggggtacaagtgcaggtttgttacatgagtatattgagtgatgctgaggtttggggtacagatcccatcaccaggtggtgagcatagtacctaacagatagttctttaatccatgccctcctctctccctccctgctctagtagtccacagtgtctattctggtctgggaaattttcatcactttccaccaatcttctatttattctccaaatgtcttccaaagtatcctgccccaccccctcctcatcctaagagattcctttaacttcaagatcatatccagtgattgctgaaaaatgtctgccatgcacttgctaagctagtgtttttaggcattaacatttattatcacatccatatttatatttttgaaataatttatacttctcactgatatcatctaaacagatgcttctcacagttttatgttttgttttttgtcagggatgaaagacaagtgagtggtatcacttaagggaaagaacagtaggcttaacgaatagcagacctggattctagttctggctttgtcatttactagctctggtaccccaggccagtcacttaccatctctggttcggttctcatctatcaaacaaagaggctagacaagattagaaactaaaggcagaagacaaggtagaaaaatcatatgattttgggaagagcattttgtcctttggtttagaagaccaggctgcccaaaagagcctcctattttatccataacccctgatgataaggttggtgggaacagagtttctaatagtaatcataataaatttcagaagagttttaaagcttctggtcaacccccttgatttatatgggtgataaaactgaggcctagagcagttgtaatatgtgcaaagtcatagtgactggcctcctagcccaactactttgtcagctacaatgaaatgctcattaacagaatctttctgcaagtataaacagaatctattttttataaaacagctggccacaactaaccatgccccatctttacaactgcttctgacattcatttatgactgctttgctcacatttaggaataaactttgaaaaaaatactttgtcagaaatagtgccaagttttcactacatctattcttgttcctgtatttcttttcgtacttttaaattttatacatctttttaaaacaattttatacaatttcctttactacaacatccaagcaattcattagatgactacagcctagatgaaggtataaatgcctattacatctacctcattaaagaacttcgttgtaattcttgggcagtttccagactctgttacagaaacagagggctgtttctttttgttgtctttaaacttttcaaattaattcaaaactagtatctaattgtcctttttgctgtggtatgtggtgtaatgttgattgggaataagaattatggtagaaatagcagatgtttcaaattctcccatattagtctcttagggacgctagctccagattccagcccctggggcaataacttgtgaggattttcctggtgttacaaaaaatattgctgttaaaaaactaagactcaaaaccaaaagttgtgattaataataacaggattattagtcaataatattttgattaatactatagaatagcaacagtgaatatacctcaaattgaaaacttttaggttgtgttcttggctcattctctcataacctggatctaagttggaaagctgtggcaccctgtttgggtgtcccatctaccctgttttctgtttctgcagatggcttgttcaagcttcattttaagcctgctctgtctacttatcttccttatatcctaatagacttctcttgtgttattacacatttctcttttgctctaatatttcattattttccagtttgtcagtaccgttatcagagggacgaggaaggaataacacaccagttgaccattttgtttctctgaaaatctgagcaatacggagatccttttattagtaaaactgaatcattactcatactacaagggctttcacttttaaaatgtaatccatcattgcttgccatttttatgaaaaccaaagttgaaaagtcttctgaatcacaggctatgtatagccacacatgcatgacttcaggctagcataaagacatgtctgctcctgagcctcttcttttaaagggcaaccacttgtataccctctggtggccactcctccttctccactccaaggcagccctggtactttcctaagtggcccctcctacagagcacttgccggcatttggcctgctgctggtgaagacgccccttactagcttcataaatgtttttctgcaagcagggatcccagacacatactttggtttctagtgtttcagttactatgttgtatttgaaattctcattccacaattaccctttagttgaagtcctgaagtacatgccatgtactccccctttatttctaccttgatcaatggcctctgcggagtgtagtgaaagacatctttttattatgatctacactttaaaaaaccaaaggctgcctgtattacattgctttggggagttgttaagactctgttttttctactgcttcacattaaacaataattttgttgaattttgaattcttaaaattctcactgacaaacattttaggtcagtgttgaggaaaatgtgtgatgcatgttagagaggtgatgcattctcccttatgcagggacatgggtatatgtgttacatatgctgatatataacccaccattcatcccaggaccacaagggtagctgtagataaactggttatcctaaaatcatgattatcagtgttgatctctgcaaccaacattgctttagggagttgctagtcattacccctgctacaatagatagtatttgtcagtctaagttacagacaaaaaattctaggttgactgattaagaaagccatgtgttttaatttccttcatgttttaaaaacaatggacgtaagtgcagagagacctttgaaaatattaagggaaatctatttaatcctataggtatgtgatgacttgtttttttggaaaaaggtatttggaacatcaatctgtaattatccattttccattcatgcattcactaattcaatatttgatatgtgtctgggagtgctgggaataacataaatacaaaaaaaaccctaagataatcattcaccagaagctcatagatataatacagttatatagctaaatgcaaccagttgtttttccaaatgtactcatcatctgtaataaaagaaaaatgaagtaaaacatctgaaaccttaacttaaaaaaaaaa

SEQ ID NO: 4839 - DNA, 3155 bp, Homo Sapiens
  NM_020356
ttcattttactcttatcgtgctttccagaaagtttgcctgctgggagagtctttttgatcgtttcccatgtgttgtcagatagctccatagaattcagtttctgagaaccagccagaagcatgcagtgacattgcacaatctgcctctgaagctggagatactagctgcagagctcaggggagctgctccacatcaccgacatgaagggaacaggcatcatggactgtgcgcccaaggcactcctggccagggcactttatgacaactgccctgactgctctgacgagctggctttcagcagaggggacatcctgaccattctggagcaacacgtgccagaaagcgagggttggtggaagtgtttgctccatgggaggcaaggcctggcccctgccaaccgcctccaaatcctcacggaggtcgctgcagacaggccgtgccccccattcctgagaggcctggaagaagctcctgccagctcagaggagacctatcaggtgcccactctaccccgccctcccactccaggccccgtttatgagcagatgaggagttgggcggaggggccccagccccctactgcccaagtctatgaattccccgaccctcccaccagtgccagaatcatctgtgaaaagactctcagctttccaaaacaggccatcctcacgcttcccagacctgtccgggcctcactgccgactctgccttcccaggtgtatgacgtgcctacccagcaccggggccccgtggtcctgaaggagccagagaagcagcagttatatgacataccagccagccccaagaaggcaggactccatcccccagacagccaagcaagtgggcagggtgttcccctgatatcagtgactaccttaagaagaggcggttacagcacattaccaaatcctcagaaatcggaatggatttatgacactccagtgtctccaggaaaggccagcgtcagaaacacgcctctcaccagctttgcggaagaatcaaggccccacgctctccccagttccagctccactttctacaatcctccaagtggcagatccaggtccctcactccacaactgaataacaatgtgcccatgcagaaaaaactcagccttccagaaattccttcttatggctttcttgtacccagaggcacatttcctttggatgaagatgtcagctacaaggttccttcaagctttctgattccccgagtggaacagcagaacaccaagcccaatatttatgacatccctaaagcaacgtcgagtgtttctcaggctgggaaggagctggagaaagccaaggaggtgtcagagaattccgcgggccataattcctcatggttctccagacggacaacttccccatctcctgaaccggacagattatcaggttccagttctgacagcagagctagcatcgtttcctcgtgctccaccacatccaccgacgactcctccagctcttcctcggaggagtcagcaaaggagctctccttggacctggatgtggccaaggagacagtgatggctctgcagcacaaggtggtcagctctgtcgctggcctgatgctctttgtcagcaggaagtggagattccgagactatctggaggccaacattgatgcaatccacaggtccactgatcacatagaagaatctgtaagagaatttctggattttgcccgaggagtccatgggactgcctgtaacctcactgacagtaaccttcagaacagaattcgggaccagatgcagaccatctccaactcctaccgcatcctgcttgaaacaaaggaaagcttggataatcgcaattggcctctggaagttcttgtgactgacagtgtccagaacagcccagatgaccttgagaggtttgtcatggtggcacggatgcttccagaagacatcaagaggtttgcctccattgtcattgccaatggaaggctcctttttaagcggaactgtgaaaaggaagagactgtgcagttgaccccaaatgcagaatttaagtgtgaaaaatacatccagcctccccaaagagaaactgaatcacaccaaaagagtaccccttccactaagcaaagggaagatgaacactcttctgaactattaaagaaaaatagggcaaatatctgtggacagaatcctggccctcttatacctcagccttcgagtcaacagactcctgagaggaaaccccgcttatctgaacactgccggctctactttggggcgctcttcaaagccatcagcgcatttcacggcagcctcagcagcagccagcccgcggagatcatcactcagagcaagctggtcatcatggtgggacagaagctggtggacacgctgtgcatggagacccaggagagggacgtgcgcaacgagatcctccgtggcagcagtcacctctgcagcctgctcaaggacgtagcgctggccactaagaatgccgtgctcacgtaccccagccctgccgcgctggggcacctccaggcggaggctgagaagctggagcaacacacgcggcagttcagagggacactgggatgaggactgtctacctcccttcctcctctgctcacctctcagcttcacacccacaacttgtgcaactctgccctatgggaaaagccagccggggcatacaccaatgagctgaaacagacctggtgcccaaagctggtagtaccaagtggctaagcaaccccagggcattgacttaccccgcagggggtcaggaaagagagtcaggtatgaggtaaagaccttgtgaagtttagcatatatggagtatgcagtatcagcttgaagtgacttcgcagaaataatattttatattgattaaatgtgtgcatgttttgtttgttttttgagacaaagtctcactctgtcacacaggctggagtgcagtggcgcgatctcagctcactgcaacctccgccttctgggttgaagcaattctcccgcctcagcctccagagtagctggtactacaggtgtgcgccaccatgcccagctaatttttgtatttttttttaatgaaaggtctcacatatttattactgaacccagccaaccaatgcattcataacagattcagaaagaaaaaatatattcccaataaaacatgtacaattctccag

SEQ ID NO: 4840 - DNA, 2089 bp, Homo Sapiens
  NM_020360
gggccagcgcggcccgggccgccctcgcctcccacccagggcgctgagcacgcacgccgccggcctggcggcgttcgcggggcccgggaccagccgccgccttctccaggcgctcctactctctgggcatctgcagtccgagcggaaggggcgggaacgtcggcgacgccgaggagcaaagcccacgatcggcttcccggggcagcggacggctgccttcctcccggcgcaaacgcaccgcccaggagggggcgggctcggcgggtcggggggcggggccggggtccgagctcgggcccgcctccgcctccgccagctcctgtgagctgccgagtgctaggcacccgggctcttctgggggctccagaggcgccgcccaagagaccctgggccggcgccgggcgcagctgcctctccgtctttgtgtctgtctctgtgtctgtctggctatctccgagtttgcctccgcttccagaactaagccacccagacaccatcatctcgaaaaccccagcccttctcccatggcaggctacttgccccccaaaggctacgccccttcgcccccacctccctaccctgtcacccctgggtacccggagccggcgctacatcctgggcccgggcaggcgccagtgcccgcccaggtacctgccccagctcccggcttcgccctcttcccctcgcctggccccgtggccttggggtctgctgcccccttcttgccactgccaggggtgccttctggcctcgaattcctggtgcagattgatcagattttgattcaccagaaggctgagcgagtggaaacgttcctaggctgggagacctgtaatcggtatgaactgcgctctggggccgggcagcccctgggtcaggcggccgaggagagcaactgctgcgcccgtctgtgctgtggcgcccgccggccgctgcgtgtccgcctggccgaccccggggaccgtgaggtgctgcgtttgctccgcccgctgcactgtggctgcagctgctgcccctgtggcctccaggagatggaagtacaggctccaccaggcaccaccattggccacgtgctacagacctggcatcccttcctccccaagttctccatccaggatgccgatcgccagacagtcttgcgagtggtggggccctgctggacctgtggctgtggcacagacaccaactttgaggtgaagactcgggatgaatcccgcagtgtgggccgcatcagcaagcagtgggggggcctggtccgagaagccctcacagatgcagatgactttggcctacagttcccgctggacctggatgtgagggtgaaggctgtgctgctgggagccacattcctcattgactacatgttctttgagaagcgaggaggcgctgggccctctgccgtcaccagttagaggccaccatggtgtgaggagaccatcacctcgaccagaactccagatggtcacctgccctggcccctcctctgggcagcccctttcctccatgtacactgcaggggacagaaggggggccccatccctaccctactccctggccgcctgcccctgtggttcccaaggaggggtatgtatgagagccgctctcctgctacctcccaccactgtcccagcagtccctcggcacacaggcatatcagctttcacactttccccatgcactctctcccacccccttccagggcctctgctccaaaggaggcctctggaacccaggactctggggttttacaagagggctggggtgtggaagggcaagctgcaccaaagacggtggatatagccaccgcccccccgccgctgcctagcatctgcttggccaattagttcagcctcagaccatggcactttgagggggtctctacctccccatcaacagctgcagggggaccccagtgccaacttcctctcccactagggccctgccttcagctggtgcttgctgcgattcctgtgccttatgtaactgcccttccttcccttgccctaggaaaaaggctgcatctttatatgttacattcatataaactttgtaactttttggacattgaaaaaaaaaaaaaaaaaaaaaa

SEQ ID NO: 4841 - DNA, 3950 bp, Homo Sapiens
  NM_020366
atgtcacatctggtggaccctacatcaggagacttgccagttagagacatagatgctatacctctggtgctaccagcctcaaaaggtaagaatatgaaaactcaaccacccttgagcaggatgaaccgggaggaattggaggacagtttctttcgacttcgcgaagatcacatgttggtgaaggagctttcttggaagcaacaggatgagatcaaaaggctgaggaccaccttgctgcggttgaccgctgctggccgggacctgcgggtcgcggaggaggcggcgccgctctcggagaccgcaaggcgcgggcagaaggcgggatggcggcagcgcctctccatgcaccagcgcccccagatgcaccgactgcaagggcatttccactgcgtcggccctgccagcccccgccgcgcccagcctcgcgtccaagtgggacacagacagctccacacagccggtgcaccggtgccggagaaacccaagagggggccaagggacaggctgagctacacagcccctccatcgtttaaggagcatgcgacaaatgaaaacagaggtgaagtagccagtaaacccagtgaacttgtttctggttctaacagcataatttctttcagcagtgtcataagtatggctaaacccattggtctatgcatgcctaacagtgcccacatcatggccagcaataccatgcaagtggaagagccacccaagtctcctgagaaaatgtggcctaaagatgaaaattttgaacagagaagctcattggagtgtgctcagaaggctgcagagcttcgagcttccattaaagagaaggtagagctgattcgacttaagaagctcttacatgaaagaaatgcttcattggttatgacaaaagcacaattaacagaagttcaagaggcatacgaaaccttgctccagaagaatcagggaatcctgagtgcagcccatgaggccctcctcaagcaagtgaatgagctcagggcagagctgaaggaagaaagcaagaaggctgtgagcttgaagagccaactggaagatgtgtctatcttgcagatgactctgaaggagtttcaggagagagttgaagatttggaaaaagaacgaaaattgctgaatgacaattatgacaaactcttagaaagcatgctggacagcagtgacagctccagtcagccccactggagcaacgagctcatagcggaacagctacagcagcaagtctctcagctgcaggatcagctggatgctgagctggaggacaagagaaaagttttacttgagctgtccagggagaaagcccaaaatgaggatctgaagcttgaagtcaccaacatacttcagaagcataaacaggaagtagagctcctccaaaatgcagccacaatttcccaacctcctgacaggcaatctgaaccagccactcacccagctgtattgcaagagaacactcagatcgagccaagtgaacccaaaaaccaagaagaaaagaaactgtcccaggtgctaaatgagttgcaagtatcacacgcagagaccacattggaactagaaaagaccagggacatgcttattctgcagcgcaaaatcaacgtgtgttatcaggaggaactggaggcaatgatgacaaaagctgacaatgataatagagatcacaaagaaaagctggagaggttgactcgactactagacctcaagaataaccgtatcaagcagctggaaggtattttaagaagccatgaccttccaacatctgaacagctcaaagatgttgcttatggcacccgaccgttgtcgttatgtttggaaacactgccagcccatggagatgaggataaagtggatatttctctgctgcatcagggtgagaatctttttgaactgcacatccaccaggccttcctgacatctgccgccctagctcaggctggagatacccaacctaccactttctgcacctattccttctatgactttgaaacccactgtaccccattatctgtggggccacagcccctctatgacttcacctcccagtatgtgatggagacagattcgcttttcttacactaccttcaagaggcttcagcccggcttgacatacaccaggccatggccagtgaacacagcactcttgctgcaggatggatttgctttgacagggtgctagagactgtggagaaagtccatggcttggccacactgattggagctggtggagaagagttcggggttctagagtactggatgaggctgcgtttccccataaaacccagcctacaggcgtgcaataaacgaaagaaagcccaggtctacctgtcaaccgatgtgcttggaggccggaaggcccaggaagaggagttcagatcggagtcttgggaacctcagaacgagctgtggattgaaatcaccaagtgctgtggcctccggagtcgatggctgggaactcaacccagtccatatgctgtgtaccgcttcttcaccttttctgaccatgacactgccatcattccagccagtaacaacccctactttagagaccaggctcgattcccagtgcttgtgacctctgacctggaccattatctgagacgggaggccttgtctatacatgtttttgatgatgaagacttagagcctggctcgtatcttggccgagcccgagtgcctttactgcctcttgcaaaaaatgaatctatcaaaggtgattttaacctcactgaccctgcagagaaacccaacggatctattcaagtgcaactggattggaagtttccctacataccccctgagagcttcctgaaaccagaagctcagactaaggggaaggataccaaggacagttcaaagatctcatctgaagaggaaaaggcttcatttccttcccaggatcagatggcatctcctgaggttcccattgaagctggccagtatcgatctaagagaaaacctcctcatgggggagaaagaaaggagaaggagcaccaggttgtgagctactcaagaagaaaacatggcaaaagaataggtgttcaaggaaagaatagaatggagtatcttagccttaacatcttaaatggaaatacaccagagcaggtgaattacactgagtggaagttctcagagactaacagcttcataggtgatggctttaaaaatcagcacgaggaagaggaaatgacattatcccattcagcactgaaacagaaggaacctctacatcctgtaaatgacaaagaatcctctgaacaaggttctgaagtcagtgaagcacaaactaccgacagtgatgatgtcatagtgccacccatgtctcagaaatatcctaaggcagattcagagaagatgtgcattgaaattgtctccctggccttctacccagaggcagaagtgatgtctgatgagaacataaaacaggtgtatgtggagtacaaattctacgacctacccttgtcggagacagagactccagtgtccctaaggaagcctagggcaggagaagaaatccactttcactttagcaaggtaatagacctggacccacaggagcagcaaggccgaaggcggtttctgttcgacatgctgaatggacaagatcctgatcaaggacatttaaagtttacagtggtaagtgatcctctggatgaagaaaagaaagaatgtgaagaagtgggatatgcatatcttcaactgtggcagatcctggagtcaggaagagatattctagagcaagagctagacattgttagccctgaagatctggctaccccaataggaaggctgaaggtttcccttcaagcagctgctgtcctccatgctatttacaaggagatgactgaagatttgttttcatgaaggaacaagtgctattccaatctaaaagtctctgagggaaccatagtaaaaagtctcttataaagttagcttgctataacatgaaaaaa

SEQ ID NO: 4842 - DNA, 4492 bp, Homo Sapiens
  NM_020367
agatctgactggccaacgtcgggcggaagtcgggaggttgggtggtctgtaaacgctggcttgtgacagggagggggaggaggaaggccttcgtaaaggttgcatctccgtcccttcgctcccggggacccgcgggaaaaaaaaaaatccaacacccaggccccgcggctagccccttcccacaggctctctccgctcgattttgtcaccgttatgtgggaagcgaatccagagatgtttcacaaagcagaagaattattttctaaaacaacaaacaatgaagtggatgacatggacacgtcagatacccagtggggctggttttacttggcagaatgtgggaagtggcacatgtttcagccggataccaacagtcagtgttcagttagcagtgaagatatcgaaaaaagcttcaaaacaaacccttgtggctccatttcttttactacttccaaattcagctacaagatagactttgcagaaatgaagcaaatgaatctcaccactggaaagcagcgcttaataaaaagagcccccttttctatcagtgctttcagttacatctgtgaaaacgaggccatccctatgccaccacactgggagaatgtgaatactcaagtaccatatcagcttattcctctgcacaatcaaacacatgaatataatgaagttgctaatctctttgggaagacgatggatcgcaaccgaattaaaagaattcagagaattcaaaacctagatttgtgggagttcttttgcaggaaaaaggctcagctcaagaaaaaaagaggtgtgcctcagattaatgaacaaatgctgtttcatggtaccagcagtgaatttgtggaagcaatctgcattcataactttgattggagaataaatggtatacatggtgctgtctttggaaaaggaacctattttgctagagatgctgcttattccagtcgtttctgcaaagatgacataaagcatgggaacacattccaaattcatggtgtcagcttgcaacagcggcatctgtttagaacatataaatctatgtttcttgctcgagtgctaattggagattacataaacggagactccaaatacatgcgacctccttccaaagacgggagctatgtgaatttatatgacagctgtgtggatgatacctggaacccaaagatctttgtggtttttgatgccaaccaaatctatcctgagtacttgatagactttcattgatttcacttccaaatctcggtggtcaaggaagctttattcttttttgcaggaaggtttgctcttcagtcatctagccactaaatgttaattatctgatacttttgaaacagatatgaaaaaaagtggcctccatataaaaagacatactgacttcaaggttggtttttgttgttttgtttttgcctgtttcttgtagtcttgtttgttaaaagttgatatcattgatgttttaacacataggggtgaaagataccattcaaaatggaatcagctgagtctcaactaatgtggtcattgagatctttaaagtttacgtgtgtgttatcaggataaatgattttagtttaaatagacttattcgtataaatgttgaaaaaaaatacagacataaatgtgtccctttagaggaattgatcctttgtaaattgaattcaggtagtagtatcatccaccaatccatctgttgctttgttggtcttctgaaggggggatttaaaactctgaaacagtctgagcaccttgagagaaatcagaaacaagacaattatttgcagtgctgtcaaacaagccagaaggagaaaatcaaggtagaatgccccactttccagttgccttaggatagcaggctgcagcctcagacttgatcctgtcattctcctctgtctcccacatctgaattgataattgctgcaaaatgtcattagcctacacttcatccatcagggctcttggattcttacaccacgacttgctgtgcaaggtgtttattgcatcttcaaagtgaaactttaaattattattcaaacatttattttccttttgttttaaaaagagtccctacaatgatcacttctaagatttttttttaccttcccctctgcagcacacacagctattcaacaatgatttctaaaattcatatttcaaatttgtatctctccattttgaaacattatagaaagcatgggatgcttgagacaaatctggtttctcctttgaagtagctgttgacaacctactctcttgaaaagttagatataattcttaatcatgtttagtggaaatttgtttacctgttccatctgttttgctgtttcattgtaaggaagatgagaagtgttggaacagcttccctcccctaaaggtattctagcagaggcgagacagcaacttggcgggcatgttgcataggagttaagtaccagatggggaattgcccatgtgatggtgaagagtctctcacattgattttcttccttttctcctcttctctcctccttctcttctctcctctttctcttctcttctttctcttctcttctgtcttcctcttcctcttctcttcctctcctcttcctctttctctctcttcctttttctcttcctctttctctttctctttctcttctcttctctctctcttccttccttctttctttccttccttccttccttccttccttccttccttccttctttccctccctccctccctccctcctccctttttctttttctttctttttttttggtttggcagagtcttgctctgttgcccaggctgcagtgcagtggtgtgatctcggctcactgcaacctccacctcccgggttcaagcaattctcttgcctcagcttctccagttactgggactacaggtgcataccaccatgcccggctaatttttgtatttttagtagaggcggggttttgtcatgttggccaggctgatctcaaactcctgacctcaggtgatccgcctgcctcagccttccaaagtgctgagattacaggcatgagccgctgtacccggcctgattttctatgattctgcctttaaaagacagcacgtataccaagcctttttcagaaagcttttctcttaactccttctaatgctgaattttctctctattatcctcacccaattttggctgagagttagtgtacacaatttaacttcttagaaaaattccagtgtctatgcttatattgctcacttgaatcatttgaattagaaagggatctacaaataataaaagcaaagagtgcagacagattagggatagtaattcttaaagtgccatctatcccagatttccgttatagaccagcatatgtgtaattgtgcagtgggaggtaagtagtacccaggacattgcatgtacaatactttgaaacaaagtggcaacaaagatttcctggctcaggtatgcaccccagctgctggtttagatgaagtgctgagaatatttagaaaaagcgctttaaaaagcatctagagattatcatgaaaataattggagacaaagtcactaggctgctttgtgagaggcagcataccatggctctaaacccgttcacaaaaaacaatgttagagacattaggaattcaggttttgaaaatctttttttcgatttatttgtaatttacataccaaaaaaccacattaaaatagtcctcccttcaacatggctatcttttttcaagttttatatgcatagctctctcagcacttgaatggaaaaactgttacagcatttgggagttgtttttcttttagactttgcagatcttatctcaaggtgactaggaacccagagctaagtatctgtgaggcaatctctgcgaacgctgaacttacctagttggtttctatgaaatatgtagaatgcactgcagtagccattgtaagaaggtactataccggttttttggggcttgttgttgttgtttggtctgagaatgtactgccaacccctcttttataagagagaactgattttgatacatattttaaaatatgatagtacagagttaatggatgttaaaattttatttctttgttttggtaagtagattaaatcgagaatcatataatcagtacatttgagaattatataaccagtatataataatactggacacaaccatttgccatcttttcctgttatcatcccatagagtgggtggggagaatgaatagacataaacctagaataatgataaatggtttttaaaactctatattgaatacattccagctgataatgacttttctttttcaccttggtgatatcagcctcagggtaaaaaaaaaagtttcataaatcttttagttataaacaggaaagttttatattagtgtgtcatttcatttctagactgttgatggtgatgatgataaagaatttggagccaattttgatatatgaatgtattgcttttacatgtgatgattaaagctctccattagcagtt

SEQ ID NO: 4843 - DNA, 2088 bp, Homo Sapiens
  NM_020368
aatcgtacgccacgcggagagcatgctgggggccggaaggaagaggaaattccagtagccgatcaggagtctgcaaactccggtggtaggggagcgcgctgctgtttagagccacgagttaccggagcgcctgattcctgcgccgaagtcagtggtggccgaaagtccggagtcgctgtaaaacctgagattgtgagccatggtggggagatcccggcggcgcggagcagctaagtgggcagctgtgcgagccaaggcaggtcccacgctcaccgacgaaaatggagatgatttaggattgccaccctcaccaggggacaccagctactaccaagatcaggtagatgactttcatgaggcacgatcccgggccgccttagctaagggctggaatgaagtacagagtggagacgaggaggatggcgaggaggaggaggaggaggtgctagccctagatatggacgatgaggacgacgaagatggagggaatgcgggggaggaggaggaggaggagaatgccgatgatgatggtgggagctccgtgcaaagtgaagctgaggcctctgtggatcccagtttgtcgtggggtcagaggaaaaaactttactatgacacggactatggttccaagtcccgaggccggcagagtcaacaggaggcagaggaggaggaaagagaggaggaggaggaggcacagatcattcagcggcgcctagcccaagcgctgcaagaggatgattttggtgtcgcctgggttgaggcctttgcaaaaccagtgcctcaggtagatgaggctgagacacgggtcgtgaaggatttggctaaagtttcagtgaaagagaagctgaaaatgttgcgaaaggaatcaccagaactcttggagctgatagaagacctgaaagtcaagttgacagaggttaaggatgagctggagccattgttagagttggtggaacaagggatcattccacccggaaaaggaagccaatacttgaggaccaagtacaacctctacttgaattattgctcgaacatcagtttttatttgatcctgaaagctaggagagtcccagcacatggacatcctgtcatagaaaggcttgttacctaccgaaatttgatcaacaagctgtccgttgtggatcagaagctgtcctcagaaattcgtcatctgttgacacttaaggatgatgctgtaaagaaagaactgattccaaaagcaaaatccaccaagcccaaaccaaagtctgtttcaaagacttctgctgctgcctgtgctgttacagatctttctgatgattctgattttgatgaaaaagcaaaactgaagtactataaagaaatagaagacaggcaaaagctaaagagaaagaaagaagaaaatagcactgaagaacaggctcttgaagatcaaaatgcaaagagagctattacctatcaaattgctaaaaataggggacttactcctaggagaaagaagattgatcgcaatcccagagtgaaacacagagagaagttcagaagagccaaaattagaagaagaggccaggttcgtgaagttcgtaaagaagagcaacgttatagtggtgaattatctggcattcgtgcaggagttaaaaagagcattaagcttaaatgaagtttttgcttagcataaggtttttggcagttttggatcaataaatttttacttttaactaaagtcattgtattaatatataatactttaaattttaaaaattcttgtccacaaggaaatttgtctgggttattggacaatttataagaactatgggagcaatatgaaggtgcttgagaaaagagatgatgttgaagttttccaatattctgttgaagttttccaatattaagtattagcttagggaaatttcacagttcattgtggagtgttaaacttagaacatgtgtaacttttcacataaagagaatgcatctttgacagttatcttatttgtaaggcagcctataaaatagttctgaagtattttatttacctaactataattattgggccagatacttgttaataaatgggcttaatgttaacatggaaaaaaaaaaaaaaaa

SEQ ID NO: 4844 - DNA, 1525 bp, Homo Sapiens
  NM_020370
ctgcttgaagcctaactgtccaccagaaaggactgctctttgggtgagttgaacttcttccattatagaaagaattgaaggctgagaaactcagcctctatcatgtggaacagctctgacgccaacttctcctgctaccatgagtctgtgctgggctatcgttatgttgcagttagctggggggtggtggtggctgtgacaggcaccgtgggcaatgtgctcaccctactggccttggccatccagcccaagctccgtacccgattcaacctgctcatagccaacctcacactggctgatctcctctactgcacgctccttcagcccttctctgtggacacctacctccacctgcactggcgcaccggtgccaccttctgcagggtatttgggctcctcctttttgcctccaattctgtctccatcctgaccctctgcctcatcgcactgggacgctacctcctcattgcccaccctaagctttttccccaagttttcagtgccaaggggatagtgctggcactggtgagcacctgggttgtgggcgtggccagctttgctcccctctggcctatttatatcctggtacctgtagtctgcacctgcagctttgaccgcatccgaggccggccttacaccaccatcctcatgggcatctactttgtgcttgggctcagcagtgttggcatcttctattgcctcatccaccgccaggtcaaacgagcagcacaggcactggaccaatacaagttgcgacaggcaagcatccactccaaccatgtggccaggactgatgaggccatgcctggtcgtttccaggagctggacagcaggttagcatcaggaggacccagtgaggggatttcatctgagccagtcagtgctgccaccacccagaccctggaaggggactcatcagaagtgggagaccagatcaacagcaagagagctaagcagatggcagagaaaagccctccagaagcatctgccaaagcccagccaattaaaggagccagaagagctccggattcttcatcggaatttgggaaggtgactcgaatgtgttttgctgtgttcctctgctttgccctgagctacatccccttcttgctgctcaacattctggatgccagagtccaggctccccgggtggtccacatgcttgctgccaacctcacctggctcaatggttgcatcaaccctgtgctctatgcagccatgaaccgccaattccgccaagcatatggctccattttaaaaagagggccccggagtttccataggctccattagaactgtgaccctagtcaccagaattcaggactgtctcctccaggaccaaagtggccaggtaataggagaataggtgaaataacacatgtgggcattttcacaacaatctctccccagcctcccaaatcaagtctctccatcacttgatcaatgtttcagccctagactgcccaaggagtattattaattattaataaatgaattctgtgcttttaaaaaaaaaaaaaaaaaa

SEQ ID NO: 4845 - DNA, 1551 bp, Homo Sapiens
  NM_020371
gggcgtctccgccgcagctcggctcccgcgcgctcagcaccgccagcggcggccagatgcaggcggagcgaggagctcggggaggccgtgggcggcggccaggccgcggccggcctggcggagatcgccacagcgagcggcccggagccgcagcggcggtagccagaggcggcggcggaggcggcggcggggacggaggcggacgccggggccgtggccgtggccggggcttccgcggcgctcgcggaggccgaggaggaggaggcgccccgcgaggcagccgccgggagccgggaggctggggcgcaggggccagcgcgccggttgaagatgacagcgatgcagagacctatggagaagagaatgatgaacagggaaattattctaaaagaaagattgtctctaactgggatcgatatcaagatattgaaaaagaggtcaataatgaaagtggagagtcacagaggggaacagatttcagtgtcctccttagctctgcaggggactcattctcacagttccggtttgctgaggagaaagaatgggatagtgaagcttcttgtccaaaacagaattcagcattttatgtggatagtgagttattggttcgagcccttcaagagctgcctctctgcctccgactcaacgttgctgccgaactggtccagggtacagttcctttagaggttcctcaggtgaaaccaaagagaactgatgatggcaagggattagggatgcagttaaaggggcccttggggcctggaggaagggggcccatctttgagctgaaatctgtggctgctggctgccctgtgttgctgggcaaagacaacccaagcccgggtccttcaagggattctcagaaacccacttccccactgcagtcagcaggagaccatttggaagaagaactagatctgttgcttaatttagatgcacctataaaagagggagataacatcttaccagatcagacgtctcaggacctgaaatccaaggaagatggggaggtggtccaagaggaagaagtttgtgcaaaaccatctgtgactgaagaaaaaaacatggaacctgagcaaccaagtacctccaaaaatgttaccgaggaagagctggaagactggttggacagcatgatttcctaaaaaggggaaaaaaagtgcctgaagcaaatcttggttgccttctaacggcaggtgggcataaggctgtccttcaggaccagccagtttacaagcatgtctcaagctagtgtgttccattatgctcacagcagtaaatgcctacctctgtgtttgacatctgaaagaatacattgaagcagcttgttgcatttgtttttctggcttagtaatctaatagatttccttaagggcaggagatagactctggcccttgtttctagcctccttccttgcagtgtttacaacatagccagtgtttacagcatagcagatgctgctgctgattaagagaatagatgcaaacaaggcatgcatttggccaaaataaacaaatgctggtctgtccaaaaaaaaaaaaaaaaaaaaa

SEQ ID NO: 4846 - DNA, 3830 bp, Homo Sapiens
  NM_020374
ccagtgcaggacgcgctgacagctcgagtgagcggactgcccaggacttcggaactagacgagttctgtagaaatcctgtcaaagaatatgaagaaaaacagagaaagattctgcaatagagagagagaatttgtatataaatttaaagtaggaagtcagtgcttagaactgagagtgccactcaaatttcctgttcaagagaatgccagtcatttgcatggacgtctgatgctgctgcacagtttaccgtgctttatagaaaaagacttaaaagaagctctgactcagtttatagaagaagaatccctcagcgattatgatagagatgctgaagcatccctggcagctgtgaaatcaggtgaagtagatttacatcagctggcgagtacatgggccaaagcttatgctgagaccacgttagagcatgcaaggcctgaagaacccagctgggatgaagattttgcagatgtgtaccatgacttaattcattctcctgcctctgaaactctcttaaatttggaacataattactttgttagtatctcagaactgattggtgaaagagatgtggagctgaaaaaattacgagagagacaaggtattgaaatggaaaaagtcatgcaggaattgggaaaatcactgacagatcaagatgtaaattcactggctgctcagcattttgaatcccagcaagacctagaaaataaatggtcgaatgaattaaaacaatcaactgccatccaaaaacaagagtatcaagaatgggtaataaaacttcaccaagacctaaaaaaccccaacaacagctcccttagtgaggaaattaaagttcagccaagtcagttcagagaatctgtagaagcaattggaaggatttatgaggaacagagaaagttagaagaaagttttaccattcacttaggagcccagttgaagaccatgcataatttgagattgctgagagcagatatgctggacttctgtaagcataaaagaaatcatcgaagtggtgtgaaacttcatcggctccaaacagctctgtcactttattctacatctctctgtggcctggttttactagtagataatcgaattaattcatatagtggtattaaaagagattttgccacagtttgccaagaatgcactgacttccatttcccccgaattgaagagcaattagaagttgtccaacaggtggtactttatgctagaacccagcgcaggagtaaattgaaagaatcacttgattctggaaaccaaaatggaggaaatgatgataagactaagaatgctgagaggaactatttaaatgttttacctggggaattttatattacacggcattctaatctctcagaaatccatgttgctttccatctctgtgtggatgaccatgtgaaatcgggaaacatcactgctcgtgatcctgccattatgggactccgaaatatactcaaagtttgctgtacccatgacatcacaacaataagcattcctctcttgctggtacatgatatgtcagaggaaatgactataccctggtgcttaaggagagcggaacttgtgttcaagtgtgtcaaaggtttcatgatggaaatggcttcatgggatggaggaatttctaggacagtgcaatttctagtaccacagagtatttctgaagaaatgttttatcaacttagtaacatgcttccccagatcttccgagtatcatcaacactcactctgacatccaagcactaaacccttatagattgacatgctggcagaagatgattgttaaactctccaggaacttgtgctatgctgggaatctgtcaagcaaaagatgcccagaaagagaacttgcagctcaatccacaaatcaagatacatgtgtgtgaaaccattccaaaaatttatatactgcacaaactggtgatcaacccctaacttaaacacttaaagtctctttatgaatttctctttttttcttctctgtgttacctgtgaatattagtaatctaaaactttttatttatcacacatggacacttgggaaaggaaacttgattatatttacatggaggcatttgactttttcaagaggcttgactcgtctcaggtgcaatccttaattaaacatacaaacaaaattttccttttactttctttgccaaaacaaaatgtaaaagcactgaaatatacattgcaagtacaaatttcctgtgaaaatctttttatagaaacacaaatgtataagacaaatgtgcttgttcttttaaattctcctgtttcagaatctctttttaatctactcctaaggatgtacaagttagagtcagaagacgttttagattttttccctctctctcatcctcccgctgtgcccttgcacttgcatattaataacatttcatggactgggaaatagtgttcttttttgcaagcttgatgtcaagttagtctaaaccagcacctggcagtattttagtgctcatcaacattgtgacaatcacacaaggaagatcatttctacatttctgtcctccctgcgttctcagcttgcttaaccattcctctacctcttgcatttttttgcggataaatgtatccccatttctgcttctctgtttcccctccttttccattgtttttccttatggtactactttctcaggtgctacatatcatatatttgtcccatctataacatatttaaatgctataagtagtaactccattaaacaaaggcatttacaaaagcacacaggtgtttagaaaagcaatagtttcatcaattccaagttatgtggatattgtaactggccacaagaatgaaatggagggcatttggtgtcataagatggcatgtcttgatgacaagaaacaaaacgcccttcattaatatgcctcagtgtaataactattatagaaactgttggcaagcagagtgctttcctataacagaatgtgtcttaattttctactcgagggaaaggtttgtccaggtaacaacactaaagacaaccctaagaacacccactccagcagtatgtccattagacactaaaactctccaaattatttgtcagggagcctggcgattctgccaagaaggcaggtgttttgcccttagagcctatacagttctcttggagaaattgtctttcaggcaccactgttaatcactgagactgattctaatgcaaagcagggaagacagaggcagaaaccaggagagtggtagatcagtgcagcccagatatcggaatggaggagcaaagtttcattcacggatgtttgttgaatgctgctgcccaactcttcctttgtcacctctaggctattccactaagttacttataaactggtggctttaactgagggctgtgtaaaggtactatttggcatgtgaagtcaggataaatttatcgaatgtccgttttccacatgcaactgtgttacagaagtagtaaaattggaagaatcatgtttatggtgttaccactgatggaaacacacaaacaccaagctaataataaatatataacttaaaaagctaattatatgcactgaaatggtgggaattttagtgatgcagtaattgaggagtctggagttttgtatttggaccaagaattatgagatgaggatctttttctgagtgttctaaagggcttcttgagggggagtggtttaaagcacttcatgaatgatgtgaagaaggtaccttgggctgagacagcattctaggtacagatggcactctgttcaaccaactgtggatggaaaatattctgaaaaaaaatacaataaaaattttaaaaatacaaaaaaaaaaaaa

SEQ ID NO: 4847 - DNA, 2443 bp, Homo Sapiens
  NM_020376
ggcggccccagtcagacgcaggcagccccaaagcctgaacaggcagggccagacccagcttcttcgcctccgccagcggggaccccgagctagagccgcagcgggacctgcccggcccccggctccagcgagcgagcggcgagcaggcggctcacagaggcctggccgcccacggaacccggggcccggcggccgccgccgcgatgtttccccgcgagaagacgtggaacatctcgttcgcgggctgcggcttcctcggcgtctactacgtcggcgtggcctcctgcctccgcgagcacgcgcccttcctggtggccaacgccacgcacatctacggcgcctcggccggggcgctcacggccacggcgctggtcaccggggtctgcctgggtgaggctggtgccaagttcattgaggtatctaaagaggcccggaagcggttcctgggccccctgcacccctccttcaacctggtaaagatcatccgcagtttcctgctgaaggtcctgcctgctgatagccatgagcatgccagtgggcgcctgggcatctccctgacccgcgtgtcagacggcgagaatgtcattatatcccacttcaactccaaggacgagctcatccaggccaatgtctgcagcggtttcatccccgtgtactgtgggctcatccctccctccctccagggggtgcgctacgtggatggtggcatttcagacaacctgccactctatgagcttaagaacaccatcacagtgtcccccttctcgggcgagagtgacatctgtccgcaggacagctccaccaacatccacgagctgcgggtcaccaacaccagcatccagttcaacctgcgcaacctctaccgcctctccaaggccctcttcccgccggagcccctggtgctgcgagagatgtgcaagcagggataccgggatggcctgcgctttctgcagcggaacggcctcctgaaccggcccaaccccttgctggcgttgccccccgcccgcccccacggcccagaggacaaggaccaggcagtggagagcgcccaagcggaggattactcgcagctgcccggagaagatcacatcctggagcacctgcccgcccggctcaatgaggccctgctggaggcctgcgtggagcccacggacctgctgaccaccctctccaacatgctgcctgtgcgtctggccacggccatgatggtgccctacacgctgccgctggagagcgctctgtccttcaccatccgcttgctggagtggctgcccgacgttcccgaggacatccggtggatgaaggagcagacgggcagcatctgccagtacctggtgatgcgcgccaagaggaagctgggcaggcacctgccctccaggctgccggagcaggtggagctgcgccgcgtccagtcgctgccgtccgtgccgctgtcctgcgccgcctacagagaggcactgcccggctggatgcgcaacaacctctcgctgggggacgcgctggccaagtgggaggagtgccagcgccagctgctgctcggcctcttctgcaccaacgtggccttcccgcccgaagctctgcgcatgcgcgcacccgccgacccggctcccgcccccgcggacccagcatccccgcagcaccagctggccgggcctgcccccttgctgagcacccctgctcccgaggcccggcccgtgatcggggccctggggctgtgagaccccgaccctctcgaggaaccctgcctgagacgcctccattaccactgcgcagtgagatgaggggactcacagttgccaagaggggtctttgccgtgggccccctcgccagccactcaccagctgcatgcactgagaggggaggtttccacacccctcccctgggccgctgaggccccgcgcacctgtgccttaatcttccctcccctgtgctgcccgagcacctcccccgcccctttactcctgagaactttgcagctgcccttccctccccgtttttcatggcctgctgaaatatgtgtgtgaagaattatttattttcgccaaagcacatgtaataaatgctgcagcccagcctctgcccactttgtgtgtatgtgaccgcctgcttacttgcagtgagagcctggtggccagggtctggccctaccttggctgaccagcctctccacagctgcaggccaggtctcccagcgtcgcactcctgggcctggcatttggaacctgccaggctggcctgggaacacccccctacaggcacatatgaacgtactgcattcctgccgacccccctgtctaggatgcatccacaccccccccaattttgcccagcagcctcctggctgacccttggccacagccttctgagggccaatggaaatatttgggaccaagattcttggtaaataaaaacgaaaatgtttgcaaaaaaaaaaaaaaaaaa

SEQ ID NO: 4848 - DNA, 3201 bp, Homo Sapiens
  NM_020379
aaggcgcgggccccggcgcggcggggagggctcggccggaggggaggctgcggcgcgcggccggtcgctgcgggcccgggccccaagccgtgccgctccgctcgcccgggccccgccgaggccgctgcgcccccgcctcctcgcgggaggactcgctccaaactccctgaacttcggggacagtcccccgaagcggcgaaactctcagggttggcaaccctgcccagggacccccatcccgggcggcgctccggacgccctcccctcaccgcgcccccgcagacacgtgcctggactccgagggcttctggagccaccggccgggccacgatgctcatgaggaaagtgcccggcttcgtcccggcctccccgtgggggctgcggctgccgcagaagttcctcttcctcctcttcctctcgggcctggtcaccctgtgcttcggggccctcttcctgctgccccactcctctcgcctcaagcgcctcttcctggccccccggacccagcagcctggtctggaagtggtggctgaaatcgccggccatgccccggcccgcgagcaggagccgcctcccaacccggcccccgccgcgccggccccgggcgaggatgaccccagcagctgggccagtccccgccgcaggaaaggggggctgcggcgcacccgccccactggaccccgcgaggaggccacggcggcccggggcaatagcatcccggcctccaggcccggggacgagggcgtccctttccgctttgacttcaacgcattccggagccgtctccgccacccggtcctgggaacgagggccgatgagagtcaggagccccagagccaagtgcgagcccagcgggagaaaatcaaggagatgatgcagtttgcttggcagagctataagcgttatgcaatggggaaaaacgaactccgtccactaacaaaagatggctacgagggtaacatgttcggaggcctcagcggggcaacagtcattgactccctcgataccctctacctcatggagctgaaggaggagttccaggaggccaaggcctgggtgggagagagcttccacctgaacgtgagcggagaagcatccttgtttgaggtgaacatccgctacatcgggggactcctctcagccttctacctgacaggagaagaggtgttccgaataaaggccatcaggctgggagagaagctcctgccggcgttcaacacccccacgggaatcccaaagggcgtggtgagcttcaaaagtgggaactggggctgggccacagccggcagcagcagcatcttggcggagtttggatccctgcacttggaattcttacacctcactgaactctctggcaaccaggtcttcgctgaaaaggtcaggaacatccgcaaggtcctcaggaagatcgaaaagccctttggcctctaccccaacttcctcagcccagtgagtgggaactgggtgcaacaccatgtctcagttggaggactcggggacagtttttatgaatatttgatcaaatcctggttgatgtcgggcaagacagatatggaggctaaaaatatgtactacgaagccttggaggcgatagagacctacttgctgaatgtctctcccggggggctgacctacattgccgagtggcgaggggggattctggaccacaagatggggcacctggcctgtttctccgggggcatgatcgcccttggcgccgaggatgccaaggaagaaaagagggcccactaccgagagctcgcagcccagatcaccaagacgtgtcacgagtcatacgcccgctcagacaccaaacttgggcctgaggccttctggtttaactccggcagagaggccgtggccacccagctgagcgagagctactacatcctccggccagaggtggtggagagctacatgtacctgtggcgacagacccacaaccccatctacagggagtggggctgggaggtggtgctggccttggagaaatactgtcggacagaagccggtttctctgggatccaagacgtgtacagtagcacccccaaccacgacaacaagcagcagagcttctttctagcggagacactaaagtatctctatcttctgttctctgaagatgacttgctctccctggaagactgggtgttcaacaccgaggcccacccactcccggtgaaccactcagacagctccggcagagcctggggcagacactgaccccatctcctgccgccgccctggggccgccgcagggatgccttgccttttcaggatttgagactgttctcaaagggattgggaacgaaggccccatctcgggcagacccccagcagatgtgtcggacaagcaacttcttttcctctgtgaggagacaagacttggagactcagcgatgtcaggccagggccatggccacactggcccacacattcctttctacagagaatttctatgaagcccactcacttgccattccagggccaaaggaccggaggtttgcatatccgccccttgtatttgatttgcttccttttggtttcttggtttttgtttttgcttgattttgtcttttctctacagtttagttttgtcacaattacacatatagttttcaaaatcatgcactttctaaaatggtgtcatcctgaaaaacaaaacccagtgtttgcacacacacaaaatcttgaccccgttatctatattttaaatgctttttgcccaacactgaccctatgttcaactttgtgtcatttaccttataatttgaggaggggtttccctttgggcctcagtgttacaaattactagtgctattttcattattattgtaatggaaaaatctgtggactagaataaaagagtttattgaataagaaatatgattgggctcattgcacatcagtgactcctagaaaaaccattgcaatgttaccatcagaaataataatcagccagcagttgatttaaggtataatttagtaaacgattccaacttctattacctcccctgaaatcggtcctgatatattcgagaagcatgaggccagcccttcagatgcagttgtttatttatactcaggtttagattgggaagaggcccagggaggagcagcaacttgcctgaggtcacacagcccaaaaaaggcaaaggagagtctcgcccctgccgtctcctggccaccccagttgagtgt

SEQ ID NO: 4849 - DNA, 2765 bp, Homo Sapiens
  NM_020382
ctgggtttcccgggagatcccaggcggtgacagagtggagccatggctagaggcaggaagatgtccaagccccgcgcggtggaggcggcggcggcggcggcggcggtggcagcgacggccccgggcccggagatggtggagcggaggggcccggggaggccccgcaccgacggggagaacgtatttaccgggcagtcaaagatctattcctacatgagcccgaacaaatgctctggaatgcgtttcccccttcaggaagagaactcagttacacatcacgaagtcaaatgccaggggaaaccattagccggaatctacaggaaacgagaagagaaaagaaatgctgggaacgcagtacggagcgccatgaagtccgaggaacagaagatcaaagacgccaggaaaggtcccctggtaccttttccaaaccaaaaatctgaagcagcagaacctccaaaaactccaccctcatcttgtgattccaccaatgcagccatcgccaagcaagccctgaaaaagcccatcaagggcaaacaggccccccgaaaaaaagctcaaggaaaaacgcaacagaatcgcaaacttacggatttctaccctgtccgaaggagctccaggaagagcaaagccgagctgcagtctgaagaaaggaaaagaatagatgaattgattgaaagtgggaaggaagaaggaatgaagattgacctcatcgatggcaaaggcaggggtgtgattgccaccaagcagttctcccggggtgactttgtggtggaataccacggggacctcatcgagatcaccgacgccaagaaacgggaggctctgtacgcacaggacccttccacgggctgctacatgtactattttcagtatctgagcaaaacctactgcgtggatgcaactagagagacaaatcgcctaggaagactgatcaatcacagcaaatgtgggaactgccaaaccaaactgcacgacatcgacggcgtacctcacctcatcctcatcgcctcccgagacatcgcggctggggaggagctcctgtatgactatggggaccgcagcaaggcttccattgaagcccacccgtggctgaagcattaaccggtgggccccgtgccctccccgccccactttcccttcttcaaaggacaaagtgccctcaaagggaattgaattttttttttacacacttaatcttagcggattacttcagatgtttttaaaaagtatattaagatgccttttcactgtagtatttaaatatctgttacaggtttccaaggtggacttgaacagatggccttatattaccaaaacttttatattctagttgtttttgtactttttttgcatacaagccgaacgtttgtgcttcccgtgcatgcagtcaaagactcagcacaggttttagaggaaatagtcaaacatgaactaggaagccaggtgagtctcctttctccagtggaagagccgggaccttccccctgcacccccgacatccagggacggggtgtgaggaagacgctgcctcccaatggcctggacgggatgtttccaagctcttgttcccctaacgtctcaacaggcgctcactgaagtgtatgaatattttttaaaaaggtttttgcagtaagctagtcttcccctctgctttctcgaaagcttactgagccctgggccccaagcacgggccgggcatagatttcctcttccacaagctgccgcttttctgggcaccttgaagcatcagggcgtgaaatcaaactagatgtgggcagggagagggttgcttacctgccctgctggggcagggtttcctgaaactgggttaattctttatagaaatgtgaacactgaatttattttaaaaaataataataaaaatttaaaaaaattaaaaataaaaaaaaccacagaaaacaactttacatgtatataggtcttgaagtgagtgaagtggctgcttttttttttttttttttttgcttttttttgctttttgtagaagagattgagaatggtactctaatcaaaaataaagttttgtagtgggaccagaaattacttacctgacatccacccccattccccctcatcctgctggggttgaaagttccagacctgctgtcgaggccttgtgtttgtcagacacccagtgtcctcctgcaaggacgcaactgtgagctgaggtgtgagcctaggagcccaggacccctgaccccggccgctgctgccagcctcagaaaggcacccaggtgtgcaggggagcacacagggcccggcagcccccaggaatcaaggatagggctaaggttttcaccttaactgtgaaggcaggaggaataggtgactgcttcctcccgcccttcacagaactgattctcacacactgtcccttcagtccagggggccggggctcaggagccatgacctggtgtctcctgcccaccctggtcccaggtaaatgtgaatggagacaggtatgagaggctgtcctcgtctttgattcccccccaaccccacctcgggcctcacgacggtgctacctaagaaagtcttccctcccaccccccgctagcctggtcagtggtcagcaaattggaagaggatccgatgggagtgtaaatgtgagacacaatgtcttgattatacctgtttgtggtttagctttgtatttaaacaaggaaataaacttgaaaattatttgtcatcataaaaatgaaacaaattaaaatatttattgccaggcaaaaaaaaaaaaaaaa

SEQ ID NO: 4850 - DNA, 2397 bp, Homo Sapiens
  NM_020385
gcgcttccggggactggagcgtgcgtgctgaggtatgcgcaacgcgtgcggggtctcttccggagtcttttcctggacggggtccctgcggtgggtgtgtttcggcctggcctgggcaggcgcttgtgctgccagggcgccgggcccggggaggccggggtctcgggtggccgccggcccaggcgctggacggcagcaggatggggaaggcgaaggtccccgcctccaagcgcgccccgagcagccccgtggctaagccgggtcctgtcaagacgctcactcggaagaaaaacaagaagaaaaaaaggttttggaaaagcaaggcgcgggaagtaagcaagaagccagcaagcggccccggtgctgtggtgcgacctccaaaggcaccagaagacttttctcaaaactggaaggcgctgcaagagtggctgctgaaacaaaaatctcaggccccagaaaagcctcttgtcatctctcagatgggttccaaaaagaagcccaaaattatccagcaaaacaaaaaagagacctcgcctcaagtgaagggagaggagatgccggcaggaaaagaccaggaggccagcaggggctctgttccttcaggttccaagatggacaggagggcgccagtacctcgcaccaaggccagtggaacagagcacaataagaaaggaaccaaggaaaggacaaatggtgatattgttccagaacgaggggacatcgagcataagaagcggaaagctaaggaggcagccccagccccacccaccgaggaagacatctggtttgacgacgtggacccagcggatatcgaagctgccataggtccagaggcggccaagatagcgaggaaacagttgggtcagagcgagggcagcgtcagcctcagcctcgtgaaagagcaggccttcggcggcctgacaagagccttagccttggactgtgagatggtgggcgtgggccctaagggggaggagagcatggccgcccgtgtgtccatcgtgaaccagtatgggaagtgcgtttatgacaagtacgtcaaaccaactgagcccgtgacggactataggacagcggtcagtgggattcggcctgagaacctcaagcagggagaagagcttgaagttgttcagaaggaagtggcagagatgctgaagggcagaattctagtggggcacgctctgcataatgacctaaaggtactatttcttgatcatccaaaaaagaagattcgggacacacagaaatataaacctttcaagagtcaagtaaagagtggaaggccgtctctgagactactttcagagaagatccttgggctccaggtccagcaggcggagcactgttcaattcaggatgcccaggcagcaatgaggctgtacgtcatggtgaagaaggagtgggagagcatggcccgagacaggcgccccctgctgactgctccagaccactgcagtgacgacgcctagcagtcctgccctgctgctgctgccgccccgctacagaggcaatgtgaccagtcacagggacagatcacatctccccagagtggcaactctggtgaaaccttttcagaatcatggcagaggggcgtggcgtggtgctactgagaaggtcctccttcctcttgactttgtggtctgaaacctggtcttactgtccatgtgtgtttgggcccggatggtcagggtggggagcagggacggccatgggcacgcctggccacgctttaccgactgctgaccccctgggccaggtgaggttggggcctgtgggccgccagtccatacggtgctgtcactgcccatcttcggtgacaccctggggtgaggtgctcagcaccttcctctcgaggagccacattttcctcctttgtgttaggggacataacaagctctgctgggcttgagggacccagaccaggtgtctgcagtcagctcctgagacacagctggccggcacaacaggtgttacatcaggggtttcctgtggccgtttgaactttgagcatttatctaaattaaattggcccagggttggctggtgggtcacccagcagaggcttctccccatagcacgaggatgtgttgcctgggcacggtgactgcggttattcctggaggtcggcagacatgccaaccttgggctatttgagctggagaagctatgtgatgctagccggtggctttctgggctaggccccagtttgaggctcccctgggaactagagccaggaacagccagtggcactgacaaggggacggagtccaaggcgttattgggccacctgacagctggacagaaaaggggcagacacaccgaggatgcgatttaaaataaatgcagatgtttacttggaaaaaaaaaaaaaaaaaaaaaaaaaaaaaaaaaaaaaaa

SEQ ID NO: 4851 - DNA, 5537 bp, Homo Sapiens
  NM_020390
ggaactgccgcggccgccaccgccgctgccggcgccgctgctgtaggggaccagcgcgggtgcgcagacgaaaggcgctctttgccagctgaaagttcccacggaaaaactaccatctcccctgcccaccatggcagacgaaattgatttcactactggagatgccggggcttccagcacttaccctatgcagtgctcggccttgcgcaaaaacggcttcgtggtgctcaaaggacgaccatgcaaaatagtggagatgtcaacttccaaaactggaaagcatggtcatgccaaggttcaccttgttggaattgatattttcacgggcaaaaaatatgaagatatttgtccttctactcacaacatggatgttccaaatattaagagaaatgattatcaactgatatgcattcaagatggttacctttccctgctgacagaaactggtgaagttcgtgaggatcttaaactgccagaaggtgaactaggcaaagaaatagagggaaaatacaatgcaggtgaagatgtacaggtgtctgtcatgtgtgcaatgagtgaagaatatgctgtagccataaaaccctgcaaataaacggaaacatcaggcatgaacactgtttatgtctgaatcaactgcagatctaatttggttctaagttgtcaccaaagctatagccttcataagcaacctcatttctttttttaattgttttcagattgtgctgggttagttttgcaagcaattgataatttttaaaaaattatcaatatgtataattttttttgaattttgtagatatgtttcctataatattcctgtggttttcagtatgtcagtccaagaaacaaacaagatagcttcagcagatgtgatttgtctgagcaaatcattcctgtgttttagttagatgataaaccagggttttaaatcaaacaatgtagcataaagtggtattgaagtaccatatttaagttgaactgctctgcattaattacagatttaatataaaatgaactgattatatattggaattgttgcactttcagcctgtgtagggcaaacacaaatccttaaacaaaaatcatgttatcaaaaactgtcagttattttggtggccacatgcaaccatgtgattactttggtcatactatttaccaaattgttggcaaacttgatgtaaccttatatggtggttttagtcccttcttatggttggcagaagggcactgaactgttgggtgaaagttagttagcaagtaagattataaggaagacacaaaagacagtggcaaagagggttgattaaatctataagtttttatgtgaggactttgtaagtcagcataaaaatgaaaagttgtttctcagttgtttttgcttttaactttgcccccaacgtttaaagggagtgatctgctttacatgatactatgcaatgcttgttttccaactatgttgaataaatagtaatatttatcagtaaatactcctttccaacttccttttttttttttttttttttgagactgagtctcactccatcagccaggctggagtgcagtggtgcaatctcggctcactgcaacctctgcctcccgagttcaagcaattctcctgcctcagcctcccaagtagctgggactacaggtgcatgccaccacgcccagctacttttttgtgtattttagtagagatggggtttcaccatgttgtctaggctggtcttgaactcctgacctcaggtgatccacctgcctcagcctcccaaagtgctgggattacaggcatgagccaccacacccagcccctttccaaccatttctaagtagattttttgacattaatgtatttattaaacaaaaactgagaattccttaaattgatttggaatttttgttaattttatgtcctttttttcctaaagtgaattaaagtgaatcatggaagcagcattactttatatgaatattattatttaagttaagttattttaagtatatgcattttttctgattgttgtgtgacttaattcagttgctggtgtgaactataactagcaaataattctataaactgaattattttaaaaggtattttaggtgacaccactgcatttctatttcatcttttgagtcatatgtatattatttccagaattttagacattattacagggtttgtgaggacctttgactcagtgacaatcatcatattggagcaaaacatagaacaaaatcactatctcagaaataccttaattctctaagactggctcttagacctctcccatcatgccttgacctctaaaaagccctttgttcctatcttctaaaggaaagtatatcatatatgatgatgtaactgatctaatcagtgactggaaatagcattagtaacagaagatcccaagttttagttgcttaatttgtacacacttttaaatattgtcttagcctcggcaaaccaatttggggaagaagcaagatactttaagagaaatacaaaggaaatttctaaagcacaagaaatagtgaggtagtagttagtcgtctttcctacaacattttagcttttgcccatctaaagcacaattaaaattaggctacattctttccagtattctatttaagtacctactacatactgctctagtttcttagtactctgtaatgtgtatcttaattgctactggttggcattgtaactcataggaattccagaaaattattaatccgtgctgcttgcagttcattcatatggcccctcttaaccatgctggtgttatgattcagtattaactctcaattagcatgcccctgttcttcctaacttgtaaaatttcacataaatatattttcaattgtgtacaaattaagggtgtacaaattataataatgcatctctatcttcatactttgaatggcaaacgctatttatgcataaatattttcattttaagtaatatatgaagtgtaaatactcgatatataagtatagattttaaagatatgggactttattttcacataagtcaatagatgtttctctagaacaaaatatttagtaaagctttataaattatattaaaaggaagcggggaacatgtattttttaacatagaacagaagtgacttcattctttttagacatcagaaatgttaaagttgattcccaatatttgttgtacttttttgtagcaaatgttaaaaatcacgagttaccatgtatagaatgtggactgtcatgttgatatcattgtacagtgataagccatttttatctgtatacatttcaccaatttattaacaggttgaatatttgtttctttttagaacattttatttatactgtgaagactttgttataccttatttgctacaacatagatcatatcattgctactttgacttagcatttgcatcataaacataattatgatgtttttttcatgctcccttccaggggctcagtcacttgaagaaactgttgctaaccaagctcttgactctgtttcccttaatgatacaagtctctgtaccagcgctttatgttaattaccaaaactctcctgcatcagagcatgatatctataataggagatactgcaataaaatgattaggctgtaaaatttggagacacaatttttcattacaatgcaatttgcatgtgcacatgtgcgcacataactttatatgttagttcttttttccaaactcccaactcttaaaagtattgtagtctgttggtgcctcaactgttggtaactttttttttttaaatttacaactttccacaacttgtttttgtactttaaggtttctcaattagaatatttctagttgagctgtaatttgaatgcattgttctcagggctatttgtgctaaaagctgaaatttcattattttaaagctaattgcctgaaaatatattggcagaattttcccaaattgtaataactgtgatacatgcatataaaaaaatccttaatgtcaacacacttaaactacatgctaaatagtcaagaaaaaaatggaaacagtagcatccatactggaatcttgccatatttttttcattttagaatagattttggcagtctcatcttagaatcctatccttaggatacatctgaaagcattcctttggcatggaccccagagatagttttggagccaggcattgatgtagaggttcaccaaacatatttagggataatagataaattcataatgcttttttgggtacactgaaatgtttacatactgaattctgtaatatgaactaggaacgcatttactatgagaaaatatggctcttaagcagtgtaagagtgaaaatataagcatatttccattaacagtatattgtactgatcagcagctctcattttaacatcagttaggcataatatttcatagttttcaagccttttttttctgctaacattcagacaagtaacaggcaacaaagatttaagaaaaatttatggtggaaaaccttaaaaattgagacaattcaatctatttaatctattaaattttttctctgaattgggtatatggcatcattatttgattttagcagggaacatttggatttagcttatgaaacacagatgttctatgggaacatggcttgaagccaatatgtaatttaatgtttttccattaaacaaacatctgaacaccaacttagctaccaagtgaggtcaagtgcctgaaaagtactgtatacatctaataagcatgttttccttatgtaaaagatgcactttatggcaatgcataccaggctttcacctgctagaaacatacttgttgccaactttgccatctaccactattctcctccttagaacaggtagaaacctattttacaaaaaaaaaaaaaaaaaaaaaaagacaggttattgtatttatatgaagtccctaaaactgtttcttggtattgatagacttaagtttatcttagttcaagattgcactttttaaaaaactctggactattttcagcaatgaccgaacagcttgtcacacatcatagttgtgatcttttttgaggagttatttattgtggttaatatctactataaataagcattcttgtgcttgttacaaagcataatgcaaattactagttctatactagtataatgaaaatgactagttctatactgttatgtacttttgtcttcctccccaaaaaggaaacagtttagcattgtctaaattcagtggcacttttttagtaatacatttttttttcttagatacaggagaactattgcttttacctgcagaaactcaaatgttttcgctaaaactttaaaattctaaaatacgtagtatgggtattactaattgtacattttacatttcaaaaatagttaaaattcaaatgttaagtctttgacttaaaaaacctttaaatatagataataccttaacaattataactttgtgatattattaaaatatatttgtctgttaacttcatcagttgtattaaataaaaatagttaacagcttgcacta

SEQ ID NO: 4852 - DNA, 1768 bp, Homo Sapiens
  NM_020395
ttttcctgctttcggagccggccagtgcgggaaccgtttccgaagggaccaccgggaacagacggatcggcagggcggggcggaacggtgaggccatctactgaaacacagaagcaattttaaaagaaaatggaggaagtataactgatctttgcagaaagtggggaagtgagttgaccagagaaggatgagagaattgccaagttgtactgaacgccaagctgagaatggtgattctgaagatagaatgcgtttgcaatggctgctactgtgaacttggaacttgatcccatttttttgaaagcactaggtttcttgcattcaaagagtaaagattctgctgaaaagctaaaagcactgcttgatgaatctttggctcggggcattgattccagttaccgtccatctcaaaaggatgtggagccacccaaaatttcaagcacaaaaaacatttccattaagcaagagcccaaaatatcatccagtcttccttctggtaataataatggcaaggtcctcacaactgaaaaggtaaagaaggaagctgaaaagagacctgctgataaaatgaaatcagacatcactgaaggagttgatattccaaagaaacctagattggagaaaccagaaacacagtcatctcccattactgtccaaagtagcaaggatttacctatggctgacctttccagttttgaggagaccagtgctgatgattttgccatggagatgggattggcctgcgttgtttgtaggcaaatgatggtggcatctggcaatcaattagtagaatgtcaggagtgccataatctctaccaccgagattgtcataaaccccaggtgacagacaaggaagcgaatgaccctcgcctggtgtggtattgtgcccgatgtaccagacaaatgaaaagaatggctcaaaaaactcagaaaccaccgcagaaaccagcccctgcagttgtttctgtaactccagctgtcaaagatccattggttaagaaaccagaaactaaactgaaacaagagacaacttttctagcgtttaagagaacagaagtcaagacatccacagttatttcaggaaattcttctagtgccagcgtttcctcgtcagtaactagtggcttaactggatgggcagcttttgcagccaaaacttcctctgctggtccttcaacagcaaaattgagttcaacaacacaaaacaatactgggaaacctgctacttcgtcagctaaccagaaacctgtgggtttgactggtctggcaacatcatccaaaggtggaataggttccaaaataggttccaataacagcactacgcccactgtacctttaaaaccacctccacctctaaccttgggtaaaactggccttagtcgctcagttagttgtgacaatgtcagcaaagtaggtcttcctagtccaagtagtttagttccaggaagcagcagccaactaagtgggaatggaaatagtggaacatcaggacctagtggaagtactaccagcaaaactacttcagaatccagcagctctccctcagcatcccttaaaggcccaacttcacaagaatcacagctcaatgctatgaagcgattacagatggtcaagaagaaagctgcccaaaagaaactcaagaagtaatgtggccaagtaggtttttgtatcatattagcctaaagatgaaaggcttattattatgatataatctgtaatacactgtaatttaataaaagtcttcataatcaaaaaaaaaaaaaaaaaa

SEQ ID NO: 4853 - DNA, 4640 bp, Homo Sapiens
  NM_020399
acgcatgcgcagcgggggcaggctgggaggtgggactgactgagtcttccgtgtgtcgccgccgttgccgcctcagcttcagcctcgttactcctgcggttctgtgactgtgctgctggcgttaacggcgcgaggtgaagggaggtgacggagtgtgcccgcgcgcgcgggggtcccctcagtcccagcagttcccttcgtgcgcggggggcggcgagggtcttcagcagtcgggagaggcccttgacggcgccatgtcggcgggcggtccatgcccagcagcagccggagggggcccagggggcgcctcctgctccgtgggggcccctggcggggtatccatgttccggtggctggaggtgctggagaaggagttcgacaaagcttttgtggatgtggatctgctcctgggagagatcgatccagaccaagcggacatcacttatgaggggcgacagaagatgaccagcctgagctcctgctttgcacagctttgccacaaagcccagtctgtgtctcaaatcaaccacaagctggaggcacagttggtggatctgaaatctgaactgacagaaacccaagcagagaaagttgttttggagaaagaagtacatgatcagcttttacagctgcactctattcagctgcagcttcatgctaaaactggtcaaagtgctgactctggtaccattaaggcaaaattgtctggcccctctgtggaggagctggaaagagagcttgaggcaaacaaaaaagaaaaaatgaaagaagcacaacttgaagctgaagtgaaattgttgagaaaagagaatgaagcccttcgtagacatatagctgttctccaggctgaagtatatggggcgagactagctgccaagtacttggataaggaactggcaggaagggtccaacagatacaattgctaggacgagatatgaagggacctgctcatgataagctttggaaccaattagaagctgaaatacatttgcatcgtcacaaaactgtgatccgagcctgcagaggacgtaatgacttgaaacgaccaatgcaagcaccaccaggccatgatcaagattccctaaagaaaagccaaggtgttggtccaattagaaaagttctcctccttaaggaagatcatgaaggccttggcatttcaattacaggtgggaaagaacatggtgttccaatcctcatctctgagatccatccggggcaacctgctgatagatgcggagggctgcacgttggggatgctattttggcagtcaacggagttaacctaagggacacaaagcataaagaagctgtaactattctttctcagcagagaggagagattgaatttgaagtagtttatgtggctcctgaagtggattctgatgatgaaaacgtagagtatgaagatgagagtggacatcgttaccgtttgtaccttgatgagttagaaggaggtggtaaccctggtgctagttgcaaagacacaagtggggaaatcaaagtattacaaggatttaataagaaggcagtaactgacacacatgaaaatggagacctgggcactgcaagtgaaactccgctagatgacggtgcttcaaaattagatgatctgcacactctgtatcataaaaaatcttattaaattgaccatatctccagacaagattgttaatcagactattctgaatttggggcactggggaagatggtgacaaagactacaaaatcaggggaggctgtttgttgcctaaatgaaaggcgggtacctcagggcttcatgtgaacaattctcaatgcataaaacaccctgttttctgtggtagaccataattagctattgcatgtaaagcaattttgattttcttgaacttgtaagcaccaaagcatgtgtttcccaaaggggtattactgggctcttaagtaccaaatgaaaccctactgttttacttggttccttttccctttagtaggaggacagtgctaactggaattttataaggagtaccctttaaaatacagagagtaagtgaattcatattttatattctagaatgttaactgtggtatttcagaagacagagcttgactcaatgaattgtagaaatataggcttgacttaatttttgtaactgaaaggctttagacttaaaaaaatttattgtgcatcctaaaatctaaaccaattattaatgatcatttattgtaatgagtttgcatttcagctttattcaatgcagtacaaaatagttttctttaagcagtcttttatcaatcaatgctgcactagaaatagattctcaaaagttactaaacattttactttttttgttttttaaaagaaatgcagatgagtgtaaaacatctgttctcaattatgttgatctgtgtgcgcagtactggagcatttacccattcatgttgagcctcaaatgcttgttttctggggtccacaaaagacagttttatacattttgagttgttcataaagtttgtcttgtgatagtcctggcacttaaagacaaatttttctggtagtaaaagttcagatttattactatgtcatgaaacacagtacattcaaatcaaacggcagttttctttctaagtaaatgatttccagtcatctaaaaggtgggcaagatgagataaagacattttgatacagtaattgttttggttgggttttcatgtcagtttatgtttgactaaagctctcttcatatgcaggtttataaatttgttaggtctgttgtcccatgattaaacatggagtgcctcctctctgatttaatattctgcaggtcattgtaacctgctaggcaaagtcacaacattgcattaaagaggtgatagctttgctaatatcactgttttaaaggacgtacagttaaaggaatattaagtgggagaaagcctacaaggcttttagaatattatcagtatcttcatttctggtattcagatgttatgtgataaaacacattttttttggctttcccagatacactatatatttgttcaagggtaaatctataaaatgtatatactttattttgtggttttgctatttataaatttaatgttttaactgttgctcatttatggtttgttttgggtggtggtgttcatctgtatatcaccatgttaatttgtaatggaagtgcacttcgtagtgtatattgttactgacattaaaatactttatagcattgtctctgagcaaaagctagtatttaattgtacaaatgaataagcaagttacatgttattgtttgctcttgacagggtaggcctcttaaaagaaaaaaaacaacttgttttttctttatgaatcccctatgccaaacacataccttccatgcatgacatgagatctgcaaactggattttagccaccgtatttatttagtcaaaaaaattgtccattgtagcagacccgaaaacctttttgctgtgacatgaaaccatgttattcttatcttcttaaaacacagcctgggatggaatggccatggcatttttttcagagaacatcctttatctgctatgactgaatccttaggaaatgtaagctataaccctttgattttcaagaactaccgaataagtgtatgaagaggtggttttttaaaacttcaagttggaatttttatgaggtcactgtgtaatttgaagaattgtgtgagattgtcatgatataaattccttttaaggactgataaatagaatgaaaagtttccaggtagtttaaaactccacaggtcagtttccttttcattcctgcttcactgtggtttataagcctacgggagagcaccgttgctcagatgctactgtgagcttcctgtccggtgttagaaagtaactagttaaaagttcattttagaatgtatggtttttggggatgaactaagaattagttattagttccaaaggactgagaaccaattttaatattttcacatttataggaaagaaattcatatgtccctgaaacttctaggacaaaaccaaacaagtaaggagggaactgttgcaaagccatttcatcgagaaggggacagaaggagaaatacacacatgtatacacaaacagaatggttgagaaaacgttttaataaaatgtgagggttgtatgtgtgcgtgtatatatttacacttaacctctaaaattctcttctacagtatctctgttatgaatatgatggaaaagcaacattttggtggtgagactattgttaaaataaatttgagaaagacgaaaattttgtgagtcttgataattacaagtcaacagctatcgaaagttagcacagcttgtctgtggtgctgtttttttccccactgcagtggacttatgctgttttcatgtttagaaacaaaaaggtttcatgtgattcatgtgtaagatgcacagtatttgacatcctgattatgtaatccctattccatctatccagtcttacacttatggttggcctcaaatctattgcatttatgataatgtattatatctagttgagtttaatatttttttattagcctgtaaataaagatggcatcttctacattaaaatgatattgatctcatttttttaaataaacattttgtttccttgacgttaaaaaaaaaaaaaaa

SEQ ID NO: 4854 - DNA, 2855 bp, Homo Sapiens
  NM_020400
agtccgtgaaggcctctgagggcaatgcttcctcttcactctctccttggcccgtgtggggttgggtgagtgcactgagctgggagggatgggctgagatctgctgaggtgggtgtgtcccctcccgccctgggagcaggtcctaccagcccagcccagcccagcccagcccagagcaggcagcggaagccagcttggggcagcgcagagcaacacggagcacaggtctctgctgctgatgaagctgtgaccaaacgcacccaacccttggcagccatctgtccctgcagccatagcccacattcccatgacctccctctgcttgttttgggaccatgtctgtacagcctctaggccccagccccggaggtgaatgccatgccatgattctggtgtgctccatggcatccccagcctagctcccaatcccactttggcacgatgttagccaacagctcctcaaccaacagttctgttctcccgtgtcctgactaccgacctacccaccgcctgcacttggtggtctacagcttggtgctggctgccgggctccccctcaacgcgctagccctctgggtcttcctgcgcgcgctgcgcgtgcactcggtggtgagcgtgtacatgtgtaacctggcggccagcgacctgctcttcaccctctcgctgcccgttcgtctctcctactacgcactgcaccactggcccttccccgacctcctgtgccagacgacgggcgccatcttccagatgaacatgtacggcagctgcatcttcctgatgctcatcaacgtggaccgctacgccgccatcgtgcacccgctgcgactgcgccacctgcggcggccccgcgtggcgcggctgctctgcctgggcgtgtgggcgctcatcctggtgtttgccgtgcccgccgcccgcgtgcacaggccctcgcgttgccgctaccgggacctcgaggtgcgcctatgcttcgagagcttcagcgacgagctgtggaaaggcaggctgctgcccctcgtgctgctggccgaggcgctgggcttcctgctgcccctggcggcggtggtctactcgtcgggccgagtcttctggacgctggcgcgccccgacgccacgcagagccagcggcggcggaagaccgtgcgcctcctgctggctaacctcgtcatcttcctgctgtgcttcgtgccctacaacagcacgctggcggtctacgggctgctgcggagcaagctggtggcggccagcgtgcctgcccgcgatcgcgtgcgcggggtgctgatggtgatggtgctgctggccggcgccaactgcgtgctggacccgctggtgtactactttagcgccgagggcttccgcaacaccctgcgcggcctgggcactccgcaccgggccaggacctcggccaccaacgggacgcgggcggcgctcgcgcaatccgaaaggtccgccgtcaccaccgacgccaccaggccggatgccgccagtcaggggctgctccgaccctccgactcccactctctgtcttccttcacacagtgtccccaggattccgccctctgaacacacatgccattgcgctgtccgtgcccgactcccaacgcctctcgttctgggaggcttacagggtgtacacacaagaaggtgggctgggcacttggacctttgggtggcaattccagcttagcaacgcagaagagtacaaagtgtggaagccagggcccagggaaggcagtgctgctggaaatggcttctttaaactgtgagcacgcagagcaccccttctccagcggtgggaagtgatgcagagagcccacccgtgcagagggcagaagaggacgaaatgcctttgggtgggcagggcattaaactgctaaaagctggttagatggaacagaaaatgggcattctggatctaaaccgccacaggggcctgagagctgaagagcaccaggtttggtggacaaagctactgagatgcctgttcatctgctgacttctgtctaggctcatggatgccaccccctttcatttcggcctaggcttcccctgctcaccactgaggcctaatacaagagttcctatggacagaactacattctttctcgcatagtgacttgtgacaatttagacttggcatccagcatgggatagttggggcaaggcaaaactaacttagagtttccccctcaacaacatccaagtccaaaccctttttaggttatcctttcttccatcacatccccttttccaggcctcctccattttaggtccttaatattctttctttttctctctctctcgtttctctcttctctctcctctcctctcctctctcttctcctcttctctctctctccctctctctcctttgtccagagtaaggataaaattctttctactaaagcactggttctcaaactttttggtctcagaccccactcttagaaattgaggatctcaaagagctttgcttatattttgttcttttgatacttaccatactagaaattaaagcgaatacatttttaaaataaatacacatgcacacattacattagccatgggagcaataatgtcaccacacacacttcatgaagcctctggaaaactctacagtatacttgtgagagaatgagagtgaaagggacaaataacatctgtgtagcagtattatgaaaatagcttgacctcgtggacttcctcagagggttggtccctggatcacactttgagaaccatacttgtcctgaagtattggagttcatgtctaacttcttcccagggcattatgtacagtgctttttattactgtggggagagggcagtgctaaataaattaatcactactgatagtc

SEQ ID NO: 4855 - DNA, 3158 bp, Homo Sapiens
  NM_020401
gttttagggacagactgcttccgggtcgaagggcttgcttccggagagcgggaaggctaaaacgcggtagctaaactgcagccaactttggttgtgtgtggaaaaggctttagccatggacaggagtggctttggagagatatcatcccctgtaatccgggaggcagaggtgacacggactgcacggaaacagagtgctcagaaaagagttttacttcaggcatctcaagatgaaaattttggtaatactacaccaagaaaccaggttatccctcgaactcctagctcatttcgacagccttttaccccaacaagccgaagcttactaaggcagccagatatttcctgcattcttggaacaggagggaagtcgccccgacttacgcagtcttcagggttctttggaaatctctccatggttactaatctggatgacagtaactgggcagctgcattttcatcacagcgttccgggctgttcacaaacacagagccccacagtataacagaagatgtaactatcagtgctgttatgttacgtgaggatgatcctggagaagctgcatccatgagtatgttttctgatttcctgcagtcttttctgaagcactcttcgagtacagtttttgatcttgtggaagagtatgaaaacatctgtggtagtcaggtgaatatactgagtaaaatagtgagtcgagcaacacctggacttcaaaaattttcaaaaacagccagtatgctctggcttcttcaacaggagatggtcacatggaggctgctggcttctttgtatagagacagaatacagtctgcattagaagaggaaagtgtattcgcagttactgctgttaatgccagtgaaaaaacagttgtggaagcgttatttcagagggattcacttgttcgacaaagtcagctggtggtagattggttagagagtattgccaaagatgaaattggagaattttctgataatattgagttttatgcaaaatcagtatattgggaaaatactctgcataccttaaaacaacggcagctgacttcttacgttggaagtgttcgtccgcttgtcactgaattggaccctgatgctcccataagacagaaaatgccccttgatgatctggatagagaagatgaagttagattactcaaatatctctttactctaatccgtgctggaatgacagaagaggcacaacgactctgtaaacgctgtggtcaagcatggagagctgcaacacttgaaggctggaaactgtaccatgaccctaatgttaatggaggaacagaattagaacctgttgaagggaatccatatagacgcatttggaaaataagttgctggagaatggcagaagatgagctttttaatagatacgagagagcaatttatgcagctttaagtgggaatcttaagcagctgcttcctgtctgtgacacctgggaagacacagtttgggcctacttccgggtgatggtggacagtctggtagaacaggagatccagacatcagtagcaactctggatgaaactgaagaactccctagagaatatctgggagcaaactggacgttagaaaaggtttttgaggaacttcaagctactgacaaaaagagagttctggaagagaatcaagaacattatcatatagttcaaaagtttcttatcctgggagacattgatggtttgatggatgagtttagcaaatggctttccaaaagcagaaacaatctacctggacacctgcttcgctttatgactcaccttattttgtttttccgtactctgggactacagaccaaggaggaagtttctattgaagttttaaagacatacatacagcttttaataagagagaaacatacaaatcttatagcattttatacctgtcatttgcctcaagacctagctgttgcccagtatgcattatttttggaaagtgttacagaatttgaacagcgccaccattgcctggagttggctaaagaagcagatttggatgttgcaacaataacaaaaactgtagttgagaatattcgaaagaaagataatggtgaatttagtcatcatgacctggccccagccctagatactggcactactgaggaggatcgtttaaaaattgatgtaattgactggttggtatttgacccagcgcagagggcagaagcactgaaacaaggcaatgcaattatgagaaaattcttggcatcaaaaaagcacgaagctgcaaaagaagtatttgtgaaaattcctcaggattctatagcagaaatctataatcagtgcgaggaacaaggaatggaaagtccacttcctgctgaagatgataatgctatccgagaacatttgtgcatcagagcttatttggaagcccatgaaacctttaatgagtggtttaagcatatgaattcagttccacaaaaacctgctttgatacctcaaccaacttttactgagaaagtggctcatgaacacaaagaaaagaaatatgaaatggattttggtatttggaaagggcatttggatgccctaactgctgatgtgaaggagaaaatgtataacgtcttgttgtttgttgatggagggtggatggtggatgttagagaggatgccaaagaagaccatgaaagaacacatcaaatggtcttactgagaaagctttgtctgccaatgttgtgttttctgcttcatacgatattgcacagtactggtcagtatcaggaatgcctacagttagcagatatggtatcctctgagcgccacaaactgtacctggtattttctaaggaagagctaaggaagttgctgcagaagctcagagagtcctctctaatgctcctagaccagggacttgacccattagggtatgaaattcagttatagtttaatctttgtaatctcactaattttcatgataaatgaagtttttaataaaatatacttgttattagtaattttttcttttgcattaccatgtaaaatttagacatttgaattttgtacttttcagaatattatcgtgacactttcaacatgtagggatatcagcgtttctctgtgtgcttgttaataaaactatataaaaattaaaattttctgtttttacaaattccaaaaaaaaaaaaaaaaaaaaaaaaaaaaaaaaaaa

SEQ ID NO: 4856 - DNA, 2576 bp, Homo Sapiens
  NM_020404
agtccgggggcatcgcgatgctgctgcgcctgttgctggcctgggcggccgcagggcccacactgggccaggacccctgggctgctgagccccgtgccgcctgcggccccagcagctgctacgctctcttcccacggcgccgcaccttcctggaggcctggcgggcctgccgcgagctggggggcgacctggccactcctcggacccccgaggaggcccagcgtgtggacagcctggtgggtgcgggcccagccagccggctgctgtggatcgggctgcagcggcaggcccggcaatgccagctgcagcgcccactgcgcggcttcacgtggaccacaggggaccaggacacggctttcaccaactgggcccagccagcctctggaggcccctgcccggcccagcgctgtgtggccctggaggcaagtggcgagcaccgctggctggagggctcgtgcacgctggctgtcgacggctacctgtgccagtttggcttcgagggcgcctgcccggcgctgcaagatgaggcgggccaggccggcccagccgtgtataccacgcccttccacctggtctccacagagtttgagtggctgcccttcggctctgtggccgctgtgcagtgccaggctggcaggggagcctctctgctctgcgtgaagcagcctgagggaggtgtgggctggtcacgggctgggcccctgtgcctggggactggctgcagccctgacaacgggggctgcgaacacgaatgtgtggaggaggtggatggtcacgtgtcctgccgctgcactgagggcttccggctggcagcagacgggcgcagttgcgaggacccctgtgcccaggctccgtgcgagcagcagtgtgagcccggtgggccacaaggctacagctgccactgtcgcctgggtttccggccagcggaggatgatccgcaccgctgtgtggacacagatgagtgccagattgccggtgtgtgccagcagatgtgtgtcaactacgttggtggcttcgagtgttattgtagcgagggacatgagctggaggctgatggcatcagctgcagccctgcaggggccatgggtgcccaggcttcccaggacctcggagatgagttgctggatgacggggaggatgaggaagatgaagacgaggcctggaaggccttcaacggtggctggacggagatgcctgggatcctgtggatggagcctacgcagccgcctgactttgccctggcctatagaccgagcttcccagaggacagagagccacagataccctacccggagcccacctggccacccccgctcagtgcccccagggtcccctaccactcctcagtgctctccgtcacccggcctgtggtggtctctgccacgcatcccacactgccttctgcccaccagcctcctgtgatccctgccacacacccagctttgtcccgtgaccaccagatccccgtgatcgcagccaactatccagatctgccttctgcctaccaacccggtattctctctgtctctcattcagcacagcctcctgcccaccagccccctatgatctcaaccaaatatccggagctcttccctgcccaccagtcccccatgtttccagacacccgggtcgctggcacccagaccaccactcatttgcctggaatcccacctaaccatgcccctctggtcaccaccctcggtgcccagctaccccctcaagccccagatgcccttgtcctcagaacccaggccacccagcttcccattatcccaactgcccagccctctctgaccaccacctccaggtcccctgtgtctcctgcccatcaaatctctgtgcctgctgccacccagcccgcagccctccccaccctcctgccctctcagagccccactaaccagacctcacccatcagccctacacatccccattccaaagccccccaaatcccaagggaagatggccccagtcccaagttggccctgtggctgccctcaccagctcccacagcagccccaacagccctgggggaggctggtcttgccgagcacagccagagggatgaccggtggctgctggtggcactcctggtgccaacgtgtgtctttttggtggtcctgcttgcactgggcatcgtgtactgcacccgctgtggcccccatgcacccaacaagcgcatcactgactgctatcgctgggtcatccatgctgggagcaagagcccaacagaacccatgccccccaggggcagcctcacaggggtgcagacctgcagaaccagcgtgtgatggggtgcagacccccctcatggagtatggggcgctggacacatggccggggctgcaccagggacccatgggggctgcccagctggacagatggcttcctgctccccaggcccagccagggtcctctctcaaccactagacttggctctcaggaactctgcttcctggcccagcgctcgtgaccaaggatacaccaaagcccttaagacctcagggggcgggtgctggggtcttctccaataaatggggtgtcaaccttacccaaggaaaaaaaaaaaaaaaaaa

SEQ ID NO: 4857 - DNA, 2364 bp, Homo Sapiens
  NM_020406
ctgctgaaaaagcagaaagagattaccagccacagacgggtcatgagcgcggtattactgctggccctcctggggttcatcctcccactgccaggagtgcaggcgctgctctgccagtttgggacagttcagcatgtgtggaaggtgtccgacctgccccggcaatggacccctaagaacaccagctgcgacagcggcttggggtgccaggacacgttgatgctcattgagagcggaccccaagtgagcctggtgctctccaagggctgcacggaggccaaggaccaggagccccgcgtcactgagcaccggatgggccccggcctctccctgatctcctacaccttcgtgtgccgccaggaggacttctgcaacaacctcgttaactccctcccgctttgggccccacagcccccagcagacccaggatccttgaggtgcccagtctgcttgtctatggaaggctgtctggaggggacaacagaagagatctgccccaaggggaccacacactgttatgatggcctcctcaggctcaggggaggaggcatcttctccaatctgagagtccagggatgcatgccccagccagtttgcaacctgctcaatgggacacaggaaattgggcccgtgggtatgactgagaactgcgatatgaaagattttctgacctgtcatcgggggaccaccattatgacacacggaaacttggctcaagaacccactgattggaccacatcgaataccgagatgtgcgaggtggggcaggtgtgtcaggagacgctgctgctcctagatgtaggactcacatcaaccctggtggggacaaaaggctgcagcactgttggggctcaaaattcccagaagaccaccatccactcagcccctcctggggtgcttgtggcctcctatacccacttctgctcctcggacctgtgcaatagtgccagcagcagcagcgttctgctgaactccctccctcctcaagctgcccctgtcccaggagaccggcagtgtcctacctgtgtgcagccccttggaacctgttcaagtggctccccccgaatgacctgccccaggggcgccactcattgttatgatgggtacattcatctctcaggaggtgggctgtccaccaaaatgagcattcagggctgcgtggcccaaccttccagcttcttgttgaaccacaccagacaaatcgggatcttctctgcgcgtgagaagcgtgatgtgcagcctcctgcctctcagcatgagggaggtggggctgagggcctggagtctctcacttggggggtggggctggcactggccccagcgctgtggtggggagtggtttgcccttcctgctaactctattacccccacgattcttcaccgctgctgaccacccacactcaacctccctctgacctcataacctaatggccttggacaccagattctttcccattctgtccatgaatcatcttccccacacacaatcattcatatctactcacctaacagcaacactggggagagcctggagcatccggacttgccctatgggagaggggacgctggaggagtggctgcatgtatctgataatacagaccctgtcctttctcccagtgctgggatttctccatgtgagggggcagcaggacacccagggatctagcgtgggggaggagaggagcctaatgagaaaatgaccatctaaagcctgcccttcattggtctggttcacgtctccaaaccagcttggatggtagcagagacttcagggtgctccagccaaacgtatttgggcatcaccatgacctgggaggggaagatgcactgagacgtatgaggcttccagcctagcagccagggccctagcacaaacaggaggctcgccccatctgagcaactgcaggagaggttagtacagtcatgcattgcttaacgacagggacgtgtcgttagaaatgtgtcgttaggtgattttatgaccataggaacattgtagcgtgcacttacaccaacccagatggtacagcccaatacacacccaggatggacgctagagtcgactgctcctaggctacaagcctgcagtgcatgttatggtgtgaatactgcaggcaatcttaacaccacggcaagtatttgtgcatctacacacatctaaacatagaaaaggtacagcataaatacactattgtcatctcagcagaccaccgttctatacgcaattcgtcgctgacccaaacgttgctatgtagcatctgcgtatcgtgggataattgacatgagggcttgagagaactccagaaaaaaatgggttagcattttcccagagctgttatcattgggtctctcttaccaccata

SEQ ID NO: 4858 - DNA, 1501 bp, Homo Sapiens
  NM_020408
gcgcccgcccccgaagcggcgcgggacgcctggcgccgtccgcgatccgcagggctgcccgcttaggcttaggcccggcccgctggcaaagccgagccgcagcattttatttcgttcgtggtttccgcacaggctggagtttcgtgggttgggtcgtacttgggacctcggcgaagaggacccgtttatttttttttctttccaaaatggcagcctccagtcgcgcacaagtgttatctctgtaccgggcgatgctgagagagagcaagcgtttcagcgcctacaattacagaacatatgctgtcaggaggataagagatgccttcagagaaaataaaaatgtaaaggatcctgtagaaattcaaaccctagtgaataaagccaagagagaccttggagtaattcgtcgacaggtccacattggccaactgtattcaactgacaagctgatcattgagaatcgagacatgcccaggacctagcaagccggggaccagccaccagtggcggccagggaccaccttcagcatccactctctgtttgagatgggggctcccaaaaccagcttacaatagccttttgcgctgcctgtcctgtgggagctgataaaccaagtcacatttgcattctgttgcaggcttagtgaaaaaggactgctgtctttccttggttcaagtgttagaatggagagctggagttcgttcagaatagtgctgtgtgttaccacgtctcccctgcaccccattcctaccttgtagctcatgaccattgtgtatagcatttctacactttgtttcttggtccttggcaataaaaagaatgatctccctgagcctttgaccccagataaacccctcccaattaatgcattttcatttcctactgatacaaggcctggagagggctgttgggggccctcagggagggttcaactctgagacgagaactgccttggtgaaggcaagttcaagcaccacttgagactgggggcagcatggagtagggcagggctacggggatacacggtgcaccctgcaacttatacctgagcccagtacaacaaaggtgacgggtgtgtaggtacacacccagagatggagcactgcagatcagcaacctcagccccacctgggaatttgctggaaatgcaggctcaagcccctccccacacctggtgaatgagagagccccagcctgacccaagcccagggcgactcccataccctgaagcctggggcatgctgggcagcaccggtgcccaaatctggctggtggacagaagcacctggagagttggagagctttttaaaaagacatctctcagcacttccctctctgcagattctgactcagtaagtgaggggtgaggcacagtcatttttctctattctgaagctctcccactgttttcaatgtttaaccaactggggacccctgctctttaagtatattacaggtaataaagatattgtttgtatgcttttaaaaaaaaaaaaaaaa

SEQ ID NO: 4859 - DNA, 3887 bp, Homo Sapiens
  NM_020410
cccggaagtgagcgcggcgctaggaaagatggcggcagcggcggcggtgggcaacgcggtgccctgcggggcccggccttgcggggtccggcctgacgggcagcccaagcccgggccgcagccgcgcgcgctccttgccgccgggccggcgctcatagcgaacggtgacgagctggtggctgccgtgtggccgtaccggcggttggcgctgttgcggcgcctcacggtgctgccattcgccgggctgctttacccggcctggttgggtgccgcagccgctggctgctggggctggggcagcagttgggtgcagatccccgaagctgcgctgctcgtgcttgccaccatctgcctcgcgcacgcgctcactgtcctctcggggcattggtctgtgcacgcgcattgcgcgctcacctgcaccccggagtacgaccccagcaaagcgacctttgtgaaggtggtgccaacccccaacaatggctccacggagctcgtggccctgcaccgcaatgagggcgaagacgggcttgaggtgctgtccttcgaattccagaagatcaagtattcctacgatgccctggagaagaagcagtttctccccgtggcctttcctgtgggaaacgccttctcatactatcagagcaacagaggcttccaggaagactcagagatccgagcagctgagaagaaatttgggagcaacaaggccgagatggtggtgcctgacttctcggagcttttcaaggagagagccacagcccccttctttgtatttcaggtgttctgtgtggggctctggtgcctggatgagtactggtactacagcgtctttacgctatccatgctggtggcgttcgaggcctcgctggtgcagcagcagatgcggaacatgtcggagatccggaagatgggcaacaagccccacatgatccaggtctaccgaagccgcaagtggaggcccattgccagtgatgagatcgtaccaggggacatcgtctccatcggccgctccccacaggagaacctggtgccatgtgacgtgcttctgctgcgaggccgctgcatcgtagacgaggccatgctcacgggggagtccgtgccacagatgaaggagcccatcgaagacctcagcccagaccgggtgctggacctccaggctgattcccggctgcacgtcatcttcgggggcaccaaggtggtgcagcacatccccccacagaaagccaccacgggcctgaagccggttgacagcgggtgcgtggcctacgtcctgcggaccggattcaacacatcccagggcaagctgctgcgcaccatcctcttcggggtcaagagggtgactgcgaacaacctggagaccttcatcttcatcctcttcctcctggtgtttgccatcgctgcagctgcctatgtatggattgaaggtaccaaggaccccagccggaaccgctacaagctgtttctggagtgcaccctgatcctcacctcggtcgtgcctcctgagctgcccatcgagctgtccctggccgtcaacacctccctcatcgccctggccaagctctacatgtactgcacagagcccttccggatcccctttgctggcaaggtcgaggtgtgctgctttgacaagacggggacgttgaccagtgacagcctggtggtgcgcggtgtggccgggctgagagacgggaaggaggtgaccccagtgtccagcatccctgtagaaacacaccgggccctggcctcgtgccactcgctcatgcagctggacgacggcaccctcgtgggtgaccctctagagaaggccatgctgacggccgtggactggacgctgaccaaagatgagaaagtattcccccgaagtattaaaactcaggggctgaaaattcaccagcgctttcattttgccagtgccctgaagcgaatgtccgtgcttgcctcgtatgagaagctgggctccaccgacctctgctacatcgcggccgtgaagggggcccccgaaactctgcactccatgttctcccagtgcccgcccgactaccaccacatccacaccgagatctcccgggaaggagcccgcgtcctggcgctggggtacaaggagctgggacacctcactcaccagcaggcccgggaggtcaagcgggaggccctggagtgcagcctcaagttcgtcggcttcattgtggtctcctgcccgctcaaggctgactccaaggccgtgatccgggagatccagaatgcgtcccaccgggtggtcatgatcacgggagacaacccgctcactgcatgccacgtggcccaggagctgcacttcattgaaaaggcccacacgctgatcctgcagcctccctccgagaaaggccggcagtgcgagtggcgctccattgacggcagcatcgtgctgcccctggcccggggctccccaaaggcactggccctggagtacgcactgtgcctcacaggcgacggcttggcccacctgcaggccaccgacccccagcagctgctccgcctcatcccccatgtgcaggtgttcgcccgtgtggctcccaagcagaaggagtttgtcatcaccagcctgaaggagctgggctacgtgaccctcatgtgtggggatggcaccaacgacgtgggcgccctgaagcatgctgacgtgggtgtggcgctcttggccaatgcccctgagcgggttgtcgagcggcgacggcggccccgggacagcccaaccctgagcaacagtggcatcagagccacctccaggacagccaagcagcggtcggggctccctccctccgaggagcagccaacctcccagagggaccgcctgagccaggtgctgcgagacctcgaggacgagagtacgcccattgtgaaactgggggatgccagcatcgcagcacccttcacctccaagctctcatccatccagtgcatctgccacgtgatcaagcagggccgctgcacgctggtgaccacgctacagatgttcaagatcctggcgctcaatgccctcatcctggcctacagccagagcgtcctctacctggagggagtcaagttcagtgacttccaggccaccctacaggggctgctgctggccggctgcttcctcttcatctcccgttccaagcccctcaagaccctctcccgagaacggcccctgcccaacatcttcaacctgtacaccatcctcaccgtcatgctccagttctttgtgcacttcctgagccttgtctacctgtaccgtgaggcccaggcccggagccccgagaagcaggagcagttcgtggacttgtacaaggagtttgagccaagcctggtcaacagcaccgtctacatcatggccatggccatgcagatggccaccttcgccatcaattacaaaggcccgcccttcatggagagcctgcccgagaacaagcccctggtgtggagtctggcagtttcactcctggccatcattggcctgctcctcggctcctcgcccgacttcaacagccagtttggcctcgtggacatccctgtggagttcaagctggtcattgcccaggtcctgctcctggacttctgcctggcgctcctggccgaccgcgtcctgcagttcttcctggggaccccgaagctgaaagtgccttcctgagatggcagtgctggtacccactgcccaccctggctgccgctgggcgggaaccccaacagggccccgggagggaaccctgcccccaaccccccacagcaaggctgtacagtctcgcccttggaagactgagctgggacccccacagccatccgctggcttggccagcagaaccagccccaagccagcacctttggtaaataaagcagcatctgagattttaaaaaaaaaaaaaaaaaaaaaaaaa

SEQ ID NO: 4860 - DNA, 2967 bp, Homo Sapiens
  NM_020414
ccggaactgcagttgctgctgcagctgaggtacagcggcggtttctgaggttcttcactcgcgactgacggagctgcggtggcgtctccacacgcaaccatgaagttgaaggacacaaaatcaaggccaaagcagtcaagctgtggcaaatttcagacaaagggaatcaaagttgtgggaaaatggaaggaagtgaagattgacccaaatatgtttgcagatggacagatggatgacttggtgtgctttgaggaattgacagattaccagttggtctcccctgccaagaatccctccagtctcttctcaaaggaagcacccaagagaaaggcacaagctgtttcagaagaagaggaggaggaggagggaaagtctagctcaccaaagaaaaagatcaagttgaagaaaagtaaaaatgtagcaactgaaggaaccagtacccagaaagaatttgaagtgaaagatcctgagctggaggcccagggagatgacatggtttgtgatgatccggaggctggggagatgacatcagaaaacctggtccaaactgctccaaaaaagaagaaaaataaagggaaaaaagggttggagccttctcagagcactgctgccaaggtgcccaaaaaagcgaagacatggattcctgaagttcatgatcagaaagcagatgtgtcagcttggaaggacctgtttgttcccaggccggttctccgagcactcagctttctaggcttctctgcacccacaccaatccaagccctgaccttggcacctgccatccgtgacaaactggacatccttggggctgctgagacaggaagtgggaaaactcttgcctttgccatcccaatgattcatgcggtgttgcagtggcagaagaggaatgctgcccctcctccaagtaacaccgaagcaccacctggagagaccagaactgaggccggagctgagactagatcaccaggcaaggctgaagctgagtctgatgcattgcctgacgatactgtaattgagagtgaagcactgcccagtgatattgcagccgaggccagagccaagactggaggcactgtctcagaccaggcgttgctctttggtgacgatgatgctggtgaagggccttcttccctgatcagggagaaacctgttcccaaacagaatgagaatgaggaggaaaatcttgataaagagcagactggaaatctaaaacaggagttggatgacaaaagcgccacctgtaaggcatatccaaagcgtcctctgcttggactggttctgactcccactcgagagctggccgtccaggtcaaacagcacattgatgctgtggccaggtttacaggaattaaaactgctattttggttggtggaatgtccacgcagaaacagcagaggatgctgaaccgtcgtcctgagattgtggttgctactccaggccggctgtgggaattaattaaagaaaagcattatcatttgaggaaccttcggcagctcaggtgcctggtagtggatgaggctgaccggatggttgagaaaggccattttgctgagctctcacagctgctagagatgctcaatgactcccaatacaacccaaagagacaaacgcttgttttttctgccacactcaccctggtgcatcaggctcctgctcgaatccttcataagaagcacaccaagaaaatggataaaacagccaaacttgacctccttatgcagaaaattggcatgaggggcaagcccaaggtcattgacctcacaaggaatgaggccacggtggagacgctaacagagaccaagatccattgtgagactgatgagaaagacttctacttgtactacttcctgatgcagtatccaggccgcagcttagtgtttgccaacagtatctcctgcatcaaacgcctctctgggctcctcaaagtccttgatatcatgcccttgaccctgcatgcctgtatgcaccagaagcagaggctcagaaacctggagcagtttgcccgtctggaagactgtgttctcttggcaacagatgtggcagctcggggtctggatattcctaaagtccagcatgtcatccattaccaggtcccacgtacctcggagatttatgtccaccgaagtggtcgaactgctcgagctaccaatgaaggcctcagtctgatgctcattgggcctgaggatgtgatcaactttaagaagatttacaaaacgctcaagaaagatgaggatatcccactgttccccgtgcagacaaaatacatggatgtggtcaaggagcgaatccgtttagctcgacagattgagaaatctgagtatcggaacttccaggcttgcctgcacaactcttggattgagcaggcagcagctgccctggagattgagctggaagaagacatgtataagggaggaaaagctgaccagcaagaagaacgtcggagacaaaagcagatgaaggttctgaagaaggagctgcgccacctgctgtcccagccactgtttacggagagccagaaaaccaagtatcccactcagtctggcaagccgcccctgcttgtgtctgccccaagtaagagcgagtctgctttgagctgtctctccaagcagaagaagaagaagacaaagaagccgaaggagccacagccggaacagccacagccaagtacaagtgcaaattaactggtcaagtgtgtcagtgactgcacattggtttctgttctctggctatttgcaaaacctctcccacccttgtgtttcactccaccaccaaccccaggtaaaaaagtctccctctcttccactcacacccatagcgggagagacctcatgcagatttgcattgttttggagtaagaattcaatgcagcagcttaatttttctgtattgcagtgtttataggcttcttgtgtgttaaacttgatttcataaattaaaaacaatggtcagaaaaaaaaaaaaaaaaaaaa

SEQ ID NO: 4861 - DNA, 478 bp, Homo Sapiens
  NM_020415
gtgtgccggatttggttagctgagcccaccgagaggcgcctgcaggatgaaagctctctgtctcctcctcctccctgtcctggggctgttggtgtctagcaagaccctgtgctccatggaagaagccatcaatgagaggatccaggaggtcgccggctccctaatatttagggcaataagcagcattggcctggagtgccagagcgtcacctccaggggggacctggctacttgcccccgaggcttcgccgtcaccggctgcacttgtggctccgcctgtggctcgtgggatgtgcgcgccgagaccacatgtcactgccagtgcgcgggcatggactggaccggagcgcgctgctgtcgtgtgcagccctgaggtcgcgcgcagcgcgtgcacagcgcgggcggaggcggctccaggtccggaggggttgcgggggagctggaaataaacctggagatgatgatgatgatgatgatg

SEQ ID NO: 4862 - DNA, 2249 bp, Homo Sapiens
  NM_020421
aggtggctgtccccgcacggttcccagctaattccccgctaccgggttgcggccggaagccgggcgccgcggctctgcttccctcggggatctggcgacatggccagaaaggctctcaagcttgcttcgtggaccagcatggctcttgctgcctctggcatctacttctacagtaacaagtacttggaccctaatgactttggcgctgtcagggtgggcagagcagttgctacgacggctgtcatcagttacgactacctcacttccctgaagagtgtcccttatggctcagaggagtacttgcagctgagatctaaggtgcaccttcgctctgccaggcgtctctgtgagctctgctgtgccaaccggggcaccttcatcaaggtgggccagcacctgggggctctggactacctgttgccagaggagtacaccagcacgctgaaggtactgcacagccaggctccacagagcagcatgcaagagatccgccaggtcatccgagaagatctgggcaaggagatccatgatttgttccagagcttcgatgacacccctctggggacggcctccctggcccaggtccacaaggcagtgctgcatgatgggcggacggtggccgtgaaggtccagcacccaaaggtgcgggctcagagctcgaaggacattctcctgatggaggtgctcgttctggctgtgaagcagctgttcccagagtttgagtttatgtggcttgtggatgaagccaagaagaacctgcctttggagctggatttcctcaatgaagggaggaatgctgagaaggtgtcccagatgctcaggcattttgacttcttgaaggtcccccgaatccactgggacctgtccacggagcgggtcctcctgatggagtttgtggatggcgggcaggtcaatgacagagactacatggagaggaacaagatcgacgtcaatgagatctcacgccacctgggcaagatgtatagtgagatgatcttcgtcaatggcttcgtgcactgcgatccccaccccggcaatgtactggtgcggaagcaccccggcacgggaaaggcggagattgtcctgttggaccatgggctttaccagatgctcacggaagaattccgcctgaattactgccacctctggcagtctctgatctggactgacatgaagagagtgaaggagtacagccagcgactgggagccggggatctctaccccttgtttgcctgcatgctgacggcgcgatcgtgggactcggtcaacagaggcatcagccaagctcccgtcactgccactgaggacttagagattcgcaacaacgcggccaactacctcccccagatcagccatctcctcaaccacgtgccgcgccagatgctgctcatcttgaagaccaacgacctgctgcgtggcattgaggccgccctgggcacccgcgccagcgccagctcctttctcaacatgtcacgttgctgcatcagagcgctagctgagcacaagaagaagaatacctgttcattcttcagaaggacccagatctctttcagcgaggccttcaacttatggcagatcaacctccatgagctcatcctgcgtgtgaaggggttgaagctggctgaccgggtcttggccctaatatgctggctgttccctgctccactctgagtggaattgctctccctgccccattctggtgtctttccactcctcagcccctcatcttgcctccacccagctgctccatttttgccacatcgtggcccgcagccccagagtcactgtccatgtcaccatccttctcctcctttggaatcctctccgcacactgtggcccttgtctcagggcccacaagctgaactgtggcatagctctctcttcttctccaagaagactcagcagcctacattcccattcctggtatgtgccattgggttggatgtccccactacttccgttaacccttcccattgtcaagatgtgccacgggtgccactgggggcacactgaacttgtagggagtgtgattttgttggaggtgcacatggtctctgaatttgacagagaacaccttccctttccttgccatgtcaccctccagaggaagtcacacctcagcgaggtggtttggcatctggggccaactccattacagctatgagctcactgctgtcagtgacgtttggtgttttctgtactgtgtttcaataaaaactccttcaaggttgcaaaaaaaaaaaaaaaa

SEQ ID NO: 4863 - DNA, 1589 bp, Homo Sapiens
  NM_020424
tttctggaaacgacggcggcccggcgggtccaaaccacctaccatccccgctcgcgtttccaggctccctacccccgccgccgccgcctcttcttccaccactgccaccgcctcctcttcatctgcggcccaccggcggcggccgccccgaagccccgccccctccatcgcctcctgcatcatcacttccggtaaccccgccggccgccagctccaggagggagaatgggagaggggcaaggagggaacgagtggaagattgcgtcacgacgcacataaagacgtacgaagccgtcgccaaatgacaacggcaacacgacaagaagtccttggcctctaccgcagcattttcaggcttgcgaggaaatggcaggcgacatcagggcagatggaagacaccatcaaagaaaaacagtacatactaaatgaagccagaacgctgttccggaaaaacaaaaatctcacggacacagacctaattaaacagtgtatagatgaatgcacagccaggattgaaattggactgcattacaagattccttacccaaggccaattcatctgcctccaatgggccttaccccactccgaggccggggacttcgaagccaagagaaactgaggaaactttccaaaccagtatatctcagatctcatgatgaagtttcctaatctagaggaaagtttatttctgcaaatgatgagccaactagttattgaatgtaaaccagatggcaaaacacttcttgattaggggcaaaaattcaaatgtcttcttaaaacctccacaattgattctccccctgtgatgtaaacttagatatccctagagtttctcagcatctttcttcctgagtggatggcattatccctagaggtcatggaccttacatcctcactgcagtcacctttggaaacaagaccgaggcctgtagaaggaaagcggaaggatgtaagagctgttcatgggaattccattcaccacacatgccagctgatgcaaagaaatttgccagtcactggaagttactgtggctactataaaactatgtaccactctcagaatattcttaggctttttttttttcaagttatagatttgcttaaagtgaggttttttggtgtgtgcttttttgttgtcttttgacccttccagtttccagacaaacttgtcttaaaaagtgcatcattggattgaccatggtttttcatgaaattttatgagatttctgccttaacaaaatgcatatattccttatcttaaagcctgtcattacttaggatgcacttataggatctgaaaagctcactttaaactcatactacattcgttacgagtattttacgttaacataattgaaaagtacaaggtccaagctggctttcaaattatgtctaaacagaaatgggacaaatagacttgaaaatagaagggatttattccacccctgcaagggtagagtcaggtgagagtcccttggtgagtcatttgtacatcagtgtcatttcttcttaacctctgaagaagatgggcatcagaaataaagacaaagcactatcaaaaaaaaaaaaaaaaaaaaaaaaaaaaaaa

SEQ ID NO: 4864 - DNA, 2259 bp, Homo Sapiens
  NM_020435
ggggaacaatggggcccttgagggcccctcctccagcccccattgtgcttggtggtgagaggtggccctggctcggccacacaccctcggggaggaccagcatccaagcaggtggaagggctctgagggagactggaattttctggcctggagaaggacccgcccgcccgcccctatgaccaacatgagctggagcttcctgacgcggctgctggaggagatccacaaccactccaccttcgtgggcaaggtgtggctcacggtgctggtggtcttccgcatcgtgctgacggctgtgggcggcgaggccatctactcggacgagcaggccaagttcacttgcaacacgcggcagccaggctgcgacaacgtctgctatgacgccttcgcgcccctgtcgcacgtgcgcttctgggtcttccagattgtggtcatctccacgccctcggtcatgtacctgggctacgccgtgcaccgcctggcccgtgcgtctgagcaggagcggcgccgcgccctccgccgccgcccggggccacgccgcgcgccccgagcgcacctgccgcccccgcacgccggctggcctgagcccgccgacctgggcgaggaggagcccatgctgggcctgggcgaggaggaggaggaggaggagacgggggcagccgagggcgccggcgaggaagcggaggaggcaggcgcggaggaggcgtgcactaaggcggtcggcgctgacggcaaggcggcagggaccccgggcccgaccgggcaacacgatgggcggaggcgcatccagcgggagggcctgatgcgcgtgtacgtggcccagctggtggccagggcagctttcgaggtggccttcctggtgggccagtacctgctgtacggcttcgaggtgcgaccgttctttccctgcagccgccagccctgcccgcacgtggtggactgcttcgtgtcgcgccctactgaaaagacggtcttcctgctggttatgtacgtggtcagctgcctgtgcctgctgctcaacctctgtgagatggcccacctgggcttgggcagcgcgcaggacgcggtgcgcggccgccgcggccccccggcctccgcccccgcccccgcgccgcggcccccgccctgcgccttccctgcggcggccgctggcttggcctgcccgcccgactacagcctggtggtgcgggcggccgagcgcgctcgggcgcatgaccagaacctggcaaacctggccctgcaggcgctgcgcgacggggcagcggctggggaccgcgaccgggacagttcgccgtgcgtcggcctccctgcggcctcccgggggccccccagagcaggcgcccccgcgtcccggacgggcagtgctacctctgcgggcactgtcggggagcagggccggcccggcacccacgagcggccaggagccaagcccagggctggctccgagaagggcagtgccagcagcagggacgggaagaccaccgtgtggatctgagggcgctggcttgcgagctgggccagggaggaggagggttggggggctccggtggaaacctgcgaccccttctcctcagccttctccttagccggtggcctcaggcagactctgcccagaggggcagccaggctgctcagggaaggggctgaaagcggcagaggagtgccctggcttggtcaccactggggccaaggtggggtggagagaggcctaggagccagaaagggccctctgctgtggtctgaaccccagggggagtggggcattgactccacccctgtcctgagctggaataggtcctctgggatgccagctctcccctttgtgcttccctgcagcaacccatggagggcccagggtgcctggtatgggcatcagttggtgggggtgcgggggtgcgtgtccccattccctgcaacagcaaatggggctccttcttcagccctccccttcccagccccaaactgagacagactgggagctgggagcctggggtggacaggaccataccctctttgagcttctgcgatgccggccttccgttcctctgggaggcttgaagttctgcaaagatgttgatatgccttgcagcttggacccaatgggtggtggtcagggcctgggggcttggccatgctgggggaatggggctctgggttcctgcctgtggcctgtctgtcctcctccctaattcagacccagcctcaagaggaaagggagtaaaataaaactaacttgtttataaaaaaaaaaaaaaaaaa

SEQ ID NO: 4865 - DNA, 2225 bp, Homo Sapiens
  NM_020438
gctcgaagaagcccggtctccgggtaagatggcagcggacggacagtgctcgctccccgcttcatggcggccggtgaccctcacccacgtcgaatatcctgcaggtgatctctctggccacctccttgcctacctgagcctcagccctgtatttgtcatcgtcggtttcgtgaccctcatcatatttaagcgggagctgcacacgatctccttccttgggggcctggcactgaacgagggggtcaactggctgatcaaaaacgtcatccaggagccacggccctgtggaggcccccacacagcagtgggcaccaagtacgggatgccctccagccattcccagtttatgtggttcttctccgtctattccttccttttcctgtatttaagaatgcaccaaacaaacaacgccaggttcctggacttgctgtggaggcacgtgctctccctgggactcctcgctgtggccttcctagtctcctacagcagggtctacctgctgtaccacacctggagccaggtgctctatggaggcatcgctggaggcctcatggccatcgcctggttcatcttcacccaggaggtcctcaccccgctgttccccaggatagcagcctggcctgtctccgagttcttcctaatccgagacacaagcctcattcccaacgtactctggtttgagtacacggtaacccgggcagaagccaggaacagacaacgcaagctggggacgaaactgcagtgaccagtgggtgtggctgggtccagcctccagatctggcccgcacgatgccttgcaggatggacaggatgacagacagggacgaagcagagacctctacagacccaagtcaccaagtggagcctttttttttcttattttaattttaatgaacaaggtggaccaaagggctgaaccagcccctcaaccaggaccctggggggcctgctgcctgggggccgtggccagagaccctcgctgtgctgctgccagcccctggctgggcagaaagtgccctcggcatgggcacctgggtgtggggtggaggaggagggctcgcgcctctggtctcggggccaggaattccaggtggcgtgagaagtacacactatttattttttggttttgtcagaggcaggcaggattttggagctggaagaatctgctctccggtggctgccctgtgaacagagggctcccggtcagcttcccaggcccttcgccctatgcccagagggcagactgcctctccctgggccggggtggcctgggtgccaggaggaggggagcataccccacaccctccctgccaccgttgccgttccagaacctcggtcagtgtttccctgtctgggggcagggcccagagcgagcacgcgtctggcggctgctgtcgttgtgttctaccccgtactgacccaacaccacaagggctttctctggtcccctgtccctaagacaataatcgctttctgacaaaggagcctgcacatttgggtgagcagacccaagctgtttacagctctttcttgtcctgccatccagtagcagttagtcttcatccccacgtgaacaaaatgggaaggagccgtgaggagaggagtgaggcaacaggcacccgaagtccctcgtccttccctctgtgtgctctgaatatgtccttgtccttcctgacccatctctgaccagctgggaacctgcttggggtccccctcaaacctgtgtctggggtgtgggctcacagatccctatcagcctggttcgtgggagggctcttcctaaagggacccccatctctaagtcactctgaaagggagttgtggagaggagacgcctccagactctcagaagttttgaggactgaactgggtcactcgggatctgtgttcgaatcctccccacccctttctttgtggagtttcctaacctgctgctgaagcacaatgttttggtgctttcttttctcatttgttaaaggcagtgtccaaaagccattccagatgccaagaccaggggcttatttctagggaaggtaggtcggtttccatgtttccctcccgttatttttattttttactttttgcctgagacaagccgagtatgaggtggtttgatttaagaaaaatcaatgaaattgtttactactgttttaaaataaaaccgtaaactctggcaaaaaaaaaaaaaaaaaaaaaaaaaaaaaaaaaaaaaaaaaaaaaaaaaa

SEQ ID NO: 4866 - DNA, 1927 bp, Homo Sapiens
  NM_020441
ctccgggtccctctgtcacttcctgaatcctgcttcctgcttcccagaggccgggatccggagccgcccgaagccggtgccgcagccccctgcgcccccggtgcccccgacatgtccttccgcaaagtggtccggcagagcaaattccggcatgtgttcgggcagccggtcaagaacgaccagtgctatgaggacattcgcgtgtcccgtgttacctgggacagcaccttctgcgccgtcaaccccaagttcctggcggtgattgtggaggccagtggagggggtgcctttctggtgctccccctaagcaagacgggccgcattgacaaggcctacccgacggtgtgtgggcacacgggacctgtcctggacatcgactggtgtcctcacaacgacgaagtcatagccagcggctcggaggactgcacggtcatggtgtggcagatcccagagaacgggctgacctccccgctgacagagccggtggtggtactggaggggcacaccaagcgagtgggcatcatcgcctggcaccccacggcccgaaacgtgctgctcagtgcaggctgcgacaacgtggtactcatctggaatgtgggcacagcggaggagctgtaccgcctggacagcctgcaccctgacctcatctacaatgtcagctggaaccacaatggcagcctgttttgctcagcatgcaaggacaagagcgtgcgcatcatcgacccccgtcggggcaccctggtggcagagcgggagaaggctcatgagggggcccggcccatgcgggccatcttcctggcagatggcaaggtgttcaccacaggcttcagccgaatgagcgagcggcagctggcgctctgggacccagaaaacctcgaggaacccatggccctgcaggaactggactcgagcaacggggccctgctgcccttctacgaccccgacaccagtgtggtctacgtctgcggcaagggtgactccagcatccggtactttgagatcacagaggagcctccctacatccacttcctgaacacgttcaccagcaaggagccgcagcggggtatgggcagcatgcccaagcggggcctggaggtcagcaagtgcgagatcgcccggttctacaaactgcatgagcgcaagtgtgagcccatcgtcatgactgtgccaagaaagtcggacctcttccaggatgatctgtaccccgacacagccgggcccgaggcagccctggaggctgaggagtgggtgagcgggcgggatgccgacccgatcctcatctcactgcgggaggcctacgtgcccagcaagcagcgggacctgaagatcagccggcgcaacgtgttgtctgacagccggcccgccatggccccgggctcctcccacctaggggcccccgcctccaccaccactgctgctgatgccacccccagcggcagcctggccagagccggggaggctgggaagctggaggaggtgatgcaggagctgcgggccctgagggcgctggtcaaggagcagggcgaccgcatctgccgcctggaggagcagctgggccgcatggagaacggggatgcgtagggccacagccacacgccaccttcatctcctccgccgcccccttcccactcagcttctgccagcgggtcgcaccgggctagctggctgcccagagcctctgaggcagcgcaggggtcagttcccacccccacccgtcccaggcccaggccgaagccagcgcccagctttcctcactgttcctgtggaggatgtctacgcccaggcgagctcctcgacctctgagggaccatctccccgaccactgcccagccctctgctccctccccagaggaggcgggagggtgggctctatattttcattccaaataaaattctctttctaaaagccaaaaaaaaaaaaaaaaaa

SEQ ID NO: 4867 - DNA, 3625 bp, Homo Sapiens
  NM_020442
gccagctgctgcgcatgcgccggccggggccccgcccccatgcgccgcgcggctccagggccacgttccagggtcgggtttggtggattcctcagtccctgccgccgcggggcgccctgggatagcggcggggcctcctgatctcggcccctttccaaacactcctgatgcctcatttgcctctcgcctcttttcgaccaccattttgggggctgaggcactcacggggcctccccaggtttcactccgtttctacacagtcggagccccatggatctcccatctcccggaggaaccgtgaagccaaacagaagcgcctgcgagagaagcaggcgactctggaggctgagatagcaggggagagcaagtcacctgcagaatccattaaggcctggaggcctaaggagttagtattgtatgaaatccctacgaaacccggtgaaaagaaagatgtctctgggcccctgcctcctgcatacagcccccgatatgttgaggctgcctggtacccgtggtgggtacgagagggcttcttcaaaccagaatatcaggcccggctgccccaagctacaggggagaccttttccatgtgtatcccacctcccaatgtcactggctccctgcacattggccacgcactcacggtggccatacaggatgccctcgtgcgctggcaccggatgcgtggggatcaagtgctgtgggtccctggttcagatcatgcaggaattgctacacaagctgtggtggagaaacaactgtggaaggaacggggagtgaggagacatgagctgagccgggaggccttccttagggaggtgtggcagtggaaggaggcgaaaggtggagagatctgtgagcagctgcgagctctgggtgcctccctggactgggatcgagagtgttttaccatggatgttggctcctcagtggctgtgactgaagcttttgtgcggctctacaaggcggggttgctgtaccggaaccatcagcttgtcaactggtcatgtgctttaagatcagccatctcggacattgaggtggagaaccggcccctgcctggccacacacagcttcgactgcctggctgccccacccccgtgtcttttggcctcctattttctgttgccttccccgtggatggagagcctgatgcagaggttgtggtaggaaccacaaggccagagacgctgcctggagatgtggctgtggccgttcatccagacgactcgcgatacacacatctacacgggcgacagcttcgtcaccccttgatggggcagcctcttcccctcatcacagactatgctgttcagccacatgtgggcacgggggcagtgaaggtgactccagctcacagtcctgccgatgctgagatgggggcccgacatggcttgagccccttgaatgtcattgcggaggatgggaccatgacctccctctgcggggactggctgcagggtcttcaccggtttgtggcccgggaaaagataatgtctgtgctgagtgaatggggcctgttccggggcctccagaaccaccccatggtactgcccatctgcagccgttctggggatgtgatagaatacctgctgaagaaccagtggtttgtccgctgccaggaaatgggggcccgagctgccaaggctgtggagtcgggggccctggagctcagtccctccttccaccagaagaactggcagcactggttttcccatattggggactggtgtgtctcccggcagctgtggtggggccatcagattccagcctacctggttgtagaggaccatgcgcagggagaagaggactgttgggtggttgggcggtcagaggctgaggccagagaggtagcagcggaactgacagggaggccaggggcagagctgaccctggagagggatcctgatgtcctagacacatggttttcttctgccctgttccccttttctgccctgggctggccccaagagaccccagaccttgctcgtttctaccccctgtcacttttggaaacgggcagcgaccttctgctgttctgggtgggccgcatggtcatgttggggacccagctcacagggcagctgcccttcagcaaggtgcttcttcatcccatggttcgggacaggcagggccggaagatgagcaagtccctggggaatgtgctggacccaagagacatcatcagtggggtggagatgcaggtgctgcaggaaaagctgagaagcggaaatttggaccctgcagagctggccattgtggctgcagcacagaaaaaggactttcctcacgggatccctgagtgtgggacagatgccctgagattcacactctgctcccatggagttcaggcgggcgacttgcacctgtcagtctctgaggtccagagctgccgacatttctgcaacaagatctggaatgctcttcgctttatcctcaatgctttaggggagaaatttgtgccacagcctgctgaggagctgtctccctcctccccgatggatgcctggatcctgagccgccttgccctggctgcccaggagtgtgagcggggcttcctcacccgagagctctcgctcgtcactcatgccctgcaccacttctggcttcacaacctctgtgacgtctacctggaggctgtgaagcccgtgctgtggcactcgccccgccccctggggccccctcaggtcctgttctcctgcgctgacctcggcctccgcctcctggccccactgatgcccttcctggctgaagagctctggcagaggctgccccccaggcctggttgcccccctgcccccagcatctcggttgccccctaccccagcgcctgcagcttggagcactggcgccagccagagctggagcggcgcttctcccgggtccaagaggtcgtgcaggtgctaagggctctccgagccacgtaccagctcaccaaagcccggccccgagtgctgctgcagagctcagagcctggggaccagggcctcttcgaggccttcttggagcccctgggcaccctgggctactgtggggctgtgggcctgttacccccaggcgcagcagctccctccggctgggcccaggctccactcagtgacacggctcaagtctacatggagctgcagggcctggtggacccgcagatccagctacctctgttagccgcccgaaggtacaagttgcagaagcagcttgacagcctcacagccaggaccccatcagaaggggaggcagggactcagaggcaacaaaagctttcttccctccagctggaattgtcaaaactggacaaggcagcctctcacctccggcagctgatggatgagcctccagccccagggagcccggagctctaactcatcatccccatcagttttcctccctctcagacctgtctttgaggacaaacagatttgtcagctgtcagggtgcagtgggacgtcagagactatgtggtccatcgccttcattgtgtaaatgaggacacagactggcttggtcgcagtgactgtggtgtccttgagatgctcacattactgcccggcctgcctcccacctggaagtctgggaatgaggagattgagataaacttttgaaatcccaaaaaaaaaaaaaaaaaaaa

SEQ ID NO: 4868 - DNA, 5426 bp, Homo Sapiens
  NM_020448
aaatcgcgacctttgaaagcaaaacactgcagcatcttggcagctctgaattgggaagggatgaaggaggctgtgcctccgggttgcacgaagagtccgagtcatttctcagaaggttttgataggtgggccttagaggagacgccgccgagcaccgcaagaactggaaaacacacccctctctgtctgcctgggagagccacggaaattggcacttctctgagtgaagctgaggagaaggctgtaaatctgccaaaacagccttgaagtattcttttgtcatgaggaagtgacggctgctggagggaggtgaacaccacaaggagagatggcatctggcctgggccccgcctagcagcagctccacctcctaggccaggccctgtgggatgcgccactagaccaccatggacggatcccacagcgcagccctgaagctgcagcagctgcctcccacaagtagctccagcgccgtaagcgaggcctccttctcctacaaggaaaacctgattggcgccctcttggcgatcttcgggcacctcgtggtcagcattgcacttaacctccagaagtactgccacatccgcctggcaggctccaaggatccccgggcctatttcaagaccaagacatggtggctgggcctgttcctgatgcttctgggcgagctgggtgtgttcgcctcctacgccttcgcgccgctgtcactcatcgtgcccctcagcgcagtttctgtgatagctagtgccatcataggaatcatattcatcaaggaaaagtggaaaccgaaagactttctgaggcgctacgtcttgtcctttgttggctgcggtttggctgtcgtgggtacctacctgctggtgacattcgcacccaacagtcacgagaagatgacaggcgagaatgtcaccaggcacctcgtgagctggcctttccttttgtacatgctggtggagatcattctgttctgcttgctgctctacttctacaaggagaagaacgccaacaacattgtcgtgattcttctcttggtggcgttacttggctccatgacagtggtgacagtcaaggccgtggctgggatgcttgtcttgtccattcaagggaacctgcagcttgactaccccatcttctacgtgatgttcgtgtgcatggtggcaaccgccgtctatcaggctgcgtttttgagtcaagcctcacagatgtacgactcctctttgattgccagtgtgggctacattctgtccacaaccattgctatcacagcaggtgcaatattttacctggacttcatcggggaggacgtgctgcacatctgcatgtttgcactggggtgcctcattgcattcttgggcgtcttcttaatcacgcgtaacaggaagaagcccattccatttgagccctatatttccatggatgccatgccaggtatgcagaacatgcacgataaagggatgactgtccagcctgaacttaaagcttctttttcctatggggctctggaaaacaatgacaacatttctgagatctacgctcctgccaccctgccagtcatgcaagaagagcacggctccagaagtgcctctggggtcccctaccgagtcctagagcacaccaagaaggaatgagactcgcctccctctatttataactgtcccctccaggctgacagtggttcaaccctgaatcctaaaacttgcctttcaagtctcattttgtttctaactgagaactctatggatgatgatctcaaaaagcctttgtctctgggaaaggatgcgttatcttggtcttggaaatttcaaatgatgagggttgggggatggaagcattattccaggtggacgggatagaatccagcctctgcctggattagcccagggggatttggaaagcctttctaccatccttgaggatggtaactgagcttcctctgacagtgaccaaaggatgctgtatccttcagagctaaggcaagacagagagtctgctgttaattctcaaatccagcgaaaggctggacatctctaaatctcgtcttcctccacctcatgtgcatgcctgatctcaccctgacactcctgatgccgcatctgtgatagcactcgtgttgccttcacatggcaggctgggccaaccctgggtggaaggttctgacatttgtgttttcagaaatgtacatctgccttccagtcatctgtgcccttctagggaagatgtgcttgatatgttcaaattggatctactctgaaaacgaaacttggttttggtcctgtgaggactacttgtttgtccacctcctccaccaaaggaattaggaagttaagagaaggggaagaatatggaggataggagagggtgatgatgctttagcccattaaggaagaaaagttccccttactcttacaaaaggtgattgcaccacttaaaaaaggataggtagaaaatctggccattttatgtgttatttttttcctgcataccagtgccccctggaaagatggggatgctcatttcagagacagcctcttcacctgtcctccgtctctccattacagagccacaagccaagcttgagttactggttaatttccttgaagtcaatagagactctctgggtcctcatccccatgcatatatgtctgggagaagcaagcattctccaaaacagggctgttgctttcttcctggccgcatatgtgactgtcttcccctagactgatggtatacttttgagaggggcggataaaggtttgcaaactttaatgggcataaggatcccctagaagcatatgtaaaatgcagattcctgcaccccaactgcagacactgttaagtgggactggagtggggcccacgggtctgcattcttaactggtaccaccagtgattctgatgcgatgcttcaatcccgagatttcacatctggaaagcctaagaatttacaaagatgttctgctaaaacccccagggccccatgcagtcttgctagaaaatttcctccctagggttcctttggaaggttaaatactccccataggatctgtggcatttctccatccaatgaatactacttagagctacactcaccacttccctagacagcctttaataggcatgataacagtgttaatagaccagtgtgatagatcacttatctttatggattgtgcttaatactgatttagtatcttgactccaaaaactgacatctgttgtctgtgataaccacttctgtattgcgtcttaaccacttctgtattgtgtggtcttaactgcctaaggcggcaatgggcagtgggcccctttcccttaggatgggtatcaattcaacaatatttataaggcatttactgtgtgctaagcatttggaagacccaggctacaaaataagacatagttcctgccctccaggccagcagagggaggcacaaatacccaggaatctctgatgggtgtgaagtgcggtcgtgggccacagaaaatgaccgtcatggagaccctgctaaaggtcggaccctgagcccaaaggggtattcagaagtggagatgattttggccccactcatagatgggtggcaaatctaagatttgtataaagcatataaaatagggtgatcacccccgaggcagaggggccagcatttgcaaaggcacagagctaagaggagctgggcaaagaaaggaaagccagggaaggtggtgggagatgagtctcaaagctaagtagtggaagctgggcacagtggctcatgcctgcaatcccagcactttgggaggccaaggctggaggatcacttgagcccaggagttttatatcagcctgggcaacatagcaagacctcatctctgctaaaaattaaaaataaataaattagctgggtgtggtggtgcatgcctgtgatcctagctactcaggaggctgaggtgggaggatcgctagagcccagagagccaaggctacagtgagccatgatcatgctactgcactccagcctgggtgacaatgagaccatggctcaaaaaaaaaaaaaaaaaaaagataagcagtggaggccgaatcatggagggtcttgaatacctggctaaggagtttaaagtgtatccaagaggacgtgggagccactgatggttcatgaggaagagaagggcaggaccagcactgattgaaaaggagggcttgttcagtgtggaggaagaatcagaagggggaataagttaccttctccgagcctgcaagaacaaaaaacaaaaagcagaaattaaaatcaggtttcactgctatttatatatttctcctttcccaaatgatttttctaaagctgggagtggaggcaggagggagaaacagaaggtgagcagggaggctatttagatgtgtcaaacccgggtgatcattaataatttgggcatatatatgctcccaaacttactctgcccccttccttcccttttttttttttttttttggtatgggccttttaggcttgggccagccagctttcttgagatgagtgaataaaagcgtattgtaatttcatgtctgcttcagatcatggggacagtgccacccaggaactgctgctgaggcctgggaagctcccttgccttcgggtttggagcagtggcatcatcccaccaacctgagccatgaaagggctgagcagaaagttaaatggtagtttcctgactggaagccacacgtaggtcacttgagtagtcaggaagcacagtgggtgtggagccatcatctgtcttgggctggttcctcccaatctttgtccagtggtataaatggactgtctgctgatggccatacgcagcactggctgttaagatggggaaggggtacatcaggattccactcatagccctggttcgttattgttactcatggctctgacgtccccaagccctcttgaatgttgcaagcaatgttaaatatcacacctcggtctccttttgagcagcccaggtacctaaagcaaggtcaccaaacttgggtttaaacttcagttgccatcacagcagggttcaggttatgcagtttttgcagtgtggagttgaacgctgggtaaagaagggagagctgactctccattgcttttctagtggaaaccagccagtttgacggcacggtgcggatacaggactccatcaggctagtgttggggaaccagcccggcagccttccatgtgaattccaaagctgtttcaacactggctgataggcagacaaaaggttacttgtgtgtttctctgagaagcggtgtaaatgaagtcaccttagaatatattctgtgcggatgcttatattttgttaacttcacgacttatggcatgtcttatttaaaaaaaaaaaagtactaggtgcaaataacattatgaagtggtatttaattaaaaatccatgcagtgacagctga

SEQ ID NO: 4869 - DNA, 5618 bp, Homo Sapiens
  NM_020449
acatccgggcttctgctactagtgagaggaagatggcggccgcggctgtggtggttcccgcagagtggataaagaactgggagaaatcagggagaggcgaatttttgcatttatgtcggatcctcagtgaaaataaaagccatgatagttcaacatacagagatttccagcaagctctctatgagttgtcatatcatgtaattaaaggaaatctaaagcatgaacaggcatctaatgttcttagtgacattagtgaatttcgtgaggatatgccctccattcttgctgatgtattctgcatattagacattgagacaaattgtttagaagaaaaaagcaagagagactattttacacagttggtattagcatgtttgtttcagacacagttctaaaggaacgcctggatccagaaacactggaatcattagggcttatcaaacaatcacagcaattcaatcaaaagtcagttaaaatcaagacaaaactcttttataagcagcaaaaattcaatttgttaagagaagagaatgaaggttatgccaagctgattgctgaattggggcaagatttatctggaagtattactagtgatttaatcttagaaaatatcaaatctttaataggatgctttaatctggatcccaatagagttttggatgtcattttagaagtgtttgaatgcaggccagaacacgatgacttctttatatctttgttagaatcttacatgagtatgtgtgaaccgcaaacactgtgtcatattcttgggttcaaattcaagttttaccaggaaccaaatggcgagacaccatcatctttatacagagttgcagcagtacttctacaatttaatcttattgatttagatgatctttatgtacatcttcttccggctgataattgcattatggatgaacacaaacgagaaattgcggaagctaagcaaattgttagaaagcttacgatggttgtgttgtcttctgaaaaaatggatgagcgagagaaagaaaaggaaaaagaagaggagaaagtagagaaaccacctgataaccaaaaacttggcttgttggaagccttattaaagattggtgattggcaacatgcacagaacattatggatcagatgcctccatactatgcagcttcacacaagctaatagcccttgctatttgcaagctcattcatataactattgagcctctctaccgaagagttggagttcctaaaggtgctaaaggctcacctgttaatgctttgcaaaacaagagagcaccaaaacaagctgagagctttgaagatttgaggagagacgtgttcaatatgttctgttaccttggtcctcacctttctcacgatcccattttatttgcaaaagtggtgcgcataggcaagtcatttatgaaggagtttcagtctgatggaagcaaacaagaagataaagaaaaaacggaagttatccttagctgtttgcttagcattactgaccaggtactacttccatctctttctttgatggactgcaatgcttgtatgtctgaggaactatggggaatgtttaaaacatttccatatcagcatagatatcgtctgtatggccagtggaagaatgaaacttataacagtcacccacttttagtaaaagttaaagctcaaacaatagacagagccaaatatatcatgaagcgcctaaccaaggaaaatgtgaagccttctggaagacaaattgggaagttgagccacagcaatccaaccattttgtttgattatatcttgtcacaaatacagaagtatgataacttaataacacctgtagtagattcattgaaatacctcacttcactgaattatgatgtcttggcctattgtatcattgaagctttagctaatccagaaaaggaaagaatgaaacatgatgacacaaccatctcaagctggcttcagagtctggctagtttctgtggtgcagtttttcgtaaatatccaattgatcttgctggtcttcttcagtatgttgccaatcagctaaaggcgggcaaaagttttgacctgcttatattgaaagaagtggtacaaaaaatggcaggaatagaaattacagaggaaatgacaatggagcaactagaggctatgactggtggagagcagctaaaagctgagggtggttattttggtcagatcagaaacactaaaaaatcctctcagagattaaaggatgctctattggaccatgatcttgcccttcctctctgtctgcttatggctcagcagagaaatggggtaatctttcaggaaggtggagagaaacatttgaaacttgtgggaaagctctatgaccagtgtcatgataccctggtgcagtttggtgggtttttagcatctaatctgagcacagaagattatataaagcgagtgccttcaattgatgtactctgtaatgaatttcatacaccccatgatgcagcatttttcctgtctaggccaatgtatgcccatcatatttcgtcaaagtatgatgaacttaaaaaatcagaaaagggaagtaaacagcaacataaagttcataagtacattacatcatgtgagatggtgatggcgcctgtccatgaagcagtggtctccttacatgtttccaaagtctgggatgacatcagccctcaattctatgctacattctggtcattgacaatgtatgaccttgcagttccacacaccagctatgaacgagaagtcaataaacttaaagtccagatgaaagcaattgatgacaatcaggaaatgcccccaaataaaaagaaaaaagagaaggagcgctgtactgcccttcaggacaagcttcttgaagaagaaaagaaacagatggaacatgtacagagagttctacagagattgaaactggaaaaggacaactggcttttagcaaaatctaccaaaaatgagaccatcacaaaatttctacagctgtgtatatttcctcgatgtattttttcagcaattgatgctgtttactgtgctcgttttgttgaattggtacatcaacagaaaactccaaatttttccacacttctttgctatgatcgagttttctctgacataatttacacagttgcaagctgtactgaaaatgaagccagtcgatacggaaggtttctttgctgcatgttagagactgtgaccaggtggcatagtgatagagccacatatgaaaaggaatgtggaaactatccaggattccttaccatattacgggcaactggatttgatggtggaaataaggctgatcaattagactatgaaaattttcgacatgttgtacataaatggcattacaaactaaccaaggcatcggtacattgccttgaaacaggcgaatatactcacatcaggaatatcttgattgtgctaacaaaaatacttccttggtacccaaaagttttgaatctgggtcaagctttggaaagaagagtacacaaaatctgccaagaagaaaaagagaagaggccagatctatatgcattggctatgggctactctgggcagttgaaaagtagaaagtcatacatgatacctgaaaatgagtttcatcacaaagacccccctccgaggaatgcagttgccagtgtgcaaaatgggcctggtggtgggccttcttcatcatcaataggaagtgcatctaaatcggatgaaagcagtactgaggagactgataaatcaagggagagatctcagtgtggtgtgaaagctgttaataaagcttctagtaccacacctaaagggaattcaagcaatggaaatagtggctctaacagcaacaaagctgttaaagaaaatgacaaagaaaaagggaaagagaaagaaaaagagaaaaaagaaaagactccagctactactccagaggccagggtacttggtaaagatggtaaagaaaaaccaaaggaagagcggccaaataaagatgaaaaagcaagagagaccaaggaaagaacgccgaagtctgacaaagagaaagaaaaattcaagaaggaagaaaaagctaaagatgagaaatttaagaccactgtccccaacgcagaatcaaaatcaactcaagaaagggaaagagagaaggagccatccagagaaagagatatagcaaaggaaatgaaatcaaaggaaaatgttaaaggaggagaaaaaacaccagtttctgggtccttgaaatcacctgttcccagatcagatattccagagcctgaaagggaacaaaaacgccgcaaaattgatactcacccttctccatcacattcctccacagtaaaggacagtctcatcgaactcaaggaatcttcagcaaagctctacattaatcatactcctccaccactgtccaagagtaaggagagagaaatggacaagaaagatttggacaagtcaagggaaagatccagagaaagagagaaaaaagatgaaaaggacaggaaagagcggaaaagggatcactcaaacaacgaccgtgaagtgccaccggacttaaccaagagacgtaaagaggagaatggaacaatgggggtttcaaaacataaaagtgaaagtccttgtgaatctccttatccaaatgagaaagacaaggaaaaaaataagtcaaaatcttcaggcaaagaaaaaggcagtgattcatttaaatctgagaagatggataaaatctcctccggtggcaaaaaggagtccaggcatgataaagaaaagatagaaaagaaagagaaacgggacagttcaggaggaaaggaagagaagaaacatcataagtcctcggacaagcacagataatgaagactttccatcaaggtgagatcggactggaactgttcggctgcgaccagaaatttattttcctgagtaaattgccgagaattaagaatgaagagggccatttgcatctccttaaattattcagttacctgctttattgctccatgtggaaaacttaaaattgttaagttgtgcattactgtattttaacttgttgcttagtttctacatgtttattttcagtaatggctgaaagtgttaactgttccatacttttagcacaatgtgctgcataaggttacctgtgtacagagttttactttagattaactaaatattgcctgggttcagtttttatttccattctgaaatgcttcctttttattgtttgaaactgaaaataaacaattgttgaacccttttgattttacctcattttaaaactgttttaatttattatttggcttgttcttaatattagtcactaaaagcagtgggagcattgtcttatgaaatgcttaggaatcattttatatagtacatgtacaacattaaacgtgtttaaaaaagaaaaaggtaccagcgatcacttgtcccttgccattttttcttgtaattatgttagacaaatcttggcggcggggggatcaaaacataattgttttaattctacagctgtaggagctttgtattgctgaactttcatctggaaaagtttcacagtgacatttttaaaagagaatttttttatctgccgaattctaccagtgtaaccttttttctaaataaacaatagttttctcaaatggttgtaaaaaaaaaaaaaaaa

SEQ ID NO: 4870 - DNA, 4357 bp, Homo Sapiens
  NM_020451
ccccgccccgctctttcgcttcccgggccgccggcagccgccgccagccgcagccatgggccgggcccggccgggccaacgcgggccgcccagccccggccccgccgcgcagcctcccgcgccaccgcgccgccgcgcccgttccctggcgctgctcggagccctgctggccgccgccgctgccgccgccgtccgggtctgcgcccgccacgccgaggcccaggcggccgcgcggcaggaactggcgctgaagaccctggggacagatggcctttttctcttttcctccttggacactgacggggatatgtacatcagccctgaggagttcaaacccattgctgagaagctaacagggtcttgttctgtcacccagactggagtgcagtggtgcagtcacagctcactgcagcctcaacttccctggctcaattgatcctcctgcctcagcctcctgaggtcaactcccgcggccagctgcgaggaggaggagttgccccctgaccctagcgaggagacgctcaccatagaagcccgattccagcctctgctcccggagaccatgaccaagagcaaagatggcttcctaggggtctcccgcctcgccctgtccggcctccgaaactggacagccgccgcctcaccaagtgcagtgtttgccacccgccacttccagcccttccttcccccgccaggccaggagctgggtgagccctggtggatcatccccagtgagctgagcatgttcactggctacctgtccaacaaccgcttctatccaccgccgcccaagggcaaggaggtcatcatccaccggctcctgagcatgttccaccctcggccctttgtgaagacccgctttgcccctcagggagctgtggcctgcctgactgccatcagcgacttctactacactgtgatgttccggatccatgccgagttccagctcagtgagccgcccgacttccccttttggttctcccctgctcagttcaccggccacatcatcctctccaaagacgccacccacgtccgcgacttccggctcttcgtgcccaaccacaggtctctgaatgtggacatggagtggctttacggggccagtgaaagcagcaacatggaggtggacatcggctacataccccagatggagctggaggccacgggcccctctgtgccctccgtgatcctggatgaggatggcagcatgatcgacagccacctgccttcaggggagcccctgcagtttgtgtttgaggagatcaagtggcagcaggagctgagctgggaggaggctgcccggcgcctggaggtggccatgtaccccttcaagaaggtctcctacttgccgttcactgaggccttcgaccgagccaaggctgagaacaagctggtgcactcaatcctgctgtggggggccctggatgaccagtcctgctgaggttcagggcggactctccgggagactgtcctggaaagttcgcccatcctcaccctgctcaacgagagcttcatcagcacctggtccctggtgaaggagctggaggaactgcagaacaaccaggagaactcgtcccaccagaagctggctggcctgcacctggagaagtacagcttccccgtggagatgatgatctgcctgcccaatggcaccgtggtccatcacatcaatgccaactacttcttggacatcacctccgtgaagcccgaggaaatcgagagcaatctcttcagcttctcatccacctttgaagacccgtccacggccacctacatgcagttcctgaaggagggactccggcgtggcctgcccctcctccagccctagagtgcctggacgggatctgatgcacaggcccccacgcctcagagccagagtggtcctcagcccatttcagactgcagatgccgcccactcccaccccactcctaggctgccttggagggtacaagatccactgagggtggccaccacagccttggctccatggtggcgggtagacaagggatgcctgggctgactgggcagaggaacctctagctctgactgtcactcggctctccctacccatttggctctggaagctgcttggcccccccagatcagggcctgggtgaactccctggacctttcctagccagccgcacagtctaggcccttgtggggtgaagaatggagggaggagcaggctaggaagacggggccaccaccctctccttgctttcagcccttcccacaggaaacatcaagaagccccagccaggaggggccaggctgccaaggcggctcccctgtttatctagagccttcgttcctggccataccccggactgccctcctgtgcctgatgtccccagctggggtcagtctcaacaggagccagtcttctggagcctctgggcagaaccctccatcagagtggaaatcagacgggaccccctgcagcttccctgaccacgccactgaccagctatctggggaagtttactgtgaaggggtttctgcctttagcaatggggttcactaagggggttcccgaggcccagggccaaggcactcccaccgcctaccttagcacagggtctctgcaggactgcgggagccagcgctcctgccgcccctcttgcccctcagaccttgcatccacagaagcacaacccagccaaacaccacagccttctccagagccggcactgtcccggcaaccaggggtgccccaggctagctcttctacctctggggcaccacggactccccttggccactcttgggactttggtccacgtcctgagccactgaccacggccagtctctctttttatatgtgcagaaaagtgtttttacacaaactttctcatggtttgtaggtatttttttataaccccagtgctgaggagaaaggaggggcagtggcttccccggcagcagccccatgatggctgaatccgaaatcctcgatgggtccagcttgatgtctttgcagctgcacctatgggaagaagtagtcctctcttccttctcctcttcagctttttaaaaacagtcctcagaggatccatgatccccagcactgtcccatcctccacaaaggcccacaggcatgcctgtactctctttcattaaggtcttgaagtcaggctgccccctccccagcccccagttctctccccaccccctcaccccacccggggctcactcagcctggcagaggaagaaggaaggcagacatctccgcagccactcctgggccttttatgtgccgagttaccccacttgccttgggcgtgtccactgagccttccccagccagtcttgttctcaattttgttttgttttgttttgagacggagtcttgctctgtcacccaggctggagtgctatggctcgatcttggctcactgcaacctccacctcccaggttcaagcaattctcttgcctcagcctcccgagtagctgggattacaggtgcatgccaccatggctggctaatttttgtatttttagtagagatggggtttcaccatattggtcaggctgatctggaacttctgacctcaggtgatccacctgcctcagcctcccaaagtgctgggattacaggcgtgagcaatcgtgcccagccttgttcttaattttgtatcatccagtcatcgctaatattacacgcaccttctcacttaatcctcacgacaagcctgtgaggcagatgctcattgttcccatcttgatgaaacttgagtctcagggaagtgaagtgacttgcccagggtcactcaggtagagttgagattcaaacccacatgtggctccaaagtctgcatctggatttgggggtgttttttggcatggcaccctcacctctctccctgcctgttttccccaaagtggaaaggaaggcctttcaaaccagagtgtctcactcccctctgacctccagaccagatggggcatgagccagccagctcagccaggctccctgtgtcctgggaggaagtgtccccatcccccatgccccttatggggagggagggcgtctgatgctctctctctgcctccccccccatcctgtcaggcacaggtgacgggggcagcccatgcgagcccttctcctgctgctctgggagggccagttccacattgagccagcctggtcccatggaaaatgatggcctgggctttctgaggccttatctgatgcctctgcagttcatgtcccccaccaggcctcgaggctcagggtgggagagggccccgggctgccctgtcactcctctaacacttccctcccctgtccccaacatgccctgtaataaaattagagaagactaacaaaaaaaaaaaaaaaaaaaaaaaaa

SEQ ID NO: 4871 - DNA, 5872 bp, Homo Sapiens
  NM_020452
atggataccttgagagctgttccccttttttcaatatctggcctcttctcctttccctacagggtctcccatgggattgctgggatcttgctgggtgagatggcagtgtgtgcaaaaaagcgccccccagaagaagaaaggagggcgcgggctaatgaccgagaatacaatgagaaattccagtatgcgagtaactgcatcaagacctccaagtacaatattctcaccttcctgcctgtcaacctctttgagcagttccaggaagttgccaacacttacttcctgttcctcctcattctgcagttgatcccccagatctcttccctgtcctggttcaccaccattgtgcctttggttcttgtcctcaccatcacagctgttaaagatgccactgatgactatttccgccacaagagcgataaccaggtgaataaccgccagtctcaggtgctgatcaatggaatcctccagcaggagcagtggatgaatgtctgtgttggtgatattatcaagctagaaaataaccagtttgtggcggcggatctcctcctcctttccagcagtgagccccatgggctgtgttacatagagacagcagaacttgatggcgagaccaacatgaaagtacgtcaggcgattccagtcacctcagaattgggagacatcagtaagcttgccaagtttgacggtgaagtgatctgtgaacctcccaacaacaaactggacaaattcagcggaaccctctactggaaggaaaataagttccctctgagcaaccagaacatgctgctgcggggctgtgtgctgcgaaacaccgagtggtgcttcgggctggtcatctttgcaggtcccgacactaagctgatgcaaaacagcggcagaacaaagttcaaaagaacgagtatcgatcgcctaatgaataccctggtgctctggatttttggattcctggtttgcatgggggtgatcctggccattggcaatgccatctgggagcacgaggtggggatgcgtttccaggtctacctgccgtgggatgaggcagtggacagtgccttcttctctggcttcctctccttctggtcctacatcatcatcctcaacaccgttgtgcccatttcactctatgtcagtgtggaggtcatccgtctgggccacagctacttcatcaactgggataagaagatgttctgcatgaagaagcggacgcctgcagaagcccgcaccaccaccctaaacgaggagctgggccaggtggagtacatcttctccgacaagacgggcaccctcacccagaacatcatggttttcaacaagtgctccatcaatggccacagctatggtgatgtgtttgacgtcctgggacacaaagctgaattgggagagaggcctgaacctgttgacttctccttcaatcctctggctgacaagaagttcttattttgggaccccagcctgctggaggctgtcaagatcggggacccccacacgcatgagttcttccgcctcctttccctgtgtcatactgtcatgtcagaagaaaagaacgaaggagagctgtactacaaagctcagtccccagatgagggggccctggtcaccgcagccaggaactttggttttgttttccgctctcgcacccccaaaacaatcaccgtccatgagatgggcacagccatcacctaccagctgctggccatcctggacttcaacaacatccgcaagcggatgtcggtcatagtgcggaatccagaggggaagatccgactctactgcaaaggggctgacactatcctactggacagactgcaccactccactcaagagctgctcaacaccaccatggaccaccttaatgagtacgcaggggaagggctgaggaccctggtgctggcctacaaggatctggatgaagagtactacgaggagtgggctgagcgacgcctccaggccagcctggcccaggacagccgggaggacaggctggctagcatctatgaggaggttgagaacaacatgatgctgctgggtgcaacggccattgaggacaaacttcagcaaggggttccagagaccattgccctcctgacactggccaacatcaagatttgggtgctaaccggagacaagcaagagacggctgtgaacatcggctattcctgcaagatgctgacggatgacatgactgaggttttcatagtcactggccatactgtcctggaggtgcgggaggagctcaggaaagcccgggagaagatgatggactcatcccgctccgtaggcaacggcttcacctatcaggacaagctttcttcttccaagctaacttctgtcctggaggccgttgctggggagtacgccctggtcataaatggtcacagcctggcccacgcactggaggcagacatggagctggagtttctggagacagcgtgtgcctgcaaagctgtcatctgctgccgggtgacccccttgcagaaggcacaggtggtagaactggtcaagaagtacaagaaggctgtgacgcttgccattggagacggagccaatgatgtcagcatgatcaaaacggctcacattggtgtggggatcagtgggcaggaagggatccaggctgtcttggcctccgattactccttctcccagttcaagttcctgcagcgcctcctgctggtgcatgggcgctggtcctacctgcgaatgtgcaagtttctttgctatttcttctacaaaaactttgctttcaccatggtccacttctggtttggcttcttctgtggcttctcagcccagaccgtctatgaccagtatttcatcaccctgtataacatcgtgtacacctccctgccagtcctggctatgggggtctttgatcaggatgtccccgagcagcggagcatggagtaccctaagctgtatgagccgggccagctgaaccttctcttcaacaagcgggagttcttcatctgcatcgcccagggcatctacacctccgtgctcatgttcttcattccctatggggtgtttgctgatgccacccgggatgatggcactcagctggctgactaccagtcctttgcagtcactgtggccacatccttggtcattgtggttagcgtgcagattgggctcgacacaggctactggacggccatcaaccacttcttcatctggggaagccttgctgtttactttgccatcctctttgccatgcacagcaatgggctcttcgacatgtttcccaaccagttccggtttgtggggaatgcccagaacaccttggcccagcccacggtgtggctgaccattgtgctcaccacagtcgtctgcatcatgcccgtggttgccttccgattcctcaggctcaacctgaagccggatctctccgacacggtccgctacacacagctcgtgaggaagaagcagaaggcccagcaccgctgcatgcggcgggttggccgcactggctcccggcgctccggctatgccttctcccatcaggagggcttcggggagctcatcatgtctggcaagaacatgcggctgagctctctcgcgctctccagcttcaccacccgctccagctccagctggattgagagcctgcgcaggaagaagagtgacagtgccagtagccccagtggcggtgccgacaagcccctcaagggctgaaggccgaggatggatgccctgtgccagtgaccagagcacccagggctggccagtcactgagggaacagcgtctcggaactgctggtcctcattccttgcttcccgtccccccggtagactctgtcctgctggtcccaccacacatggctgggacatctgttcccagctgtaggcccttccaccagctggggagctagagggagcaggcccaagggcagagcagaggctgaggcacggggagccagccccactcggggaccagaagtggaaccaaaaacaagaaaaaactgtgagagattgtgtctgcccctgccctgcctgggacccacagggagactataatctccttatttttttactcctactccccagaggggccctagtgcctctgttcctgaattacataagaatgtaccatgccgggaagccagagacctgcaggggcctcggcccctcacatcgtgtatgtctctccttgatttgtgttgtgtccagtttggttttgtctttttttatttggcaagtggaggaggcttttatgtgacttttatgttgtggttggtgtcttaactctcctgggaaaaggaggctggcacacactgggatgccgcagcctggccggctgtggggtggtttgggaggatccatgtcggctctgcctgcagtgaccagtgctctgtggggcagaggagctgaccagggagggaggtacccatgagcagagggtagtgggagagtgtaaaggagggtttggtcctgtctgcttcctcaccttgagagtaaagtgctgccctctgcccccaacacacacacatatcaattcctggattccttagtcctgctggccttgggctggagcctaggaaagtggcccccaaatccttagtgagctaaagctgggtctgaaatttggtcagtggggaggggtagttttcttttcttttttctttttctttttttctttttttttttgagatggagtctcactcttgtcacctaggcaagagtgcaatggcacaatctcagctcactgcaacctccacctcctgggttcaagcgattctcctgcctcagcctcctgagtagctgggattacaggcacacaccaccacgcttggttaatttttgtatttttagtagagatgtttcaccatgttggccaggctagtcttgaattcctgacctcctgacctgcccacctcaacctcccaaagtgctgagattacaggcgtgagccaccacacccagctcagggaggcgtagttttctttaattttaaatttaaacccaagtttattggcagactcccttttgacctccctttgcctccccatctggtgctttcttgcatctacaccccagggccctgtggtggggctgcagggggaagctgtgcacctgagatgaggctggaacgggaattggcctctctgctcccttcttcagtaagcaaggagccccgcccctcaggcccagcctctggcaagaggtggtggaatccttgtgccgggtagtagaggaggataagggcaaaaccaggcccaggccagtgcctggcttggtctggatgggacactgtcagagtttggccacagcctgtcctttacttcatccacacctatgaagctattccctaaataaggcatttcccaagttagtcgctacctaatcagccttgagaagaatcctttcctcttctttgatagtgggtcgggggattcttcaggaatggtttggagctgggagtgggtagggggattttaaatgttccatatgggagccccaaaggaactggatgggctgcagtgaggtgggggcgggtgggcagggaatgggagaggggaagtcttggcagggaaatcccttttggccacacagtttacaaacccagtatcatgtctgtctgtgtgtctctcaaggtgagagtctgatttttataccaaagaggaaatgattttttttcatattttgtttgtctatattatataaatatatatatacagttatatatatatatattattttttggttctctctcgttttttagggagggaagaaagtaccaagttgcattgagctgtaattaaggaacattataatttatgacacatttctatacttgcaaaaattatatcattttatggatataagagaaaaatgcctttttataaaatttcaatttctgaaaaaaaaaaaaaaa

SEQ ID NO: 4872 - DNA, 1903 bp, Homo Sapiens
  NM_020457
cggcgtccccggggcccactcccgagcgcaggcgggcagccaggcgggcggcgcggcgcgggccggcaggaagcgtattctgggcacggggcgccgggcgggccggctgcgccgagcggcagtggtgggataccacccaaggcctcgcgcggcgccgcccgtcgaggggcgggcggcggcgtagccactgggccgtcgaagagcgcaggaggccggtgggccgggccgggccgcgcggcgcagccatgcctggctttacgtgctgcgtgccaggctgctacaacaactcgcaccgggacaaggcgctgcacttctacacgtttccaaaggacgctgagttgcggcgcctctggctcaagaacgtgtcgcgtgccggcgtcagtgggtgcttctccaccttccagcccaccacaggccaccgtctctgcagcgttcacttccagggcggccgcaagacctacacggtacgcgtccccaccatcttcccgctgcgcggcgtcaatgagcgcaaagtagcgcgcagacccgctggggccgcggccgcccgccgcaggcagcagcagcaacagcagcagcagcagcaacagcagcaacagcagcagcagcagcaacagcagcagcagcagcagcagcagcagcagtcctcaccctctgcctccactgcccagactgcccagctgcagccgaacctggtatctgcttccgcggccgtgcttctcacccttcaggccactgtagacagcagtcaggctccgggatccgtacagccggcgcccatcactcccactggagaagacgtgaagcccatcgatctcacagtgcaagtggagtttgcagccgcagagggcgcagccgctgcggccgccgcgtcggagttacaggctgctaccgcagggctggaggctgccgagtgccctatgggcccccagttggtggtggtaggggaagagggcttccctgatactggctccgaccattcgtactccttgtcgtcaggcaccacggaggaggagctcctgcgcaagctgaatgagcagcgggacatcctggctctgatggaagtgaagatgaaagagatgaaaggcagcattcgccacctgcgtctcactgaggccaagctgcgcgaagaactgcgtgagaaggatcggctgcttgccatggctgtcatccgcaagaagcacggaatgtgaactggtgccccggcagcctgctggactcccagaccccatccagccaggggaccgcaggccattgttgaactcctctatactcctgggcactggttgacagtactgaggcttaaggcagctggactctcttgctggtgacctggcatcctcaattgtttcctcctgaagtggaagctggggccttagactctgccctggtgacaccagcaattatgactttgtctacccttcctccccagttattgttgcagattctggttaagcagaggcttcagaaccactgaacttgaaacttaccctctagggatgcaggtgggatgtccagggactataggtttgggaaaaccataccttaaggttggtcagcagtcagacaactctaatgtgtgtagtgataagagattcaagtaacatcagttctcctccttttcatgcttttccttcccaggtgcagcctgtgattctgatggggactggtaaatctgtgcctctgcctcctaggacttattttcccaggaggccatttacaaggggatctggatgacctgctgatggagatccagcttgccagggacttaggtttatcctgttttgtttgctactggttacaaattctattttctgtacaattagtcagactaaagttttcactgtgtttgtttggcaaaacaaattaaacaaaaagtaaggtttttaaaaaaaaaaaaaaaaaa

SEQ ID NO: 4873 - DNA, 6040 bp, Homo Sapiens
  NM_020461
actttccacgggtgaggcctggagaacgggtggacgtgcaggccagaacccgggacccacccggctgagcccccagactctccgctgcccacgaccctcggagtggcaccctctcctggccgtctcctctcgtgggtcccgaagaacgggtgcaaagccgagttcgtccgctgtactgcgcgggcgcgcgtttcgttcttcggttttgccacggttctgtgactccctaaaggttgagggctactgaattagaagaaacgccgagctggcttctggtgggctgccgggcgccgggcagcgtgcttggactggggagggcagggcgtgtttactctgagtagagcaaccgcaagacctcctttaaaaaataccagttctgagcttcggcattggagaggccgcctgtcattcagcctcttcggaccctctctcactccctgtcttccggagcgtgagtgaagcccgggtgaggtgttttcccacacgccgggggcccggagctgagaaggggcatggccagcatcacgcagctgttcgacgacctgtgtgaggccctcctgccggctgccaagactcacctgggccagcgcagtgtgaaccggaagagggcaaagcggagcctcaagaaggtggcctacaatgctcttttcacaaatctttttcaagatgagactcaacagctgcagcctgacatgtcaaaactaccagcgagaaacaagatcctcatgttgtcctttgacttgagagtgggtggcctgggccccaaggccgaccgtttggaggagcttgtggaggagctggaagcagccccttgctgtccgcttttggaggtggggtctgttttggacctcctggttcagctggcagggagtggtccccctcaagttctgccgagaaaacgagactacttccttaacaacaagcatgtggggagaaacgttccgtacagcggctatgattgcgacgacctgagtgtgtttgagatggacgttcagtctctgatctccagagaagagtgtttgtgtcacagcatgatccaggaaacacttcaggttatggaggctgctccaggcactggcctgcccaccgtcgggctcttctcatttggtgacccttgtggtgacaggttcgagagagacacccgggtctcgctcttcggggcccttgtgcacagccgcacttatgacatggacgtccgactgggcctgccccccgtgccagacaatgcggacctctctgggctggctattaaggtcccaccgagtgtggatcagtgggaagacgaaggattccagtcagcgtccaacttgactcctgattcccagtctgagcccagcgtgaccccagacgtggacctgtgggaagccgcacttacctatgaggccagcaagcggaggtgctgggagcgagttggctgcccccctggccacagagaggagccttacctgacggaggcgggaagggacgctttcgacaagttctgcaggctccaccaaggggagctccagctgcttgctgggggcgtcctacaggccccgcagcccgtgctggtgaaggagtgcgagctggtgaaagacgtgctgaacgtcttgattggggtcgtgtctgccacgttttcgctctgccagccggcccaggcctttgtggtgaagcggggcgtccacgtgtcaggagcgtctcccgagagcatcagcagcctgctctcggaagtggccgagtatgggacctgctacacgcgcctgagtcatttctctctgcagcccgtcctggactctttgtacagcaagggcctcgtgttccaggccttcaccagtggcctgaggaggtacctgcagtattaccgggcctgcgtcctttccactccgcccaccctgagcctcctcaccattggttttctcttcaagaaacttggccggcagctcaggtacctggccgagctctgtggcgttggcgctgtgctcccgggcacctgtggaggaggccccagggccgcgtttcccaccggcgtgaagctgctgtcctacctctaccaggaggctctgcacaactgcagcaacgagcactaccctgtactgctgtccctgctgaagaccagctgcgagccctacacccggttcatccacgactgggtgtacagcggggtgttcagagacgcttatggcgagttcatgattcaggtgaaccacgagtacctcagcttccgagataagttgtactggacacatggctacgtgctcatctccaaagaggtggaggactgtgttcccgtgtttctgaagcacattgcccacgacatatacgtctgcggaaagaccattaacctgctgaagctctgctgcccccggcattacctctgttggtccgacgtccctgtcccccggatctcggtgattttctcccttgaggagttgaaggagattgagaaggactgtgccgtctacgttgggcgcatggagagggtggcccgccacagctctgtcagcaaggaggagaaggaattacgtatggaaattgcaaaacaagaattaatcgctcatgcccgggaagcagcatccagggtcctgagtgcactgagtgaccggcagatgtcagaacggatggccttggatgcccggaagcgtgagcagtttcagaggctgaaagaacaatttgtgaaggaccaggagcgacgccaggcggccaggcaggaggagctggatgatgacttcagctacgcccgtgaactccgagacagggagagaaggctgaagtccctggaggaggagctggagaggaaggcgaggcaggcactggtcgaccactacagcaagctctctgcagaggcagctcgtcgggagcagaaggcactgtggagaatccagaggcaccgactggagagtgcacggcttcgttttctcttagaagatgagaaacacattcaggagatgctgaaagcagtgtctgaggctcaccagccccaggagccgccagacgtcctcttgagcgtgcacccccaggtcacgtctccgggccctgagcacccagagggaggccaaggctgtgattctgggtctgcagagcaacactcgcctgcctgggatggctggaacaggccaggcctgctgaccccacagccccttaagcctctagcagtgggggctggtggcagggggctgcagcaggcggagggggccagacccttctctgacagcctcagcattggagacttcctacctgtgggcccaggggctgagccgtccgtgcagactggcatggtccctctcctggaggtggcgctgcagaccattaacttggacctgcccccctcagctcctggggaggcacccgcagcagccagcactcagccctccaggccacaggagtacgactttagtactgtcctgaggccagctgtggccacctcacctgcaccagggcccctgcaggctgcagagtgcagcttgggcagctcagggctacagctgtgggaggacagttgtgggaagatggatgcctgtggctccgcctcgcgggagactctgctcccctcacacccacccaggcgtgctgctctggaggaggggagcagccagcccacagagcggctctttgggcaggtgtcagggggtggtcttcccacaggggactacgcttctgaaatagctcccacccggccacggtggaacacccacgggcacgtgtctgacgccagcatcagggtcggggagaatgtgtcagatgtggctcccacccagccacggtggaacacccacggacacgtatccaatgccagcatcagcttaggggagtctgtgtcagatgtggctcccactcggccacggtggaacatccatggacatgtgtccaacgccagcatcagggtcggggagaatgtgtcagatgtggctcccaccaggccacggtggaatacccacgggcacgtgtccaacgccagcatcagggttggggagaacgtgtcggacgtggctcccacccggccacggtggaacacccatggacacgtgtccgatgccagcatcagcttgggggagtctgtgtcagacatggctcccgcccggccacggtggaacacccatggacacgtgtctgatgccagcatcagcttgggggagtctgtgtcagacatggctcccacccggccacggtggaacacccacggacatgtgtctgacaccagcatcagggttggggagaacgtatcggacgtggctcccatccggtcacggtgcaacacccatggacacgtgtccgacgccagcatcagcttgggggagcctgtgtcggatgtggtttccacccggccacggtggaacacccatgtacccatccctccgccccacatggtgctgggggctctctcaccagaagctgagcccaacacacccaggccccaacagagcccccctggccacacgtcccagtcagcgctcagcctgggagcacagagcactgtgctggactgtgggccacggctgcctgtagaagtggggccatctctgtcctcccccagctcgggctgcggggaggggagcatcagcgtgggggagaacgtgtcagacgtggctcccacccaaccatggtggcccaacaccccgggagacagtgtctctgaagaactaggccctgggaggagcggggacactgaggacctctctccaaattggcctctcaactcacaggaagacacagctgcccagagcagcccaggccgtggtgaggaggcggaggcatcggcggcggaggctcagggtggggagcaggcctacctggcaggcctggcagggcagtaccacttggagcggtacccggacagttacgagtccatgtccgagccgcccattgctcatcttttgcgccccgtgcttccccgggccttcgccttccccgtggacccccaggtccagtctgccgctgatgagactgctgtgcagctgagcgagttgctgacgctgcccgtgctcatgaagcgctccatcacggcaccgctggccgcccacatctccttggtgaacaaggccgctgtcgactacttcttcgtggagctgcacctggaggcgcactatgaggcactgcggcacttcctgctgatggaggacggcgagttcgcccagtccctcagcgacctgctctttgagaagcttggagctgggcaaacgcccggagagctgctcaacccgctggtgctgaactctgtgctgagcaaggccctgcagtgcagcctgcatggggacaccccgcacgcctccaacctctccctcgctctcaagtacctgcccgaggtgtttgcccccaacgccccggatgtgctgagctgcctggagctcaggtacaaggtggactggcctctcaacattgtcatcaccgagggctgcctgagcaagtacagcggcgtcttctccttcctgctgcagctgaagctcatgatgtgggcgctcaaggacgtctgcttccacctcaagcgcacagccctgctgagccacatggccggctctgtgcagttccgtcagctgcagctgttcaagcacgagatgcagcatttcgtgaaggtcatccagggctacatcgccaaccagatcctgcacgtcacctggtgcgagttcagggccaggttggccaccgtgggcgacctggaggagatccagcgtgcgcacgcagagtacctgcacaaggccgtcttcaggggcctgctcacggagaaggcggcgcccgtcatgaacgtcatccacagcatcttcagcctcgtgctcaagttccgcagccagctcatctcccaggcctgggggccccctgggggcccgcggggtgcagagcaccccaactttgcactcatgcagcagtcctacaacaccttcaagtactactcccactttctcttcaaagtggtgaccaagctggtgaaccgcggctaccagccccacctggaggactttctgctgcgcatcaacttcaacaactactaccaggacgcctgaggctgctctgcgggggacgtgcacaataaaggtgttctcggaccctgaaaaaaaaaaaaaaaaaaaaa

SEQ ID NO: 4874 - DNA, 5371 bp, Homo Sapiens
  NM_020466
gctcctgcgcgctgaggctccggcggacctctggtggacatggctgcttcccgcttacccccagcgacgctaacgttaaagcagttcgtaagaaggcaacaagttcttctcctctacagaaggattttgcaaacaattcggcaagttccaaatgattctgatcgcaaatacctgaaagattgggcaagagaagaattcagaagaaacaaaagtgccaccgaagaggatacaatccggatgatgattactcaaggcaatatgcagctcaaggagttagaaaaaacacttgctttagcaaaatcttaactatagcattattctgaaggattttcaaagtctccatgtgttttgttgcatttaggattaacaatggacaacacaaagcccagtcttactatttatatgtacagtatttggtgatagagagcaaaggaaaaacacatcagaacagttgccttaacactgaaaaacataccctgcattttgaaaatgtttatggatgtctcagcagttcttaaaagaagaaaaaaaccactaacaaatggccagtagatgctggacacaatcattagggaagtgtaaatcaaaactactatgaggtcgggtgtagtggctcatgcttgtaatcccagtactttaggaggctgtggtaggtggatcacttgaggtcaggagttcaagaccagcctggccagcatggtgaaacctcatctctactaaaaatacaaaaattagcttggtgtggtggtgcattgcctgtagtcccagctacttgggaggctgaggcaggagaatcacttgaacccaggaagtggaggttgcagtgagctgaggtcgtgccactgcacttcagcctgggtgacagagtgagacagtctctaaaaaaaaaaaaaaaaaacaaccctgagattcacattcactagaatggctgtaattaaaaagagaaataataataagtcttggtgaagatgtacagaaattacagaaccctcatacattgctggtgggaatgtaaaatggtgtagccacttcagaaaacagacggtcagttcctcaaaagatgaaacagctgctgtatgagttagcacttctaccccatgcccatagccattatttggcactaaaaagaaacgaaggacttatatatactaaacatggataaaccttgaaaacgttaagtgaaagaagccggtcacaaaagatcacatgatgattccattcatacgaaatgtccagaataggcagaaagattagtggttgcctaggctggctgtagatggaatggagtaactgctaatgggtgtagggttccttttcagggtgatgaaaatatcctacagttagcttgtggtgtaggctgcacaactcttgaatatattcaaatccactgaactgtacattttaaatgtaaggtatgaattgtatctcaataaagctgttattaaaaaactcttgaggtgtaggactgaaagtatactgacaccaggagataccctggaactttctcgaaaaatcctgcattatccctgagggttgttcaggtacgttcttcagatgtgtcatagtttgatagagaactcatcaaaaagatcaccactgggaatctagatctttgttgaaaagggaagagaaagagaagcttaatgagcacattgaagcacttaccagaaagaagagggaagacttctggatgaaacctctgtgagtaccttaacattcacatggaagtagtaaaaataagattctgggtgcagttctccaatgacaggaaaaaaaacaaagagaatttgaagaatacgtcagagacaaatacattacaaccaaaattgacttcaaggcacttttgaaggagatcaaatttataacaaaataatttagtgaaagtgaaagcttgtggaagatgttggaatcatccatcctgaaaattgaagtcttctgtttatcaacagaacagctaagaagctaatctaagaatgaccagcacctgaaagatgtagacaacattttgcagaatgataaatggtatccagtactggactgtgtctgagaggcatcaactgaatgtggatgttaatgacctggactgtcagggtccacctctacctcccagagcctcagagcccacaagacaaaataattctgaatactgttccatgggggtaatctactaattcaaaatgcctgcctgtgccaattttcaggtttttatgtagataagtattagttaacctgttgcaaaatgatctgacaaacagaagcatttgtgacgtttctgaacagagaacactttggaaatattttttgtgtgacatgattgatagatacatgctatctctagtaaatctaaaatcttgaaactcaaaatcatccttttatgggtgtagaagtcagtgatttaatgatgctcttcctaacagtggtgtgcatggaaaggttttcattaaagagcgtatgtggtttgcatttgcaagattcaactagcacagactccaagaaaacctaagtttttttgttttttaaagcaggtaaggccgggcactgtggcttacacaagtaatccacacactttgggaggctgaggtgggtggatcactttaggtcaggatttcgagactagctaggccactagctagcctaacctggtggcacgtgcctgtaattccagctactcaggagggctgcctcatattgaacccgggaggcagaggctgcagtgagccgagaacacactactgcactacagcctgggcgaaagagtgagactcttgtctcaaaaaaaataaaaaagtgccatcaagttagaagttttaaattcatggtacaagcattgccatagatgtgcctgcaagaaacacacagatgacttttttttgagacagggtctctgttgcacaagctggagtgtggtggcgcgaacatggctcactgcaaccttgagctcctgggctcaagagatccacctgcttcagattttcatttagctgggaccacaggcatgtgccaccatgaccggctaattttttttacttttcagagagaggagggggaatctcactttgttgccaggctagtctcaaactcctgggctcaagcaatccacctgcctcggtggccagagtgctaggattacaggtgtgagttgtttttttttttaaagagacagtcttacctcattctgtcacccagaatggaatgactttctaaaattgcagaaagcagaacatattccttgctgtttataatattatagtcgtatcaaagggaaagagtatttctccttaaataaaattacaaataagaaatgtatgttttactcttactcataaaaggtattgtagaatacaaaaggtttttcaaactggttttgtctttgattggcttttataatccacacttcaaagaagaaatgcatttaacttttaataacttagtcaaaaagtataatgttgccttgccttgcataacctttaactattgcaaatgatgttttgtccttcccctttgtccagtattttccaaatggtcaacagtttaaacatttaagcttgcactgagaaaccttgccacatttcagcagttttgttttgcttttggtggagagcacctgatcgcgactttacagccaatgtatttactctaaattacacttttatagatacaaggtaaagtgtagctgggtgaaggcactcaggagccataaaatgtggtcaaccacaataaattaaaatgtaagctaaacaaagtattcacacttgcatttttttaataaggaatttaagatccatagtatctttaatgcttggaagagacacaaattcaaggtgataaaaatattaattagaagacacataacatgcctcaagtatatcaacacttgactccacaaacaaggcataaccatgaaaacaacactccctttattttgggctcccaaaatcaaaagttagaactaatttatttaatcacagatatttagtatactcaataatgcactaacaatttctttaaaaaaacactaatactgtacagtatttctgtgttttagtttttcccacagctgttgaaaatttcagccttgatttgaaacatgacctgcatgacaggctataagttgtcaatagttctttttctttggaaaagtacagttgtggcatttactcactttagcagatagctaaaagggaaaaataaggaaaaatatacactggacctgcagttaagtttttgacaatgccaaggatcaaaaacagatgaaacaacatttgctgaagatgaaaaggtattgcattggtcttaatagatgttgccatctctgggtgaggatgctgactgagcctgttctgtgtcttcatcacctctatttgtttcttcttctacgacagacctccaagagacaagatccatgtagtaagccacactaggtccttttgacccttctcattcttctgtagtctcttccctgtgacttttgacaaaaatactcagttcacaatattagctgcctgcttctgatgggtaggaggtaatcaaaatactcccaccaaagcactctatggtctagacttgatacttaaaatttagttttcagcattcctcaacaaggataccttgaggtaataggagatattttggtaagtgaaaataattcctgcttggaacacagcctactgaactcaggatttaatttcttgagtattaggcagttctcaataaattgatgtatactgaggaatgattctaaagaggttagtgatatcctgtttgagaatagatttagaaaactgaaggtactctccagctctacaattctgtattaggaacaatagggaaatgagaaagtgcctctatattgcaatctaatgagtctctgggggaagactgtctacctgcgtagtagttgagaacaagacaagctcccaaacacatgaaaatcaacttgaaataacatcaaattcagcctgggcaatatcatgagaccttatatctacaaaaaattagccaggactggtggcacacgcctgtagtcccaagctacttgcgaggttgaggcaggaggatcacgagcctgagaggccaaggctgcagtgaggtgtgatcatgccactgcactccagtctgggtgacagagcaagaccctgtctcaacaaaataaaaaacatcaaattcattccatattcaggtaacagtgacatatatctactgaattatttttcttttaggaatgtctatatctatggattgtcactataaaaaaaagaaaaaaccctaaaactgagcttgacaaagggaataaaagcatactttgtttttcttggtgtccccatgttaataaatcatttcttctctttggctcaaaaaaaaaaaaaaaaaa

SEQ ID NO: 4875 - DNA, 3346 bp, Homo Sapiens
  NM_020468
gcggccgcgcacgcgcggcggggggcgtggggctgggcccagccggacgcgacctcagcctgcggcggctaactgccggtaggcgtctgtgtgcgccgccaagtcggtggggcggggacgcgaggtgtggatggggggtcgccttgacctctgcctcagccagtagcgcagtctcggcctcgccgttacggagatggtgccctgggtgcggacgatggggcagaagctgaagcagcggctgcgactggacgtgggacgcgagatctgccgccagtacccgctgttctgcttcctgctgctctgtctcagcgccgcctccctgcttcttaacaggtatattcatattttaatgatcttctggtcatttgttgctggagttgtcacattctactgctcactaggacctgattctctcttaccaaatatattcttcacaataaaatacaaacccaagcagttaggacttcaggaattatttcctcaaggtcatagctgtgctgtttgtggtaaagtgaaatgtaaacgacataggccttctttgctacttgaaaactaccagccatggctagacctgaaaatttcttccaaggttgatgcatctctctcagaggtggatattccatctattataaccaagaaactattaaaagcagcaatgaagcatatagaagtgatagttaaagccagacagaaagtaaaaaatacagagtttttacagcaagctgctttagaagaatatggtccagagcttcatgttgctttgagaagtcgaagagatgaattgcactatttaaggaaacttactgaactgctttttccttatattttgcctcctaaagcaacagactgcagatctctgaccttacttataagagagattctgtctggctctgtgttccttccttctttggatttcctagctgatccagatactgtgaatcatttgcttatcatcttcatagatgacagtccacctgaaaaagcaactgaaccggcttctcctttggttccattcttgcagaaatttgcagaacctagaaataaaaagccatctgtgctgaagttagaattgaagcaaatcagagagcaacaagatcttttatttcgttttatgaactttctgaaacaagaaggcgcagtgcacgtgttgcagttttgtttgactgtggaggaatttaatgatagaattttacgaccagaattatcaaatgatgaaatgctgtctcttcatgaagaattgcagaagatttataaaacatactgtttggatgaaagtattgacaaaattagatttgatcccttcattgtagaagagattcaaagaattgctgaaggcccatacatagatgttgtgaaacttcaaactatgagatgtctttttgaagcatatgaacatgttctttcccttttggagaatgtatttactcctatgttctgccatagtgatgagtatttcagacaacttttaagaggtgcagaatcaccaacacgcaattcaaaattgaacaggaacacacagaaaaggggagaatcatttggaatcagcagaataggtagcaaaattaaaggagtattcaaaagtaccacaatggagggagctatgttgcctaattatggtgtagctgaaggtgaagatgattttattgaagaaggtattgttgtaatggaagatgattctccagtggaggctgtgagcacacctaatactccccgaaaccttgctgcatggaaaattagcattccatatgtagacttttttgaggatccctcctctgaaaggaaggagaaaaaagaaagaattcctgtgttttgtattgatgttgaaagaaatgatagaagagcagttggacacgagcctgaacattggtctgtctatagaagatatcttgaattctatgtacttgaatcaaaactaacagaatttcatggtgcatttcctgatgcccagcttccttctaagaggatcattggccccaaaaattatgaattcttaaagtcaaagagggaagagttccaagaatatctacagaaacttctgcagcatccagaactgagtaatagtcaacttctggcagactttctttcccctaatggtggggaaacacaatttcttgataagatactaccagatgtaaatcttgggaaaattataaaatctgttcctggaaaactaatgaaagagaaaggtcagcatttggaaccttttatcatgaatttcattaattcttgtgagtctccaaagcctaaaccaagtagaccagaactgaccattctcagccctacttcagaaaacaacaagaagcttttcaatgatctgtttaaaaataatgcaaaccgtgctgaaaatacagagagaaagcaaaatcagaattattttatggaggtgatgactgtagaaggagtctatgattacctgatgtatgtaggacgggtagttttccaggttcctgactggcttcatcatctcttaatgggaactcgaatcctctttaaaaacaccctggaaatgtatactgattactatcttcagtgtaaactagaacagctatttcaggagcaccgtttggtctcactcataacacttctcagagatgctatattctgtgaaaacactgaacctcgctctctccaagataagcaaaaaggagcaaaacagacttttgaagaaatgatgaattacattccagatctgttagtcaagtgtattggtgaagaaaccaagtatgaaagcatcagacttctgtttgatggcttacagcaaccagtactcaacaagcagctgacttatgttttattggacattgtgatacaggaactgtttccagagctcaataaggtacaaaaggaagttacctctgtgacatcttggatgtaaacacttggatttggtatagaataacccattgaaatttctgctgtgcgagggtggtagaaatttacttttttgggtatattcttatatatattatgtacatcgctgtctgaaattttagttattttttgtttttaataaagactaacacaaacttaatgattaaaagtgattgagtctcatagtctttcatttgctagctgtgatccaaattttattagaacataagtcacttgttattgccatttttaaaagagaaaattcataatgatgttatggcaaacagataagactgataaacttcgtattgtatagctttgaaaataattatgcctagtatggagaaacaggaataagatctgattttcttagagttaatatattttagtagattggttttccttttttttattttgtacatagttaactgtgtatctataaataaagcatcctatatgagtttttaataataaa

SEQ ID NO: 4876 - DNA, 1138 bp, Homo Sapiens
  NM_020470
gagccaatggcaggcgcgggggatgacgccacggacatggtggccgagaccggcggggtgggggacgtgtcgcgcggccgggtggcctcggtcggtaccctgggcgcggagcagctgcctcattagtattcgtacccacgaggcggcgcagcgggccctcggggacagcgagcgtcgcggccatggcttatcactcgggctacggagcccacggctccaagcacagggcccgggcagccccggatccccctcccctcttcgatgacacaagcggtggttattccagccagcccgggggatacccagccacaggagcagacgtggccttcagtgtcaaccacttgcttggggacccaatggccaatgtggctatggcctatggcagctccatcgcatcccatgggaaggacatggtgcacaaggagctgcaccgttttgtgtctgtgagcaaactcaagtatttttttgctgtggacacagcctacgtggccaagaagctagggctgctggtcttcccctacacacaccagaactgggaagtgcagtacagtcgtgatgctcctctgcccccccggcaagacctcaacgcccctgacctctatatccccacgatggccttcattacttacgtgctcctggctgggatggcactgggcattcagaaaaggttctccccggaggtgctgggcctgtgtgcaagcacagcgctggtgtgggtggtgatggaggtgctggccctgctcctgggcctctacctggccaccgtgcgcagtgacctgagcacctttcacctgctggcctacagtggctacaaatacgtgggaatgatcctcagtgtgctcacggggctgctgttcggcagcgatggctactacgtggcgctggcctggacctcatcggcgctcatgtacttcattgtgcgctctttgcggacagcagccctgggccccgacagcatggggggccccgtcccccggcagcgtctccagctctacctgactctgggagctgcagccttccagcccctcatcatatactggctgactttccacctggtccggtgaccccctggccccagatggcactgagtttttcattcattgaagatttgatttccttgaaaaaaaaaaaaaaaaaa

SEQ ID NO: 4877 - DNA, 2867 bp, Homo Sapiens
  NM_020473
gactccggctgcagccgcgggaggtccggacactggcggccatggaactcaccgggatcgatttgcttagtggtataatacctgaactctgtcagaaatatccagatttaaatttcataattggaggagagggaccaaagagaatcattttggaagaagttcgggaaagataccagctgcatgacagggtgcgtcttttgggagctttagaacacaaggatgttagaaatgtcttagttcaaggacatatttttctgaatacctcccttactgaagcattctgcatggcgatcgtggaagcagccagttgtggtttacaggttgtaagtaccagagttggtggaattcctgaggtgcttccagaaaaccttattattttatgtgagccttcagtaaaatctttgtgtgaaggattggaaaaggctattttccaactgaagtcagggacattgccagctccagaaaacatccataacatagtaaagactttctacacctggaggaatgttgcagaaagaactgaaaaggtatatgaccgggtatcagtggaagctgtgttgccaatggacaaacgactggacagacttatttctcactgcggcccagtaacaggctacatctttgctttgttggcagttttcaacttcctcttcctcattttcttgagatggatgactccagattctatcattgatgttgcaatagatgccactgggccacggggtgcctggactaataactattctcacagtaaaagagggggtgagaataatgagatatctgaaaccaggtagaaggaagcctagattgtaagattttaaacatttgtaatagttctataaagactatggaaaataaccttgcttttggggggtttttgtttttttagagttaatttagtaagttatgctacctctatatcattcaatattttctgttgaggaaagataaaaatgtatgcaattcctgagtgtagaaacttcttgcacttatttaaaatttaggagagaacatttaagccactcaggtatgcaatttttcagactactgaaatccctgtagcagagatgttttaacattatattttgagagctttgggtgctgaagggccaaacgttttctgggcattttttggccagtttttaatgtaacaccattagacactcaccagatgtttacaagttttctttaggggaactacaacaattatatgaactgttttatatcatgttcatatacatttattaggaatctaaatcatgtctttgaacatttattaggttcactcagtaggtgttacatgtaattaacaggttccttgagtaagatagtccatcagttaccagcacattttgaacccctgctctgtgtagaatgttgaactagatgcttcccgccattaaggaccaggggtgcattcactctttgtttaccattcaaatggcttacttcatcataattgtggttgatatgagatcaatatccaacatgccaaaaatgctcatgccagttaatgccaggaaaaaaatcaccgacacactactagtactttgttcctgttgtatgcattctcctaggtagagcctccatcttcagttgtgtttgtgaaggtattttttgctttttaaatactggggaccgatatcactgttgatagtgcagagaaaccctccacatttttcagtgcataattgagttttctataaatgccttcgtgttttctgagcagaatgtacgaggtgtgccatcccaaaaccagctgctaccctgtccttttaatgtaagtcactccccttcactgtggcctcgctgatgtctgataagtattgtcagtgtgcaaaaggctttacttcagaatggtttatttatagcaaactaagttgaaaattttagaaacagtctttgtgggtggatgttattaactgtcattgttgttgcccagagccatgggttttttaaccccaaattatccacatggtgtgtattatgaattctttgaactcttaaggtttttgtgagaaaaggactgtgaattcaaaacaataaggcacttgtgggtgcactacatagattctgacagtgttgtgattctgtataggatttttaaaaatgacaacattcacaaaatttattactttttaaaaaataacatgcctattaactggttgcactgatataaaagaaatatatttgtgttttgtttgtactaaaatgcaaaagcaagagtgcaatttttaaaatctagaagttaggggttttgttggagaaaaatggactgatctttaaactattcagtcttactgggatttttatgcatagaaactcacatataaacatgaaataaacagtgccagtattcataggaaagtgagaaactgtaatatttggccattattctattcaacaggttttagaggcatgccaccattttttccttatatttttgcttaatttttttaaattgtcatttaattcttaaactgtcatttatttgagatggaaataagatctaaagttagttgcctttgcctgtaaaacatgtgatttgcaaattattatttttcttttttttaacaaatggaagtaaatttgtttcacgtaaatcttaattttcaacctttctggataccttaattgtaactgtcagtttgcactggtcggtatatggaaacacattgctctaccctgctacttagttgattttaaagtgaatttacagtgatgagaaatttgtgaaaaatatattgtatttcttttgatgtttcaaaaggttgcctatgaaaaactgatttgttaaaacatgctacatgtccaaaaataaagaccagaatgacattttgataattttcaaaaaaaaaaaaaaaaaa

SEQ ID NO: 4878 - DNA, 3852 bp, Homo Sapiens
  NM_020474
gtgatttctgatgaaactggattggaataattttcatgatctttgtatatttatatatatatatttttaaattttgcatttgacttaaagtgccatgagaaaatttgcatactgcaaggtggtcctagccacctccttgatttgggtactcttggatatgttcctgctgctttacttcagtgaatgcaacaaatgtgatgaaaaaaaggagagaggacttcctgctggagatgttctagagccagtacaaaagcctcatgaaggtcctggagaaatggggaaaccagtcgtcattcctaaagaggatcaagaaaagatgaaagagatgtttaaaatcaatcagttcaatttaatggcaagtgagatgattgcactcaacagatctttaccagatgttaggttagaagggtgtaaaacaaaggtgtatccagataatcttcctacaacaagtgtggtgattgttttccacaatgaggcttggagcacacttctgcgaactgtccatagtgtcattaatcgctcaccaagacacatgatagaagaaattgttctagtagatgatgccagtgaaagagactttttgaaaaggcctttagagagttatgtgaaaaaactaaaagtaccagttcatgtaattcgaatggaacaacgttctggattgatcagagctagattaaaaggagctgctgtgtctaaaggccaagtgatcaccttcctggatgcccattgtgagtgtacagtgggatggctggagcctctcttggccaggatcaaacatgacaggagaacagtggtgtgtcccatcatcgatgtgatcagtgatgatacttttgagtacatggcaggctctgatatgacctatggtgggttcaactggaagctcaattttcgctggtatcctgttccccaaagagaaatggacagaaggaaaggtgatcggactcttcctgtcaggacacctaccatggcaggaggccttttttcaatagacagagattactttcaggaaattggaacatatgatgctggaatggatatttggggaggagaaaacctagaaatttcctttaggatttggcagtgtggaggaactttggaaattgttacatgctcacatgttggacatgtgtttcggaaagctacaccttacacgtttccaggaggcacagggcagattatcaataaaaataacagacgacttgcagaagtgtggatggatgaattcaagaatttcttctatataatttctccaggtgttacaaaggtagattatggagatatatcgtcaagagttggtctaagacacaaactacaatgcaaacctttttcctggtacctagagaatatatatcctgattctcaaattccacgtcactatttctcattgggagagatacgaaatgtggaaacgaatcagtgtctagataacatggctagaaaagagaatgaaaaagttggaatttttaattgccatggtatggggggtaatcaggttttctcttatactgccaacaaagaaattagaacagatgacctttgcttggatgtttccaaacttaatggcccagttacaatgctcaaatgccaccacctaaaaggcaaccaactctgggagtatgacccagtgaaattaaccctgcagcatgtgaacagtaatcagtgcctggataaagccacagaagaggatagccaggtgcccagcattagagactgcaatggaagtcggtcccagcagtggcttcttcgaaacgtcaccctgccagaaatattctgagaccaaatttacaaaaaaacgaaaaaaataaggattgactgggctacctcagcatacatttctgccacattcttaagtagcaaaaaaggaaaagtgctttcctcctctgcaggatgtaaggtttatcagccattaaaacttagacttctctagcttttcactagctgtgaaccagccttcctgtccatggacgtgaaactgcatagtaatgagactgtgcacactgatgtttacaagattgaaagagtctttctccgaaaatcatggtaaagaatactgagacaatgaaaaaaaatcaacaaaatatgctttctggagaactgtaccttttatggtttgcttgcacatcagtagtttctgctgaacgtgctgtcataatgaagagatttccaagattttttttcctgattagaactggtagccagtatattaaatattgatataaaaataaaagaactggaaccagattcagaatcatgaaaacaacatttttacaacaacaaaaaaactatattaaacagggtttaaaggaaattaaaacagaactatgagaagtacaatttgttatagtatagtatcaaatttctatatagattttatacctcagtggggaaaaataactgattccaatgacattcattttgttttcatctgtgatagtcatggatgcttttattttccttggggtgctgaaattgagctgaaaaaaaaaggctctttgaatatagttttaatttctctctacagttttttttgtttggtttgtgggctgttggaattgtaatttttaattgccttctaaaaaatggaaatttaacaatgtctgatctcagctgaacaaattagatgtttcagttgctcttgggtcaactggcttacagatttacatgtgcacacacacacaaatttcttatcacattttcgacttcttcacttgacctaactgattatgcgaaatacccaagattcatgctactgtaccacagatttgttttcacagcaataaatcttcagttctttgtttatgattccacttaacaaaaggcctgcagaagtgatttattatttgggtatttggagataatacatttgatggttttttggaaaacctttttcactccatactcagatatgcttcattgtcaaatgcatatttagattagattattgaattgtaatgtttatctgctgctttttttaaataaaatttgactgaaaatgtttaattggcattttttaatgacttagccaaagaagtgcagctattattccatattaataggcttgcatttcttttcctaaatcttatttaggctaaatcagttttatttttctctgattttttttaataccacagaatcacctgagtgtcaattgaaagttgtcaattaaaaggtaaccttttaatctcgtaggaggaatctcattaagacatttttcctgatatgtagagcagtctgttggcaaaaatgcatatattttctttcatatttgtaaaattatatttaatggaattcttttctttgattatcaaggactttcactgcaggcagtgctatttcttgtgcctaagaatgtttccaaaagtcgcatcgctaatgatatttgccaagttgagtgtacacaaagtttctcatatcctgttcaagttaatcaacatcaagcacatggggatgctttagggtgagtctatagtacaaaatgcataaaccatgtccccaggaaatttgaaaggaagcaggtgctgaatggaatttttttccttttccatgagctgtgttaattctatctccagtaggcctaatgcttgaataagcaagatgtctaatcaataaattattttcatgctcagaatttcaggtttttgtactccagcatagcttggtcttatttcttactgtatgaaagcttaacagcaatgtgatttaaggttttgttttaaatgggagatgtaagtgatttaattcatgggtacttttagaacctgatagataatcccattgcctttatttttctaattaaagaattcctaaatactttgaaaatacaaaatattcctgaataaaaaaaaaaaaaaa

SEQ ID NO: 4879 - DNA, 3304 bp, Homo Sapiens
  NM_020478
gtcacccgggccactcagggcagagcctggctgctgggcagaagggcacttgggccgggctgcttcagccgagagggccattcggtgtcctgcccacagagagagaaacagtgagagaccaagagagcaaaccagagagatagggagggggaatgcaaggggtccctgggggactcaggagtcccagtggagaatgagaggcaggccccccgtggtggccggggccctggctgccagaggaccgggctggtgaggaggcgaggatgtggactttcgtcacccagctgttggtcacgctggtgctgctgagcttcttcctggtcagctgtcagaacgtgatgcacattgtcagggggtccctgtgctttgtgctaaagcacatccaccaggagctggacaaggagctgggggagagcgagggcctcagtgacgacgaggagaccatctccaccagggtggtccggcggcgggtcttcctgaaggggaatgagtttcagaatattccaggggagcaggtgacagaggagcaattcacggatgagcagggcaacattgtcaccaagaagatcattcgcaaggtggttcgacagatagacttgtccagcgccgatgccgcccaggagcacgaggaggtggagctgagagggagtggcctacagccggacctgatagagggcaggaagggggcgcagatagtgaagcgggccagcctgaaaagggggaaacagtgaccccgagccgctctccttggagtagcctctcgggaggatcacacctcgacacccaacccctgaaccccacacactctgccatgcacacaggaggagagctggacctgagggccaccgcagcggtgcacacattcctctgggctgacggcatgacctctgtaagggactcctgctagtcccctcttggcatgaatgactgactgtagacgcatgacctccaggcttcaatcctgcctcttgcaatgacagctgatctgtcggaaccaggacacaaaagcagcaagaagcggggagagagagggatagaaaacaagcgcaggagagcctgcgaacgcaaaagtgaatgagggctttttgtggctggggatgggttttggttttggggttttttttttaaattgttttgacttcgtacagggtactttttcccaacctcatctgtcagaaatccatgtgggcttcctggaaagaaaaaaaaaaaaaagaaaactaggcatgaaatcagtttaacaccttaatcttaagccatgtcctcatctgcccaccctccccaacccacatacctccattccacttgtgacaccccctcgactccctggtgacgctcctcccagatcgctctacatgacattcaggacacacacacacacacacacacaccactcgcctccactgaatctacacacagattttactgtgacttctgaagctgtatagactctgctgtggataaattggaattttttatgttgtctctctctctgccaatttcaatacgaatcatcttccaatggaaaatcattaccttgaagagtgcattcggggttccttgtgttagggacttaagaatctgaggcgaggacccccaggcttacctgtaggactcaaagggagccaggaccccatctgaaagggtctcctctctcagttgggggacaggccggtggctgacccaggattgcaccagcatgtccatagagaagaggttttctatgtcttcaagcactatatcatagtccgtgttcaaagtgtaaactgtacagtaatcagccttgtgtatatgaaaaacaataaatactatgcaaaccaatagaaacatttagcagtacgtacagagcctgacagcgcagctcctgaggacttctgcggctgcaggagaaggagctgtggcctgtctttcagtgaaagaggaaggaaaggagtagggctagtgaatgtatctgccaggtcttagaagtcaggaccacccagggtctcccagagtgaacttggtgctctaagtccaggcagcctgcaggctggggaccctgggtgcaggtgccaggctcgaggctgttccctgtcctgcctcagtgcctcccctctgcccagcccctgtggcctcttggagaggcgagccagggggctccccggaccgcatggccggtgagagtagagtcggaggcggagagcctggacgcccagaggccggggccaggctctgggtcaaggcaggaaggagacagacagctggcagttcctcgcctcggtgccatcagggaggagccttaagttccactagagcctccggcccagggaggccagaatcagcacaatcccggccccgccctcgcggcgggcgcccccagggccaggagagagagacagggctggctcctctcgcccctggagccgcggtgtggacggcccggccccgtccgccccgccgctctgcgggagtgtcctcgggacacacttaaaccttccaagtagcacagaagccccctccacgtcagaggccccctggccgcggggcctgtgagcggagaggggccctgcttcccacacaaatccgccccggtgcacccccggccaggcaggccccggggcggcctaggcgccttgtcggccgggggtggggctgcttttgcttcctttagaggggcgggcagggagaggaagctctagctccgggcctgagtttccccgaggctgcgtcggaggagctgcagggcgagcccggacggctgccgtctccgccagaggccaccccggcccggcctccagggcgcagaggcgcccccctccatcctcccccatcccgggggccacggcaggggggccgcacagcgcggctgggaccgattcggtgacggcccaaggaagctgggctcagggctcgcctctcccgcctcgatcctgcaccttcctctcccaggtcgctgctgcagccaacccagtagcccccttagcgcccccgcggaccccgcagctccagactccgctttggcacctctgctccggctggcatggctgcacgctccggctgctagtaggagccgttaggggaggagtttggggtctccacacgatgcctagagaatgctgcagtctgcacattagacgctttttagaagttttgaaattaccttgatttttttaattgttatgaaaatggatcttttcttgactctcccacatgctctgttatgggagagaatcccctaccctactctgatgtatagaccattctcccttcaccagccgaaccaatgtcaaaattaataaagaaatggactaatggcaaaaaaaaa

SEQ ID NO: 4880 - DNA, 3213 bp, Homo Sapiens
  NM_020524
gaccgaagcaagagctggttcaggtggcagccacagcagcctcagggacctcagcaactatggcctcctgcccagactctgataatagctgggtgcttgctggctccgagagcctgccagtggagacactgggcccggcatccaggatggacccagaatctgagagagccctgcaggcccctcacagcccctccaagacagatgggaaagaattagctgggaccatggatggagaagggacgctcttccagactgaaagccctcagtctggcagcattctaacagaggagactgaggtcaagggcaccctggaaggtgatgtttgtggtgtggagcctcctggcccaggagacacagtagtccagggagacctgcaggagaccaccgtggtgacaggcctgggaccagacacacaggacctggaaggccagagccctccacagagcctgccttcaacccccaaagcagcttggatcagggaggagggccgctgctccagcagtgacgatgacaccgacgtggacatggagggtctgcggagacggcggggccgggaggccggcccacctcagcccatggtgcccctggctgtggagaaccaggctgggggtgagggtgcaggcggggagctgggcatctccctcaacatgtgcctccttggggccctggttctgcttggcctgggggtcctcctcttctcaggtggcctctcagagtctgagactgggcccatggaggaagtggagcggcaggtcctcccagaccccgaggtgctggaagctgtgggggacaggcaggatgggctaagggaacagctgcaggccccagtgcctcctgacagtgtccccagcctgcaaaacatgggtcttctgctggacaagctggccaaggagaaccaggacatccggctgctgcaggcccagctgcaggcccaaaaggaagagcttcagagcctgatgcaccagcccaaagggctagaggaggagaatgcccagctccggggggctctgcagcagggcgaagccttccagcgggctctggagtcagagctgcagcagctgcgggcccggctccaggggctggaggccgactgtgtccggggcccagatggggtgtgcctcagtgggggtagaggcccacagggtgacaaggccatcagggagcaaggccccagggagcaggagccagaactcagcttcctgaagcagaaggaacagctggaggctgaggcacaggcattaaggcaagagttagagaggcagcgacggctgctggggtctgtacagcaggatctggagaggagcttgcaggatgccagccgcggggacccagctcatgctggcttggctgagctgggccacagattggcccagaaactgcagggcctggagaactggggccaggaccctggggtctctgccaatgcctcaaaggcctggcaccagaagtcccacttccagaattctagggagtggagtggaaaggaaaagtggtgggatgggcagagagaccggaaggctgagcactggaaacataagaaggaagaatctggccgggaaaggaagaagaactggggaggtcaggaggacagggagccagcaggaaggtggaaggagggcaggccaagggtggaggagtcggggagcaagaaggagggcaagcgacagggcccgaaggaacccccaaggaaaagtggtagcttccactcctctggagaaaagcagaagcaacctcggtggagggaagggactaaggacagccatgaccccctgccatcctgggcagagctgttgaggcccaagtaccgggcaccccagggctgctcaggtgtggacgagtgtgcccggcaggagggcctgactttctttggcacagagctagccccagtgcggcaacaggagctggcctctctgctaagaacatacttggcacggctgccctgggctgggcagctgaccaaggagctacccctctcacctgctttctttggtgaggatggcatcttccgtcatgaccgcctccgcttccgggattttgtggatgccctggaggacagcttggaggaggtggctgtgcaacagacaggtgatgatgatgaagtagatgactttgaggacttcatcttcagccacttctttggagacaaagcactgaagaagaggtcagggaagaaggacaagcactcacagagcccaagagctgcggggcccagggaggggcacagccatagccaccaccaccaccaccggggctgacaccctgccccacagggaatggccttggcctggcccagcccaagatcccagcgttatctaactcctggagggtggactctgtcctggcttgtttggtgtcctcagatatctttcacacagtagagcaaaatcaccagccctgcactgatgtcactttatgtagaaaaaggccttagctggacctgcgttgccgtctatgcaaatgcatgcaaatactccaggccctgggatgtgggcttgtgttttgtcactgtgaagggggagatgggagaggagcctgttttggggtggggtctggggaaggcaatctgattctgaagctaaagagctttcatcctcttgagtgtatgtccccatagtgggccccttgacccacatgctgaccggtgccttgggatttgactagagttgctggctcgaggcccagcacgaggacttaccctggggttttgttaggtttggaagcagctgtccctagggggtgaagtcccccccctttttttttttacccctgcttctcccacggcttcacctccctatgtgaactgtagactcagatcccaataaagtgctgttgcagctatgatgctaggtggtttctaagcacaggggacaccccacaccccctgcctgaatggatgggtccatcccaggcactggtacttgcccccttgttctgtatccccctttgcccttgccttgcccttccaacaaaccctaggcccttgagaagctgatacttctccttttgctcacagctgccttggccccacccctgggagatgtagcaaattgagtgtgggttttggagtctgagcctcaggctcaaatccaggccaagtgatcttgggcaagttaatctctgggaactttgggtttcttatcctcaaaaaaggcgatggaagggctggggaagtgattaaataaaagcaacgcaagaaaaaaaaaaaaaaaaaaa

SEQ ID NO: 4881 - DNA, 1579 bp, Homo Sapiens
  NM_020529
agcccacagcagtccgtgccgccgtcccgcccgccagcgccccagcgaggaagcagcgcgcagcccgcggcccagcgcacccgcagcagcgcccgcagctcgtccgcgccatgttccaggcggccgagcgcccccaggagtgggccatggagggcccccgcgacgggctgaagaaggagcggctactggacgaccgccacgacagcggcctggactccatgaaagacgaggagtacgagcagatggtcaaggagctgcaggagatccgcctcgagccgcaggaggtgccgcgcggctcggagccctggaagcagcagctcaccgaggacggggactcgttcctgcacttggccatcatccatgaagaaaaggcactgaccatggaagtgatccgccaggtgaagggagacctggccttcctcaacttccagaacaacctgcagcagactccactccacttggctgtgatcaccaaccagccagaaattgctgaggcacttctgggagctggctgtgatcctgagctccgagactttcgaggaaatacccccctacaccttgcctgtgagcagggctgcctggccagcgtgggagtcctgactcagtcctgcaccaccccgcacctccactccatcctgaaggctaccaactacaatggccacacgtgtctacacttagcctctatccatggctacctgggcatcgtggagcttttggtgtccttgggtgctgatgtcaatgctcaggagccctgtaatggccggactgcccttcacctcgcagtggacctgcaaaatcctgacctggtgtcactcctgttgaagtgtggggctgatgtcaacagagttacctaccagggctattctccctaccagctcacctggggccgcccaagcacccggatacagcagcagctgggccagctgacactagaaaaccttcagatgctgccagagagtgaggatgaggagagctatgacacagagtcagagttcacggagttcacagaggacgagctgccctatgatgactgtgtgtttggaggccagcgtctgacgttatgagcgcaaaggggctgaaagaacatggacttgtatatttgtacaaaaaaaaagttttatttttctaaaaaaagaaaaaagaagaaaaaatttaaagggtgtacttatatccacactgcacactgcctggcccaaaacgtcttattgtggtaggatcagccctcattttgttgcttttgtgaactttttgtaggggacgagaaagatcattgaaattctgagaaaacttcttttaaacctcacctttgtggggtttttggagaaggttatcaaaaatttcatggaaggaccacattttatatttattgtgcttcgagtgactgaccccagtggtatcctgtgacatgtaacagccaggagtgttaagcgttcagtgatgtggggtgaaaagttactacctgtcaaggtttgtgttaccctcctgtaaatggtgtacataatgtattgttggtaattattttggtacttttatgatgtatatttattaaacagatttttacaaatgaaaaaaaaaaaaa

SEQ ID NO: 4882 - DNA, 1869 bp, Homo Sapiens
  NM_020530
gtcacccccagcgggcgcgggccggagcacgggcacccagcatgggggtactgctcacacagaggacgctgctcagtctggtccttgcactcctgtttccaagcatggcgagcatggcggctataggcagctgctcgaaagagtaccgcgtgctccttggccagctccagaagcagacagatctcatgcaggacaccagcagactcctggacccctatatacgtatccaaggcctggatgttcctaaactgagagagcactgcagggagcgccccggggccttccccagtgaggagaccctgagggggctgggcaggcggggcttcctgcagaccctcaatgccacactgggctgcgtcctgcacagactggccgacttagagcagcgcctccccaaggcccaggatttggagaggtctgggctgaacatcgaggacttggagaagctgcagatggcgaggccgaacatcctcgggctcaggaacaacatctactgcatggcccagctgctggacaactcagacacggctgagcccacgaaggctggccggggggcctctcagccgcccacccccacccctgcctcggatgcttttcagcgcaagctggagggctgcaggttcctgcatggctaccatcgcttcatgcactcagtggggcgggtcttcagcaagtggggggagagcccgaaccggagccggagacacagcccccaccaggccctgaggaagggggtgcgcaggaccagaccctccaggaaaggcaagagactcatgaccaggggacagctgccccggtagcctcgagagcaccccttgccggtgaaggatgcggcaggtgctctgtggatgagaggaaccatcgcaggatgacagctcccgggtccccaaacctgttcccctctgctactagccactgagaagtgcactttaagaggtgggagctgggcagacccctctacctcctccaggctgggagacagagtcaggctgttgcgctcccacctcagccccaagttccccaggcccagtggggtggccgggcgggccacgcgggaccgactttccattgattcaggggtctgatgacacaggctgactcatggccgggctgactgcccccctgccttgctccccgaggcctgccggtccttccctctcatgacttgcagggccgttgcccccagacttcctcctttccgtgtttctgaaggggaggtcacagcctgagctggcctcctatgcctcatcatgtcccaaaccagacacctggatgtctgggtgacctcactttaggcagctgtaacagcggcagggtgtcccaggagccctgatccgggggtccagggaatggagctcaggtcccaggccagccccgaagtcgccacgtggcctggggcaggtcactttacctctgtggacctgttttctctttgtgaagctagggagttagaggctgtacaaggcccccactgcctgtcggttgcttggattccctgacgtaaggtggatattaaaaatctgtaaatcaggacaggtggtgcaaatggcgctgggaggtgtacacggaggtctctgtaaaagcagacccacctcccagcgccgggaagcccgtcttgggtcctcgctgctggctgctccccctggtggtggatcctggaattttctcacgcaggagccattgctctcctagagggggtctcagaaactgcgaggccagttccttggagggacatgactaatttatcgatttttatcaatttttatcagttttatatttataagccttatttatgatgtatatttaatgttaatattgtgcaaacttatatttaaaacttgcctggtttctaaaaaaaaaaaaaaaaaa

SEQ ID NO: 4883 - DNA, 2251 bp, Homo Sapiens
  NM_020531
gcgcaacgtcatttccgcgtacgggggagggcgggcctggagtctgagccggcgccgctcagtgtgaggtggtttctgcgggtgaggctggcgcccgtaccatgagcgaggcggacgggctgcgacagcgccggcccctgcggccgcaggtcgtcacagacgatgatggccaggccccggaggctaaggacggcagctcctttagcggcagagttttccgagtgaccttcttgatgctggctgtttctctcaccgttcccctgcttggagccatgatgctgctggaatctcctatagatccacagcctctcagcttcaaagaacccccgctcttgcttggtgttctgcatccaaatacgaagctgcgacaggcagaaaggctgtttgaaaatcaacttgttggaccggagtccatagcacatattggggatgtgatgtttactgggacagcagatggccgggtcgtaaaacttgaaaatggtgaaatagagaccattgcccggtttggttcgggcccttgcaaaacccgagatgatgagcctgtgtgtgggagacccctgggtatccgtgcagggcccaatgggactctctttgtggccgatgcatacaagggactatttgaagtaaatccctggaaacgtgaagtgaaactgctgctgtcctccgagacacccattgaggggaagaacatgtcctttgtgaatgatcttacagtcactcaggatgggaggaagatttatttcaccgattctagcagcaaatggcaaagacgagactacctgcttctggtgatggagggcacagatgacgggcgcctgctggagtatgatactgtgaccagggaagtaaaagttttattggaccagctgcggttcccgaatggagtccagctgtctcctgcagaagactttgtcctggtggcagaaacaaccatggccaggatacgaagagtctacgtttctggcctgatgaagggcggggctgatctgtttgtggagaacatgcctggatttccagacaacatccggcccagcagctctggggggtactgggtgggcatgtcgaccatccgccctaaccctgggttttccatgctggatttcttatctgagagaccctggattaaaaggatgatttttaagctctttagtcaagagacggtgatgaagtttgtgccgcggtacagcctcgtcctagaactcagcgacagcggtgccttccggagaagcctgcatgatcccgatgggctggtggccacctacatcagcgaggtgcacgaacacgatgggcacctgtacctgggctctttcaggtcccccttcctctgcagactcagcctccaggctgtttagccctcccagatagctgcccctgccacgcaggccaggagtcttcacactcaggcaccaggcctggtccaggaggagctgtggacacagtcgtggttcaagtgtccacatgcacctgttagtccctgagaggtggtgggaatggctgcttcattcctcgaggatgcccgggccccacctgggcttgtctttctgtttagagggaagtgtaacatatctgccatgaggaacataaattcatgtaaagccattttctcttaaacaaaacaaaactttctaagtacagtcattctctaggatttgggaagctccttgcacttggaacagggctcaggtgggtggagcagtaaggcactacccagagagcttgctgctgcggccctgtcctgcggcctcaaagttcttctttactatatataacgtgcggtcatacctttcttcgttgtggtggggatggaagagcagagggagcatggcccaggggtgttgaggccagcggtgagagccgtgttagccaagacatggaactgtgttctcaagggttatgtggggcgtgggctctccatagtgtgtatgaaaagcttgttgactctagcggctcagagaggactttgctgggtttctttctgtgaatatctccgtgctgaccatgctggaattggatgattctgcaattcgggacctactgcaggggtccgtttagtaacgtcttgtctgtgatctttgttcttgacctctagaccccaagatgtgaacagtgcacgtgttaatgtcatctttgctcatgtgttataagccccaagttgctgtatattttcacaagtatgtctacacactggtcatgattttgataataaataacgataaatcgaaaaaaaaaaaaaaaaaaaaaaaaaaaaaaa

SEQ ID NO: 4884 - DNA, 4871 bp, Homo Sapiens
  NM_020532
agtccctgccctcccctggggagggtgagtcacgccaaactgggcggagagtccgctggcctcactcctagctcatctgggcggcggcggcaagtggggacagggcgggtggcgcatcaccggcgcggaggcaggaggagcagtctcattgttccgggagccgtcaccacagtaggtccctcggctcagtcggcccagcccctctcagtcctccccaacccccacaaccgcccgcggctctgagacgcggccccggcggcggcggcagcagctgcagcatcatctccaccctccagccatggaagacctggaccagtctcctctggtctcgtcctcggacagcccaccccggccgcagcccgcgttcaagtaccagttcgtgagggagcccgaggacgaggaggaagaagaggaggaggaagaggaggacgaggacgaagacctggaggagctggaggtgctggagaggaagcccgccgccgggctgtccgcggccccagtgcccaccgcccctgccgccggcgcgcccctgatggacttcggaaatgacttcgtgccgccggcgccccggggacccctgccggccgctccccccgtcgccccggagcggcagccgtcttgggacccgagcccggtgtcgtcgaccgtgcccgcgccatccccgctgtctgctgccgcagtctcgccctccaagctccctgaggacgacgagcctccggcccggcctccccctcctcccccggccagcgtgagcccccaggcagagcccgtgtggaccccgccagccccggctcccgccgcgcccccctccaccccggccgcgcccaagcgcaggggctcctcgggctcagtggatgagaccctttttgctcttcctgctgcatctgagcctgtgatacgctcctctgcagaaaatatggacttgaaggagcagccaggtaacactatttcggctggtcaagaggatttcccatctgtcctgcttgaaactgctgcttctcttccttctctgtctcctctctcagccgcttctttcaaagaacatgaataccttggtaatttgtcaacagtattacccactgaaggaacacttcaagaaaatgtcagtgaagcttctaaagaggtctcagagaaggcaaaaactctactcatagatagagatttaacagagttttcagaattagaatactcagaaatgggatcatcgttcagtgtctctccaaaagcagaatctgccgtaatagtagcaaatcctagggaagaaataatcgtgaaaaataaagatgaagaagagaagttagttagtaataacatccttcataatcaacaagagttacctacagctcttactaaattggttaaagaggatgaagttgtgtcttcagaaaaagcaaaagacagttttaatgaaaagagagttgcagtggaagctcctatgagggaggaatatgcagacttcaaaccatttgagcgagtatgggaagtgaaagatagtaaggaagatagtgatatgttggctgctggaggtaaaatcgagagcaacttggaaagtaaagtggataaaaaatgttttgcagatagccttgagcaaactaatcacgaaaaagatagtgagagtagtaatgatgatacttctttccccagtacgccagaaggtataaaggatcgttcaggagcatatatcacatgtgctccctttaacccagcagcaactgagagcattgcaacaaacatttttcctttgttaggagatcctacttcagaaaataagaccgatgaaaaaaaaatagaagaaaagaaggcccaaatagtaacagagaagaatactagcaccaaaacatcaaacccttttcttgtagcagcacaggattctgagacagattatgtcacaacagataatttaacaaaggtgactgaggaagtcgtggcaaacatgcctgaaggcctgactccagatttagtacaggaagcatgtgaaagtgaattgaatgaagttactggtacaaagattgcttatgaaacaaaaatggacttggttcaaacatcagaagttatgcaagagtcactctatcctgcagcacagctttgcccatcatttgaagagtcagaagctactccttcaccagttttgcctgacattgttatggaagcaccattgaattctgcagttcctagtgctggtgcttccgtgatacagcccagctcatcaccattagaagcttcttcagttaattatgaaagcataaaacatgagcctgaaaaccccccaccatatgaagaggccatgagtgtatcactaaaaaaagtatcaggaataaaggaagaaattaaagagcctgaaaatattaatgcagctcttcaagaaacagaagctccttatatatctattgcatgtgatttaattaaagaaacaaagctttctgctgaaccagctccggatttctctgattattcagaaatggcaaaagttgaacagccagtgcctgatcattctgagctagttgaagattcctcacctgattctgaaccagttgacttatttagtgatgattcaatacctgacgttccacaaaaacaagatgaaactgtgatgcttgtgaaagaaagtctcactgagacttcatttgagtcaatgatagaatatgaaaataaggaaaaactcagtgctttgccacctgagggaggaaagccatatttggaatcttttaagctcagtttagataacacaaaagataccctgttacctgatgaagtttcaacattgagcaaaaaggagaaaattcctttgcagatggaggagctcagtactgcagtttattcaaatgatgacttatttatttctaaggaagcacagataagagaaactgaaacgttttcagattcatctccaattgaaattatagatgagttccctacattgatcagttctaaaactgattcattttctaaattagccagggaatatactgacctagaagtatcccacaaaagtgaaattgctaatgccccggatggagctgggtcattgccttgcacagaattgccccatgacctttctttgaagaacatacaacccaaagttgaagagaaaatcagtttctcagatgacttttctaaaaatgggtctgctacatcaaaggtgctcttattgcctccagatgtttctgctttggccactcaagcagagatagagagcatagttaaacccaaagttcttgtgaaagaagctgagaaaaaacttccttccgatacagaaaaagaggacagatcaccatctgctatattttcagcagagctgagtaaaacttcagttgttgacctcctgtactggagagacattaagaagactggagtggtgtttggtgccagcctattcctgctgctttcattgacagtattcagcattgtgagcgtaacagcctacattgccttggccctgctctctgtgaccatcagctttaggatatacaagggtgtgatccaagctatccagaaatcagatgaaggccacccattcagggcatatctggaatctgaagttgctatatctgaggagttggttcagaagtacagtaattctgctcttggtcatgtgaactgcacgataaaggaactcaggcgcctcttcttagttgatgatttagttgattctctgaagtttgcagtgttgatgtgggtatttacctatgttggtgccttgtttaatggtctgacactactgattttggctctcatttcactcttcagtgttcctgttatttatgaacggcatcaggcacagatagatcattatctaggacttgcaaataagaatgttaaagatgctatggctaaaatccaagcaaaaatccctggattgaagcgcaaagctgaatgaaaacgcccaaaataattagtaggagttcatctttaaaggggatattcatttgattatacgggggagggtcagggaagaacgaaccttgacgttgcagtgcagtttcacagatcgttgttagatctttatttttagccatgcactgttgtgaggaaaaattacctgtcttgactgccatgtgttcatcatcttaagtattgtaagctgctatgtatggatttaaaccgtaatcatatctttttcctatctatctgaggcactggtggaataaaaaacctgtatattttactttgttgcagatagtcttgccgcatcttggcaagttgcagagatggtggagctagaaaaaaaaaaaaaaaagcccttttcagtttgtgcactgtgtatggtccgtgtagattgatgcagattttctgaaatgaaatgtttgtttagacgagatcataccggtaaagcaggaatgacaaagcttgcttttctggtatgttctaggtgtattgtgacttttactgttatattaattgccaatataagtaaatatagattatatatgtatagtgtttcacaaagcttagacctttaccttccagccaccccacagtgcttgatatttcagagtcagtcattggttatacatgtgtagttccaaagcacataagctagaagaagaaatatttctaggagcactaccatctgttttcaacatgaaatgccacacacatagaactccaacatcaatttcattgcacagactgactgtagttaattttgtcacagaatctatggactgaatctaatgcttccaaaaatgttgtttgtttgcaaatatcaaacattgttatgcaagaaattattaattacaaaatgaagatttataccattgtggtttaagctgtactgaactaaatctgtggaatgcattgtgaactgtaaaagcaaagtatcaataaagcttatagacttaaaaaaaaaaaaaaaaaaaaaaaaaaaaaaa

SEQ ID NO: 4885 - DNA, 2118 bp, Homo Sapiens
  NM_020533
cacgtgaccgaggcacagatcagctgatgccggagggtttgaagccgcgccgcgagggagcgaggtcgcagtgacagcggcgggcgatcggacccaggctgccccgccgtacccgcctgcgtcccgcgctcccgccccagcatgacagccccggcgggtccgcgcggctcagagaccgagcggcttctgacccccaaccccgggtatgggacccaggcggggccttcaccggcccctccgacacccccagaagaggaagaccttcgccgtcgtctcaaatactttttcatgagtccctgcgacaagtttcgagccaagggccgcaagccctgcaagctgatgctgcaagtggtcaagatcctggtggtcacggtgcagctcatcctgtttgggctcagtaatcagctggctgtgacattccgggaagagaacaccatcgccttccgacacctcttcctgctgggctactcggacggagcggatgacaccttcgcagcctacacgcgggagcagctgtaccaggccatcttccatgctgtggaccagtacctggcgttgcctgacgtgtcactgggccggtatgcgtatgtccgtggtgggggtgacccttggaccaatggctcagggcttgctctctgccagcggtactaccaccgaggccacgtggacccggccaacgacacatttgacattgatccgatggtggttactgactgcatccaggtggatccccccgagcggccccctccgccccccagcgacgatctcaccctcttggaaagcagctccagttacaagaacctcacgctcaaattccacaagctggtcaatgtcaccatccacttccggctgaagaccattaacctccagagcctcatcaataatgagatcccggactgctataccttcagcgtcctgatcacgtttgacaacaaagcacacagtgggcggatccccatcagcctggagacccaggcccacatccaggagtgtaagcaccccagtgtcttccagcacggagacaacagcttccggctcctgtttgacgtggtggtcatcctcacctgctccctgtccttcctcctctgcgcccgctcactccttcgaggcttcctgctgcagaacgagtttgtggggttcatgtggcggcagcggggacgggtcatcagcctgtgggagcggctggaatttgtcaatggctggtacatcctgctcgtcaccagcgatgtgctcaccatctcgggcaccatcatgaagatcggcatcgaggccaagaacttggcgagctacgacgtctgcagcatcctcctgggcacctcgacgctgctggtgtgggtgggcgtgatccgctacctgaccttcttccacaactacaatatcctcatcgccacactgcgggtggccctgcccagcgtcatgcgcttctgctgctgcgtggctgtcatctacctgggctactgcttctgtggctggatcgtgctggggccctatcatgtgaagttccgctcactctccatggtgtctgagtgcctgttctcgctcatcaatggggacgacatgtttgtgacgttcgccgccatgcaggcgcagcagggccgcagcagcctggtgtggctcttctcccagctctacctttactccttcatcagcctcttcatctacatggtgctcagcctcttcatcgcgctcatcaccggcgcctacgacaccatcaagcatcccggcggcgcaggcgcagaggagagcgagctgcaggcctacatcgcacagtgccaggacagccccacctccggcaagttccgccgcgggagcggctcggcctgcagccttctctgctgctgcggaagggacccctcggaggagcattcgctgctggtgaattgattcgacctgactgccgttggaccgtaggccctggactgcagagacccccgcccccgaccccgcttatttatttgtagggtttgcttttaaggatcggctccctgtcgcgcccgaggagggcctggacctttcgtgtcggacccttgggggcggggagactgggtggggagggtgttgaataaaagggaaaataaatgtgtcgttttcatttttaaaaaaaaaaaaaaaaaaaaa

SEQ ID NO: 4886 - DNA, 3714 bp, Homo Sapiens
  NM_020536
ttatcagagacattgagaggcaaattcggaaaaaagaaaacattcgtcttttgggagaacagattattttgactgagcaacttgaagcagaaagagagaagatgttattggcaaaaggatctcaaaaatcatgacttgaatgtgaaatatctgttggacagacaacacgagtttgtgtgtgtgtgttgatggagagtagcttagtagtatcttcatctttttttttggtcactgtccttttaaacttgatcaaataaaggacagtgggtcatataagttactgctttcagggtcccttatatctgaataaaggagtgtgggcagacactttttggaagagtctgtctgggtgatcctggtagaagccccattagggtcactgtccagtgcttagggttgttactgagaagcactgccgagcttgtgagaaggaagggatggatagtagcatccacctgagtagtctgatcagtcggcatgatgacgaagccacgagaacatcgacctcagaaggactggaggaaggtgaagtggagggagagacgctcctgatcgtcgaatccgaggatcaggcatcagtggacttatcgcacgaccagagtggggattccctcaacagtgatgaaggagacgtgtcttggatggaggagcagctgtcctacttctgtgacaagtgccaaaaatggataccagccagtcagctgagggaacagctcagttaccttaagggtgataatttttttaggtttacttgttcggattgctcagcagatggcaaggagcagtatgaaaggctgaagctgacatggcagcaagtcgtcatgttggcaatgtacaacttgtctctggaaggaagtggacgtcaaggttatttcaggtggaaagaagatatctgtgcttttattgagaaacattggacttttttactagggaataggaaaaagacgtctacctggtggagcaccgtggcaggttgcctcagcgtgggaagtcccatgtacttccgttcaggtgctcaggaatttggagagccaggatggtggaaacttgttcataacaagcccccaacgatgaaacctgaaggagagaagttgtctgcctctactttgaaaataaaagcagcctcaaaaccaactttagatcccatcattactgttgagggacttagaaaacgagcaagtcggaatcctgtggaatctgccatggaattaaaagagaaaaggtctcgaactcaggaagcaaaagacattagaagagcccagaaggaggccgctggctttcttgacaggagcacatcttctacccctgtaaaattcataagccgaggccgcaggccagatgtgattctggaaaaaggcgaagtgattgacttttcctccttgagctcctctgaccgcaccccgctgacaagcccatctccttctccttctctggatttctctgcccctggtacacctgcctctcattctgccacacctagcttgctttcagaagcagatctgattccagatgtgatgcccccacaagccttgtttcatgatgacgatgagatggaaggcgatggagtcatagacccagggatggagtacgtcccaccccctgctgggtcagtagcttctgggccagtggttgggggcagaaagaaggtcagaggccctgaacagataaagcaggaggtagagagtgaggaggaaaaacccgacaggatggatattgacagtgaagacacagattcaaacacatctttgcaaacaagggctagagaaaagaggaagcctcagctggagaaggacacaaagccgaaagagcccaggtatactcccgtgagcatctacgaggaaaagctgctgctcaagaggctggaagcttgtcccggtgctgttgccatgactccggaagctcggagactgaaacgcaaactgattgtcagacaagcgaaaagggataggggattaccactttttgacttggatcaagttgttaatgctgctcttttgttagttgacgggatttatggagccaaagaaggaggaatttccagacttccagctggacaagccacgtacagaaccacctgtcaggacttcagaatccttgaccgataccagacttccttgccgtccaggaagggatttcgacaccagaccaccaagtttttgtatcgcttggtaggatcagaagatatggctgtggaccagagtattgtcagcccttatacctctcggatcttgaaaccttatatcaggcgtgattatgaaacaaagccacccaaactgcagctcctgtcacagattcgttcccacctgcacaggagcgaccctcactggacgccggagcccgacgcacctctcgattactgttatgtgcggccaaatcacatcccaacgatcaactccatgtgtcaggagtttttttggcctggcattgacctgtctgagtgtctgcagtacccagacttcagtgttgttgttctttataaaaaagtcatcattgcctttggcttcatggttcctgatgtgaaatacaatgaagcttacatttcatttctgttcgtccaccctgaatggagaagagcagggattgcaactttcatgatctatcatctgattcagacctgcatgggcaaggacgtaacccttcacgtctcagcaagcaaccccgctatgctactgtaccagaagtttggattcaagactgaagaatatgtattagatttctatgataaatattacccattggagagtacagagtgtaaacacgcattctttctgaggctccggcgctgatgcgaatacagctcacagagaaacgcatgtgctattggagaacaggtctttgtggagatctaaaggcagtgattgatttcacagggagctctaatctctgtgattacatggtccttcaaactcccaaccaaagtgagaaaagcggcatgcagtgaaatgagcagtgagcagccctttagcaaaatcgccctccagtccttcctggagatgccttcagccagcatcccagactccacagttatttatgaatgatgtcgtgattctccctccacctgacagtttgtaagagtgaaagagcatctaacctgatgctcttggagagagataacctgtctgtcataacttaaaggatgagaaaatgtggtgtagctattaaagattcatgcagtcccaaaaggcactgtcctgggatgatgagagattataaggtgatttcataaaaggaatccaaccctgtgcccggccattgatgtgttgtcattgaatccaggaggatttctagggcactgaagttttgttgtttcttttgctgactttggttacagtcagaaaaaataaactagatgtttgtgtctacatgttctacctgttgtacctattagcatcttcctgcagggacttgggcccatggcctgggaggttggtttgggattggggttgttgggcagcctgccattcacctggcctatcctggcccttctcatgcccaagacagttgtttcacaggagtggaagtgtgggtgatgcaagtagaaccctctagatgtaccctgtgtggtctgcaggactggactgtttgctgtgtttgtggatgttggcgatagactgtcaattaggttgtttgtgatccaacaagaacatttccaaaagtatctaggtgttctcaaataaaaagctttctttgcacaacccatggccagagcgtcaa

SEQ ID NO: 4887 - DNA, 708 bp, Homo Sapiens
  NM_020548
agtgcaatctgggcgatcgcttcctggtcctcgcctcctccgctgtctccctggagttcttgcaagtcggccaggatgtctcaggtacagcgcgtgcacagccaggctgcgaagacccttgtctgagaccgagctatgtggggcgacctctggctcctcccgcctgcctctgccaatccgggcactgggacagaggctgagtttgagaaagctgcagaggaggttaggcaccttaagaccaagccatcggatgaggagatgctgttcatctatggccactacaaacaagcaactgtgggcgacataaatacagaacggcccgggatgttggacttcacgggcaaggccaagtgggatgcctggaatgagctgaaagggacttccaaggaagatgccatgaaagcttacatcaacaaagtagaagagctaaagaaaaaatacgggatatgagagactggatttggttactgtgccatgtgtttatcctaaactgagacaatgccttgtttttttctaataccgtggatggtgggaattcgggaaaataaccagttaaaccagctactcaaggctgctcaccatacggctctaacagattaggggctaaaacgattactgactttccttgagtagtttttatctgaaatcaattaaaagtgtatttgttactttaaataaaaaaaaaaaaaaaaaaaaaaaaaaaaaaaa

SEQ ID NO: 4888 - DNA, 3307 bp, Homo Sapiens
  NM_020553
gtcaacagccacttcctccctggggcttaacaggcattccttgaagcctgccccgggcagttagtccttcccttttgtgtgaactctcggctgttttcgttgtctgcacacagagcagtggtctagggagcgaagggttttggaatggaccttttcctttcttagcttgctgtagggattgtgcttcagctaagtaaagtggaaaaacagaagtacaaaagcaacagccccagatctaagggcaccgtagctctggaatctggattttattccagattcaaccctcagcagggagttgaagtggtcagccctgtgctttacaaggctgattgggcagcacccatagtagaattgtcaatataaagtaattgaaaggatcagaatccagggttttcgttgtttttaagtttttaagttttaaaaacaaagttgtttttgttcgtttttaagtttacttctctttaatcggtctcactttattgaccaggctggtttcgaactcctgggcttaagtgatttctcctgtctcagcttctcaaagtgctgggattacaggcgtgagccgctgcacccagcccagaatccagttttaaagagtttattcaagccaaaagctgggaatggccatctgagaaacacagactctaggaaaatggggccagggccctgaagttaaaagttaaagtcttgcttacataggcagaaagcaaagacatttagtaaccttgtagaacattttcttgtataacttttcttgttttaactttcttgtttaacattttctatgcaaggctggtttatgagttacaacctataattaattataggttgttcccctgcctccaccttgttttcttttctctacagcttgttttcatttcctttccaatttaagaatgtgtttaacattctatcccagacaatgtgatggtcatgaagtctctgtcagagaggaaagagggagttaatctataatgaagatcaacagtgaagaggaaaggggtcttccctggaacgcttcagtcatatacgacattttacacaacaataatggacctgtgtaaggaggtatgtgtgggagaagattccagaaggtcttgagacactccagatgaaggttggtgtggggctgtgctgctggagcaccagagagtgaaaagaggttatctccctctgtgccaggccagagtgcagtggtgcaatcacggctcactgtagtctcaacctcctgggctcaagagatcctcccacttcagcctcccaagcagctaagactacagttattttattcttatgagcttgtgggctccatctaccaacctctgggcaaatgctcatctgacttccatagacacacagcaagcagacaaccacacaaagaggaagagggagaatatttaccagccatggaacatctgctctgtgcttatatctcatatgcattatctctaattatcaaaagaaggttagaagcaaggcacaagtcatacctacattcaaggagaggggaccatgcaaaggataaactgcagagagacaacagatttacatcccagacacattcacactgggccaagagcagctgccattgcagattcgagtcacgtccttttttccttccttctccttcttggagttacaacagaagctggggaggtgagagtgcagaaaggacgtggatgaagcagagaggcacgtgcctgtctcattcgcctctggatctgctgcatccaggactgtgccagcacaaagtgggagcccgataaatatttattgaagaaatgaaaggtgacaaaaggcagaaggagggagaccccaaaaagagagatgggatcccactatattgcacaggctggtctcaaactcctgagctcaagcgatcctcctgccttggcctcccacggtgctgagactacaggtgtgagccaccactcccagcctgatttatattttataaagaggcaacgatggagtacacagctgagcaatctcttgcatttctggaccttgagcatcaggaagcttagggagggtgaaaactcagaagaaagctcagagttgagacctttgattttttgcccagagagtccagctaacacactttataacccaaaaggccttacaaatatttcagagcagaggcagcatttttgcactggataaacaaaggtacggtaatttcttcatagtttattttcattacaagtaattcttttcctgaagaaaaatttatatttcagatttatttcccctctcaaaggggaggggagttataatattctgtttccatagcaccattcctcaagatcaaacccaggcaggcatttttacagcacacacttccatatgtcattgctaatcctcgcaaccttgaggaaactgaggtgcaaaggggttgaggaatgtgttcaccatcccaaagccaacgaagtgccagaacccaaatccaagcttggctgtctcatccccaaggacgtactctttatgccgttccttatgacttttcatgcagcaggtgcaaggcagcaagaatttggctcttctgacatttatcaggcacctggtatgtgccaggcctactgtaaaccccaagatgacatggtccatgtctatccattcagcatcagagagactgttatcaggacttgaggcctgagacacagccctgaatcagatgcaggcctctggtgtttgcaaaggatgcgtgagtatgtgtatgtgtatgcgtgcattgtgtgtaggggtgtgtgtatgttgggggttgggggcagaaaatgctccctgaactgttggtattaaggcagatctttgatggagggactggggtgtggagacttgaaccctagtttcaaagtggggacctcgaacactagtatggccagcagacaggctggagttgctgaattgtcagctaggtctttaatccactccccttctctaaatcagggtggaattggactcagggctggttcagggctgaggtttccgggggatgaatgattccagacagtgggaaggggtgatggatgatgaacctggcaagtcacaggactatggacttggctgtatgttgcatgtatgtgtaagatctgagttgagacctttgatttttgcccagaaagtccagctaacatactatataagccagtgagaccagccagtgtctgttcattgcctctgccttgcccctatgcctgcccgcctcctatagcaggtccctatagcataatgaaaatgcgaacaaccttttctctggacactggggaatctagtctggtggataaagatggatggctgttaaacgatc

SEQ ID NO: 4889 - DNA, 3192 bp, Homo Sapiens
  NM_020640
attcgctgcggagccggaggaggaggggagaggcctggaggacaccaacatgaacaagttgaaatcatcgcagaaggataaagttcgtcagtttatgatcttcacacaatctagtgaaaaaacagcagtaagttgtctttctcaaaatgactggaagttagatgttgcaacagataattttttccaaaatcctgaactttatatacgagagagtgtaaaaggatcattggacaggaagaagttagaacagctgtacaatagatacaaagaccctcaagatgagaataaaattggaatagatggcatacagcagttctgtgatgacctggcactcgatccagccagcattagtgtgttgattattgcgtggaagttcagagcagcaacacagtgcgagttctccaaacaggagttcatggatggcatgacagaattaggatgtgacagcatagaaaaactaaaggcccagatacccaagatggaacaagaattgaaagaaccaggacgatttaaggatttttaccagtttacttttaattttgcaaagaatccaggacaaaaaggattagatctagaaatggccattgcctactggaacttagtgcttaatggaagatttaaattcttagacttatggaataaatttttgttggaacatcataaacgatcaataccaaaagacacttggaatcttcttttagacttcagtacgatgattgcagatgacatgtctaattatgatgaagaaggagcatggcctgttcttattgatgactttgtggaatttgcacgccctcaaattgctgggacaaaaagtacaacagtgtagcactaaaggaaccttctagaatgtacatagtctgtacaataaatacaacagaaaattgcacagtcaatttctgctggctggactgaactgaagatcaatcctcacaattcagactgagggttgagacaaaactttaaggatacatcttggaccatatcgtatttcattcttctaatggtggtttgggcttgtcttctagtctgggccgctctaaacatttataattccaacattgtggatttcatcttatatctgtggaccatcctagtttattctcccataagtcttagaagctttatggtgattattttgaggttttcattctcgcataaagcacaatgctgtcttcatcagaaaacagttggcataagaattaaacatatgaacatcacaaaacaatttataaaaacttcttaaatatacgctttgggctagttgcaaagactatgctaatagcacttccagtgagagtgatatatttaagtgtactggatctggaatggtgttttggtttggggggaattttttttttttcctggcaaatcacatgtgttgttgatgtgagtatctgatgaaaaaacaatgtcagaataaccgacatgaaaattttttaggataacttggtgcctacctgaaaaatgtattgtgttttagactcttgatttcaaaaggttccacagaactagtctgcgcttaccttacccatgtttatatatagctgtcctacagggagcttttatttagaaaatgtctgcataatgttagattcttctcctgtctacattatgcactacataattggacttcattatgcttttgaaatgcttatctgcctgtcacataagttaaactatttaatttgttttgaatgttttggattgctacacaatacaatattctaaatttaggcatgagggtttttttgttttgtttttactttttttttgtcatcgcactatggaacacaaatggaattctcttaatttataagaagatagttgcagttaaattttgaaaatggttgtaatgagccatgaagttcaatctttataatataggtactgctctttcagacaaatagtccattttcgatgacttattattttgttgaaattgctttaactgctaatcactgtggttgccaaatatttacttcaggagcaaagattttcaaacaagcatacacgatgcaaaataccaatctggcttctagtctctttactgttttcgtttcactcagattagctcagttttctcatcaaagcagaatgctatcttgtatgtatttttttcattacaagccccatgagctgcttttatgctgaaaatggtcatttccctgttcacttactgacatgtgaagaagggtttcttgctttcttaaacatttccgtaaggcaggctagaaatgtaatacttcaaatgtttgatgattatggtcttttgataggaatagattctgcttgggatatatatccaggcactctctaaggtctagggttgatattaacaaaggaatgtacttagaatagcagtacattttatgcaaatatggaaattattttaagaaacaatgacatatcaaaactgctttttacatgattttgaaatagactagaaagctttccctatagacatattaatattccaatcataactttaattcaagaatgcagttttaccaaaagaaaaatttgaaaatttctattcaggctactggaattggttattaaaagaaaaaggaaaaagaagaatcttgctgctttcagtatttcctgatttttttgtaaatataaagaggaacttcaattatgaaaaatttttaaaagatatatatatctatatatctatatatatgtactgttttgtttcctgtcttgaagattttgagttatggttattggtttcagattgattaattcacatatgctgtgttttgaaatgagatcccattagcttttttttttttttttttttttcaatataaagtgttttctttaaaagtcatattggttcgtggcctagtgccttggattttacatatttttctttttaaatgcaaaaccttttcaacaaaatagtgtttgtcatcaggttggtactaaacatttataattactgtgtaattataaacaaaaatacataaagctttgaatataattatgtagcataaaagttaaggttgttcactatgatggcatcttagaattaaacaaaacttttactagggctgaaaagagaagactgatttaatgtggtgtgattattctgaagataaatgtctggctacagggaatattttgtactaaaaaatgattacacaaaaaaaaaaaaaaaaaaaaaaaaaaaaaaaaaaaaaaaaa

SEQ ID NO: 4890 - DNA, 1882 bp, Homo Sapiens
  NM_020650
tttttgtttatttttgttttgttttgttttgtttggtatagaagtgttggaacgtacacctctttcttaaaccatcctgacaaagggaaagggaaaaatacatttcccgtgaggcgttgtgactagaacagctggaggtggacggcagagtgccgcgacgactgccaggagttgtagttctccccggccgcgtcactgcggtgtcgcccacccttcttccccgggcaggccgcggtttcctttgtggacgtggcgaggagtgcccgcggcaccccgtgcactcattggccccgccccgtgagacgctcgtgcgagctcattgggcggggggcggggctctgcgctgccagaggcggggcctgactggagagcggccgaattgggcacatttgcgggaacgcagagcggagcgtggagagcggagcgaagctggataacaggggaccgatgatgtggcgaccatcagttctgctgcttctgttgctactgaggcacggggcccaggggaagccatccccagacgcaggccctcatggccaggggagggtgcaccaggcggcccccctgagcgacgctccccatgatgacgcccacgggaacttccagtacgaccatgaggctttcctgggacgggaagtggccaaggaattcgaccaactcaccccagaggaaagccaggcccgtctggggcggatcgtggaccgcatggaccgcgcgggggacggcgacggctgggtgtcgctggccgagcttcgcgcgtggatcgcgcacacgcagcagcggcacatacgggactcggtgagcgcggcctgggacacgtacgacacggaccgcgacgggcgtgtgggttgggaggagctgcgcaacgccacctatggccactacgcgcccggtgaagaatttcatgacgtggaggatgcagagacctacaaaaagatgctggctcgggacgagcggcgtttccgggtggccgaccaggatggggactcgatggccactcgagaggagctgacagccttcctgcaccccgaggagttccctcacatgcgggacatcgtgattgctgaaaccctggaggacctggacagaaacaaagatggctatgtccaggtggaggagtacatcgcggatctgtactcagccgagcctggggaggaggagccggcgtgggtgcagacggagaggcagcagttccgggacttccgggatctgaacaaggatgggcacctggatgggagtgaggtgggccactgggtgctgccccctgcccaggaccagcccctggtggaagccaaccacctgctgcacgagagcgacacggacaaggatgggcggctgagcaaagcggaaatcctgggtaattggaacatgtttgtgggcagtcaggccaccaactatggcgaggacctgacccggcaccacgatgagctgtgagcaccgcgcacctgccacagcctcagaggcccgcacaatgaccggaggaggggccgctgtggtctggccccctccctgtccaggccccgcaggaggcagatgcagtcccaggcatcctcctgcccctgggctctcagggaccccctgggtcggcttctgtccctgtcacacccccaaccccagggaggggctgtcatagtcccagaggataagcaatacctatttctgactgagtctcccagcccagacccagggacccttggccccaagctcagctctaagaaccgccccaacccctccagctccaaatctgagcctccaccacatagactgaaactcccctggccccagccctctcctgcctggcctggcctgggacacctcctctctgccaggaggcaataaaagccagcgccgggaaaaaaaaaaaaaaaaaaaaaaaaaaaaa

SEQ ID NO: 4891 - DNA, 5559 bp, Homo Sapiens
  NM_020652
cttcgatcgtccgattctcccagccgcaccacgggtgctcccacctgcggagaaccggagtctggcgatgccaaggcgcttctgggaattgtagttccgggcgggatgagggcagcacgcctggctccgctccttcttacgcatgcgcgactccgagctggccaaagaagttcgtcccctttgtgaggcccgggatgggaggtgcccggttcccccagggacagcttcaagcggtagggacagacatctgaggacccagcctcagggatgctgtccccgggcttccaggctccagcgccgtaggactgaggcagactccacggtgagaaagagacccgatctaacccaggcctttcatcagagcccaggagggaaggcaggaagtgggaccacgaggcccggggggcttctaactcgtctggccagggagatctgaattggggtgaagagcagaatctccagaacaaggaggaggtggtgatcatggagacagatttggctgaaatgcctgagaaaggagctctgtcttcccaggattctccccatttccaagagaagagcacagaagagggagaagtggctgctctgcgcctcacggccagatcccaggaaacagtgacattcaaggatgtggccatggactttacaccagaggagtgggggaagctggatcctgcacaaagggatgtgatgctggagaactataggaacctagtctcactttggcttccagtttccaaacctgagagctacaacttggagaatggaaaagaaccattgaagcttgagagaaaagcccccaaaagcagctattcagacatggagactagaccacagagcaaggattcaacttcagtgcaagatttttccaaagcagaatcatgcaaagttgcaataatagacagactgacacggaatagtgtctatgactctaacttggaagcagcccttgaatgtgaaaattggttagagaatcagcaaggaaatcaggagagacatttgagagaaatgttcactcacatgaattcactctctgaggaaacagaccataagcatgatgtatactggaaaagcttcaatcagaaatctgtccttatcactgaagacagagttcccaaaggatcttatgccttccatacacttgaaaaaagcttgaaacaaaaatcaaacttaatgaaaaagcagagaacttataaagagaaaaaacctcataaatgtaatgattgtggtgaactcttcacctaccattcagtgcttattcgacaccagagagtccatactggagagaaaccctatacctgcaatgaatgtgggaaatcttttagccacagagctaatttaactaaacaccagagaactcatactagaattctctttgaatgcagtgaatgcaagaaaaccttcacagaaagctcatcccttgcaacacatcagagaattcacgttggagagagaccttatgaatgcaatgaatgtgggaaaggttttaatcgaagtacacatcttgtgcagcatcagttgattcatactggagtgaagccttatgaatgtaatgaatgtgataaagcttttattcattcatcagcactcattaaacatcaaagaactcatactggagagaaaccttataaatgtcaagaatgtgggaaagcctttagccattgctcatccctaactaagcatcagagagttcatactggagaaaagccatatgaatgcagtgaatgtggaaaaacttttagtcagagcacacatcttgttcaacatcagagaattcacactggagagaaaccctatgagtgtaatgaatgtgggaaaaccttcagccggagctccaattttgctaaacatcaaagaattcatattggaaagaaaccgtacaaatgtagcgagtgtggaaaagccttcattcattcatcagctctcattcaacatcagagaactcataccggagagaaaccctttagatgtaatgagtgtgggaaaagctttaagtgcagttcatctctcatcagacatcaaagagttcacactgaagagcaaccctgaaaaattactgaatgtgaagaaatgtaagttggttttatcactgtattaaatacttgagtgtttaggtggaaggcgcatccataatatgcatgtgaggaccaattctgtatgcatctaatttcatttgcgtaatacatagttttgagccataagcaggttctttatgtccgttaatttgataattatgaaatctagccagcgatttcaaaattttaatctccaacgtcccaaatagctatctgtggaaattcaagaagtccctgagagtaggtagcagtacgaacattgtgaaatccagttttcccctctcttgtttatgtcagagctttgttgtaagcctctcactttgtaaggaaattcttattgggtaggttaggctgagggcttacatccttatcatcaggaagacacaatgttgttatttattactccttgagatctagatacacatatggtataattcatctagagtgtaatttcttttatattagccttaaaaaccaaaaatgctgggttcaaagtccttagaattcccttcctccctcaacaagctgctgtctatgttgatgaccataactgggatgtataatatttacagacaactctaagttacgttcacatggattatgtacatcattgatttttttttttttttttttttgagacagagtcttgctctgttgcccgggctggagtgcagtggcgcgatctcggctcactgcaacctccacctcccaggttcatgccattctcttgtctcagcctcccaagtagctgggactacaggcacctgccagtacgcctggctaattttttttgtatttttagtagagatggggtttcaccatgttagccaggatggtcttgatctcctgacctcgtgatctgcctgcctcggcctcccaaagtgctgggattacaggcatgagccaccatgcctggcatcatcattgatttatgtcattgttatccctctaccgcggagaccttctttcattttccatttccctgggagttcacgtgaagtagtgaatgggtcaaaatcttaacagtggttgttgatcaagtccttcctttcttatccttggcactgaataaatctttggttttccataatcaaagggtgagggagacttcttttgtctacattattcagctttctgaaagctatgctgtgtccatttgagaaaaagccccagggatattgaaggtctgagaagttgagtggttcagtgtgttattatatttagggtcccagtaaagaagaactgaagcaactgtgagacaccagggcatacttccctgtatgagtggaaaacaaggcacggaaaatagctcacaggatagtcctcaactgacttgcttgaggataagcagcttcccttcgtgaagaagttgccatttctctggccttcatatttatctactttttgttattgttgtctgtatcggttcaatctcacactgctataaagaaatgcctgagactgggtaacttataaagaaaaaaggtttaattggctcatggttccatgggctgtacaggaagtatgactggggaggtctcagggagcttttactcatggcaaaaggcaaagccagagcaggtatcttcacagggctagagcaagaggaaaagagagaggggaggtgctacacactttttatgcaaccaaatctcatgagaactctatcacgagacagcagtagggggacagtgctaaatcattcatgagaaactacctgcgtggtccagtcaccttgcaccaggccccacctcccacattggggattacaattaaacatgagatttgggtggggatacagatctaaactgtatcattactcaaaaaaaaaaaaaaaaagaaagaaaagaaaacacaggaaaaggaactcacctcttttatcatcttagtatttagtactaatggtttagagcaggaattgacaaactgtggcctggactcatggaccaactctggcccaccacctgtttctcagaagaaaattttattggaactcagccacacttactcatttacatgttgtccttgactgcctttgtgtccagtgtcagaactgagtagctgcagcggaggttgtgcctctgggctttaatatcacaaacagagcagcttataagcaacagaaacttacttctcacagttttggaggctgggaagtccaagatcaaggtgtcaacatatttagggtctagggaaggtctgcttcttggttaatagaaagcacctttcactgtgtcttcacatggtagaaggggagagctctggtatcttcagccccttataagggcactaatcccattcatgagagctccaccctcacgacctaatcacctccaaaaggccccatttcgtaataccgtcagttaagtttcattatatgactttgatggggatatagcccatagtaggttgtatgtccctgaaagcctaaaatatttactgtttggctctttacagaaaatattttcttggcccctgttccagagcattcatcaagtcagataaagggtttaaaccagtcagagaaactaggtggaatggaaaagtactgagagataattggggacagaaaaataaaagagatgggaaatgctgcatcaaaatactcctacctctaggatgttactatatattgttaggagaattcaagttattgaaacttgccaaattcttgagtgaagaggaattcatttgagagccaaaatttgactaaggaaagaagaccaacatgggctttccaaagttgagtttgaattctgccatccccactaagcagtcatgtgaccttggaaaaactccctactctgagtctcagtttctttatctgtattaggtttcaacaaagggaataaatcattggcttctcatgaggttgtcataaggattaaataagacaatgcatataaaagaactggcagacaataaatatagagtcccccactcctgcttggtgctctctttctctctccttctctacatagagaagtgccagagcatccgtcagtagaagttacttaaggttggctgtgtcttccacatcttttgtttacccatgaagaactgtgaccatcttgttctgtgtcttgtcataaagatgggacgtgacttctttctgctcttgcttccatctggtgctgttttctgcacagcctccttgagaccttccagaaccttcttttttcctacttcatatcacttaaccagtagctatctgggatggttccagaggctgaagtttgcagttgaataacattttaaatagtgttaagcgacttgggatctctggccctttgcgtttcagtatttgtcctttttatgcctgatgtttaacctgccacatgtttgtactgcaacatgaatcttggaaattttaatgttatgcatttcaaatgtttttggttatctgtaaactaaatgtgcccttattggctcacttgtcaataaagatgtttgtatatgtattgtcagaaaaaaaaaaaaaaaa

SEQ ID NO: 4892 - DNA, 3348 bp, Homo Sapiens
  NM_020662
atgcctggtgcacagagtctgcaggtcgggcggtagcgacaggtcagagctgcggcctgagcagccagcgtccggcatgaaggtctggggtctggctgctgcctgcttcttgctccagcaccatggaatgcctgcgcagtttaccctgcctcctgccccgcgcgatgagacttccccggcggacgctgtgtgccctggccttggacgtgacctctgtgggtcctcccgttgctgcctgcggccgccgagccaacctgattggaaggagccgagcggcgcagctttgcgggcccgaccggctccgcgtggcaggtgaagtgcaccggtttagaacctctgacgtctctcaagccactttagccagtgtagccccagtatttactgtgacaaaatttgacaaacagggaaacgttacttcttttgaaaggaagaaaactgaattataccaagagttaggtcttcaagccagagatttgagatttcagcatgtaatgagtatcacagtcagaaacaataggattatcatgagaatggagtatttgaaagctgtgataactccagagtgtcttctgatattagattatcgtaatttaaacttagagcaatggctgttccgggaactcccttcacagttgtctggagagggtcaactcgttacataccctttaccttttgagtttagagctatagaagcactcctgcaatattggatcaacacccttcaggggaaacttagcattttgcagccactgatccttgagaccttggatgctttggtggaccccaaacattcttctgtagacagaagcaaactgcacattttactacagaatggcaaaagtctatcagagttagaaacagatattaaaattttcaaagagtcaattttggagatcttggatgaggaagagttgctagaagagctctgtgtatcaaaatggagtgacccacaagtctttgaaaagagcagtgctgggattgaccatgcagaagagatggagttgctgttggaaaactactaccgattggctgacgatctctccaatgcagctcgtgagcttagggtgctgattgatgattcacaaagtattattttcattaatctggacagccaccgaaacgtgatgatgaggttgaatctacagctgaccatgggaaccttctctctttcgctctttggactaatgggagttgcttttggaatgaatttggaatcttcccttgaagaggaccatagaattttttggctgattacaggaattatgttcatgggaagtggcctcatctggaggcgcctgctttcattccttggacgacagctagaagctccattgcctcctatgatggcttctttacctaaaaagactcttctggcagatagaagcatggaattgaaaaatagcctcagactggatggacttggatcaggaaggagcatcctaacaaaccgttaggaacagccccgtggatactgaagttttttttatggtagttacaggaaacttctgatactctttttattattttcttgtatagagtcagacacttgaaaaaaactaatgtttgaagacaaaaatattttggcagtcacaataccagaactggattgcatttccagaattctgagttaaagaaacaaagtatttgctttgtaaaaggccaaaattctatttcctacaaactttaaatgctgtttttatagatgtgatatgaggcaacacaagcacagacagttgcatagattttaatttatacatatcaagaaaagtgcaatttcatgctgaatgaagcgtaggaacttgacaagcccataggtagctatagttctttgtcagtatagggaattatgttcatgtgaatttcctgattctcaggtgactaaaaagctagcattctatgtattaaccttacaacagactctgtaagtttgagctttaaaaaccaaactttgacataaccttatttcttgtatttgcccccttttttttataaaaggtgaataaaaagaaataatttaatatcaccattgtatggattcctaatcaagatttcacgttctcagcccctgagactagttttctttgctctctgtaattagagcctttggaagcaaagttgaaaggaagtatttccattctgttactgttttgtagcactttgtccatttattgatttttaaagtagatatttagataccacccctgccctgccccaaaaagaaaaatgtttattgtcctgctaatctatatgcctacacctcagaagctgacagatgagcttcctaaaacatgaggatgaataaatgttagaactgtgatatcttctcatttccacagagatttgggtttaaaacaaatggctaatatttgtaagcctgaaagctgccatcctctttaacatcctacctaccttttaaaatattttctggaggttaagtacagttaggcactagaacatttgttaagcctcccaaagtagtgtgcatggaagattctagagtgtccagctcttgcactacaaatgtaataataacagaataaatacacttaccctgatgatattgagggtacatgattagcctaatgtgatgtcatatgaggaagtttaggagtccatttttcaggtggtttggtgataggaataaaaatgttactcccgtcgctgatttggaagaaaaccgatgaagtacaagtaaggtttccccactcctgtgtgtggtcatgggaagccattagagggaagctgcagaacagaatggaacaggacaggctgggctagactcgagcacgcagtggcccctgtgccaccacactgtgggtcaggaacacgcgtcatggtgttcttgtcggaatgtgaacatacagcaccctctagcattacgaatctcttaggatttttaagattgtatttgataatacttatatttcacagggcacacttttggcacacctcagagcacactgctgctattttgggtcgtatcactgtaaaatacataataagtactacttaactgtgacatgaagaattggaatcccagagggcaacatttgatttgactaagatcaggcataagatagaatttttgtcatttttccttgcagttttattgacttagtttatgagcttggataaaataattttttgatgaatcatgtcaataaaaggaaaaataatgtaactacctcataagtctgataaaaggaagttgctagtgttttatagaatttctgaaggtggttaaatcaagtatgatttcaaaatatcaactagttccacttttgtgattgcaggatgcttcttatactaaagttctcataaataataaatcagcttatgccaaaaata

SEQ ID NO: 4893 - DNA, 1599 bp, Homo Sapiens
  NM_020664
agtggggcggggctcccggttccaggcgagttcgcagctgcgcgccgggtcctggaggccgaggccgctcccgcccgttgtccccgcagtccccgacgggagcgccatggcccagccgccgcccgacgtggagggggacgactgtctccccgcgtaccgccacctcttctgcccggacctgctgcgggacaaagtggccttcatcacaggaggcggctctgggattgggttccggattgctgagattttcatgcggcacggctgccatacggtgattgccagtaggagcctgccgcgagtgctgacggccgccaggaagctggctggggccaccggccggcgctgcctccctctctctatggacgtccgagcgcccccagctgtcatggccgccgtggaccaggctctgaaggagtttggcagaatcgacattctcattaactgtgcggccgggaacttcctgtgccccgctggcgccttgtccttcaacgccttcaagaccgtgatggacatcgataccagcggcaccttcaatgtgtctcgtgtgctctatgagaagttcttccgggaccacggaggggtgatcgtgaacatcactgccaccctggggaaccgggggcaggcgctccaggtgcatgcaggctccgccaaggccgctgtggacgcgatgacgcggcacttggctgtggagtggggtccccaaaacatccgcgtcaacagcctcgcccctggccccatcagtggcacagaggggctccggcgactgggtggccctcaggccagcctgagcaccaaggtcactgccagcccgctgcagaggctggggaacaagaccgagatcgcccacagcgtgctctacctggccagccctctggcttcctacgtgacgggggccgtgctggtggccgatggcggggcatggttgacgttcccaaacggtgtcaaagggctgccggatttcgcatccttctctgctaagctctaggaatcttccggccgctgcttcctgccgcctcactcagccaggtggagagcaccaatctgaaccagcaatgcctgcagcccagcccctcctctgaacactcagctattactgcgctttccctccccacggccccaactccagggcaggagcaactggacagtgggcctggcccgtggagctgccacgcaggtgcctgagggccaggtgccacgcaggtgtctgaggaccaggtgccacgcaggtggtgggggtacagacaagatgctgggatgtcccctgccccatggtcaagggtgtcctgcctgcctgggtccagggcctgagggagccacatggatcccgagacttgtgttctcttggctgaaaacactgaggtgctcccatctgtgcgtggcccatgagctgggatggtcctccagctgcccacaaggtccgcccctctgtctctgcaccacctgtttgcataaacacactttgctacaatcttgctagtgcgttttcttaaaagataatctatttactgtaaaaataaattggactttgcaaaagcttttagaaggaaaagaaagaggattaaagagaattgctggtgatcctaaaaaaaaaaaaaaaaa

SEQ ID NO: 4894 - DNA, 8702 bp, Homo Sapiens
  NM_020673
aggtgacgcggccggcgtcccaagatggcggcggcggcggctcccggaaggccgcggcggcgtcccggctgctaaggcgggccccacgcggctggcagcggacaggccggacctacggccggaggacgggcggcagccgcctctgcgcggaccggggctgggccgtgcggcggcagcggcgccaggggatgctcttgctgggcctggcctctcccttctcaacttagggcggcggcgggcccgcgcccctggctcccgggccatggcgctgagggagctcaaagtgtgtctgctcggggatacaggtgtaggtaaatcgagtattgtgtggcggtttgtggaagacagttttgatccaaacatcaacccaacaataggggcatcttttatgaccaagactgtccagtaccaaaatgagctacataaattcctaatctgggatacagctggacaagaacgatttcgtgccttagcaccaatgtactatcgagggtcggctgcagctataatcgtttatgatatcacaaaagaagagacattttcaacattaaagaattgggtgaaagagcttcgacagcatggcccacctaatattgtagttgccattgcaggaaataaatgtgatcttatcgatgtaagagaagtcatggagagagatgcaaaggactacgccgactctattcatgcaatttttgtagagaccagcgcaaaaaacgcgataaacataaatgaactctttatagaaattagtcgaagaattccatccactgacgccaacctgccatctggcggtaagggcttcaaactccgaagacagccttcagagccaaagcggagctgctgctgaccgaacctcagcctctcagacttgatgatgaagtaggtggtcctgaaagttaacaggagggctggggtccctgccaccagttttcacctagccagtcttgagtcttctccgtgcaaaaaggattcacagaaatggaccagttctgttctccaaagactgcagcaatgatatttcagtctgtgaacttctattatgtaaagaatctctagtgtacaaagggactacatcgttggcttttgaccttgctgaaaaggaacatataattgtatggatggtaggattaagttgttgagtagttttgtaatcaagattttatgtaacatttgtaaagggaaaattagcacttttgtggttcttaagggaaaagaaacagaccttgtggagattataatttccttggtttctgttaccactgttagagggagttgtatcatttaacatatagtaggatagtttaagtgtagggaggacaattattgtctgaagctaaaatgggttatttataggactgatggaaatgatttcatctctgccatctctaaagcacttttcattgaacatgttagcctaggatacgtacagtaaattaacaatgatagcagcagatgcctagctcatcctgggtttgcttctgaccttgtcatgtgtgtgccaccaaacacgttattggcacctttttaaataagctctcatgatcaagatggtgatggtagagaagctgcccggaataaactgaatttcatatgttctaaaatgactagcaatggtttaaaaaggaagaagagtggaagtgaagaaggtggtataaatgctgtcaatttttttttaacccaagtattttggtggggaaaagcaagtatctattgcttagcatatgtaaagttgtagtctatatttatggggccattgcttaaagattataaattatgtaaatacattaataaattctaagtttcatttgacattccattgaatctcgcacccagtcttgcgtatgcctgcccagttttcagcctcttaacgggagactcaagcacattggtattgtataaaggtatagagcacttagcttacaatctttaaaggtttctctgccttcccttctacccacccgcctcccaccagatcccatctggaaatcataataaagacatatgccactttgacaaacctgactagtccttactagcctgagggtaaaagattaagctccaacctcaagtcatttacctggtcttggtaataagtttcttttagcttgtacagcatcctcagaccaactgaggagctttccttgttaacaatttagcttatctttctgtttcctttatttttcccctgcctctgttagtggttaacactcttttccctcagggagcctaatgaggtttttaatatcatctaaaaataaagcattgaagtgaagttggtgaaaatttgttcctggtctaatttggcacccttccaacctgagtattgtaggggaaggaaatttacaagatttaataggaaatgaaacagcttgaatttcaaactaaattgtattttcagagctatcctgaaactgaacagctgaaactttaaaaaataattggtattattttgtgccccccacttaatatggatagattttaatgggaaaattataattcagattaaataaaaaacaattcccttttccctgttgtatatcttaagcatttggaattttttttatcttctgaaatcatataaaaagaatgtcattagtaaaaattctaacttcgttttgtttaaaagacatgtggatgctccatgcccctaggattttgcttcctccccggtgctaaattagcaagctcctagagaagccatgtgattcccagagccaggcgctttacacctaaagtagtttgactttcttctgtatacatccagatggatcccaggcatccgggcaccaccctggtgtgtccctagaattcccactgctgggcctctatctccatgacaacaaaataaaaacagaggttgcttgactcattaccaaagaggcaaagcatgtgcgaccctttctgtcttattttaccaaaagatggtgcaaatctatgaccttcacattttttccaccacacccaccagtagctgttggtgattgcatggtgtctcggtgcatggggaaaggcaaggtcttctgagctcatcttaactggtgaggcatctggatgtgtctgatcttactgtgatgttttactgtaccgagcccaatgtgggtccatctcatcagccctttgctgatttcatgatttctcaccctccctcccatatgtagggtgtgattctgttttattatagccacatgttttattaacagaatgagtgatatgaagcttgtacttatgcatttctcgggcctcttccctcattttcatcagtctgtctaagaacttgactcggcactgtttctcgtgtaatatccttctaatgcttagcaacaacaacaaaaaattgctctctcagatccataatccatactcagtgaaagcagggaaaaaatattttcacttattttatttgcttctaaaatgcaaagatgaatactaaagtcagaagcagtgtttcattttgaacacattttggattattaagctgactaagcaatgatctaatacacatttcatattttctttataataatttcttatggagaagaggctatatttcaaaggaattgagacatactcccatctataaacatgtttggttttcttacgatacagggccatttttttaaaactctcaggactgaacagaagagaaaaattattaattagctgctactgtatgttgattcttttcggagaaattgaaataagctctttgcaggcgtccaatcctagaaaccaatggtctccagaactctcacacaagtgtttttctgattctatgataactaattaaccatcatctggtgattaaaagaacataaagtaagattatgattaagtgtccatcacctgcctgtcagccgtggtcagaataagttttacacgaagcaggtgaaagatttagttcttttcaaagtaacttattttcttgtgacccgtttatgatgttgtttgaagtccctgtttcccattgtgtacgcactttctggatgtctggaaggatcgggacttttgtgtgagaggcttgagcgcctcctctatgtgggctggtgtccttcttgaagttgtcaattcctcttattcttaaatatctaaagggaaaggaaaccaactttaatttcagaacttctctttacgtcttgtatgtatttcttttctgttctcaaggaggaaaattggtctaggaagccttctaaattaaactctgggaaatatagtaatgaaaatatcctttagctaactttcctgtaactgtcaaaccaaaatgtcagtatttttagggcattgtgttaaaataagcagtttagattccgacgacactgcactaattggcatgtcagcctccagctcagaaaggcatttgctcatggttacaggcatcttttagattctaagagtgagttacagaattctttttggtactttcacttattctttcagaatacatcaaggatgtgatttatgggcccttaagagtataagatataggtgcacagtatgttacttaagtaacggatgagcccccctaaacatccacgtgtctctgcaggaacctgtgtaagtattgtgaaaacccttttcttccagggaaaaattattggaaattccttaactgagctatacttggtacttgctctagaacatttgggaaatgacaaactcaggctggctctcctctctaacctcactgggctataaatgttccttctaactctgtaatgaaagttcagtgacaaactagatagtgaacctgtgaaagtcattatttacatttgctttaaagggacagttttaccgttcaacttcaagagtttttctacctctttaacagttaatattttttaaaggaagaaatggaatgtaccttcaggggtcaagctgttaactgtatacctgcctctagttagcttggtttatcaaaaggatttttaaatgattcaaggtaatgtttaggatatttgttttaactcctgctgtgctgtgatttaaaaaaaaatagtctaagaaacaaatttatccatgagataaacatcatattttatagttttagaaaaaagggttgggggtggaatttagcctagaacttaaagaaacaacctctgcgaatttctcttgacagcggagttgcttgtcttgacttctaataatataaatccaggcagtttgattatccgatttgcaagaaactttaatggaattctggggcatttgtcctgttttatgtgcaaatgaaagtctaaaaaatatgaggaagatattacatttttcaggagcctccattttttcagtctaagagaatgataagtgagaggcctattgtgatgaagttgcattggacataatgtgggaagtgaataaatagaaccaagaatcttcatctatctctgttggtctttcaggattctcttagcatataggaaaatgatttaccttccagatctcgaaggacttccaatagcatagatcaggtttaatttgatggtctataccatcagaaataactaatatctgttttctttccttttagagtataatcaattatggataggccagaatatttttggcttcaaaacaaaaggattcataagcttaaaaaaacaaaaatcccaaaccttccatctatcccttttattacgttgaacattttagatagtaagattaagatgtatcattagtatatggtgaaattaaaaccgtggtgtctaacagatttaacaaaaagtgtttaatttactgcaagttcatttttagatctgtatggtgcccagtactccacaaaatgcatcataattgaaacaacaaaattattttcatgagcaagaattcaagtatcaaggcctatcagccaattaaaagccgtaagatagtaatgattttttttctttttttttttttttctttttttagatggagtctcactctgtcgcccaggctggtatgcagtggcgcgatctcagctcactgcaacctgtctcctgggttcaagcagttctcctgcctcagcctcctgagtagctgggatgacaggcgtgcaccaccatacccagctaatttttgtatttttagtagagatggggtttcaccatgtttgccaggctggtctcgaactcctgacctcaggtgatctgcttgcctcggcttcgcaacattctgggattacagacgtgagccaccgcgcccaaccagtaacgatttttttaaagggcctttcttaattgacagttttaagctgtagacattaatattataacaaacaaaacatgccagttttactgattccgctttttgcttgattcaggaacttttcattgtttggggaagcttttgaatgcagtactgtggaggaaatcatccttaaaatagcatttcacacatagggccaaaattgaaattgtcaaggaaacccctcagcatctaacgtcatcttgtagaagagctgggcatacctcttcctctaggccaattcagaggccactggccacccaagtagagtggggcccactggcatgagtagtccctgtgcccatgcccatggtggtgcttgactttgctttggggcttaatcctagtatcatttggccattaatttttaattaagtttatacttgaataatcagttttactcctgaaaaattttgaagccagcactgactttgtttatattcacttaccttgtatatgaacttatgacattagagtttgtgaaactgtcttaacgtggctcatacacgtgatgtcagagggactggtcagttctttacagggtgaattaatcggcagctggctagtcagagcaactgatgggtggcttttttttctttttttttttgagacggagtctcgctctgtcacccaggctggagtgtaagggcgcgatctcggctcactgcaacctccgcctcccaggttcaagcaattctcctgcctcagccacctgaatagctaggattacaggcgcccgcccccacacccggctaatattttttgtatttttagtagagacagggtttcaccgtgttgatcaggctggtctcgaactcctgacctcacgatccgcccgcctcggcctcccaaagtgctgggattacaggcgtgagtggtggccctatttttaaaccattcgttacgctgtgtagacagagctttattgccctggaaaagattttttttttaactctcatgcagttcagtctttccatcatttcactttgtgagtcactcacataattgtcaatcattcctctgaccttcttaagaatttacaccttaccgtctctgtgattgaagcagacttctcgctttatttcccttaggctcatttttctgtgggctctcccttaaagacacatggccacagacacctccttcgcatatgtaatctgccttcccctgcggccttccgtggtcacagcaacagggactgctcaccccctccagctggggcttttctaacaagcacagtcagaaatgcgcaggcctggggttggggatgaacagaagttgattagtgggcacagaaatacagttagatagaaggaatagttccagcattcgatattacagtagggagactgcatttaacaataattgattgtatatttgaaaacagctagaagaataagaatattcccaacacaaagaaaagataagcgaggtgaaggaaatcccagttaccctcattcagtccattacacattcgatacaggtatcaaaatatcataggcacctcaaagacatgtacaactcttaatttaacatttttgaaagaaaaaaaaaccggccagagcattaaaacaaataaaataagaaacacagaggccagtgttaggtgaagaactccgctgcttcagaaagagaatagcagcgctcgcttaccgtgggaacacggccagttaacaaaatgggttttggttttttgttttgttttgttttaccattggtaataagatagttaacataagtggtcagaacttcgctgaatttgtaataaagcatttgttaagcgtgtaaaagtccaaattaaaagtcttgaagaaaaacagctatggcaatgagcctagacatttttcaaaaaaaaaagctaagccgtcctaccagcaatctctctttctcctaagaatgtcatgccttctcaagacctgatgaaaggaataagatatttgtgcctttttataaaagcatctattacgaaagtaaaattcagttgcttacagttttggccgctttgtagcactattataaacagcccaaatttatggccttggacttactgcatgacacatggcctggttacctgtcatggaatgctgcagtggtggtttgccaagcttctgtggatgtttgaagactttatttttgcagtcttaaccttgggctggacctaagtgtatgtaaaccatatgatgcctgtattgtttatagatgctgacaaaagaaaactagaccttttgttttttgttgtaagatttttgttttcatgcctatgctcatagtagatagtttgcaaatgaaagttgatttgccatacttttaaataatattgttttagcttgaatattctataatacacttttatagagtataacatgctaaatcactgttttgttgtaagaagggtgtaaacattttgttaataaaatgctatgtttacaaatataaaaaaaaaaaaaaaaaaaaaaaaaaaaaaaaaaaaaaaaaaaaaaaaaaaa

SEQ ID NO: 4895 - DNA, 1375 bp, Homo Sapiens
  NM_020675
gtttgaaatcggaaagttggcggggctgcgggagctgagcctagagtccggctgttggctagagtgggcgcggatctggtgtggggaaggcggcgggactcaggcctgcctgcgaagcattgtcctacataatggtagaggacgaactggcacttttcgataaaagcataaatgaattttggaataaattcaaaagtacggacacctcctgtcagatggcgggactaagagatacctacaaggattccatcaaagcatttgcagaaaagctgtctgtgaaattaaaggaagaagaacgaatggttgagatgtttctggaatatcaaaatcagatcagcaggcaaaataagctcattcaagaaaaaaaggataacttgttaaaattgattgctgaagtaaaaggcaaaaagcaggaattggaagtactgactgcaaatatccaggatcttaaggaagaatattctaggaagaaggaaactatttctactgctaataaagcgaatgcagagaggttgaaaaggctgcagaaatctgcagacttgtataaagatcgacttggactagaaattcgaaaaatttatggtgagaaattgcagtttattttcactaatattgaccctaagaatcctgagagcccatttatgttttccttacatctcaatgaagcaagggactatgaagtgtcagatagtgcccctcatcttgagggcctagcagaatttcaagagaatgtaaggaagaccaacaatttttcagcttttcttgccaatgttcggaaagcttttactgccacggtttataattaacatacaaatagtgtatataaaaacggtttatttttcttctctattacatatctctttttttcttgtttttattattattatactttaagttttagggtacatgtgcacaatgtgcaggtttgttacatatgtatacatgtgccatattggtgtgctgcacccattaactcgtcatttcattaggtatatctcctaatgctatccctcccccctcccccaacccacaacagtccccgttgtgtgatgttccccttcctgtgtccatgtgttctcattgttcaattcccacctaggagtgagaatatgtggtgtttggttttttgtcctttcgatagtttgctgagaatgatggtttccagcttcatccatgttcctacaaaggacatgaactcatccttttttatggctgcatagtattccatggtgtatatgtgccacattttcttaatccagtctatcattgttggacatttgggttggttccaagtctttgctattgtgaatagtgccgaaataaacatacgtgtgcatgtgtctttaaaaaaaaaaaaaaaaaaaaaaaaaaaaaa

SEQ ID NO: 4896 - DNA, 2413 bp, Homo Sapiens
  NM_020676
acctctgtaggcgatcctgctctcgccgtggctttcgggtgctaggagacagttgccggcgttgggttgtgcgagacgctaactgtaccctccgggtttaacgctgtgaggcagcgcgcggaggaactggggataagcgccccggagcccccaaacagagcgcggccgctgggggacagcgcgcggcgccgggtcggggcggggcggcttttctgtcggaggacgcgaaccggcacgctgcgcctttaaggagtccagctgggctgggcgccggagctgggagcggcgcgggtaggagcccggcggcaggtcccagcccggggctagagaccgagggccggggtccgggcccggcggcgggacccaggcggttgaggctggtcaggagtcagccagcctgaaagagcaggatggatcttgatgtggttaacatgtttgtgattgcgggcggcacgctggccatcccaatcctggcatttgtggcttcatttcttctgtggccttcagcactgataagaatctattattggtactggcggaggacattgggcatgcaagtccgctatgttcaccatgaagactatcagttctgttattccttccggggcaggcctgggcacaaaccctccatcctcatgctccacggattctctgcccacaaggatatgtggctcagtgtggtcaagttccttccaaagaacctgcacttggtctgcgtggacatgccaggacatgagggcaccacccgctcctccctggatgacctgtccatagatgggcaagttaagaggatacaccagtttgtagaatgcctgaagctgaacaaaaaacctttccacctggtaggcacctccatgggtggccaggtggctggggtgtatgctgcttactacccatcggatgtctccagcctgtgtctcgtgtgtcctgctggcctgcagtactcaactgacaatcaatttgtacaacggctcaaagaactgcagggctctgccgccgtggagaagattcccttgatcccgtctaccccagaagagatgagtgaaatgcttcagctctgctcctatgtccgcttcaaggtgccccagcagatcctgcaaggccttgtcgatgtccgcatccctcataacaacttctaccgaaagttgtttttggaaatcgtcagtgagaagtccagatactctctccatcagaacatggacaagatcaaggttccgacgcagatcatctgggggaaacaagaccaggtgctggatgtgtctggggcagacatgttggccaagtcaattgccaactgccaggtggagcttctggaaaactgtgggcactcagtagtgatggaaagacccaggaagacagccaagctcataatcgactttttagcttctgtgcacaacacagacaacaacaagaagctggactgaggccccgactgcagcctgcattctgcacacagcatctgctcccatcccccaagtctgacgcagccaccactctcagggatcctgccccaaatgcggtcggagcgccagtgaccctgaggaagcccgtcccttatccctggtatccacggttccccagagctttggggaccacgcgaaaacctccaagatatttttcacaaaatagaaactcatatggaacaaaataagaaaccccagccatgaaatctaccatgaagtcttcaagttcatgtcactgagaagcttgtgcaaagcagccaccttggaccataattaaatcaaggacattttctttgagacattccttatagttggagactcaagatatttttgttgcatcaggtgtattcccttgcatgggcagtggcttttataggagcattagtcctcattcgctgaaccctgttgtttaggtctaatttaagttttacatagagacccatgtatgactgcagcccattggctgcaagaccagggaggaaagtggcaagctgtagaaaatgtttacacgcatggaggggcattgctctagccctcagagcgtccggagcagcagggtacatgggtgggaggttcattcagcacccaccagtcaggtatgttctgagtgaacccacagcagtcgcagaatgagcacctggcagggtgggtttcctaggaataatttattatttttaaaaataggcctaataaagcaataatgttctagacatctgtctaagtaatcagactcaggttccacacacaagcaacaactcgtgggcctcttttctatttcaatgtgctactaagaacccttggatgtaacatactagttagttaatgaattctgtgaattctgtgaagagtaatgtgattgaaaataagtctaaacagctgtaaaagtgaccacaatgacatgaaataaatttaataagtctagatcagcaaaaaaaaaaaaaaaaaaaaaa

SEQ ID NO: 4897 - DNA, 1401 bp, Homo Sapiens
  NM_020677
taagactcatggacatagctttaattatctttgcctgacgcccaatacctgaaaattaagatgttcatgcaagataaagaggtaatttttctcctcctcccagtcatcacccgtagcatccggttaagaggctctccacctcgctcattttggtctaactggatttacacaaactcactgtgcacgtgcctggggcgggcaaacccggaaacgacgccgagtcccgcgggatccaggaggagccaactgcgccggaggaggggtttcggccgacacgtcgggattggcggctgcagccaggggtcctccgacgctgggcttccgtgagcggcgctctgccagatctctggaccggattcgtcccattctcgtcctcatggtggacaagaaactggtggtggttttcggaggcacaggtgcccagggtggctccgtggcccgcacactcctggaagatgggacattcaaggttcgagtggtgacccgaaaccctaggaagaaggcagcaaaggagctgaggctgcaaggtgcagaagtagtgcagggagaccaagatgaccaggtcatcatggagctggccctgaatggggcttacgccaccttcatcgtgaccaattactgggagagctgcagccaggagcaggaggtcaagcaggggaagctgctcgctgatctggccaggcgcctgggcctccactatgtggtctacagcggcctggagaacatcaagaagctgacggcagggagattggccgccgcgcactttgacggcaaaggggaggtggaggaatatttccgggacattggcgttcccatgaccagtgtgcggctgccctgctattttgagaacctcctctcccacttcttgccccagaaagccccagacggaaagagctacttgctgagcttgcccacaggtgacgttcccatggatggcatgtccgtgtctgacctgggtcctgtggtgctcagccttttgaagatgccagaaaaatacgtcggccagaacatcgggctgagcacttgcaggcacacggccgaggagtacgctgccctgctcaccaagcacacccgcaaggtcgtgcacgatgccaagatgactcctgaggactacgaaaagcttggctttcccggtgcccgggacctggccaacatgttccgtttctatgccctgagacccgaccgtgacatcgagctgaccctgagactcaaccccaaggccctgacgctggaccagtggctggaacagcacaaaggggacttcaacctgctgtgacctgcccgcctcgcggccccttgtggggatcgggggcaccagaggggcagaggcaccaacatctgaataaagccattgttctcccaaaaaaaaaaaaaaaaaaaaaaaaaaaaaaaaaaaaaaaa

SEQ ID NO: 4898 - DNA, 1433 bp, Homo Sapiens
  NM_020679
cccgcagcgccggacgctggttgcgcgctcccaggcgccgagcggccccgggcacgcgcgcgcgccaccggcccggcaggtgctgtccttattcccagcccagtcaagagctaccggggctggctagtcatgggggagcccagtagagaggagtataaaatccagtcctttgatgcagagacccagcagctgctgaagacagcactcaaagttgcctgctttgagacagaagatggagaatattccgtttgccagaggagctatagtaattgctctcgcctgatgccttcccgctgtaacacgcagtacagagatccgggtgctgtggacttggagaaagtggccaatgtgattgtggaccattctctgcaggactgtgtgttcagcaaggaagcaggacgcatgtgctacgccatcattcaggcagagagtaaacaagcaggccagagtgtcttccgacgtggactcctcaaccggctgcagcaggagtaccaggctcgggagcagctgcgagcacgctccctgcagggctgggtctgctatgtcacctttatctgcaacatctttgactacctgagggtgaacaacatgcccatgatggccctggtgaaccctgtctatgactgcctcttccggctggcccagccagacagtttgagcaaggaggaggaggtggactgtttggtgctgcagctgcaccgggttggggagcagctggagaaaatgaatgggcagcgcatggatgagctctttgtgctgatccgggatggcttcctgctcccaactggcctcagctccctggcccagctgctgctgctggagatcattgagttccgggcggccggctggaagacaacgccagctgcccacaagtattactacagcgaagtctccgactaggcctccagatcagggcttcctcaccagcactggcctttcttctacccacctctaaagctggcagtggagtctctgcctcacccaaagacttttcccttccagactttgagtgtcttcccttctagactttcccatctcctggtgagatgtttcccacttatgccgtggtcctgccctgagcccctttccccaccacaacccaccacggccaggcagagaagggcaactcccaagagccactgcactgtgtaaccattagtgcaactactaccttggtgcctcagtttacccatctgtaaaatgggtaagcatagccactggtgggatattttgggatgtcaaggggtggaggcagagcacaagtcacaccagaaactgctttttatacattttgtataaggacaactctggaaacaagcctatttcctccagccagtttcactgaatgctgcaccacatgctacaccagttcagcgtgagaattttctaataaatcttttctgatactaaaaaaaaaaaaaaaaaaaaaaaaa

SEQ ID NO: 4899 - DNA, 832 bp, Homo Sapiens
  NM_020685
ggcaagcactttaaccttttaagcccaaccagatgagttgcctgcagttttggaggccttcagagcatttcactagacctctgtctgtgtcggtccagtgtctttagccaagctttgattaaagatgacttccttgtttgctcaagaaattcgcctttctaaaagacatgaagaaatagtatcacaaagattaatgttacttcaacaaatggagaataaattgggtgatcaacacacagaaaaggcatctcaactccaaactgttgagactgcttttaaaaggaaccttagtcttttaaaggatatagaagcagcagaaaagtcactacagaccaggattcacccacttccacggcctgaggtggtttctcttgagactcgttactgggcatcagtagaagaatatattcccaaatgggaacagtttcttttaggaagagcaccatatccttttgctgttgaaaatcaaaatgaagcagaaaataccattcaaaatgaggcacagcgataacttcttcacatgctatttcaaaaagcctgtttaataaagctgaatgttaaggtgtatgtaggttattgcaggaactttaggaattaaatatgttcatattcttcgattatctcctaagtgacagtgaagatatgagaatttactggcaagtcacatgttatcacctactactatttcaaggtcatgaatttgctttctaccaaacccatagatgtgttaaacacgaatattaaaaggtggactctttattaattaaaaaaaaaaaaaaaaaaaaaaaaaaaaaaaaaaaaaccaaaaaaaaaaaaaaaaaaaaaaaaaaaa

SEQ ID NO: 4900 - DNA, 3905 bp, Homo Sapiens
  NM_020689
gcgacgaggagggcgacgacgaggagacgggcagcggcgaggaggaggaagaggaggcggaggcggcggccgggtgggagcgcagcgaggacgcgcggctgctgcgcgcagggctgcctcctgccgctgtccccgccgcggccgcccgcgacaggagcggccgccgcccgccgaggccgccgcccggccgcccgaggatgcggccgtccggcgacgaggaccgcgcgcgtcgccgccgccgccgccgccgccggagggaccttctgctgagccagctctgcttcctggcctcggtggcgctgctgctctggtcgctgtcgagcctgcgagagcagaaggagcttgacctcatggacctcgtaggggaagacagaaagtggatgatggcgaggaagctgatgcaggtgaacgacactctgacttccgaagatgccggactccggaacagcaagaactgcaccgaaccagccctgcatgaattccccaatgacatcttcacaaacgaggatagaagacaaggtgcggtggtcctccatgtgctctgtgccatatacatgttctatgcgctggccattgtgtgtgatgacttcttcgtcccttccttggaaaagatctgtgagcgcctgcacctcagtgaagatgtggctggggccacattcatggcagcgggaagttcggccccagagctgttcacatcggtcataggggtcttcatcaccaaaggcgatgtgggagttggcaccatcgtgggctcagcggtattcaacatcctgtgcatcattggtgtctgtgggctctttgctgggcaggttgtggctctttcctcctggtgcctgctgagggattctatttactacacgctgtctgtgatcgcgctcatcgtgtttatttatgatgaaaaagtttcctggtgggagtctttagtccttgtgctgatgtatcttatctacattgtcatcatgaaatataacgcttgcatacatcagtgctttgagaggaggacaaaaggtgccgggaacatggtcaacggattggccaacaatgctgaaattgatgacagcagcaactgcgacgcaactgtggtgctacttaagaaagcaaatttccaccgcaaagcatcagtgatcatggtagacgagctgctgtcagcctacccacaccagctttccttctctgaggctggccttcgaatcatgataaccagccactttccccccaagacccggctctccatggccagtcgcatgttgatcaatgagagacaaagattgataaacagcagggcttataccaacggggaatctgaggtggccatcaaaatcccaattaagcacaccgtggagaatgggacagggcccagcagtgccccagacaggggcgtgaatgggacacggagggacgatgttgtggctgaggctggcaacgaaacagagaatgaaaatgaggacaatgagaatgatgaggaggaagaggaggacgaggatgatgatgaaggaccgtacacaccattcgacaccccctcgggtaaactggaaacagtgaaatgggcgttcacctggccgctgagtttcgtcttatacttcactgtacccaactgcaacaagccgcgctgggagaaatggttcatggtgacgtttgcttcctccacgctgtggatcgcagccttctcctacatgatggtgtggatggtcacaatcattggttacaccctggggattcctgacgtcatcatggggatcaccttcctggctgctgggaccagcgtgcctgactgcatggccagcctcattgtggccagacaagggatgggggacatggctgtgtccaactccattgggagcaacgtgtttgacatcctgattggcctcggtctcccctgggctctgcagaccctggctgtggattacggatcctacatccggctgaatagcagggggctgatctactccgtaggcttgctcctggcctctgtttttgtcacggtgttcggcgtccacctgaacaagtggcagctggacaagaagctgggctgtgggtgcctcctcctgtatggtgtgttcctgtgcttctccatcatgactgagttcaacgtgttcacctttgtgaacctgcccatgtgcggggaccactgagccgccgggtgcccacagaggctcagctccttcttttctgtgcaatacgagacccggccgcaccccgagtcacacaggcccccggggccacggcgttcgtctctcctgtgctgtcctcaggcctccgctcctgttttggtggcccaggctctcccctgacccatcctcgctcccccacctccttgggtcatgcccacccaccctttcctgcctcctccgtgtgaagacatccaacatccacgtgacttttccagctccatttttgaacagtgactgagattctagaaaaactggctgctaactggcctgagccaggcaacactgattccaatccctcctccttttttaagttatttgatggaagactcacctaatttgtgacctgagactgttgaagaaatagagaggagggggcccgttgattacagagagcatttgggattttgtttggtttggagatgatgcctaggttactgggtttggggggattgttttcttttgggggccttccccttttactccttttcttccagagatcaagagcttctcttgcatcttcttccactgggctctggattaatcaattacccaaaggctgcacctgccgtgttgtctgggcttgcatcccagatgtgttggagtatgcatggatgtagtgctttttagaggagccactgggcaaggccaccaagaacaaatgcatgacattttatagccaaggacgcctcgctaaagtcttatgggcgtcccctggggttgggggggcacaaggttttggaggaagaagacaacttccctcattccatcatcaccatctctttctcactaggttctttctagttttcaagcaatagttctagcctgccttggacaagggggccccagttaaacaaactacccatccatgagctgccaggcagtcaaaaacagaagcttccccgacttgtgagtccctgagatgtgctcttgttgtttggcatttggggtgacagggagtgacccagaggccaccactgcttttcatgcaggagttacagacactggtttcttggaaaatggagagaagcgcactttgcacagacgtcgtcaattaagtcccaatttgccacttggtattgagtacactggaccctgaccactggctcttgggcaaacgtccttcctcacggggcgcctccgccaagccggcccagctgcacccctcccttcctggagggatggccagggaaggagaaaacagagaactgacacctttgaaaccacagaatgtgttacatgcagactcgctcaagggcataagttattgtgaacgtttttgccaatcactgctcaacagccctgctagattttgtatgatgctgaattattatgcagactaattccacccagttgagacacaccatgcttgttcacttgtatttattgaaactgtggattcttgcccgtgctgtcccttgtatttactttaagcactgatcacttatcattcattcggtatggttttccctgtcccttgtacacattctggtatgaatttgtaaaaataacctgctacaaattggttgaatgtttctgtctgtggtgcgaaccagcattaacggatggggcacgtgcccaactgaggaacaggagaagaaatcaccaatttgggctctcagagctaagacacacttattgattctgttgcacattttgcactggtttatggcgattgttttcttggacggatagtgtaaaataaacttctctgttctctaaaaaaaaaaaaaaaaa

SEQ ID NO: 4901 - DNA, 4581 bp, Homo Sapiens
  NM_020695
ggtccgtgaggcgcgggcggcggcgaccgcggcgccagtgagggggccctggggcccgggcggctccgggccggggccccgccgcgggacggaccatgctacgctccactggcttcttccgggccattgactgcccctattggtctggggcgcccggggggccctgccggcggccctactgccacttccggcaccgcggggcccggggctccggcgcgcccggtgacggcggagaggcgccccccgcagcagggctgggttacgacccctacaaccctgagctgcccaagccccccgcgcagagggagaatggcaccctgggcctgggggaggagccgcgcccggatgtgctggagttggagctggtcaaccaggccatcgaggccgtgcgcagtgaggtggagctggagcagcggcgctaccgggagctgctggagacgacccgtgagcaccgctccgccgaggcccccgccctggcgccccgcggccccaacgccagccccactgtgggcccggacgaggatgccttcccactggccttcgactacagccccggcagccacggcctattaagccctgatgccggctaccagcccaccccactggccgcccctgccgagccgggcagcaagtactcgctggcgtccctggacaggggtcagggcagaggtggagggggtggcggtgccctggaatacgtccccaaggctgtgagccagccccggcggcacagccgccccgttcccagtggcaagtacgtggtggacaactccaggccacccacagacctggagtatgaccctctctccaactactcggcccggcacctcagcagggccagctcccgggatgagcgggccgccaagcggccccggggctcccgcggcagtgagccctacacacctgctcccaagaagctctgtgacccctttggcagttgcgatgcaaggttctcagactcagaagatgaggccgccacggtcccaggtaacgagcccaccacggccagcacccccaaagccagggccgaccctgagatcaaggccaccgggcagccaccctccaaagagggcctggaggccgaggggggcggcctgcgggagaccaaggagacggccgtgcagtgcgacgtgggggacctccagccgcccccagccaagcccgcctccccagcccaggtccagtcctcacaggatgggggctgccccaaggagggaaaacccaagaagaaaaaaaccggggccccacctgcccccagctgcaaagacggggcccaggggaaggacaagaccaaggacaagggccgagggcggcctgtggagaagccccgtgcggacaagaagggcccgcaggccagcagcccccggcgcaaggcagagcggccggaagggaccaagaagaagccatcttcggccactcctgtggccacctcagggaaagggaggcctgaccggccagcgcggcggccgagccccacaagcggggactcccgaccggcggccggcagaggcccaccccgccccctccagctgcccgacaggaagagcaccaaggccccgtcggggaagctagtggagcggaaagcccgctcactagacgagggcgcctcccaggacgcccccaagctgaagaagcgggccctgagccacgccgacctctttggggacgagagtgaggacgaggccgcagggccaggggtgccgagcgtgtggccctctgccctccccagcctcagctcggactcagactccgactcagactccagcctgggcttcccggaggcgcaggggccgcccaagcggctcaaggcctccccgcccccctcccccgccccatcctcctcctcctcctcctcctcctccacctccagcgcgggggcggatgtggactactcggccctggagaaggaggtggactttgactccgaccccatggaggagtgcctgcggatcttcaacgagtccaccagcgtcaagacggaggacagaggccggctggcccggcagccccccaaggaagagaagagtgaggagaaggggctttcgggtctgaccactctgttccccgggcagaagaggaggatctcccacctttccaagcaaggccaggaggtggagcccccgaggaggggtcccgcggtgcccccggcccggcccccgacggcgcaggaggtgtgctacctgcgggcccagcaggcgcagagggcatcggcgagcttgctgcaggcccccgccaggctggcagagaagtcgccctccgtccacatttccgcccctggcgagaagaggaggatcgcccacatccccaacccccgcctggctgcagcccccacaggtgccaagaggacccttgcggccagcggcagccagtcctccaacggccctgagccaggtggccagcagctgaaaacacgcacattgtcggggatggcgtccaagactaccaccaccatcatccctaagcgaatcgcccacagtccatccttacagagtttaaagaaacccattatccccaaagagtttgggggcaaagtccccaccgtcatccgccagcgctatctcaacctgttcatcgaggagtgtctcaagttctgtacctccaaccaggaggccatagagaaggcactgaacgaggagaaggtggcctatgaccgcagccccagcaagaacatctacctgaatgtggccgtgaacaccctcaagaagctcaggggcctggcccccagcgctgtgcccggcctcagcaaaaccagtggccgcagggttgtgtcccacgaggtggtgttggggggcaggttggccgccaagaccagcttctcgctcagccgtccaagcagcccccgggtggaggacctgaaaggggctgccctgtacagccgcctcagggagtacctgctcacccaggaccagctcaaggagaacggctaccccttcccgcacccagagcggcccgggggcgcaatcatcttcacagctgaggagaagaggcccaaggactcttcctgcaggacctgctgccgctgtggcaccgagtacctcgtgtcctcttcaggccgctgcatccgggacgaggagtgttattaccactggggacggctgcgccggaaccgggtggccggaggctgggagacccagtacatgtgctgctcggctgccgccggctctgtcggctgccaagtcgcaaagcaacacgtgcaggatggccggaaggagcgccttgagggcttcgtgaagacctttgagaaagagctctcaggagacacccacccggggatctacgccctggactgcgagatgtcctacaccacatatggcctggagctgacgcgcgtcacggtggtcgacacggacgtgcacgtggtttatgacaccttcgtgaagcctgacaacgagatcgtggactacaacaccaggttttcgggggtgacggaggctgaccttgccgacacaagtgtcacgctgcgtgacgtccaggccgttctgctgagcatgttcagcgctgacaccatcctcatcggacacagcctggagagcgacctcctggccctgaaggtcatccacagcaccgtggtggacacgtctgtgctcttcccccaccgcctgggcctcccctacaagcggtccctgcggaacctcatggccgactacctcagacagatcatccaggacaatgtggatgggcacagctccagcgaggacgccggcgcctgcatgcacctggtgatctggaaggttcgagaagacgccaagaccaagcgatgacgcctgcccgcctcccacccgcctctcctgccgtcccgctggtccttagccccatgcctcttccaaaacagtgcaataaatctccggtaacccgtccacctggccgaggcagcccagagcagcgggatgagctggcggccagagaacgcccagcccagcccacccccgctcacgtcctgccgcacccctccgccggtccccaccctctgccccccagccctctggcgtctctagaaactgctgctgatggagaccaggacagagcccgcccccacccggcccgcagcccctcctgcccctcctgccaggccctccctcccgggtggtggccggcacctctgctcctcacgtgggtcgcggggcgggcttgtcccaggtttgtttgagacagtctttttttattttgtattgttatttttattatttttaatttaaacctgatgacttgcacagcatctttcccaccgggaagagcgggcctgctgccttccctcctgcggggtgggggtgggacagaccccagtgggggccagggccacactcagcgcagtgtgggctggacccgcctctgtgctccaggggctggccggtcttcgggggcgccggcttccaccactcgccgccccacccctgcactccgtgacctctgagaacccagctggcccctcgttagccccagggtctgccgtctagagggagcccaccggcctccggacactgtcttcccgctagagccccgtcctcctctgcggggctctccggacccccttccccctcacctccaggcagggacagaataaatgtttgtatggattttaga

SEQ ID NO: 4902 - DNA, 3778 bp, Homo Sapiens
  NM_020701
ccctttcttttacgtttccgacaaaacagtgtctgtgggcagttagaatcttcagtttctgtgagcgtccgcttcgtctgggcacttccggtactcccattcagttccggtccctgtcttttacgtttccggcaaaacatcagtgtctgtgggtagttggaatcttcagttcctgtgagcgtcggcgtcttctgggcctgtggagtttcttggacaggggccgcggggctccaggacggcgcccttagcgacaccatggcccgaaatgcagaaaaggccatgacggccttagcaagatttcgccaggctcagctggaagagggaaaagtgaaggaacgaagaccctttctggcctcagaatgtactgaactgcctaaagctgagaagtggagacgacagatcattggagagatctctaaaaaagtggctcagattcagaatgctggtttaggtgaatttcgaattcgtgacctgaatgatgaaattaacaagctgctaagggagaaaggacactgggaggtccggataaaggagctgggaggtcctgattatggaaaagttggccctaaaatgctggatcatgaaggaaaagaagtcccaggaaaccgaggttacaagtactttggagcagcaaaagatttgcctggtgttagagagctgtttgaaaaagaacctcttcctcctcccagaaagacacgtgctgagctcatgaaggcaatcgattttgagtactatggttacctagatgaagatgatggtgttattgtgcctttggaacaggaatatgaaaagaaactcagagccgagttagtggaaaagtggaaagcagagagagaggctcggctggcaagaggagaaaaggaagaggaggaggaagaggaggaagagatcaacatctatgcagtcaccgaggaggagtcggacgaggaaggcagccaggagaaaggaggggacgacagccagcagaagttcattgctcacgtccctgttccctcgcagcaagagattgaggaggcactggtgcgaaggaagaaaatggaactcctccagaagtatgcaagcgagaccctgcaggcccaaagtgaagaagccagaaggctcctggggtattaggacccagctggggctctccttggagttcttccatcccccagtggtacctcaggacccagggctgcagacacaggctggtgctgcaagggctcctgccccattctcagccttccttccctctccttgtctcatgttgaccggagggtaggggtctgtccctggtcttcctggtaggttttgtacacatattttgctactgtgtggatccatttatttttattgtggagtgtatacaacaggttgcgaactggctgcctgtgtcttattttgacttgcactgccattttgaggggagaagaatcaattagtggcaaacatttaaaaatgcaattttttgcagaccaaagtataattttaaaaaatgcaaattttctaaaagacacatctcttgaaaaatgagatgatgtggccaggcgcagtggctcacgcctgtaaccccagcactttgggaggccgaggcgggcgggtcacgaggtcaagagatggagaccatcctggccaacatggtgaaaccccatgtctactaaaaatacaaaaaaattagctgggcgtactggcatgcacctgtagtcccagctgcttgggaggctgaggcaggagaatcacttgaacccgagaggtggaggttgaagtgagccaagatcgtgccattgcactccagcctggcgacagagtgagactctgtcccaaaaaaaaaaaaaaaaaaagatgcacgcaacccacaagtcaatgaccaggtccctctgtgttggttgctgctctgggctctccgttagcccccctccacctgctccactcgctcctgcctgggtggcaggaatttgagtttgctattcctgttttataacctgttctgcagaaacctatttttattaaagatttttataagaaagggaaacctccatgtcttcagcttgttccctgggccaacggctctgaggtgacagtggcattaggatgtgaccagtcactaaggggcactgccttcctgcaggggagtccctgaagccccagccccaagtgtggcaaagacaggaccagatcccaggagtctaggtgggagtgagccgacccaccatggcgtccgtggccacagctgtagacagggctccttgcagtgggctgcaccgtggcctgctgaaagcacacagtggacacgagctgagtccagagcttcctctgaactggggcttagctctccagtggggaaccatggtcagcggctgtagcccctgggcaagatggtgcctggcttcctgccctctgcagggtcatgggagtgtctgggaactcagggtcagggccagatggctgttcctggggcctggggctccagctcaggctgtttgggaataggaggaactcttggcttggagaagcccatcacacagcgggaggcctgggatggttggtctgcggggagcagctcagactgggggtggcagagccgtgtgtggctgtgtgtggccaagtcgggagagtggccagtgctgggccctctctaaggagcccgagggccacaaggactgtggaaaaggtctgagtgagggagtcgggagctagtggctaagggacttgcttgaggacgctccgtgcggccacaaggagaggcccaggcaggaccaggtcaggaggaggctggggcagaggccctggcaggaggtgggtgggcttggtggggatgggagtagccagggtgtaggtgaggatggggaaggggcccccctgcctcctggcttccctgagggctgggctggccaatcccagccctcagtcaagcccggaggcaaatgtgtgcagggaggagaggtgtccaggttgaagctttgggagcccttggaggcagcaaggcagactcgcctctgggacccagcacccagcttgggcctgcaggtggggactcaggagtgaatatcgtgggggctttgagcaagaccctctgggcccagcctcaccttccatactttgaagtcaaggagtggacctgtgctgtctcagtttgctctggggtctgggcagtcctgtggtttgggcagaggcctcagagggccctagggacagactgacccaggtctgagcctcttgggagcgtgcggatggccggcctcagacaggcctggttgtgggtttgtcttccaaggggcacacgcgcactctggtgcttcctggcattcagaagagaatggggaatccagacatcaggccttccttctccctgggaaggatggcaggtgcttggagccaggcctgtcttgagagccagggctctgggtcttcctcctccagtgccctgttccacgccttcagtgcacaaagcactcccctcctgggatctcttcagggatccccgggatgcaaactggccagggattagaattccacatttgagcaaacagactgagagtggagaagcacccagctggacatcctctaggtgttcctggcagaggcccttgctacttgtctgtgcccaaaggccctagagggtcctagatgtgggacaaggtctcagcagggctccagtcccaggcctggaaacagctgggggtgggggaagctggctgggtgggtgtggttatcttttcccagcttgtggctccgaggtgacagaaccaatctcaggaggctttgtttggttaataaaatctactgaatggtttatttt

SEQ ID NO: 4903 - DNA, 4269 bp, Homo Sapiens
  NM_020706
agggtgccccgcgcggcgtggactcgggccgctgccgccatcccgctggagagagggagagagaggcccgcccgctcgccggccgggccagtgtgagccagtgcgtgagggcgcggggggccgtgtcagcgagacgcagagcgcagccgccaccaccaaacggacatgttgaagaccagcgctgccgccgcctccttttcctcatcctgcgaacgggactgagagggggcccgccacctctccgcctctgcctcggccgcccgcctcgccgcttcgggcgcagcctcttcctgcccgggcctcggactccgccgctcgtcgcctccccccggccaccaggcccggctggtttcccagccccgctccgccgcggcgcgaggtctatgtgaccggcgggcccggagcagccgccgccgcagcgcgaacatggacgccgtcaacgccttcaaccaggagctcttttcgcttatggatatgaaacctcccatctctagagccaagatgattctcatcactaaagctgctattaaagctattaagctttataagcatgtagttcaaatagtagaaaagttcatcaaaaagtgtaaaccagaatacaaggttccgggattatatgtaattgactcaattgtgcgacagtctcgtcatcagtttggaactgataaagatgtttttgggccaagattctctaaaaacataactgccacattccaatatttatatctttgtccatctgaagataagagtaaaatagttcgtgtgctgaacctttggcaaaaaaatggagtgttcaaaattgaaattattcaacctcttttggacatggcagcgggaaccagtaatgcagccccagtagcagaaaatgttaccaataatgaaggctcacctccacctccagtaaaagtttcttctgaacctcccacacaagccactccaaactccgtcccagctgtaccacagttgcccagctctgatgcttttgctgctgtggctcagctgtttcagacaactcaaggccaacagcttcagcagatccttcagacttttcaacagcctccaaaaccacagtctcctgcccttgacaatgctgtgatggctcaggttcaggctatcacagctcagttaaagacaactcctacacaaccatctgaacaaaaagctgctttccccccacctgaacagaaaactgcatttgacaagaagttgcttgatagatttgactatgatgatgagccagaagctgtggaagaatcaaagaaagaggataccactgccgtcaccacgacagcacctgctgccgcagtaccccctgcacccaccgccaccgtgcctgctgctgctgcacccgctgctgcctctcctcctcctccacaggcaccatttggctttcctggagatggcatgcagcagccagcatacacacagcatcaaaatatggatcagtttcagccacgaatgatgggaatacaacaggatccaatgcaccatcaggttccacttcctcctaatggacaaatgccaggatttggacttcttcctacacctccatttcctcccatggctcagcctgtgattcctccaactccaccagtgcagcagcctttccaagcttcttttcaggcacaaaatgaaccacttacacagaagccgcatcagcaggaaatggaagtagaacaaccttgtattcaagaggttaagcgacatatgtctgataacagaaagtcaagatctaggtcagcatccaggtcaccaaaaaggaggcgatctagatctggttctagatctcgaaggtctcggcatcgacgttctcgatctcggtccagggatagacgccgacattctccccgatctcgatctcaagaaagacgggatcgagaaaaagagagagaacgtcgacaaaaaggcctccctcaagtgaaaccggaaactgcaagtgtttgcagtactaccctctgggtggggcagctggacaaaagaactactcagcaggatgttgccagtctcttggaagagtttggtccaattgaatcaattaatatgattcctcccaggggttgtgcctatattgttatggttcataggcaagatgcctatcgtgccctgcagaaactgagccgaggaaactataaagtgaaccagaaatccataaagattgcctgggccttaaacaaaggaataaaggcagattataagcagtattgggatgtagaacttggtgttacttatattccatgggacaaagtcaagcctgaggaactggagagtttttgtgaaggaggaatgttggacagtgacacacttaacccagattggaaaggaattcctaagaagcctgaaaatgaagttgctcaaaatggaggtgctgaaacctcacacacagaaccagtatcacccatacctaaaccattacctgtgcctgtccctcctattcctgttcctgcacctataacagtgccacctccacaggtcccaccacatcaaccgggtccacctgtagttggtgctctccagccgcctgctttcacgcctcctctgggaataccgcctccaggctttggtcctggtgttcctcctccccctcctcctccaccatttttgcgcccaggattcaacccaatgcatttaccaccaggttttctgcctcctggacccccacctcctataactccaccagtatccattcctcctcctcacactccaccaataagcatcccaaactctactatcgctggtataaatgaagacactacaaaagacttatctattggaaatcccattccaacagtggtgtctggggctagaggaaacgccgagtctggtgacagcgtgaaaatgtatggctctgccgtgccacctgctgcacccacgaatctgcccacccctcctgtaacccagcctgtttcacttcttggcactcaaggagttgcccctggtcctgtaattggacttcaggcaccatctactggtcttcttggcgcccggcccggtctcatcccactccagcgccctccaggaatgcccccacctcacttacagcggttccctttgatgccgccccgtcccatgccaccgcacatgatgcacagaggcccaccgccaggaccagggggctttgcgatgcctccacctcatggaatgaaaggtcccttcccaccgcatggcccctttgttaggcctggtggaatgccagggctcgggggcccagggccaggcccagggggtcctgaagacagagacggaaggcaacagccgccgcagcagccacagcagcagccacagccgcaggcgccccagcaaccacagcagcagcagcagcagcagccaccaccatcacaacagcctccaccaacacagcagcagccacagcagtttagaaatgataacaggcagcagttcaattcaggtagagaccaagaaaggtttggaagaagatcttttggaaatagggtggaaaatgaccgggaacggtatgggaaccgtaatgatgatagagataatagtaaccgtgacaggagagagtggggaaggaggagccctgaccgggacaggcacagagacttggaagagagaaatagacgctctagtgggcatcgagacagagagagagattctagagatagagagtctcgtagagagaaggaagaagcccgaggaaaggaaaagcctgaggtgacagacagggcaggtggtaacaaaaccgttgaacctcccattagccaagtgggaaatgtagacactgcttcagaacttgagaagggggtgtctgaggctgcagtcctaaagccttctgaagagttacctgctgaggctacctcatccgttgaacccgaaaaggattctggctcagcagcagaggctcctcgttagagactggaatttgtgaaaatgtgacagtgacacttcctggagtgtagagcttgaggtgtacagatgctgtattatatccgctcccgctgtactgcagccccgcgccagctggtggggaactgtaagcaatttgattgcttcccttctatttaaaaatagccacaaaataacaaaaaatactgaaaatatgaataaatattaccctttttgctgtaactttttaaaagttttgactttaaaaagtttacaaatcgtaattagaagtgctctctatttttttttttttttttaatttaagacaaggtaacggtgaaagctcctcaaaacaatagggatgtttttaataaactctattttcgtaacaaactttaatgtgtgctattcttcctacactgcatt

SEQ ID NO: 4904 - DNA, 2694 bp, Homo Sapiens
  NM_020710
gtgggtgcctgccagcagctgaggcgccatggcggcggcagcggtgtcagagtcttggccggagctggagctggctgagcgcgagcggcggcgggagctgctgctgacggggcccgggctggaggagcgagtgcgggcggcgggtgggcagctgccgccgcggcttttcaccctgccgctgctgcactacttggaagtgagcggctgcgggagcttgcgcgcgccggggcctggcctggcgcagggcctgccgcagctgcacagcctcgtgctgcggcgcaacgcgctggggcccggcctgagccccgagctcgggccgctgcctgcccttcgggtgctcgacctgtcgggcaacgcgctggaggcgctgccgccgggccaaggcctgggccccgccgagccgccgggccttccgcagctgcagagcctcaacctcagcggcaaccggctgcgcgagctgccagccgacctggcgcgctgcgccccgcgcctgcagagcctcaacctcaccggcaattgcctagactcctttcccgccgagctctttcgccccggcgcgctgcccctgctcagtgaactggcggctgctgacaactgcctccgagaactcagccccgacatcgcccacctggcctcgctcaagacgttggacctctcgaacaaccagctgagcgagatccctgcagagcttgcggactgccccaagctcaaggagatcaatttccgtgggaacaagctgagggacaagcgcctggagaagatggtcagcggctgccagaccagatccatcctggagtacctgcgcgtcggaggccgtggtggcgggaagggcaagggccgtgccgagggctcggagaaggaagagagccggaggaagaggagggagaggaagcagaggcgggaaggtggtgatggggaggagcaggacgtgggagatgccggccggctgctgctcagggtcctgcacgtctctgaaaaccccgtacctctgacagtcagagtgagccccgaggtccgggatgtgcggccctacattgtgggggccgtggtgcgaggcatggacctgcagccagggaatgcactcaagcgcttcctcacctcgcagaccaagctccacgaagatctctgtgagaagaggacggctgccacccttgccacccacgagctccgtgccgtcaaagggcccctgctgtactgcgcccggcccccacaggacctcaagattgtccccttggggcggaaagaagccaaggccaaggagctggtgcggcagctgcagctggaggccgaggagcagaggaagcagaagaagcggcagagtgtgtcgggcctgcacagataccttcacttgctggatggaaatgaaaattacccgtgtcttgtggatgcagacggtgatgtgatttccttcccaccaataaccaacagtgagaagacaaaggttaagaaaacgacttctgatttgtttttggaagtaacaagtgccaccagtctgcagatttgcaaggatgtcatggatgccctcattctgaaaatggcagaaatgaaaaagtacactttagaaaataaagaggaaggatcactctcagatactgaagccgatgcagtctctggacaacttccagatcccacaacgaatcccagtgctggaaaggacgggccctcccttctggtggtggagcaggtccgggtggtggatctggaagggagcctgaaggtggtgtacccgtccaaggccgacctggccactgcccctccccacgtgactgtcgtgcgctgacgccagggccgcctgtccgcgtttgtttggccggttttgcggaggtttctatgcggcaatgctgaattatccgttagattttcaccccagtttttttgttggtttttttttttgagatggagtctcgctctgtcgccaggctggagtgcagtggcgtgatctcgagtcactgcagcctgtgtctcctgggttcaagcgattctcctgcctcagcctcccaagtagctgggactacaggtgtgtgccactaagctcagctaatttttgtatttttagtagagacggggtttcaccattttgaccaggatggtcttgatctcttgacctcatgatctgtccacctctgcccctcaaagtgctgggattacgtgatccacccgcctcagcctcccaaagtgctgggattacaggcgtgagctgtgcctggcccaccccagcattttttaagatgtatgtattcgttgttctgtttttccagatgattctgtcgtaaagtgatgctatgttgtcgttacaacatcaaagtgattttacggtttttgatgggattattcaagtgtcagaattaactgttcaaaatgttctgaatcatgtagatacatggcaggtaactgtttatgggagaaaagtacagtgctgttacgtggcactgtacagtcatgtgccacgtaacagcgtctgggtcagtgacggacacttacctgacagcggatccacaatattctcgtgcagtgtgtttggaatcctggtctgggctctcgtcgttggccttgtagatcaagtaggggaagtgagtgatgttcagtcatgctgctgggacacttggttttccagatgaaaacacataaataaaactacatgcaccatcaaaaaaaaaaaaaaaaaaaaaaaaaaaaaaaaaaaaaaaaaaaaaa

SEQ ID NO: 4905 - DNA, 5919 bp, Homo Sapiens
  NM_020713
ccccccgccccggcccggcccggcccggccgcagccccgctgggcgccgcagagatgacggatcctttctgcgttggaggccgtcggctcccggggtccagcaagagtggtcccgggaaggatggcagccgaaaggaggtccgacttccaatgctgcatgacccaccgaagatggggatgccggtggtccgtggtggacagacagtgcccggccaggcccctctctgctttgacccgggaagtccagccagtgacaagacagaagggaagaaaaaggggcggccaaaagccgagaaccaggccctccgagacattcctctctccctgatgaacgactggaaggatgagttcaaggcacactcgagggtgaagtgtccaaactcagggtgctggctggagttccccagcatctacgggctcaagtaccattaccagcggtgccaagggggtgccatctcagatcgcctggccttcccctgccccttctgcgaggccgcattcacctctaagacccagctggagaaacaccggatctggaaccacatggaccgacccctgcctgcctccaagcctgggcccatcagcaggccggtcaccatcagccggcctgttggggtcagcaagcccatcggagtgagcaaacctgtcactattggcaaacctgtgggtgtcagcaaacccattggcatcagcaagccagtctcggtcggcagacccatgccagtcaccaaggccatcccggtcactaggcccgtgccagtcaccaaacctgtcacagtcagcaggcccatgcccgtcaccaaggccatgccggtcaccaaacccatcacagtcaccaagtctgtgccggtcaccaaacccgtacctgtcaccaaacccattacggtaacaaagcttgtgacagttacgaaacccgtgccggtcaccaagccagtgacagtcagcaggcccattgtggtcagcaagccggtgacagtcagcaggcccattgctatcagcagacacacaccgccctgcaaaatggtgctgctgaccaggtcggagaacaaagcacctcgtgccacagggaggaacagtggtaagaaaagggctgcggacagcctggacacctgcccaattccacccaagcaggccaggccagagaatggggagtacggcccctcctccatgggccagagctcggccttccagctgagtgcagacaccagcagtggctccttgtcgccaggcagcaggccgtcagggggcatggaggcactgaaggctgcaggccctgcgtccccgcctgaggaggacccggagcgcacaaagcacagaaggaaacagaaaacacccaaaaagtttacaggggagcagccatccatctcagggacctttgggctcaaaggcctggtcaaagctgaggacaaggcccgagttcaccgctccaagaagcaggaggggccaggccctgaggacgcccggaagaaggtgccagctgcccccatcactgtcagcaaggaggcaccggcccctgtggcccacccagctccaggtggccctgaagagcagtggcagagggccatccatgagcgcggggaagccgtctgccccacctgcaacgtggtcacccggaagactctcgtggggcttaagaagcacatggaggtgtgtcagaagcttcaggatgcactcaagtgccagcactgccggaagcagttcaagtccaaagccggcctcaactaccacactatggccgagcacagtgccaagccctctgacgccgaggcctccgaagggggcgagcaggaggagcgcgagaggctgcgcaaggtgctgaagcagatgggacggctgcgctgcccccaggagggttgcggggctgccttctccagcctcatgggctaccagtaccaccagcggcgctgcgggaagccgccctgcgaggtggacagcccctccttcccctgcacccactgtggcaagacgtaccgatccaaggctggccacgactaccacgtgcgctcggagcacacggcccccccccctgaggagcccacagacaagtcccctgaggctgaggacccgctgggtgtggagcggaccccaagcgggcgtgtccgccgcacgtcggcccaggtggcggtgttccacctgcaggagatagcggaggacgagctggcccgcgactggaccaagcggcgcatgaaggatgaccttgtgcccgagaccgcacggctcaactacactcgaccagggctccccacgctgaacccccagctgctagaggcatggaagaatgaagtgaaggagaaaggccacgtcaactgtcccaacgactgctgtgaagccatctactccagcgtgtccggactcaaggctcatctcgccagctgcagtaagggggcccacctggcagggaagtaccgctgtctgctgtgtccgaaggagttcagttctgagagtggcgtcaaataccacatcctgaagacccacgcagagaactggttccgaacatcagcagacccacctcccaaacacaggagccaggactcattggtgcccaagaaggaaaagaagaaaaatctggcaggtggaaagaagcggggccgaaagcccaaggagcggaccccagaggagcctgtggccaagctgcccccgcgccgggacgactggcctccaggatgcagagacaagggggcccggggctccaccggccggaaggtgggagtcagcaaggcgcctgaaaagtgagcatggtgcgtggggcctggcccccatgcagccgccacaccgccctctgttcaaggcagggccagctccgggacctctgtcctccagttctccatcccccacccccgcctcttcatccgtccagtggggcagccagccactctcccttccctgaaggtggcccttcccctgttaaggctgccacagggcacacctgggttggggctccccaaggtgtgcccagcagaagtgcaatagccaggagggttgcccctcctcatgggaatgtgtctggggtcttggtgccacaggggctgcagcgcagagtaggcagatggcctttggccccccggctccgcttcctcaggccctgccgggtcccttccctggctaccccaaggctcaggcatccctggtgacctgtggttctgggctggtgagggcacctgagcaacctggcacgggcagccaccatcctggcctcacctccacccaacactggaactccagcacccccagctacctcccaggacagacccctgtctgaccactgccatgctgacctgacaggctccggcctgcccttggccacccacttggtccccttgcttctgttttctacctctccaggcctgcccactacccccacccctgctcctcctttgtcagtgcgatccctgctgtgctcaggccctgccccccaggcctgtctgtaattctcccagcttggggcaagggaggggttttgcttcttgtacctacagggcagcagaagcttgatgcccttcaacacagctgccagccctgggggtgtggggcccctggagtgtgctctcctccagtgttcagccttctggcactgcaggcctaggttggagcagcctcgtggagtagggacggactagttcgggccctggggtcttgctggggcccataggcatgtggggcaggaagctgggcagagctggcctggctctgagtggccactgggggaaaggcagccttctgtctgccaatctgggtaggcccagtggccaagctctcatgggagccccctccccacttttttttttaacctgcccccattgtttctggttgtgtggtcatttgatatgggaactgaaggccagccaggggaggggcttggccaaagtcacagcaggttgatggcagctccagagctgtctttgcccctttgtggccctgaggacggctgggtctataggtagggcaggggtcaggcagggagtccagggtgcctggaagaggtggccacagcctgtggctccctccctggggtcctgccttccaaccacggcattgcagggaggatgaggctcagagggggtaggtttggagggaggccattttccagggtgggtgggagtgggctgagggctcggccccactgaccctggacgatgagaattttgatgtttgcccgtgtgcgtgtgtctcctgggtgtagtggatgccagtcttgttgctgtgacaagtaacaaccttttttttaaattgttttttatacaaacactcgcaatccgacatttggtgctaagggtttcctggtgcagacggtgggcctgggggctgggctggaccagggcgtgggtctctggggttggggtcccttgctgctcagggaggcagtactgactgggcactgcctctgcccccagcacccaccctcccccattccccagggagaaggggccccactgggcttggcctgcagtagtagggagacaagttccaggagcactttggggactggggttgcagaacacttcctgtctctggcttcatccttgggccagaaggctccaaccctcagcagcccttgccagatgtgccagggagtgggtgtggagacccggactccccccacccacgcacacctcggcctgatgagaggatggaggctggggcagagatgggcgtgacccagcgtcagagggtcgggggaggcattccttcctgtgtcccagagcttcactggtggagctggaggagccggaggtggagggtggggtctggcagctgctgctggggcagcctcatgaggggaggggaggggaggggaggggagcaggcactgggcgggggcctaggtgcactttgtccttgccaccaatggcgggaggagggtggacctgaacacctgcagggtgtggtgcctgccccagcctctcaggtacttggcccttggggagaagagaagagggtctggtttttgctgggggtgagtttccgggacactcccaaagcccacagataatccctggtgtgggaagaggagtcctggataccttgatgtttagcactttaaccccctttgtctttaaggtaggcgtgggggctactgccagaagtggctgttgggtctgaccccctcctttctgccctccctctgccacatgctggtccgcagagccctcctcccaaggggtggggccctgggtggagctcagcagggtctgcccactccctacgctggcccacataggcctccaggagccctcagtgagagggaccagcatagctgacccccagagtgtggtgggcgccggccctgcccgaggcccagtcggggccctttctgcagatctacctctggctcagcgcacgccccctgccctgagaacaggaaagggcccggaagggctgactcaccgggccgacgctcacacgaaaatgggatgcactttatttgctggtgcaaaggcaggtgagggtgcctcctgtgtgaccgttggccctcctgcctggtggcgctgaagggaaggagccagtgagcctgaccccgggaggggccgtccccgtgtgccgcgtttggcggggccccaggcggctcccccaggcccgggtctggggccccaggctttcccctgcctcgcggccgggcgtcccgtgctttgggtttcttggtttgggttttttaatgccagttctcagtacataagtgcattttgaaagaggttccagctatcacttgtaaccatatatatatacatatatattctatctacaaagtgtttatttgcgagatgtttcaacggtgagttcgggccccgcccgccttgtgaccatctgtccccggtcctcgtccccgccccgcgccctggtcccgagtggcgtggggacgggccatcactgtatgtattaaaatgactgtatcaaataaatgtttattgatttttttccagg

SEQ ID NO: 4906 - DNA, 5957 bp, Homo Sapiens
  NM_020728
agtatccaccccgcccgctcccggtgacgtgccagccccaggcccacgccgctcccgccccgcgtgatgacgccaccgtcccgggcggaggcgggcgtgcggcggagccgcgtcccctcagaggggcgctggcgcggggctgagccgcccgggatcagcgcgagcacccagcccgcctcggccgggagggcagcgcggcactgcggggcgatgagcggcgcccggggcgagggcccggaggcgggcgccggcggggctgggggccgcgcggcgcctgagaaccccgggggcgtgctgagcgtggagctgcccgggctgctggcgcagctggcgcggagcttcgcgctgctgctgcccgtgtacgcgctgggctacctggggctcagcttcagctgggttctcctcgcgctcgcgctgctcgcctggtgtcgccgcagccgcggcctcaaggccctgcgcctgtgccgcgcgctggcgctgctggaagacgaggagcgcgtcgtgcgcctgggggtgcgcgcctgcgacctgcccgcctgggttcattttccagacactgaaagagcagaatggctaaataagactgtaaaacacatgtggcctttcatttgccaatttatagagaagttgtttcgagaaactatagaaccagccgtgcggggagcaaacacccaccttagcacctttagtttcacgaaggtcgacgtgggccagcagcccctcaggatcaatggtgttaaggtatacactgaaaatgtagacaaaaggcaaattattttggaccttcagattagttttgtaggaaattgtgagattgatttggagatcaaacgatatttttgtagagctggtgtgaaaagtatccagattcatggtaccatgcgggtgatcctggaaccgttgattggagatatgcccttagttggagctttgtctatcttcttccttaggaaaccacttttagaaattaactggacaggactgacgaatcttctggatgtccctggattgaatggtttatcagatactatcattttggatataatatcaaactatctggtgcttcccaatcgaatcaccgttccacttgtcagtgaagttcaaatagctcagttgcggtttcctgtaccaaagggtgttctaaggatacattttattgaagctcaggatcttcaggggaaagacacttaccttaagggacttgtcaagggaaagtcagacccctatggaatcattagagttggcaaccaaatcttccaaagcagagtcatcaaggagaacctcagtccaaagtggaatgaagtctatgaggctttagtgtatgaacatcctggacaagaattagagattgagctctttgatgaagacccagacaaggatgactttttaggaagtcttatgattgacctcattgaagttgaaaaggagcgccttttagatgaatggttcactctggacgaggttcccaaggggaagctacacttgagactggagtggctcacgttaatgccaaatgcgtcaaacctcgacaaggtgctaacagacatcaaagctgacaaagaccaagccaacgatggtctttcctctgcattgctgatcttgtacttggattcagcaaggaaccttccgtcagggaagaaaataagcagcaacccaaatcctgttgtccagatgtcagttgggcacaaggcccaggagagcaagattcgatacaaaaccaatgaacctgtgtgggaggaaaacttcactttcttcattcacaatcccaagcgccaggaccttgaagttgaggtcagagacgagcagcaccagtgttccctggggaacctgaaggtccccctcagccagctgctcaccagtgaggacatgactgtgagccagcgcttccagctcagtaactcgggtccaaacagcaccatcaagatgaagattgccctgcgggtgctccatctcgaaaagcgagaaaggcctccagaccaccaacactcagctcaagtcaaacgtccctctgtgtccaaagaggggaggaaaacatccatcaaatctcatatgtctgggtctccaggccctggtggcagcaacacagctccatccacaccagtcattgggggcagtgataagcctggtatggaagaaaaggcccagccccctgaggccggccctcaggggctgcacgacctgggcagaagctcctccagcctcctggcctccccaggccacatctcagtcaaggagccgacccccagcatcgcctcggacatctcgctgcccatcgccacccaggagctgcggcaaaggctgaggcagctggaaaacgggacgaccctgggacagtctccactggggcagatccagctgaccatccggcacagctcgcagagaaacaagcttatcgtggtcgtgcatgcctgcagaaacctcattgccttctctgaagacggctctgacccctatgtccgcatgtatttattaccagacaagaggcggtcaggaaggaggaaaacacacgtgtcaaagaaaacattaaatccagtgtttgatcaaagctttgatttcagtgtttcgttaccagaagtgcagaggagaacgctcgacgttgccgtgaagaacagtggcggcttcctgtccaaagacaaagggctccttggcaaagtattggttgctctggcatctgaagaacttgccaaaggctggacccagtggtatgacctcacggaagatgggacgaggcctcaggcgatgacatagccgcagcaggcaggaggcgtcctcttcagcgtagctctccacctctacccggaacacaccctctcacagacgtaccaatgttatttttataatttcatggatttagttatacataccttaatagttttataaaattgttgacatttcaggcaaatttggccaatattatcattgaattttctgtgttggatttcctctaggatttcgccagttcctacaacgtgcagtagggcggcggtagctcttgtgtctgtggactctgctcagctgtgtccgtaggagtcggatgtgtctgtgctttattatggccttgtttatatatcactgaggtatactatgccatgtaaatagactattttttataatctttacatgctggtttaaattcagaaggaaatagatcaaggaaatatatatattttcttctaaaacttattaaattcgtgtgacaaataatcattttcatcttggcagcaaaaagttctcagtgacctattttgtggtgtttctttttgaaaagaaaagctgaaatattattaaatgctagtatgtttctgcccattatgaaagatgaaataaagtattcaaaatattaacattttcataaatataaggatgtattattgagaagtaagttgaagggcttataaggaaaaatgttttataactgagtaatatattaagagaattgtcatggttcataaatcacattatgctaatctgaaatttcttacataaaaatgaagtgtcttatgtttattttaattgctgttgtaacttactcatgaaacagtatacagacaccttgtacttttcctcaactgtaagagcagactttcaatgttagcaattaagctgttgtcaaacaatcagtcatgagctttgttaattttcaatgttttcccagcctataaaaaaaggaaggtacacgttgtccttttaaaggttgtgaggtagattggagtgagtagacaggatattgcattaaaaattgaaagctcgatctcattattgtcaggaacccccagtgtgacctcacacataggatgtgggacctttgagccgatgtgcactggccaccaccagggttgggggcgccacagctgcgagcccggcccctgctgttctcagcagccacttcccaggctgcctcactttatgccatgactgaccttaatattgggatattgttatgcaatttttatcctgtttagactgttaaaagcaggtttctgtacttaagagtcccccagacctcctgtgaggtgaggctctgttgcagtgtcgtaggctgtgtgtgtctgtaaagaaagaatgcacatatgtagacgattaagtgtatattataagctatatgctgaaaatggcttccatagccatgagaacatcttaaaactatgtgtaaatatattaaggaaagtatagctttgtaatttaaattggagcttttagcttgtttcatggaactatacaacttgtgggtaactcacatgaccaaacaaaccaaagtgcctgtgacggggcgggtggcgtctacccaccctcccttctagcagattcttattttgtttgaatttataaacaaggctggtggctgtctacccaccctcccttctagcagattttgattttgtttcaatttataacttacactttgaaccatgggtttacttataatggagtctgtagcttcacagcatatttcatgtaatcataaagaccagtatattccctcctgctgaatgacatgcgactgtaaagcctctttataaaccatttccaatgttagtatataggattatttgggaagcgtatcaatacctttatagacaaatacgaacatgtatgcacacaaaacatttaactatggtatttatggaagacaggtaacaacattaaatctagttgctttcccttagtattagatttgttgagggttttttaaaaatcaggtctgttgaaagtcttctgtcataatctataaagcagcagcactcatggaaattgtagcatgccagtaatttttaccaacatcccatacatctgagttctgcagtccagtgtgtaatccgctccatgtgtattttgcttaatggaatgctttatttaagcacttaggcagagtagacacaattaaaggtacaaagcccagaggaagtggtagagcagcaccgtgcctgccctgaggcagtggagtcagtagcgctgtccccagggccttgagtgcctggaggtgcttggcctccagtagctgcctccattctcttttaaaaaaagggggtgattctgaggcactgaagtgcctcccagatgtggaggagtgaagccaccatcgaggccacactcagcactccaggatcccagcgatgtcagacactcttgagttgtcaaaacgttaattttcagttttaaataatcagtttatctaagaaaagggaattttaacttttctaccttgagccaagccaatgaagggaaaattaattaacttagtaaatttgaagtgcagctctgttagctcgtacatgtgggttcttatcctgatcctgtgccttaaagtaggaaggtgtttccaagttcagattaaaatagaagcagctggccgggtgcggtggctcacgcctgtaatcccagcactttgggaggccgaggcgggcggatgacctgaggtcaggagttcaagaccagcctggccaacatggagaaaccccatctttactaaaaatacaaaaattagccgggcgtggtggtggagcgcacgcctgtagtcccagctactcgggaggctgaggcaggagaattgcttgaacccaggaggcggaggttgcagtgagccaagatcgcaccactgcactccagcctgggcaacagagtgagactccgtctcaaaaaataaataaaatagaagcagccttgtaactgtatttaccatgataatatattctgcacggtaagaattccttttacagacattctttatcaagaggtcggcccttctttttcaggcacataagccaaatgcaggcctgtgtgtagctgtgtgttttttctgtggttgccgcatttattccacctccagctggaccccccactgcaaatagagaacagcggtgggggatgggggttaaaaagtagagaacctcctttctgttcaactaatttcacgtgacagtgcatgtatttattcaataaaacctttatgttagctc

SEQ ID NO: 4907 - DNA, 9156 bp, Homo Sapiens
  NM_020733
ccgctgcccgctgcccgctgccctcgccccgcgcgccgggcatgtgagcgcgggcgggcgccgtcaccatggcctcgccgcgcgcctcgcggtggccgccgccgctcctgctgctgttgctgccgctgctgctgctgccgccggcggcccccgggacgcgggacccgccgccttccccggctcgccgcgcgctgagcctggcgcccctcgcgggagcggggctggagctgcagctggagcgccgcccggagcgcgagccgccgcccacgccgccccgggagcgccgcgggcccgcgacccccggccccagctacagggcccctgagccaggcgccgcgacacagcggggaccctccggccgggcccccagaggcgggagcgcggatgctgcctggaaacattggccagaaagtaacactgaggcccatgtagaaaacatcaccttctatcagaatcaagaggacttttcaacagtgtcctccaaagagggcgtgatggttcagacctctgggaagagccatgctgcttcggatgctccagaaaacctcactctactcgctgaaacagcagatgctagaggaaggagcggctcttcaagtagaacaaacttcaccattttgcctgttgggtactcactggagatagcaacagctctgacttcccagagtggcaacttagcctcagaaagtcttcacctgccatccagcagttcagagttcgatgaaagaattgccgcttttcaaacaaagagtggaacagcctcggagatgggaacagagagggcgatggggctgtcagaagaatggactgtgcacagccaagaggccaccacttcggcttggagcccgtcctttcttcctgctttggagatgggagagctgaccacgccttctaggaagagaaattcctcaggaccagatctctcctggctgcatttctacaggacagcagcttcctctcctctcttagacctttcctcatcttctgaaagtacagagaagcttaacaactccactggcctccagagctcctcagtcagtcaaacaaagacaatgcatgttgccaccgtgttcactgatggtggcccgagaacgctgcgatctttgacggtcagtctgggacctgtgagcaagacagaaggcttccccaaggactccagaattgccacgacttcatcctcagtccttctttcaccctctgcagtggaatcgagaagaaacagtagagtaactgggaatccaggggatgaggaattcattgaaccatccacagaaaatgaatttggacttacgtctttgcgttggcaaaatgattccccaacctttggagaacatcagcttgccagcagctctgaggtgcaaaatggaagtcccatgtctcagactgagactgtgtctaggtcagtcgcacccatgagaggtggagagatcactgcacactggctcttgaccaacagcacaacatctgcagatgtgacaggaagctctgcttcatatcctgaaggtgtgaatgcttcagtgttgacccagttctcagactctactgtacagtctggaggaagtcacacagcattgggagataggagttattcagagtcttcatctacatcttcctcggaaagcttgaattcatcagcaccacgtggagaacgttcgatcgctgggattagctacggtcaagtgcgtggcacagctattgaacaaaggacttccagcgaccacacagaccacacctacctgtcatctactttcaccaaaggagaacgggcgttactgtccattacagataacagttcatcctcagacattgtggagagctcaacttcttatattaaaatctcaaactcttcacattcagagtattcctccttttttcatgctcagactgagagaagtaacatctcatcctatgacggggaatatgctcagccttctactgagtcgccagttctgcatacatccaaccttccgtcctacacacccaccattaatatgccgaacacttcggttgttctggacactgatgctgagtttgttagtgactcctcctcctcctcttcctcctcctcctcttcttcttcttcagggcctcctttgcctctgccctctgtgtcacaatcccaccatttattttcatcaattttaccatcaaccagggcctctgtgcatctactaaagtctacctctgatgcatccacaccatggtcttcctcaccatcacctttaccagtatccttaacgacatctacatctgccccactttctgtctcacaaacaaccttgccacagtcatcttctacccctgtcctgcccagggcaagggagactcctgtgacttcatttcagacatcaacaatgacatcattcatgacaatgctccatagtagtcaaactgcagaccttaagagccagagcaccccacaccaagagaaagtcattacagaatcaaagtcaccaagcctggtgtctctgcccacagagtccaccaaagctgtaacaacaaactctcctttgcctccatccttaacagagtcctccacagagcaaacccttccagccacaagcaccaacttagcacaaatgtctccaactttcacaactaccattctgaagacctctcagcctcttatgaccactcctggcaccctgtcaagcacagcatctctggtcactggccctatagccgtacagactacagctggaaaacagctctcgctgacccatcctgaaatactagttcctcaaatctcaacagaaggtggcatcagcacagaaaggaaccgagtgattgtggatgctaccactggattgatccctttgaccagtgtacccacatcagcaaaagaaatgaccacaaagcttggcgttacagcagagtacagcccagcttcacgttccctcggaacatctccttctccccaaaccacagttgtttccacggctgaagacttggctcccaaatctgccacctttgctgttcagagcagcacacagtcaccaacaacagtgtcctcttcagcctcagtcaacagctgtgctgtgaacccttgtcttcacaatggcgaatgcgtcgcagacaacaccagccgtggctaccactgcaggtgcccgccttcctggcaaggggatgattgcagtgtggatgtgaatgagtgcctgtcgaacccctgcccatccacagccatgtgcaacaatactcagggatcctttatctgcaaatgcccggttgggtaccagttggaaaaagggatatgcaatttggttagaaccttcgtgacagagtttaaattaaagagaacttttcttaatacaactgtggaaaaacattcagacctacaagaagttgaaaatgagatcaccaaaacgttaaatatgtgtttttcagcgttacctagttacatccgatctacagttcacgcctctagggagtccaacgcggtggtgatctcactgcaaacaaccttttccctggcctccaatgtgacgctatttgacctggctgataggatgcagaaatgtgtcaactcctgcaagtcctctgctgaggtctgccagctcttgggatctcagaggcggatctttagagcgggcagcttgtgcaagcggaagagtcccgaatgtgacaaagacacctccatctgcactgacctggacggcgttgccctgtgccagtgcaagtcgggatactttcagttcaacaagatggaccactcctgccgagcatgtgaagatggatataggcttgaaaatgaaacctgcatgagttgcccatttggccttggtggtctcaactgtggaaacccctatcagcttatcactgtggtgatcgcagccgcgggaggtgggctcctgctcatcctaggcatcgcactgattgttacctgttgcagaaagaataaaaatgacataagcaaactcatcttcaaaagtggagatttccaaatgtccccgtatgctgaataccccaaaaatcctcgctcacaagaatggggccgagaagctattgaaatgcatgagaatggaagtaccaaaaacctcctccagatgacggatgtgtactactcgcctacaagtgtaaggaatccagaacttgaacgaaacggactctacccggcctacactggactgccaggatcacggcattcttgcattttccccggacagtataacccgtctttcatcagtgatgaaagcagaagaagagactacttttaagtccaggagagagagggactcattgctctgagccagtcacctgggacctctgctcagaggaccgcaccaggaggctgcgcccaggatttgtcgggagccacgctgagtggcaagcaggaagagggacaggcatgcggggcgtgaccacagtggaggagacaggtggatgtggaaccacaggctgctcattcagcacctttgttgttactgtgaacgtgaatgtgggccagtatcaagagagtctctctgagtgactgcaccatggcactggcaccagggcgactattagccagggcagaccactagacttcagtgcagggacctggttttcccttcgtttgcactttagtaaattgggtgggaggtttccttttggatctgttttgagactgttccagaaagaaggcttcctttcccgagacacttccataggcagcaatttggtgattcatttgcagcaaaatactggcttgttaattattttcctgcccagcgcctgcgtgctaaacaacagatgaggatgagcgtaccactgaagtctgaagatgtcgccattgaacggacagtgttttcatatgtttctaggttgtcttatgctacagtttccaagccagcccccacagtgaggaaatgtgtgaggcaccgcacacaactgcaatgtgttttttaagtcaaggtgacacatgtatttaagattttttttttaaatctctttgcagttaaatctcactttttcaaacaagcctggatcagggcaaaacaacttatatttggttttagctggaggctcagcaggcagattgcaggcaggggggcacttttcatccatgagggcccagcctggggcctgggactcgatcaccattgtggaggccagaggcagctgcgtatggaggagaaatgtcaaactgaacgcaggtttcaccactctaggaaagcagcttgttgagcccctgcagctggatgtggttagagggatgggctgaataggcaggttagatttcctgcatcaacagtgctttgggaagctgtgtggattcctgaggaagaacagggagccgagatggagccacacatgagtttgctcaccggctactgcagcactttgtacccagaatctcatgtccacaaaccccatgtaaactttcaaccactcaaagctgtttattcggctgaagaaataacttttttttctcacccagtcatttgtacctcttcatatggctatgtcgcaccctccagaaacgtggttatacttccagtcagtgtgggagaactgaagacttccggttggtcgaggaactgagggttgaccttcgggaaggaagttccactcatcttatttattatgcctgtgatgtgggtcctgccagggagacatccagtactcggtgtctttaattgccacctggggaactgtgtttattggccttctttggggcatcctggttttggatgaagtgaggggaatacagaggtaaaagaattgtctccaccctgaagcggggagtcccgcttcacatttctggaaatggtgcagccactggggacagttctgccccgggcatggttgtttcttcaaggtcctctaaatataatccctattcttacataatccttggccctgatggttttaagcaagaactcctgtgtcccatggtctccaccactcaccatcaccctgctgtagcaagagtcctagtcaggggaggtgcattttagtagttacattgcacttatccatgagataaataaaaggagaactgtttttatcagtggaggctaacctaaaatttcaaagtgtcgcctttttgaaatcttgggcctctctctctgtagaaccaatggccctttgtggctcacggcctcgcacctaactggagagttctgagctcctgcagctcacctgagcccacagactaggcttcttggctccttccgcagcatgcctgctcacccccagaacccgcagctgtgggaagagccatgtagggaggctattcccaggcatacacttccactgccttcagctgacgtcacagctgacaaatcatctcctctatcggagccagaagacttcagctccacaaaatgaagtgttctgtcctgaaaacattcttgggaagaatcccaacatcgagaaaacggtgtcctgtgagttccaacaatgcttcttgttcatgggtttcttccgtatggagtggattaagagtgttttattttgttgttctaactgagaaaaaaaggaggcacccacaaggttgaggtcacacagtctccacagtttccaggaggcgtttgggggtggggaaggcacctccagagcatgaggctctaaggggacatgagtaaagcatgtctgtgacccagtgaggaagggagaggccagctgcactcctgcacggggttcctagctgcagaagggtcccgcctaggccgaggggaaacacctgatagcagaagaggcctggatgcacacctggcacgccgaggctctccgcccagacacagtgctccatgtcagcccctgcacctggggtgtgtgattcacgtgcacagatgccacaatcctgcaccaatatcccacagatgggggaaggtgagaggaaggggcaagtgatgtgtaactgctcaagagatgcttaaacctccatagagaggagccgggcgcaggggcatctgtgtgtcccgtcacacactgcagcagggaagggtggctggctggctccctggcatcagtggtttggtttaagctccagagggtcttattgccattgtcttttcctctgccccttgagccagcctaaggccctggagtctgtttctttaggcggatgaactgacatgctcctaccatgaccaggctctgggcaaggctcctcacagtatccttgagaggtgggcatggaagtgcccatttctcaggtacagaaaccttcagagaggataaatagcttgccctgtagaagcaggactgaaacccttgtctgcctgactcccccagctactctgcccactgtagccccctgccttactgtcctggcacacccctcaccatcctgtataccttaaatatcaaagagggcaagagagaaagggctttaaagataagttatttttttaaggaaccttaatattatttttaagaagtaaccaaattagtgacgtgaaatgcaaaaaaaaaaaaaaaaaaatgctgactacccttttgaaaatgtgctttcagattgttttttatatgtaattcttagacacttgtcattaagaaaatagtggctggcttgtgctcagcaagaagcacactggcacgtggctttggtataggaagtggaaggcaaggacctgggtttctgacaagtgcagtcagacatacacatccatctgagagctgcttgccttgttcccgtggtaaggccatggctcccacatactggaagcatatttttgtgaactgttttcagaattgggaacatattcagtggaatgtcttaaacgctgacacatcttcctcctttgaggggaagtatattttcagaagcagctaagacatttagagccaaaattgctgataggtggttcagtcaagttggctgatggcatctgaggtcaaaaactaagatgtgacgattgagttcttaaagaggtaactcttaaagtgggcccaagggagaaggcagcatctttggactcctaggctggatggctacccaagaatatgccattgaaggatgacacctattcagatgtgaaagttcccagagcaggcacctttgggtcacccaccacgtgtggctttttggtgcctgcatgaaactgtgttgccccctggtgagatgcccgggtgtcctgtaagccgatttaactctgcctgaggaagaggagctgtccactccagttgcccttggctaagtttagcctaacacacagggttttgacccatagttctaaaatacacaaattttgagactacagcacttctttggaaagaggaagaatgcaaagttcagtatttcaatactttgtattttacttgaaattacccttagtagcatcttttttttcctgtctgaaagcttttgtgtggatgagaagggacatttcatttcctcccttaacaaagtgtcattctgaggttctcatgtgtgtttttggaaatagagatactggttttgtagagtttgcctttgggtatgttttctttttttcttaaatctccaaggaagagaactgactaaaatagtaggaacatgaaagtattaaatgccaattaatttgttgtagtaaagtatcttcattagcgttatactccatcatatctggtgtaaactgctcacagaaaaccctatgaaaccaaagggggaccattcaggtctaaaaagcgacaggtccgagactgggtctgtcacctgggcattttcaaagaggacattttgaagaatttgcatattcagatttttaaaatgcacttaacatacttcattacagatttcttgggtagggaggatgggataggccagggatgggatggagtcagttctgcctgggaaactaatccgaatcatttacctttctgtattaaccttggcctgtcctaaaaagagaacgactgtttcatcatgagttgctctgagttttgttaatgtttgtgttggtggattgacggttaaatgaagcatttagctggaatatgaactttgggagttttcatgttgtcctggatttctctttgtaaacctttaaaccttagcccctggttgattgtgttaaacccattatgagaatgttatttaaagttgtattataattgcaacctccactaattattcagtactgtagcagcaaagtattatttgtaagaatttggttatttttatacttatatccactctaagtctggcgttctagtcagtaaaatgatgcaataaaattaatatcattttca

SEQ ID NO: 4908 - DNA, 6698 bp, Homo Sapiens
  NM_020739
acggcatgcactgcggcgcccagccggtcaccgcctgccggctgcagacgcctgcgagcaggttgtttttataagaggcgtcattggcgcccgagctgtgaccgccgccactggggcagccagcacaatcgggcggaggtggcgctgccccttcagacctgaaagatgtctgaaaattccagtgacagtgattcatcttgtggttggactgtcatcagtcatgaggggtcagatatagaaatgttgaattctgtgacccccactgacagctgtgagcccgccccagaatgttcatctttagagcaagaggagcttcaagcattgcagatagagcaaggagaaagcagccaaaatggcacagtgcttatggaagaaactgcttatccagctttggaggaaaccagctcaacaattgaggcagaggaacaaaagatacccgaagacagtatctatattggaactgccagtgatgattctgatattgttacccttgagccacctaagttagaagaaattggaaatcaagaagttgtcattgttgaagaagcacagagttcagaagactttaacatgggctcttcctctagcagccagtatactttctgtcagccagaaactgtattttcatctcagcctagtgacgatgaatcaagtagtgatgaaaccagtaatcagcccagtcctgcctttagacgacgccgtgctaggaagaagaccgtttctgcttcagaatctgaagaccggctagttgctgaacaagaaactgaaccttctaaggagttgagtaaacgtcagttcagtagtggtctcaataagtgtgttatacttgctttggtgattgcaatcagcatgggatttggccatttctatggcacaattcagattcagaagcgtcaacagttagtcagaaagatacatgaagatgaattgaatgatatgaaggattatctttcccagtgtcaacaggaacaagaatcttttatagattataagtcattgaaagaaaatcttgcaaggtgttggacacttactgaagcagagaagatgtcctttgaaactcagaaaacgaaccttgctacagaaaatcagtatttaagagtatccttggagaaggaagaaaaagccttatcctcattacaggaagagttaaacaaactaagagaacagattagaatattggaagataaagggacaagtactgaattagttaaagaaaatcagaaacttaagcagcatttggaagaggaaaagcagaaaaaacacagctttcttagtcaaagggagactctgttgacagaagcaaagatgctaaagagagaactggagagagaacgactagtaactacggctttaaggggggaactccagcagttaagtggtagtcagttacatggcaagtcagattctcccaatgtatatactgaaaaaaaggaaatagcaatcttacgggaaagactcactgagctggaacggaagctaaccttcgaacagcagcgttctgatttgtgggaaagattgtatgttgaggcaaaagatcaaaatggaaaacaaggaacagatggaaaaaagaaagggggcagaggaagccacagggctaaaaataagtcaaaggaaacatttttgggttcagttaaggaaacatttgatgccatgaagaattctaccaaggagtttgtaaggcatcataaagagaaaattaagcaggctaaagaagctgtgaaggaaaatctgaaaaaattctcagattcagttaaatccactttcagacactttaaagataccaccaagaatatctttgatgaaaagggtaataaaagatttggtgctacaaaagaagcagctgaaaaaccaagaacagtttttagtgactatttacatccacagtataaggcacctacagaaaaccatcataatagaggccctactatgcaaaatgatggaaggaaagaaaagccagttcactttaaagaattcagaaaaaatacaaattcaaagaaatgcagtcctgggcatgattgtagagaaaattctcattctttcagaaaggcttgttctggtgtatttgattgtgctcaacaagagtccatgagcctttttaacacagtggtgaatcctataaggatggatgaatttagacagataattcaaaggtacatgttaaaagaactggatactttttgtcactggaacgaacttgatcagttcatcaataagtttttcctaaacggtgtctttatacatgatcagaagctcttcactgactttgttaatgatgttaaagattatcttagaaacatgaaggaatatgaagtagataatgatggagtatttgagaagttggatgaatatatatatagacacttctttggtcacactttttcccctccatatggacccaggtcggtttacataaaaccgtgtcattacagtagtttgtaacatttgtagattggatagcatttttatgatttgatgagtttcttgtaaggttaccgtttctaagagttgtgctttatggccactgagagaattcagaataaattgaaagatggagtctaaaaattattagctgttacaaatggaacatttcattataacgtgatcactttgacttgagcaaatggtttaatttttatcttaaaaatcagttaagaatatataaaatcctactttggccaagtttgtttcttttcattatagtttatatgaaaagatcaccttaagtgaaattattttcctttaatcttttatgtatttattcacttttggaagctaggaatgagcaacacaaattttactctgaagtcagaagagctcatatataataattctaatgtcccacctattttcacttgtccattccatgtaccagcttagttatgatacttagtcacataattatctttgataaaggtagaggcacaaagaggcaaactaagcaagtcaaattctaatgtgtgtacttcataataattttttatccattttcatctttatattctgtaacatgaaacttacctaatcttcaaatgttagcttcattttttacctttgaaatacttaatctttctgaataaatataatgtgtctataaaataatgagactgattctggtgtctttagtcattaagctggtatctagtcctataatgaacaaaggtgaagctgccttgaggagacaagtgaaaaatttttgcttcaaaggagctcacaagctaagtaaataaatgaaattaaggtatggggcatggtggcctcaggctgtctggaggtgtttggaaaggcttcttgagtgaggtggcctttgaactgaacttagtttttaaagtagcttttggaagagaaatgaggatttgctatgcagacagggaagggaatttcacttaaaaggaaggtcatttggagatgtgaagatacactgctttaaggaagcagggtagagctggaggataagagatgcagaccatgaagggccccattttatgctaaaggttttgtcctgtaggacatggagaacttctgaagaattttcaaggcgggtgggataagattatattgtattttagattacagtagtccccccttatcttcaggatatatgttccaagacccccagtggatgctggaaaccagggatagaacataattctatatatactatgcatgaatttctttttccttctttacaatctcacacataggtttgttcttactatagatcttaccaatctcagcatacttttatttctcttgagaaccttcaccctttcacttaaaggaggcgctttatagcttctctttggcatatccaaatgccagcatcactgttgtattttggggtcattattaagttacttaatcatccttaatccttatcttagggatacttgaacacaaacactgtggtaggataacagtatatctgattaacagactgctactaggtgattaatgggtgggtagtgtaaatacacaagaaaaggatgattcacatcccatgtgggatggagcagaactgcattatttcattacattactcagaacaggcatataattgaaaacttatgaattatttttttttaattatttgagatggaatcttgctttgtcagccaggctggagtgcagtgacacgatctcagctcactgcaacctctgtctcctgggttcaggtgattctcctccctagtctcccaagtagctgggactataggcacgtgccaccacacccggctaattttcatatttttagtagagatggggtttcaccatgttggccaggctgttcttgaaatcctgacctcaagtgatccacacatgtctacctcccaaagtgctgggattacagtcgtgagccactgtaccccgcctaaaactgatgaattatttctgaaattttctatttaacattttcagaccacagttgaccacaggtaacggaaacctcaatcacagaaagtaaagccgtggatacggtgggactaatgtattggtagcagcctagaggattgatgggaaaggtatgaagctagaaggtggtcaatataatacagacatgagctgatgaacatctaaactgggactatactagtaggagaggaaaggaaaaaacatttggaaaatagtaacattgatatttcttgtgaaggagaagtagaaagtaacagtgacttctagatttctgggttgggtcatcttgttggatagtagtaccactgagatagggaattcaaggtttggggcaagggtaattggagatgagaattgtgtttggaggtaactactgacattcaagtggagagggttagttggcagttagttctatggtcatctcttttgccgagactgtatatttatcagactcctgggagaacaccaacatccatggggttgtagggaaggctaaggacaggagtggggagtggtaccttgaaaatccaaaagccatctcaagtaaaaggaataaatgtgtcatgctttttaaaaagttgatgtgcggaaaatgttttcttggcttggaaactgggcggccaggggatgacagtatggacttccagtgaagtagtgacggaagcctgatcatagacattaaggaaagcggtgtaggtgttgtgagcttttgctgtaagaaaaagttgagacttttgttttgctttgtttgtgagagatgtgtatgtatttctgctgagtgataaagccagcggggagggactgatttttataggaaaggaggaaaaataatggaaacacatctcattattttattgtcacatttcttttctttgttatcttttgagtgtttcccttttttgccagtagagttattgtctattttttctttctataggacaaaaaaactaatacagactcctttatttttatatggatatactaggattgtaattcagatatttaatatcttttatcagtgttcagatcatagattaatggagaaaacatttaaaattgttttaaatttaaatacattgaactctaacatagatgaaaaatgtgtttactgctttcagtcgacctgataaaaagcaacgtatggtaaatattgaaaactccaggcatcgaaaacaagagcagaagcaccttcagccacagccttataaaagggaaggtaaatggcataaatatggtcgcactaatggaagacaaatggcaaatcttgaaatagaattggggcaattaccttttgatcctcaatactgattcacaattgagttaaattagacaactgtaagagaaaaatttatgctttgtataatgtttggtattgaaactaatgaaattaccaagatgacaatgtcttttcttttgtttctaagtatcagtttgataactttatattattcctcagaagcattagttaaaagtctactaacctgcattttcctgtagtttagcttcgttgaattttttttgacactggaaatgttcaactgtagttttattaaggaagccaggcatgcaacagattttgtgcatgaaatgagacttcctttcagtgtaagagcttaaagcaagctcagtcatacatgacaaagtgtaattaacactgatgtttgtgttaaatttgcagcagagcttgagaaaagtacattgttctggaatttcatcattaacattttataatcttacactcacttcttgtctttttgtgggttcaagagccctctgacttgtgaagaatttgctgccctcttaagagcttgctgacttgttttcttgtgaaattttttgcacatctgaatatcgtggaagaaacaataaaactacaccatgaggaaaactaaaggtctttatttaaaatctggcattgtattaacatgtaattttatactatgtggtattttatacatttcctcagtagtgatatttggtaaagcagttcatacagcttttttctaagttccatgaatcttacccagtgtttaccgaagtatttaagcagcatctgaatatttccacccagcaatgttaatttatctaggaaagttcagaatttcatcttcatgttgaatttcccttttaacttccgttcatagacatatatgtgacttccaattcgaccctctggcaagtgagtgtggaagaaaacagcagttcttttataattgcttgaaattaggaaagcgcttatttcctagaagcaaataaatgtttaagtaaataaaggctacattttgctg

SEQ ID NO: 4909 - DNA, 1927 bp, Homo Sapiens
  NM_020740
gcacttctcgcgaggttgcaggcagtgccgggccagacatggcggaagaggaggtggccaagttggagaagcacttgatgcttctgcggcaggagtatgtcaagctgcagaagaagctggcggagacagagaagcgctgcgctctcttggctgcgcaggcaaacaaggagagcagcagcgagtccttcatcagccgtctgctggccatcgtggcagacctctacgagcaggagcagtacagcgatctgaagataaaggttggggacaggcacatcagtgctcacaagtttgtcctggcagcccgcagtgacagctggagtctggctaacttgtcttccactaaagagttggacctgtcagatgctaatcctgaggtgacgatgacaatgcttcgctggatctatacagatgagctggagttcagagaggatgatgtgttcctgactgaactgatgaaactagcaaatcggtttcagctacagctcctcagggagagatgtgagaagggtgttatgtctctagtgaatgtcaggaactgtattcgcttctaccagacggcagaggagctgaatgccagcacactgatgaactactgtgcagaaattattgcaagtcattgggacgacctgaggaaggaggatttcagcagcatgagcgctcagttgttatacaaaatgatcaaatccaagacagagtacccgctacataaagccatcaaagtggagagagaagacgtggtcttcctgtatctgattgaaatggattcccagctccctgggaagctgaatgaagcggatcataacggagatctggcattagatctagccctctcacgacgactggagagtattgccaccacgctggttagtcacaaagctgatgtggacatggtggacaagagtggctggagcttgttacacaaaggaatccaaagaggagatctctttgctgccactttcctcattaagaatggggcctttgtcaacgctgctacactgggtgcccaggagacaccactgcaccttgtggccttgtacagttcaaagaaacactcagcagatgtgatgtctgagatggcgcagattgcagaggcccttctgcaggctggtgccaaccccaacatgcaggacagcaaggggaggactcctttacatgtgtccatcatggccgggaatgaatatgtgttcagtcagctgctgcagtgcaaacaactagatttagaactcaaagaccacgagggcagcacggctctgtggctggcagtgcagcatatcacagtgtcttctgaccagtctgtgaaccccttcgaagatgtccccgtggtaaatgggacttcatttgatgagaacagctttgcagccagactcatccagcgcggcagccacacagacgcacctgacacggcgacaggtaaagcacgtgcctcccgaaggggcgacgctggggtctgcaggcgccaggaaatggcatgtaaatgccttcaccccaaatttagaaactgaacggcatactatgaggataattattttgtacttaattttatatacagtaaaagcctgggttgtcatttttaaaaatcctgtgcttcaaacaattgagcagacatcaagtccctgaaactgaaacttccatttatttaatgcggcgactcgcagactctttggactcaagaattcctttgaccgtcttaaaaattgtaccccagagagcttttctttaggtgggttataacttcagtatttaccatattagactacactttgagaacactgttttaatgtatttccttgatctgactaaataaaataacagggatattttaaggagagggatttggtgtaattcagtattgagtactggcaatgcataaaacatgggtaggtgtcactcacacaggaagacttgaccaaaaaaaaaaaaaaaaaaa

SEQ ID NO: 4910 - DNA, 1872 bp, Homo Sapiens
  NM_020744
ctagcctggcgctgggggcgggcaccagcccccacccctcggcgtcccctccccttcacttcccccaccccctgtcccctcccttccctcccttcccccccgtggcgaggcagcagcgacggcggcggcggcagcggcggtcgcggctgaggctgaggaggaggcggcggcggcgggcggggctcggctcgggctccgcgggcgggcgggcggacatggcggccaacatgtaccgggtcggagattatgtctactttgagaattcctccagcaacccatacctaataagaaggatagaagaactcaacaagactgcaagtggcaacgtggaagcaaaagtagtatgcttttatagacgacgtgatatttccaacacacttataatgctcgcagataagcatgctaaagaaattgaggaagaatctgaaacaacagttgaggctgacttgaccgataagcagaaacatcagttgaaacatagggaactctttttgtcacgccagtatgaatctctgcccgcaacacatatcaggggaaagtgcagtgttgcccttctgaatgagacagaatcagtattgtcatatcttgataaggaggataccttcttctactcattggtctatgacccctcattgaaaacactattagctgacaaaggtgaaatcagagtgggacctagatatcaagcagacattccagaaatgctgttagaaggagaatcagatgagagggaacaatcaaaattggaagttaaagtttgggatccaaatagcccacttacggatcgacagattgaccagtttttagttgtagcacgtgctgttgggacattcgccagagccctggattgcagcagttctgtgaggcagcctagtttgcatatgagtgctgctgcagcttcccgagacatcaccttgtttcacgctatggatacattgtatagacacagctatgatttgagcagtgccattagtgtcttagtaccactcggaggacctgttttatgcagagatgaaatggaggaatggtcagcctctgaagctagcttatttgaagaggcactggaaaaatatggcaaagacttcaatgacatacggcaagattttcttccttggaaatcattgactagcatcattgaatattattacatgtggaaaactactgacagatatgtgcaacagaaacgtctaaaagcagcagaagctgagagtaaactgaaacaagtatatatcccaacctacagcaaaccaaatcccaaccaaatatccactagtaatgggaagcctggtgctgtgaatggagctgtggggaccacgttccagcctcagaatcctctcttagggagagcctgtgagagctgctatgctacacagtctcaccagtggtattcttggggcccacctaatatgcagtgtagattatgtgcaatttgttggctttattggaaaaaatatggaggcttgaaaatgcccacccagtcagaagaagagaagttatctcctagcccaactacagaggaccctcgtgttagaagtcacgtgtcccgccaggccatgcagggaatgccagtccgaaacactgggagtccaaagtctgcagtgaagacccgccaagctttcttccttcatactacatatttcacaaaatttgctcgtcaggtctgcaaaaataccctccggctgcggcaggcagcaagacggccgtttgttgctattaattatgctgccattagggcagaatgtaagatgcttttaaattcttaaccttatatgttgtgcttctgaccattttctcttttcctctctttccttttttttttgtttgtttgtttgcaataaacataagttcttgtgtacaaaaaaaaaaaaaaaa

SEQ ID NO: 4911 - DNA, 4782 bp, Homo Sapiens
  NM_020745
acgatggcagcgtcagtggcagctgcagcccggaggctgcggcgggccattcgaaggtcgcccgcatggcggggcctcagccatcggccgctctcatcggagccccctgcagccaaggcctcggccgtgagggccgcctttctgaacttctttcgggaccgccatggccaccggctggtgccctccgcttccgtgcggccccgcggcgaccccagtttgctttttgtcaatgcgggcatgaaccagttcaagccaatctttctgggcaccgtggatccacgaagcgagatggcaggcttccgacgtgtggccaacagccagaaatgtgtgagagctggaggacaccataacgacctggaagatgtgggtcgagacctttcccatcataccttctttgaaatgcttggcaattgggcctttgggggtgaatattttaaggaggaggcttgtaacatggcctgggaactgctgactcaggtctatgggatccctgaggaaaggctctggatctcctactttgatggtgaccccaaggcagggctggacccagacctggagaccagggacatctggctgagcttaggggtgcctgctagccgtgtgctttcctttggaccacaagagaacttctgggagatgggggatactggcccttgtgggccctgtactgagatccactacgaccttgctggtggggtgggagccccccagctggtagagctttggaacctggtcttcatgcaacacaacagagaggcagatggaagcctgcagcccctgccccagcggcatgtggacacaggaatgggcctggaaaggctggtggctgtgctgcaaggcaaacactccacctatgacactgacctcttttccccgctgctcaacgccatacagcagggctgcagggcacccccttacttgggccgagtaggggtggcagacgaggggcgcacagacacagcgtaccgcgtggtggctgaccacatccgcacactcagtgtctgcatctctgatggcgtcttccctgggatgtcaggtcccccgctggttcttcgtcggatcctgcgtcgagctgtgcgtttctccatggagatcttaaaggcaccacctggcttcctaggcagcctggtacctgtagtggtggagacactgggagatgcttatccagaactgcaaaggaactcagcccagatcgccaacctggtgtcagaggacgaggcagccttcctggcctccctggagcggggtaggcggatcattgatcggactctgaggaccctggggccttcagatatgttccctgctgaagtggcctggtccttgtcactgtgtggagacctgggactccccttggacatggtagagctgatgctggaggagaaaggggtccagctagactccgctggactggagcggttggcccaagaggaggcccagcaccgggcacggcaggctgagccagttcagaagcagggattgtggcttgatgtccatgcgcttggggagctgcagcgccaaggagtgcccccaactgacgacagccccaagtacaactactccctgcgacccagcggaagttatgagttcggcacctgtgaggcccaggtgttgcaactgtatacagaggacgggacagcagtggcctccgtggggaaaggccagcgctgtggcctcctcttggacaggaccaacttctacgcagaacaggggggccaggcttcagaccgtggctacctggtgcgggcagggcaagaggacgtgctgttcccagtagcccgggcccaggtctgtggaggtttcatcctgcatgaggcagtagcccctgagtgcctgcggttaggggaccaggtgcagctgcatgtggatgaggcctggcgtctaggctgcatggcgaagcatacggccacccacctgctgaactgggcactgaggcagaccctgggccctggcacagagcagcagggctcccatctcaatcctgagcagctgcgcttggatgtgaccacccagaccccattgaccccagagcagctccgggcagtggagaacactgtgcaggaggccgtggggcaggatgaggctgtgtacatggaggaggtgcccctggcgctcactgcccaggtccctggcctgcgctctctggatgaggtttacccagaccctgtgcgggtggtatcagtgggggtgcccgtggcccatgcattggacccagcctcccaagccgcactgcagacctctgtggagctatgctgtgggacgcacctgttacgtactggggctgtaggggacctggttatcatcggggaccgccagctttccaagggcactacccgcctgctggccgtcactggggagcaggcccagcaggcccgagagctaggccagagcctggcccaggaagtgaaagcggccactgagcggctgagtctggggagccgggatgtggcggaggcactgaggctgtccaaggacataggacgactcattgaagctgtggaaactgctgtgatgccccagtggcagcggcgggagctgctggccacagtgaagatgctgcagcggcgtgccaacactgccatccgtaagctgcaaatgggacaggctgcaaagaaaactcaggagctgctggagcggcactcgaaggggcctctgattgtggacacagtctctgctgagtctctctcagtgctggtgaaggtggtacggcagctgtgtgagcaggcccccagcacgtctgtgctcctactcagcccccagcccatggggaaggtgctgtgtgcctgtcaggtggcccagggtgccatgcccaccttcacagcagaggcctgggcactggcagtgtgcagccacatggggggcaaggcgtggggctcgcgagtggtggcccaaggcaccggaagcactactgacctggaagctgccctcagtatagcccaaacctatgccctcagccagctctgacccaggtccgcccagggacccacatggactaaaggcaatgccaggagccctgaaggagccagcagaaccttcccacatgctgaagcgaggactagaggctggaggccaagcagctgagccaaagaagatcacctgggccagggcctacatgacacaaggagacatgggctagggaaggcagaactgggcccaaagacacacacccccttggtgaaagagaagacatggacaattatggctgtgactgcacattagaaattatttcactggccgggtgtggtggttcacacctgtaatccaagcactttgggaggccgaggcaggtagatcatgaggtcaggagatcaaaaccatcctggctaacatggtgaaaccccatctctactaaaaatacaaaaaattagccgggtgtggtggcacacgcctgtagtcccagctactcgggaggctgaggcagaagaatcgcttgaacctgggaggtggaggttgcagtgggccaagatcgcaccactgcactccagcctgggtgacagagcgagactctgtctcaaataattatttcacagaggatagcaagctccagaaggttctattacctttaaaaaagagtagttttgcccctcccagcaacctaagaccagtctgaactcacactgtctgaaaggccacccaggatccaaatcgggccatcttcattgccatgagtgttcggacaggctctgcgtgccaggcaacagtgggcagacaaagggctccctggctactgggaagatacagaaccatcctgtgaaaatcatttcagcactggagaccttctttgctattacttctttcattaacaatgacctctaatttaaattgggccctgctggtttgttgatgaattgagcaactgagaacgtggcgggcactaaactgacagttccttccttcatggagcctgcttcatgtggaggaaacaggaaataaagcaaaagaagagggtcaggcttggtggctcatgcctataatcctggcattttaggaggctgaggttggagaatcgcttgaggccagaagtgcaagaccagcctgcgcaaacagcaagaccctgtctacaaaaaaaaaaaaaagtaatctttatgcctcagcctcccaggtagctgagactacccacaccttggtcccagctacttgggaggctgaggtgggaaaatcactttgcccaggaattcaaggccgcagtgagctatgattgcaccactgcactccaggcaacagagtgagaccctgtcttaaaaaaaagaagggagaaagtgtcagatggtgatgaggtctgggggggaaatagagaatggggatcaggagtgtggatggtgatattccctcaccaagaggtgacatgtgagcagggagctgggaggtgagggtgtgacccgtgtggaaatcagggaaaagcattccagcctgagggaacagccaatgcagaggccgtgaggtggccagtgccactgagcagtgagctgggataggggcaggtgaggaggctggagagcggggtcagacaaacaatatgcttattaaaacaagttgtacagcacctgcctcaagcctgagctgaagctgaaaattggcacttcaaagcaggaggaagcagagatggaggaaagccctccttccctaccagaatgagtccacctcagacagccagactttggacctctgcctttgttcctagatctctgttgctagatgaaggaaagggcctcaggggatccatcttcaaatcaagggctccctggctaccaaattctgtctagtaaaaattattcgagcagcgtg

SEQ ID NO: 4912 - DNA, 5645 bp, Homo Sapiens
  NM_020747
agaagaggaagattagaagattttttttttctttgagagaaagcccagcggagataaacgaatgtcccctcatctccaaagaaaagttcatcggatttttattctagagagctcatcttcaggatgtcagtgaacatttctactgcaggaaaaggtgtggatccaaatacagttgatacttatgacagtggcgatgattgggaaatcggggttggaaatttaataattgatttggacgctgatttggagaaggacagacagaaatttgagatgaataattccaccaccaccactagtagcagcaactccaaggattgtggaggtccggcctccagtggggctggtgctaccgcagccttagctgatggcctaaaatttgcttctgttcaggcctctgctccccaggggaattcacacaaagagaccagcaaatcaaaagtgaaaaggagtaaaacttctaaggatgctaataaatctctgccttctgctgccttgtatgggattcccgagatcagcagcactggcaagaggcaggaagtccaagggcgccctggagaggcaactggcatgaattcagcgctgggtcaaagtgtgagcagcggcggcagcggcaacccaaacagcaatagtaccagcaccagcacctctgccgccaccgcgggggcaggctcctgtgggaaaagcaaagaggagaagccaggtaaaagccagagcagccgaggcgccaagcgggataaggatgcggggaaatccaggaaggacaagcacgacctgcttcagggccaccagaatggcagtggcagccaggccccttccggggggcacctctatggctttggggccaagagcaatggaggtggcgcgagccccttccactgcgggggcactgggagtggcagcgtcgccgctgcaggggaagttagcaaaagtgccccggattcagggctcatgggaaactctatgttggtaaagaaggaagaggaggaggaggagagccacaggcgaatcaagaaactgaaaactgagaaggttgaccccctgtttacagtgccagcgccaccaccgccgatttccagcagtctcacgcctcagattctaccctcctacttttccccatcttcatccaatattgcagcaccggttgaacagcttttggttcggactcgttctgtgggtgtcaatacatgtgaagttggagtagtgacagagccagagtgtcttgggccctgtgaacctgggaccagtgtgaatttggaagggatcgtgtggcatgaaacagaagaaggtgtcctagtggtcaatgtcacgtggaggaacaaaacgtacgtgggaaccctactggactgcaccaagcacgactgggcccctcccaggttttgtgagtcaccgacaagtgacctggagatgagagggggccggggcagagggaagagagcgaggtctgctgctgctgccccgggctccgaggccagcttcacagagtccagagggctgcagaataagaacagagggggggccaatgggaaagggaggcggggcagcctcaatgccagcggacgaaggacacccccaaattgtgctgctgaggatatcaaagccagcccttcctccaccaacaaaaggaaaaacaagcctccaatggagctggacctgaactccagctctgaggacaataagcctggaaagcgtgtccgcacaaattccagaagcactcccactacccctcaagggaaaccagagactacttttttggaccaaggctgctcttctccagtgttaatcgactgtccccacccaaactgcaacaaaaagtacaagcacattaacggcctgaggtaccaccaggctcatgcacacttagacccagaaaacaagctggagttcgagcctgacagtgaggacaagatctcggactgtgaggaaggattgagtaatgtggcacttgaatgcagtgagccaagcacaagtgtatctgcttatgaccagttgaaggcaccggcatcccctggtgctggaaacccacctgggaccccaaagggaaagagagagctgatgagcaatggcccaggttccattattggtgctaaagctgggaagaattctggcaaaaagaagggccttaacaatgaactgaacaaccttccagtaatctccaacatgacggctgcgttagacagttgctcggcagcagacggcagtttggctgctgagatgcctaaactggaagcagaaggattaattgacaagaaaaatttaggagataaagaaaagggcaaaaaagctaccaactgcaaaacggacaaaaacctctctaaactgaaaagtgcccggcccattgcccctgccccagcccccactcccccgcagctaatcgctatacccactgcaacctttacaacgaccaccactgggacaatacccggactgccctccctcacaacaactgttgttcaggctacaccaaagagtcctccgttaaaacccattcaaccaaagcccacaattatgggagagcccatcaccgtgaacccagctctggtgtcactcaaagacaaaaagaaaaaggagaagcgaaagctaaaggacaaagaagggaaagagacgggaagcccaaaaatggatgccaagctggggaaactagaggactccaagggggccagcaaagatttacctgggcattttttaaaggatcatctcaacaagaatgaagggctggcaaatggactgtcggagtctcaggagagccgcatggccagtatcaaagctgaggccgataaggtttacactttcacagacaacgctcccagcccttccatagggagcgcctcgaggctggaatgcagcactttggtgaacgggcaggcaccaatggcacctctgcatgtgttgacccagaatggggcagagagttcagctgcaaagacaagcagcccggcctattcagacatatctgatgctgctgacgatggtggttctgacagcaggtcggagggtatgagatcaaaggccagttccccatcagatattatttctagtaaggacagtgttgtaaaagggcattcttcaactacagcacaatcatctcaactgaaagagtcccattctccctattaccacagctatgatccttattattctccaagttacatgcaccctgggcaggtcggtgcccctgcagctggaaatagtgggagcacgcagggaatgaagatcaagaaggagtctgaggaagatgctgaaaagaaagacaaggcagagcagttagattctaagaaagtggaccacaattctgcatccttacagcctcagcaccagtcggtgatcacacaaagacatcctgccctggctcagtcactttattatggccagtatgcatatgggctctatatggaccagaagtctctgatggccaccagccctgcctatagacagcagtatgagaagtactatgaggaccagaggctggcagagcagaaaatggcccagactgggagaggagactgtgaaaggaaaagtgagctccccttgaaagagctgggcaaggaggaaactaaacagaaaaatatgccatcggccacaatctcaaaagctccctctactccggagcctaacaaaaaccattctaaactagggccatcagtgcctaataaaactgaggagacaggtaaatcgcagcttctctccaatcaccagcagcagcttcaggccgacagcttcaaagctaagcagatggaaaaccaccagcttattaaggaggctgtagaaatgaagtctgtcatggactctatgaagcagacaggtgtagacccaacctcgagatttaaacaagacccagattcaagaacatggcatcattatgtataccagcccaaatatctggatcagcaaaagtcagaagaacttgatagagagaagaaattaaaagaggatagtccgaggaaaactcctaataaagagagtggtgtgcccagccttcctgtatcgttaacaagcattaaagaggagcccaaagaggccaagcatcctgattctcaatcaatggaggagagcaagctgaaaaatgatgatcgaaagactcctgtgaactggaaggactctcggggaacaagagtggctgtctcctcacccatgagtcagcatcagtcatacatacagtacttgcatgcttatccttacccacagatgtacgaccccagccatcctgcataccgggctgtttctcccgtcctaatgcacagttatcctggggcatatctctctccaggatttcattatcctgtttatgggaagatgtcagggagagaagagacagagaaagtcaataccagccctagcgtcaacacgaaaacaaccactgaatctaaagcactggatttgctccagcagcatgctaaccaataccgcagcaagtctcctgctcctgtggaaaaggctacagctgagcgggaacgggaggcagaaagggaaagggatcgccactcccccttcggccagcggcacctgcacacgcaccaccacacccacgttggcatgggttacccgctaatcccgggtcaatatgacccttttcaaggcttgacctctgctgcccttgttgcctctcagcaggtggctgcccaggcatctgcatctggaatgtttcctggacaaagaagagaataacaagattggacatgtacattgtcatgtgactggatcacatggggaagcgctttatacagacatcagttccatggtgttaatttgaaatgccttaatggcaggcaaaaaccagtcatttcatttttgtaaattacagattttatcacagagtaacaaatgttgctgtaattaaacttctgttttatatatatatacgtatacatatctgtatatatacatatatatatatataaatataaatatattctttactttttgtatcagtaaccaggctcgcacacacagggtctgctgccacgtcgcaaaccactcagtaaaggaaattaaaaatgtatttgtcatgttaaaaagtgttagccacaaaaggctacttactttcttttccttttcctttaaaattgtaaataaataatgttatgtatcagtgtgcctgaaccttgcatatccttcacatatttcccataagcccctcagaaaggctaactgtgatgatgacactttggtacaatttagatgtctatttggtggctcctgttaaagacgcaccagtgtaaaatgttcctgtagtcactgtttgtacttgtgtattgtggaaaaagtacttttggaaggcatggggttgccagtaccacaaaaactgtgttgtatataatgtaaagattaaaatggggaaataatgagcatctgtgaataatgaggtgtcattttttgataatcttgaatggcaaataacccaatagcctgcgtaccagagacatctgtgattgttctattacttgaatagttctacagtctttttttttttttaatgtttacaattatccagttttagaagagagagactttaacgccattgcctggttacttgttttatgctgtaatctagtttattttatgtaaaatgtatattgaatgctttccttttttatacctgccttaaataatttggcaatcagaattaaaaagtttttttttttttaaat

SEQ ID NO: 4913 - DNA, 5881 bp, Homo Sapiens
  NM_020748
ctctgcctttcctctcgcagccacccttcctctcagaccagtacggtggccgacgggagtcagacgctggggatgaatgaaggatcaacaaacagtaataatgactgaatgtacaagtcttcagtttgtcagcccttttgcttttgaggcaatgcagaaggtggatgttgtttgcctggcatctttaagtgatccagaattaagacttcttctgccctgtttggtacggatggcactttgtgcacctgctgaccagagccaaagctgggctcaggataagaaactcatccttcgccttctttctggagtggaagctgtcaactccattgttgcattgttgtccgtggactttcatgctttagaacaagatgccagcaaagaacagcagcttaggcataaacttggaggaggcagtggagagagcatcctggtatcacagcttcagcatggactgacgttagagtttgaacacagtgattcacctcgtcgattgcgtcttgtgcttagtgaactgttggcaattatgaacaaggtgtctgagtccaacggagaattttttttcaagtcttctgaactttttgagagtccagtatatttggaggaagctgcagatgtactttgtattttacaagcagagctcccttccttgctccctatagttgatgtagctgaagctttgctacatgttagaaatggtgcctggttcttgtgtctcttggtggccaatgttcctgatagttttaatgaagtttgtaggggcctgataaaaaatggagaacgacaagatgaagaaagtcttggaggaaggcgcaggacagatgccttacgcttcttgtgtaaaatgaatccttctcaggccctcaaggtccgaggcatggtggtggaagaatgtcacttgccaggccttggtgtggctttgacattggatcatactaaaaatgaagcttgtgaggatggagtgagtgacttggtttgttttgtaagtggtttgcttcttggaacaaatgcgaaagtccggacttggtttggaacttttatccgaaatggacagcagagaaaaagagagaccagcagttctgtcctttggcagatgagaaggcagcttcttctggagttgatgggcattcttcccacagtaagaagcacccgaattgtggaagaagctgatgtggatatggagcccaatgtgtctgtgtattcggggctgaaagaagagcatgttgtgaaagccagtgcactcttacgtctgtactgtgctttgatggggatcgctggactcaaaccaactgaagaagaagctgagcaattactgcagttgatgacgagccgtcctcctgctacgccagctggggttcgctttgtttcactttccttttgtatgctactggccttttctacacttgtcagtacacctgaacaggagcagctgatggtggtgtggctaagttggatgataaaagaagaagcgtattttgagagtacttcaggcgtctctgcttcttttggggagatgttattattggtggctatgtactttcacagcaaccagcttagtgctatcattgacttggtctgttccactttggggatgaagattgtaattaagccaagctccttgagcaggatgaagacaatcttcacacaggaaatttttactgagcaggttgtcacagctcatgcagttcgggtccctgtcaccagcaacctgagtgccaacattactggatttttgcctattcattgtatttaccagcttctcaggagccgttcctttaccaagcacaaagtgtcaataaaagattggatttatagacagctgtgtgaaacctctactccacttcatcctcaattacttcctttgattgatgtgtacataaattctatacttactcctgcgtcgaaatctaatccagaagccacaaatcagccagtcacagaacaggagatactcaatattttccaaggagtcattgggggtgacaacatccgccttaatcagcgtttcagtatcacagcacagcttttggtgctctactatatactgtcttatgaagaggctcttctagcaaacacgaagactttagctgccatgcaaagaaagcccaaatcatattcttcttctttaatggatcagattcctatcaaattccttattcgacaggctcaagggctgcagcaggagttgggagggttgcattcagctttactacgtctccttgctactaactacccacatttatgtattgtggatgactggatttgtgaagaagaaatcacagggactgatgccctgctacggcgaatgctcctgactaataatgctaaaaatcattctcccaaacaactccaagaagcattttcagctgtcccagtaaatcacacacaagtgatgcagattatagaacacttgactctactctctgccagtgaacttataccatatgcggaagtgttaacatccaatatgagccagctattgaattcaggggttccacggagaattctgcaaacagtcaataaactatggatggttcttaatactgtgatgcctagaaggctatgggtaatgacggttaatgcacttcagccttcaataaagtttgtacgacaacaaaagtatactcagaatgacctgatgatagatcctctcattgtcctaaggtgtgatcagagggttcacagatgccccccactgatggatattaccctacacatgttgaatggatatcttcttgcatctaaagcctaccttagtgctcatctgaaggaaacagagcaagataggccttcccagaataatacaattggtttagttggacaaactgatgctccggaagttaccagggaagaattgaaaaatgcattactggccgctcaggatagtgcagctgtccagattctcttagagatttgcctacctactgaagaggagaaagcaaatggtgtcaatccagatagcttgttaagaaatgttcaaagtgttattaccaccagcgctccaaataagggaatggaggaaggagaagacaatttgctctgtaaccttcgagaagttcagtgccttatctgttgtctcttgcaccaaatgtacattgcagatcccaacattgctaagcttgttcactttcagggttatccatgtgaacttttgcctctgacggtcgcaggtattccatctatgcacatctgtctagatttcatacctgagcttattgcacagccagaacttgagaaacagatatttgctatccagttgctttctcacttgtgtatacaatatgcattaccaaagtcacttagtgtggctcgtttagctgtcaatgtcatgggaactttgttaacagttttaacacaggctaagcggtatgctttttttatgccaactctgccaagtttggtctctttttgtcgagcatttcctccattgtatgaggatattatgtctttgctgatccaaatagggcaagtttgtgcctctgatgttgccactcagacaagagacattgatccaattattacacgtcttcaacaaataaaggagaaaccaagtggatggtctcaaatctgtaaagattcatcttataaaaatggatccagggacactggaagcatggatcctgatgtacagctctgtcactgtattgaaagaacagtaattgaaataataaatatgagtgttagtggaatttaaaacaaaatttaaaacaacaaaaagttgtttgctgcatatacccaacatgaatctgcatattagtaacaactctaaactgaatgggaacagtaaagtattgtcttggaatcactaaaacaattcaattcaacatgagtatagtttagaactttatgagaattatgcttgcttgtttctgattggcacatctttggatctactttgctgatatgtttctattgtagcagctgagctttttttttttccactgggaacacatgtaagaaactcattattggaaagggaatttggccttgtatttagcttttgaagtgaagactgccatgcctttaatttcttataaaaatgagtctgtgggtagccctagtgtttattttaactgtgagcttgtaacagaatgtgacaaagatgcaaagatgggagaggaaaaaagggtaaagggaaaggagaattaaggaaataataggagttaaaaacacaagtagaaatctcaaagatttgcagtgcaagtaatagtaatgcaagttggaattctagttctcaagaaagagtattgagaagacttttaaaaaggcaagtagcttttgtaaatgatttctgtggaaatacagatgaggatttaaagatttcacatatttgcttcaatttttattaatatatgaagccatatgtttaaagagatacttgaataatttggaattttaagatactggtgtaaaagtgtttacagaaacatctttgttcaaagaagaacctgagagatctcatttagttttatgttttaaatttatttttataatgctttattaacttacctaatgctcagaggggggaaatatgtatcaaattaaatgaaggtagagcaataaaacccactggattaaagagctcttggtttgtcatcaggattataattcatatcttactttgagaagatctttgagtaagaaaatgcagtgtttgaacctgaggaaaagttaaagtgtagaaaatattgtcttgccgaaggattttgcagtcctctgtcagtaacttccattgattaggcagacatattcaggtaaaccctaatcattaaaaaaaaattatcaatgtagaaagtaattcccttttttctctctgagatatacctcaatcacacacttccccacccccacttgaaacagacctcttcacttgtgttttttttttttttttcctgaggtggagtcttcccctgttgcccaggctggagtgcagtgggatgatcttggctcactgcaacttctgccacctgggttcaagggattctcgtgcctcaacctcctgagtagctgggactgcaggcacgcgccacctgtatttttgtatttttagtaaagacgggggtttgccatgttgcccagactggttttgaactcctggcctcaggtgatctgcccaccttggcctcccaaagtgctgggattacaggtgtgagccaccgcacctggccagaccgcttcacttgtaaaagaaattaggctaataagaaggtgtagtttttgagaaatgaaatttaactttagccttttcactagtaaatagtcacatctcattttcttcctttgtaaaatggggttactactggccctacctcatattctatgagaatgagtttgtagctgtttcaaatcatgaagtgcatagtatcacatgtgatagaatatttataactttttattagatgcttaatgttcaattaagtaattttgatgtgaaaaataaaagtaataaaagtatcttaaaaatagcataagaattttcatatttttaaacaaggcagttttgtagtcccttaagattaaatacaactgctccttttttttttaaactgaggccttgcgatattttgtgtgaatagatatgccctaggagttcagaaaaagttaaaagtatgttttctaattaaatgcagtgcacattcctggatcaatattcaaagactggtcataacctgctgtgttaaaataatcacatatgctctttttcatcagatttgttgatgatgtaaataaaatgtgtaaatatattagtaaatgttaatattcatgtattttaagttaaggttataaaatttgtcacaatgtgtttttttattcaagtgaaaacagatgtgtgcagctattttgaatattggtttataaacattcatattctttatcaaacgaa

SEQ ID NO: 4914 - DNA, 5378 bp, Homo Sapiens
  NM_020750
acttccgcgggcgcgtgcgcagtggcgggccgggcgcgtgcgcagcgccggcttcttcccagcgcgagttgctgctaacgctcctcctccagcttcccacccccgccgcccgccgcggcccggtaccaacgggtggtctcgccgagggagctgtcgtgcctcgtggtcccgggactgcagtggtgtgcgctctcggcgcgtggcgctaggcatggcgatggatcaagtaaacgcgctgtgcgagcagctggtgaaagcggtgacggtcatgatggaccccaactccacccagcgctaccggctggaagccctcaagttttgtgaggagtttaaagaaaagtgtcctatctgtgtcccctgtggcttgaggttggctgagaaaacacaagttgccatcgtcagacattttggccttcagatcctggaacacgttgtcaagtttcggtggaacggcatgtctcgattggagaaggtgtatctgaagaacagtgtcatggagctgattgcaaatggaacattgaacattttggaagaggagaaccatattaaagatgctctgtctcgaattgtagtggaaatgatcaagcgagagtggccacagcattggcctgacatgctaatagaattggacactctttccaaacaaggggaaacacagacagaattggtgatgtttatccttttgcgactggcagaggatgtagtgacttttcagacacttccccctcaaagaagaagggacatccagcaaacattaacccagaacatggaaaggatcttcagttttctgcttaacacacttcaagaaaatgtaaacaagtatcagcaagtgaagacagatacttctcaggagtcaaaggcgcaagcaaactgtcgagtaggagttgcagcactgaatactctagcaggctatattgactgggtgtctatgagtcacatcactgctgaaaactgtaaactcctggagatactgtgtttgctgttgaatgaacaggaacttcagttgggagccgctgagtgtcttctcattgcagtcagcagaaaaggcaagttggaagaccggaagcccttgatggtcttatttggagatgttgccatgcattatatactctccgccgcacagactgctgatggaggaggtttggtagaaaaacactacgtctttctgaagaggctctgtcaggtgttgtgtgcgctgggcaatcagctgtgtgcattgctgggtgcagattctgatgtagaaacaccatcaaactttggaaaatacctggaatcttttcttgctttcacaacccatccaagtcagtttctacgctcttcaactcagatgacttggggagccctcttcaggcatgaaatcctgtcccgtgatcctttgctattagcaataataccaaaatatcttcgtgcttccatgactaacttggtcaagatgggctttccttctaaaacagacagccctagctgtgaatattctcggtttgattttgatagcgatgaggacttcaatgctttcttcaactcctcccgagcacaacaaggagaggtgatgaggttggcatgtcgtttggatcccaaaactagcttccagatggctggggagtggctaaagtatcaactatcaacttttcttgatgctggttctgtgaattcttgttctgcagttggaactggagaaggaagcctctgttccgtcttctcaccttcattcgtgcagtgggaagccatgactctttttttggaaagtgttatcacccagatgtttcgaacactaaatagagaagaaattcctgttaatgatggaatagagctattgcagatggttctgaactttgataccaaggatcccctcatcctgtcctgcgtccttactaatgtctctgcactctttccatttgtcacctacagaccagagttcctgccccaggtcttctctaagctattttcatctgtcacttttgaaactgttgaagaaagtaaggcccccagaacccgggcagtgaggaatgtgaggaggcatgcttgttcctccatcatcaagatgtgtcgtgactacccccagcttgtgctgcccaattttgacatgctttataaccatgtgaagcaactcctctccaatgagctactcctgacacaaatggagaagtgtgccctcatggaagccctggttctcattagcaaccaatttaagaactacgagcgtcagaaggtgttcctagaggagctgatggcaccagtggccagcatctggctttctcaagacatgcacagagtgctgtcagatgttgatgctttcattgcgtatgtgggtacagatcagaagagctgtgacccaggcctggaggatccgtgtggcttaaaccgtgcacgaatgagcttttgtgtatacagcattctgggtgtggtgaaacgaacttgctggcccactgacctagaagaggccaaagctgggggatttgtggtgggttatacatccagtggaaatccaatcttccgtaacccctgcacagagcagattctgaaacttcttgacaatttgcttgcgcttataagaacccacaatacattatatgcaccagaaatgctagccaaaatggcagagcctttcaccaaggctctggatatgcttgacgcggaaaaatctgctatattaggattacctcaacctctcttggaactcaatgactctcctgtcttcaaaaccgtcttggaaagaatgcagcgtttcttctctaccctctatgaaaactgttttcatatcctagggaaggcaggcccttccatgcagcaagacttctatactgtggaggaccttgctacccagcttctcagctcagcctttgtcaacttgaacaatattcctgactaccgactcagacccatgcttcgtgtctttgtaaagcctctggtgctcttctgtcccccagagcactatgaagccctggtatcccccatcctcggacctcttttcacctacctccatatgaggctttctcagaaatggcaagttatcaaccaaaggagcctgctgtgtggagaagatgaggctgcagatgaaaacccagagtctcaagagatgctggaggagcaactggtgaggatgttaacccgagaagtcatggacctaatcacggtttgctgtgtttcaaagaagggtgctgaccacagtagtgctcccccagcagatggagacgatgaagaaatgatggccacagaggtcaccccctcagctatggcagagcttacagacctgggcaaatgtctgatgaagcatgaggatgtttgtacagcgctattaattacagccttcaattccctggcctggaaagatactctgtcctgccagaggacaacctcacagctctgctggcctctcctcaaacaagtgctgtcagggacactgctcgcagatgcagttacgtggcttttcaccagtgtgctgaaaggcttacagatgcacgggcagcacgacgggtgcatggcttccctggtccatctggccttccagatatacgaggcactgcgccccaggtacctggagataagagctgtaatggagcaaatccctgaaatacagaaggactcactggaccagtttgactgcaagcttttaaacccctccctgcagaaagtggctgacaagcgccgaaaggaccaattcaaacgcctcattgctggttgcattgggaaacccttgggagagcagttccgaaaagaagttcacattaagaatcttccctcacttttcaaaaaaacaaagccaatgctggagacggaggtgctggacaatgatgggggtggcctggccaccatctttgaaccctgaatcaagcttttgggcatccttcctcggcctttcttgtcatctcttctttccctttgtagccgatctctaggcccttcttgcactgccacctcactttccaccactgtcagcctggaaagagatccaggtctggagctggagagaacaggccctgtgcaggaccagaagtaattatactaaagtatcaagaaagggagttagggcttaaactattctgtctagatgtcccagatagttcccattctacttggagatttggcttttccaagaaaagctagagcagagcagcccttctcccacaagccctcccacccccgtgcagccacatacctgtacagaatggtaactaagggtgctgtgcccaaccctgcgactagcaaggctcgcagcaagagcacagccctcaactacttgtgccagagtttctcttggaccactccaactcccactgagcccttttgctgctgggctggcaggaaactttccccactccctaaggggcatgtctgggttaggtgctaagtgctgaagagaacttggtcagttctctcaactttgctttgggcaagaatctggtcacctgatgggatccatggtacaggctactgctaaacttggcacagtatcaagtatagtacctccaaggaccagggctgggaagtctttagtgctaacatcccctttagagttcacacatcttgcccttccatgaatgacccctcagtctggcctccccagcctcaaggtccactcaggcacaagagccacagtaccctagatagtgtcacatgacaccgttgtcatccaaggataatacagaccaactaggctacatctgtgatgagcagctagcaaagccgctggtcttctcctaggactaagtccaggtgccttccacaatctcatggtctttcaggtccctggttacttttctcaaaggccatttccaaaagaatacatgccttcacatcacaacctgtactgtgagtccattctagaggtcactgaaaggccctgtaaagagaggacatggatacgggacctggccctgaggttattactggccgtaaggcagagttaatccatacagaaaccagtgtgtccatgtgctctgcacaaaaacagacctgttgtccatccagtccactgacaagagggtttccccgagagccgaagtggactgaagctacagtttttagctggtgcgggccacaggcagggtcagattgagaagaagcaaagctggggaagcagaagttgggagtcttgtgttgctccctcttcctgtgtggtgctctgggtttctgtggatcgtgaaggcgatctcaagagtgtttccctccaaacctgatagctgcctattcctgtctggttggggctgtggaggatgtagttgtatttattgcattgtaatatttttaacatcctgtgacttcatgctagaaattttctattgtttatagaaactttttgtagaaacattaactctaaagcacatctgcatgtcagtaaaaatctcagtttcgtacagaaagggaaaaaaaaaaaaaaa

SEQ ID NO: 4915 - DNA, 15882 bp, Homo Sapiens
  NM_020765
gaagatggcgacgagcggcggcgaagaggcggcggcagcggctccggcgccggggaccccggcaacgggggcggacacgaccccgggctgggaggtggctgtgcggcccctgctgtccgcgtcctactccgccttcgagatgaaggagttgccgcagctggtggcctcagtcatcgagagtgaatcagaaatcctgcaccatgagaagcagtacgagccattctactcatcttttgttgcactttccacacactatattacaacagtttgcagtctcattccccggaaccaacttcagtcagtggcagcagcctgtaaagttctaattgagttttctctcctgcgtctggagaatccagatgaggcttgtgctgtgtcccagaaacacttgattctcctaatcaagggcctgtgcactggctgtagccgactagatagaactgaaattatcacatttacagcaatgatgaaatccgccaagctgccccaaacagtgaagacactttcagacgtggaagatcagaaagagctggcctcaccagtaagccctgagttgaggcaaaaggaggtacagatgaattttttgaaccagctgacctcagtttttaaccctagaactgtagcatcacaacctatcagtacacagactctggtggaaggagaaaatgatgagcagtcatctacagatcaagcctcagctatcaaaaccaagaatgtgttcatagctcagaacgtggctagtcttcaagagcttggtggctcggagaagctactgcgtgtatgtttgaacctgccatatttcctacgctatatcaatcggttccaagatgcagttttagctaattccttcttcataatgcctgcaacagtagcagatgccactgctgttcgtaatggctttcattcattggtgattgatgtaactatggcattggataccctttctctacctgtgttggaacctctcaatccttctcgtctacaagatgtgacagtcctcagcctaagttgtctgtatgcaggtgtgagtgtggcaacgtgcatggccatcctccatgtgggtagtgcccagcaagtgcggacagggtccacgagctccaaagaagatgactatgaaagtgacgcagctacaattgtccagaaatgtctcgaaatctatgacatgattggacaagcaatcagcagttctcgccgggctggtggtgagcactatcagaatttccaattgctgggtgcttggtgcttgttaaacagccttttcctcatactgaacctcagtcctactgcgttggctgataaggggaaagagaaggacccactggctgccctccgagtcagagacatcctttctcgtactaaagagggagtgggctcccctaaactggggcctggaaaagggcatcagggatttggggtactctcagtaatattggcaaaccatgccatcaaactgctaacgtctctctttcaagacctacaagtggaggcccttcacaagggttgggagacagatggcccccctgcagccttgagcattatggcccagagcacctccatacagaggattcaacggctgattgactctgtcccactgatgaacctgctcttgacgttactttcaacttcctacagaaaggcatgtgtcctgcagcggcagaggaagggctccatgagcagcgatgccagcgcctccaccgactccaatacttactatgaggacgatttcagtagcacggaggaggacagcagccaagacgatgacagtgagcctattttggggcaatggtttgaggagactatttctcccagtaaagagaaagcagcacctccgcctcctcccccacctcctccactggaaagctctcctcgggttaaaagccccagtaagcaggcccctggtgagaagggcaacattctggcgagtcgcaaagatcctgagttgttcttaggtctggcttccaacattttgaacttcatcacctcttccatgctgaactctcggaacaattttatccgaaactatctgagtgtatctctttcagaacaccatatggccaccctagccagtatcatcaaggaggtggacaaagatggactcaagggttcatcagatgaagagtttgctgcagctctctatcacttcaaccactcactggtaacctctgaccttcagtcacctaacctgcagaacacactgttgcagcagctaggagtggctcctttttctgagggcccttggcccttgtacattcaccctcaaagcctctctgtgctttcacgcctcctgctcatctggcaacataaagccagtgctcaaggtgaccctgacgtcccagaatgccttaaagtttgggacaggtttttgtctacaatgaagcagaatgccctgcaaggtgtggtgcccagtgagacagaggatctgaatgtagaacacctgcagatgctcctcctcattttccacaatttcaccgagacaggccggcgggccatattgtcgctttttgtccagatcatccaggagttgagcgtcaacatggatgctcagatgcgcttcgtgccgcttatcttggctcgcctccttctcatctttgattatctgcttcatcagtactccaaagcccctgtgtatctatttgagcaggtacagcataacctgctaagtcctccctttgggtgggcaagtggatcccaggacagcaacagccgccgggcaaccactcctctctatcatggattcaaagaagtagaagaaaactggtctaagcatttctcatcagatgctgtcccacaccccagattctactgtgtcctgtccccagaagcctcagaggatgatttgaaccgacttgattctgtggcatgtgacgtccttttctccaagcttgtcaagtatgatgagctttatgctgcactgacagccctgcttgcagctgggtcccagcttgatacagttaggagaaaggaaaacaagaatgtaacagccttggaggcctgtgcccttcaatattacttcttgatactgtggaggatcctaggaattttaccaccatcaaagacttacattaaccagctatccatgaactcacctgagatgagcgaatgtgacatcttgcacactctgcgatggtcttctcggctccggatcagctcctatgtcaactggataaaggatcaccttatcaaacagggaatgaaggctgagcatgctagctcgcttctagaactggcatccaccactaagtgtagctcagtgaaatatgatgttgaaatagtagaggaatacttcgctcgacagatctcatccttctgtagtatcgactgtaccaccatcttgcagctgcatgaaattcccagtctgcagtccatctacacccttgatgccgcgatctcaaaggtccaggtctctttggatgagcatttttctaagatggctgctgagactgatcctcataagtcgtctgagattaccaagaacctacttccagccacgctgcaactcattgacacctatgcatcgttcaccagagcctatttgctgcaaaactttaatgaagagggaacaactgagaaaccttccaaggagaaactgcaaggctttgctgctgttttggctattggctctagcaggtgcaaggcaaatactctgggtccgacactggttcagaatttgccatcgtcagtgcagactgtgtgtgagtcctggaacaacatcaataccaatgaatttcccaatattggatcctggcgcaatgcctttgccaatgacaccatcccttcagagagttatattagtgcagtgcaggctgcacacctggggactctctgtagccaaagtctgcccctggctgcttccctgaagcataccctcctctcactggtcaggttgactggagatcttattgtttggtcagatgagatgaacccaccacaggtaattcggacactgctacctcttcttttggaatcaagcactgagagtgttgccgagatcagtagcaactccctggaacgcatcttgggccctgctgagtctgatgagttcttggctcgtgtttatgagaagctgatcactggttgttacaacattctggccaatcatgcagatcctaacagtggactggatgaatccatcctggaggaatgtctccagtacttggaaaagcagctggaaagtagccaggctcgtaaagctatggaggagtttttctctgacagtggagaacttgtacagatcatgatggcaacagccaatgagaacctctctgctaaattctgtaaccgagttttgaaattcttcaccaaactcttccagctgactgagaagagccctaacccgagcctgttgcatctctgtggctccctggcacaactggcctgtgtggaacctgtgcgcctgcaggcctggctcacccgcatgactacatcgcccccaaaagattctgatcagctggatgtaattcaggagaaccggcagctgctgcagttactgaccacatacattgttcgggaaaacagccaagttggggaaggtgtgtgtgctgttcttctgggcaccctgactcccatggcaacagagatgctggccaacggtgatgggactggcttccctgaacttatggttgtgatggccactctggccagtgcaggtcaaggtgctggtcaccttcagcttcataatgctgctgtggattggctgagcagatgcaagaaatacctgtcacagaagaatgtagttgaaaaactgaatgccaatgtaatgcatggaaagcatgtgatgatcttggagtgcacatgccatatcatgtcttacttggctgatgtcacgaatgccctgagccagagtaatggtcaaggcccaagtcatctctcagtggatggggaagagcgggccattgaagtagactcagactgggtggaggagttggcggtggaagaggaagattcccaggctgaggattcagatgaagattctctttgcaataaactctgcacttttacgatcacacagaaagaattcatgaaccagcattggtaccactgtcacacctgtaaaatggtggatggcgtgggtgtctgcacagtgtgtgctaaggtgtgccacaaggatcatgagatttcctatgccaagtatggatccttcttctgtgactgtggagccaaggaagatggcagctgtttggctctggtgaagagaactcctagcagtggcatgagctctaccatgaaggagtcggcatttcagagtgaacccaggatttcagagagtctagtgcgtcatgccagcacctcctcgccagctgacaaagccaaggttaccatcagtgatggaaaggttgctgacgaagagaagcccaagaagagcagcctctgccgcacagtagagggctgccgggaggaattacagaaccaggccaatttctccttcgctcctctcgtgttagacatgcttaatttccttatggatgccattcagaccaacttccagcaagcttcagccgtcgggagcagcagccgtgctcagcaagccctcagtgagctacacactgtggagaaggcagtggagatgacagaccagctgatggttcccaccttagggtcccaggaaggtgcctttgagaatgtgcggatgaattacagtggagaccagggccagaccatccggcagctgatcagtgctcatgtgctcaggcgggtggctatgtgtgtgctctcctctccccatgggcgccgccaacatttggctgtcagccatgagaagggcaagatcaccgttctgcagctctctgcactcctgaagcaagcagattccagcaaaaggaagttaactctgacccgcttggcttctgccccagttccttttactgtgttgagcctcacaggaaatccctgcaaggaagactacttggcggtttgtgggctaaaggactgtcatgtgctcacctttagtagctcaggctctgtttcggatcacttggttttgcaccctcagttggcaacggggaacttcatcatcaaagccgtgtggttacctggttcacagaccgagttagcaattgtcaccgcagactttgttaagatttatgacctgtgtgttgatgccttgagtccaaccttctattttctcctgccaagctcaaagataagagatgttaccttccttttcaatgaggagggaaagaacatcattgttataatgtcttcggctgggtacatctatactcagcttatggaagaggccagcagtgcccagcagggacccttctatgtcactaatgtgttggaaatcaatcatgaggacctgaaggacagtaacagccaggtggcgggcggtggtgtgtccgtgtactactcccacgtgttgcagatgttgttcttcagctattgtcaaggcaaatcattcgcagccaccatcagcaggacaaccctggaggtgttgcaactcttccccatcaacatcaaaagttccaatggtggcagtaagacttctcctgctctttgccagtggtctgaggtgatgaaccaccctggcttggtgtgctgtgtccagcaaactacaggggtgccgctggtagttatggtgaaaccagacacttttcttatccaggagattaagactcttcctgctaaagcgaagatccaagacatggttgctattaggcacacggcctgcaatgagcagcagcggacaacaatgattctgctgtgtgaggatggcagcctgcgcatttacatggccaacgtggagaacacctcctactggctgcagccatccctgcagcccagcagtgtcatcagcatcatgaagcctgttcgaaagcgcaaaacagctacaatcacaacccgcacgtctagccaggtgactttccccattgacttttttgaacacaaccagcagctgacagatgtggagtttggtggtaacgacctcctacaggtctataatgcacaacagataaaacaccggctgaattccactggcatgtatgtggccaacaccaagcccggaggcttcaccattgagattagtaacaacaatagcactatggtgatgacaggcatgcggatccagattgggactcaagcaatagaacgggccccgtcatatatcgagatcttcggcagaactatgcagctcaacctgagtcgctcacgctggtttgacttccccttcaccagagaagaagccctgcaggctgataagaagctgaacctcttcattggggcctcggtggatccagcaggtgtcaccatgatagatgctgtaaaaatttatggcaagactaaggagcagtttggctggcctgatgagcccccagaagaattcccttctgcctctgtcagcaacatctgcccttcaaatctgaaccagagcaacggcactggagatagcgactcagctgcccccactacgaccagtggaactgtcctggagaggctggttgtgagttctttagaagccctggaaagctgctttgccgttggcccaatcatcgagaaggagagaaacaagaatgctgctcaggagctggccactttgctgttgtccctgccagcacctgccagtgtccagcagcagtccaagagccttctggccagcctgcacaccagccgctcggcctaccacagccacaaggatcaggccttgctgagcaaagctgtgcagtgtctcaacacatctagcaaagagggcaaggatttggaccctgaggtgttccagaggctagtgatcacagctcgctccattgccatcatgcgccccaacaaccttgtccactttacggagtcaaagctgccccagatggaaacagaaggaatggatgaagggaaggaaccgcagaagcagttggaaggagattgctgtagtttcatcacccagcttgtgaaccacttctggaaactccatgcatccaaacccaagaatgccttcttggcacctgcctgccttccaggactaactcatattgaagctactgtcaatgctctggtggacatcatccatggctactgtacctgtgagctggattgtattaacacagcatccaagatctacatgcagatgctcttgtgtcctgatcctgctgtgagcttctcttgtaaacaagctctaattcgagtcctaaggcccaggaacaaacggagacatgtgactttaccctcttcccctcgaagcaacactccaatgggagacaaggatgatgatgacgatgatgatgcagatgagaaaatgcagtcatcagggatcccgaatggtggtcacatccgtcaggaaagccaggaacagagtgaggtggaccatggagattttgagatggtgtctgagtcgatggtcctggagacagctgaaaatgtcaacaatggcaacccctctcccctggaggccctgctggcaggcgcagagggcttcccccccatgctggacatcccacctgatgcagatgacgagaccatggttgaactagccattgccctgagcctgcagcaggaccaacaaggcagcagcagcagtgccctgggcctgcagagcctgggactgtccggccaggcacccagctcttcctctctggacgcaggaaccctctctgacaccacagcatcagctccagcctcagacgacgagggcagtacagcagcgacagatggttctacccttcggacctctcctgctgaccacggtggtagtgtgggctcggagagcgggggcagtgcagtggactcagtggctggcgagcacagtgtatctggccggagcagtgcttatggcgatgctacagctgaggggcatccggctggaccaggaagtgtcagctcaagcactggagccatcagcaccaccactgggcaccaggagggagatggctccgagggagaaggagaaggagaaactgaaggagatgtccacactagcaacaggctgcacatggtccgtctaatgctgttggagagattactgcagaccctgcctcaattacgaaacgttggcggtgtccgggccatcccatacatgcaggtcattctaatgctcactacagatctggatggagaagatgagaaagacaagggggccctagacaacctgctctcccagcttattgctgagttgggtatggataaaaaggatgtctccaagaagaatgagcgcagcgccctgaatgaagtccatctggtagtaatgagactcctgagtgtcttcatgtcccgcaccaaatctggatccaagtcttccatatgtgagtcatcttccctcatctccagtgccacagcagcagctctactgagctctggggctgtggactactgcctgcacgtgctcaaatcactgctggaatattggaagagccaacagaatgacgaggagcctgtggctaccagccagttgctgaaaccacatactacctcctccccacctgacatgagcccattctttctccgccagtatgtgaagggtcatgctgctgatgtgtttgaggcctatactcagcttctaacagaaatggtactgaggcttccttaccaaatcaaaaagattactgacaccaattctcgaatcccacctcctgtctttgaccactcgtggttttactttctctccgagtacctcatgatccagcagactccatttgtgcgccgtcaagtccgcaaacttctgctcttcatctgtggatccaaagagaagtaccgccagctccgggatttgcacaccctggactctcacgtgcgtgggatcaagaagctgctagaagagcaggggatattcctccgggcaagtgtggttacagccagctcaggctccgccttgcaatatgacacactcatcagcctgatggagcacctgaaagcctgtgcagagattgccgcccagcgaaccatcaactggcagaaattctgcatcaaagatgactccgtcctgtacttcctcctccaagtcagtttccttgtggatgagggcgtgtccccagtgctgctgcaactgctctcctgtgctctgtgcggcagcaaggtgctcgctgcactggcagcctcttcgggatcctccagtgcttcttcctcctcagcccctgtggctgccagttctggacaagccacaacacagtccaagtcttccactaaaaagagcaagaaagaagaaaaagaaaaggagaaagatggtgagacctctggcagccaggaggaccagctgtgcacagctctggtgaaccagctgaacaaatttgccgataaggaaaccctgatccagttcctgcgttgtttcctgttagagtccaattcttcctcggtgcgctggcaggcccactgtctgacactgcacatctacagaaattccagcaaatctcaacaggagctcctgctagatctgatgtggtccatctggccagaactcccagcctatggtcgtaaggctgcccagtttgtggacctactaggatatttctccctgaaaactccacaaacagagaagaagttgaaggagtattcacagaaggctgtggagattctgcggactcaaaaccatattcttaccaaccaccccaactcgaacatttataacactttgtctggcttagtggagtttgatggctattacctggagagcgatccctgcctggtgtgtaataacccggaagtaccgttctgttatatcaagctgtcttccattaaagtggacacgcggtacaccaccacccagcaggttgtgaagctcattggcagtcacaccatcagcaaagtgacagtgaaaatcggggatctgaaacggaccaagatggtgcggaccatcaacctgtattataacaaccgaaccgtgcaggccatcgtggagttgaaaaacaagccagctcgctggcacaaagccaagaaggttcagctgacccctggacagacagaggtgaagattgacctgccgttgcccattgtggcctccaatctgatgattgagtttgcagacttctatgaaaactaccaggcctccacagagaccctgcagtgccctcgctgtagtgcctcggtccctgccaacccaggagtctgtggcaactgtggagagaatgtgtaccagtgtcacaaatgcagatccatcaactacgatgaaaaggatcccttcctctgcaatgcctgtggcttctgtaaatatgcccgcttcgacttcatgctctatgccaagccttgctgtgcagtggatcccattgagaatgaagaagaccggaagaaggctgtatccaacatcaatacacttttggacaaagctgatcgagtgtatcatcagctgatgggacaccggccacagctggagaacctgctctgcaaagtgaatgaggcagctccagaaaagccacaggatgactcaggaacagcagggggcatcagctccacttctgccagtgtgaatcgttacatcctgcagttggctcaggagtattgtggagactgcaagaactcttttgatgaactctccaaaatcatccagaaagtctttgcttcgcgcaaagagttgttggaatatgacctacagcagagggaagcagccactaaatcatcccggacctccgtgcagcccacattcactgccagccagtaccgtgccttatccgtcctgggctgtggccacacatcctccaccaagtgctatggctgcgcctcggctgtcacagaacattgtatcacactacttcgggccctggccaccaacccagccttgaggcacatccttgtctcccagggccttatccgggagctctttgattataatcttcgccgaggggctgcggccatgcgggaggaggtccgccagctcatgtgcctcctaactcgagacaacccagaagccacccaacagatgaatgacctgattattggcaaggtctccacagccctgaagggccactgggccaaccccgatctggcaagtagcctgcagtatgaaatgctgctgctgacggattctatctccaaggaggacagctgctgggagctccggttacgctgtgctctcagccttttcctcatggctgtgaacattaagactcctgtggtggttgaaaacattaccctcatgtgcctgaggatcttgcagaagctgataaaaccacctgctcccactagcaagaagaacaaggatgtccccgttgaggccctcaccacggtgaagccatactgcaatgagatccatgcccaggctcaactgtggctcaagagagaccccaaggcatcctatgatgcctggaagaagtgtcttcctatcagagggatagatggcaatgggaaagcccccagcaaatcagagctccgccatctctatttgactgagaagtatgtgtggaggtggaaacagttcctgagtcgtcgggggaagaggacctcccccttggatctcaaactggggcataacaactggctgcgacaagtgcttttcactccagcaacgcaggccgcacggcaggcagcctgtaccattgtggaagctctagccaccattcccagccgcaagcagcaggtcctggacctgcttaccagttacctggatgagctgagcatagctggggagtgtgcagctgagtacctggctctctaccagaagctcatcacttctgcgcactggaaagtctacttggcagctcggggagtcctaccctatgtgggcaacctcatcaccaaggaaatagctcgtctgctggccctggaggaggctaccctgagtaccgatctgcagcagggttatgcccttaaaagtctcacaggccttctctcctcctttgttgaggtggaatccatcaaaagacattttaaaagtcgcttggtgggtactgtgctgaatggatacctgtgcttgcggaagctggtggtgcagaggaccaagctgatcgatgagacgcaggacatgctgctggagatgctggaggacatgaccacaggtacagaatcagaaaccaaggccttcatggctgtgtgcattgagacagccaagcgctacaatctggatgactaccggaccccggtgttcatcttcgagaggctctgcagcatcatttatcctgaggagaatgaagtcactgagttctttgtgaccctggagaaggatccccaacaagaagacttcttacagggcaggatgcctgggaacccgtatagcagcaatgagccaggcatcgggccgctgatgagggatataaagaacaagatttgccaggactgtgacttagtggccctcctggaagatgacagtggcatggagcttctagtgaacaataaaatcattagtttggaccttcctgtggctgaagtttacaagaaagtctggtgtaccacgaatgagggagagcccatgaggattgtttatcgtatgcgggggctgctgggcgatgccacagaggagttcattgagtccctggactctactacagatgaagaagaagatgaagaagaagtgtataaaatggctggtgtgatggcccagtgtgggggcctggaatgcatgcttaacagactcgcagggatcagagatttcaagcagggacgccaccttctaacagtgctactgaaattgttcagttactgcgtgaaggtgaaagtcaaccggcagcaactggtcaaactggaaatgaacaccttgaacgtcatgctggggaccctaaacctggcccttgtagctgaacaagaaagcaaggacagtgggggtgcagctgtggctgagcaggtgcttagcatcatggagatcattctagatgagtccaatgctgagcccctgagtgaggacaagggcaacctcctcctgacaggtgacaaggatcaactggtgatgctcttggaccagatcaacagcacctttgttcgctccaaccccagtgtgctccagggcctgcttcgcatcatcccgtacctttcctttggagaggtggagaaaatgcagatcttggtggagcgattcaaaccatactgcaactttgataaatatgatgaagatcacagtggtgatgataaagtcttcctggactgcttctgtaaaatagctgctggcatcaagaacaacagcaatgggcaccagctgaaggatctgattctccagaaggggatcacccagaatgcacttgactacatgaaaaagcacatccctagcgccaagaatttggatgccgacatctggaaaaagtttttgtctcgcccagccttgccatttatcctaaggctgcttcggggcctggccatccagcaccctggcacccaggttctgattggaactgattccatcccgaacctgcataagctggagcaggtgtccagtgatgagggcattgggaccttggcagagaacctgctggaagccctgcgggaacaccctgacgtaaacaagaagattgacgcagcccgcagggagacccgggcagagaagaagcgcatggccatggcaatgaggcagaaggccctgggcaccctgggcatgacgacaaatgaaaagggccaggtcgtgaccaagacagcactcctgaagcagatggaagagctgatcgaggagcctggcctcacgtgctgcatctgcagggagggatacaagttccagcccacaaaggtcctgggcatttataccttcacgaagcgggtagccttggaggagatggagaataagccccggaaacagcagggctacagcaccgtgtcccacttcaacattgtgcactacgactgccatctggctgccgtcaggttggctcgaggccgggaagagtgggagagtgccgccctgcagaatgccaacaccaagtgcaacgggctccttccggtctggggacctcatgtccctgaatcagcttttgccacttgcttggcaagacacaacacttacctccaggaatgtacaggccagcgggagcccacgtatcagctcaacatccatgacatcaaactgctcttcctgcgcttcgccatggagcagtcgttcagcgcagacactggcgggggcggccgggagagcaacatccacctgatcccgtacatcattcacactgtgctttacgtcctgaacacaacccgagcaacttcccgagaagagaagaacctccaaggctttctggaacagcccaaggagaagtgggtggagagtgcctttgaagtggacgggccctactatttcacagtcttggcccttcacatcctgccccctgagcagtggagagccacacgtgtggaaatcttgcggaggctgttggtgacctcgcaggctcgggcagtggctccaggtggagccaccaggctgacagataaggcagtgaaggactattccgcttaccgttcttcccttctcttttgggccctcgtcgatctcatttacaacatgtttaagaaggtgcctaccagtaacacagagggaggctggtcctgctctctcgctgagtacatccgccacaacgacatgcccatctacgaagctgccgacaaagccctgaaaaccttccaggaggagttcatgccagtggagaccttctcagagttcctcgatgtggccggtcttttatcagaaatcaccgatccagagagcttcctgaaggacctgttgaactcagtcccctgaccaccacacagcagctgcggcggcgaagacgaagctggcttgccttccaccctctgttctccctccttgtgcattaagttccctccgcgggatgctgcattgttaccccgccctcccctctctcatttttcttggtgtggcttggggtttttaggcttcctgttttatctcgtgtgtgtggtgcaccagctatgaggttgtctgtaacccaagccatcaaagggcctgtacatacctaggagccatgagttgtcccggccagcttcatacttgagtgtgcacatcttgagaaataaacaagtgacttaacacacattgaaaaggaa

SEQ ID NO: 4916 - DNA, 5009 bp, Homo Sapiens
  NM_020773
gagggggcggggcgaagcgagggtgcgcgccgctgttcgccgcgggctgctcgcgcgcacctgcgggtcggacccgctgcctaccgcgtgcccggcgtcctcgtcgcgcgagttgccggtcccgcggggcctgggctgcgggcccacgggtcccggggatggcgtcggagccgcgctaactccgtttctccttggaccaagatgactgatggaaaactctccacctctacaaatggcgtagccttcatgggtattctggatggtcgaccaggaaacccccttcagaacctgcaacacgtcaatctcaaggcgccccgactcctctccgcgcctgagtacgggcccaagctgaaactcagggctttagaagaccggcacagcctccagtccgtggactcggggattcctaccctggagatcgggaacccggagcctgtaccctgcagcgcggtccacgtgaggaggaagcagtccgactccgacctcatccccgagcgggccttccagagcgcctgcgcgctgccatcctgtgcgccaccagctcctagcagcaccgagcgggaacagagcgtgcgcaaatcctccacgtttcccaggacaggctatgactcggtaaagctctatagcccgacctccaaagccctgacccgcagcgatgatgtctccgtctgcagcgtgtccagtcttgggacagagctgtccaccacgctgtccgtcagcaatgaggacatcttggaccttgtggtcacgagcagctccagtgccattgtgaccctggagaatgacgatgacccacagtttaccaacgtcaccttgagctctatcaaggaaacccgtggcttacaccagcaggactgtgttcatgaagctgaggaggggagtaaattgaaaatattggggccatttagtaacttctttgcaaggaacttgcttgctagaaaacaaagtgcaaggcttgacaaacacaatgacttgggatggaagttatttgggaaagcgccactccgagagaatgcccagaaggattcaaagagaatacagaaggaatatgaagacaaggctggaagacctagcaagccaccctctccaaagcagaatgtgaggaagaatcttgactttgaaccactttccaccaccgcactcatcctcgaggacagaccagcaaatctcccagcaaaaccagctgaagaagctcagaagcacagacagcagtatgaagaaatggtggttcaggccaaaaagcgagagctgaaagaagcccagcgaaggaagaagcagctggaagaaagatgcagagtcgaggaaagcattggaaacgctgtgctcacctggaataatgagatcttacctaactgggaaacaatgtggtgctctagaaaagttcgagatttatggtggcagggaatccctccaagtgtgagaggcaaagtctggagcttagccattggcaacgagttaaatatcacccacgagctctttgacatctgtcttgcccgagccaaggagaggtggcggtcccttagcacaggaggctctgaagtggagaacgaagatgctggtttttcagcagcagacagagaagccagtctggagcttattaaactggacatttctagaacatttcctaatctctgcattttccagcaaggtggtccatatcatgacatgttgcacagtattttgggcgcttatacttgttaccggccagatgtgggttatgtccagggcatgtccttcatagcagcagtgttgatcttgaacttagatactgcagatgcctttattgccttttctaaccttctgaataaaccctgtcaaatggcgttttttagagtggaccatggccttatgttgacttattttgctgcatttgaagtattctttgaagaaaatttgccgaaattatttgcgcatttcaagaagaacaacctaactccagatatctacctaattgattggatctttaccttatatagtaaatctctgcccctcgacctggcctgtcgtatctgggacgtgttctgtcgcgatggggaagagttcctgttccgcacggccctgggcatcctgaagctgttcgaggacatcctgaccaagatggacttcattcacatggcccagttcctgacccggctgcccgaggacctgcccgccgaggagctgtttgcctccatcgccacgatccagatgcagagccgaaacaagaagtgggctcaggtactgactgcattgcagaaagacagccgggaaatggagaagggaagtccgtccctccgacactgaggctgcagcgggaattcgcactcggcaccaatcagagccccatgccgcggcccctctgttgtttcagactgacacccgggcagccgagaagaacagacgctctttaagtttgattcctaacactggagttggccttaaacaaaacaaacacaaaaacttttaaagaattaaaccaaggcttagccttaagcagctcagtggaaggatgagctgctgcggaccacagccagccactgcatctgctgcacagttgaacgatgggcagtggctcacccccactcctttatttcagcaaaagctaattaaattgtaatgtttctatgtcaactactgggaagtatgttacagtcttagccaggatgcatgagagatgttatttgggagacttgagatgctttggctgatatttacatgttttcgataagaaagggatcgctgattgagttattgagatagtttttccagagctggaggtcacgtttctaaaactcacctacgaaagatagcattaaaggaacaggggctctctgaggatggccactgatgtgtgtttgtggatacctgggcatcgacccagcctgcaggtgagctctgggccatgttgccttgacacagtcacagtgtagaggctgcaggtgcacacgtgggctccagtgggactgcgctctgggagactgctccctggcatcggtcctgcggaggtggaaagttcgagaggaggagctatttgcgaggaagccctgtggcaatagagataggcttaaaagcggagagaacacagagtggaatcagccccctgtaagtaaaagggtagagaaagagatgtgtggctgggccctctcccacctgcctgttcagtggaggccagggcagcagcccagaacagcacatgtgggggaggtggccccttgtgccagcagtggctcctctctgcctttgagccctgcacagctggacccatcctaagtgccagtgagtccctcacacatttgactttagaacgtgtgcttcatgacccgttgtacagacggaggagcgagcaacacacgtctaacagcctagacaatctcgtcagatgctcatactggaccatcagcctccccattttagctgactttcccagggtcgttggcaaattttttgttctgtcttttccttgactaattgtagaactttgtgtgaggactttggttatccaaaatcacagaaatgaaccgttttgcagctgcgcagtctaaagggcaggccagtgtctggaagcagggcccacgtggcggtccgctggcaggctggtcctggggagcattctgcggacccggtcacgggcttggttagtcatgcgtacatgtgtgccttggggtgctctgcactccacggcccttctcagccacacttcccaccccagggggtgcccccaggctgatctcatttctgatgttgagggctgtttggctctgtctgtatagcttgtaacaggagccttgggctaggggctggggaaggaaagccgagctggcattcgttctctggactttttatgcctgccatacccgctaatgctcctcgaggtgcaggagcaggttgctgagccagtggctgccccgtgccctccttcccagcactatcatgtgtcacgtttcccggactctgcccctacatctcagctgaatctccagggaggctgcagagcatcgtggagaccactttctgcctcggcctttaaatgctgactcacctcctctcggaggaggcgtcctgtcttcacgggggggtcccggtggcctccagacgtagccatttcctgacatcaagatgttgaatgtaatctggtctgagctgggcctgtgggaggggccgcctgaggcctgtgcgctgttgtcctcgcagatgtacttatttttgttcatgttacgggcgttccgttccttaaagatgtatatattttcttactgtacataaagatgttccttaagtcgtacagaaggtggcgcggcaaagggcctcgtgcagtgtgttcagattgcccctggggatcttctgtgtcttcagcgcccagccctgcgtgttcctggtgaagcagtttcacatcagtctctccagatagcactacgatgtattccgcttctgaacaggatcccatgccagtgtggaacaccttcccaatcttagttcagaagtggcttgtatgacctgttcaggggtcacatgaggtctcgccagtttcctgggtcctcttcagaggccagaaagttctaagttctgagtccccggccagggtcccttaacacctcggcacagaggctgttggcaagtgtagaggctgcctctgtgtgtggtttaagtaaactggaaatgagacattgacgtgctgctcctccagaggtctgcacactccacttcacatgccgttgactctcacagtctaagacttcagggccgggacctttgtccagcctgcacagtagagtgaggctgcctctcccgccaggcattgggatcccatttagaaacggcattcacttcagaaggtactttttaactgctcagtttttgactattttaaatagtttgctgaaaactcctgataacacttgctacatatcatgttttaattgcttgtacagttaacctttaattttatttagtaaagtgtatcaaagtaggacttttttgaattgtaaataggtggttttattaaataaaagtcaatgtaaaattgttactta

SEQ ID NO: 4917 - DNA, 6477 bp, Homo Sapiens
  NM_020782
aaccggcgcgcgcgtaggggctgggaggccggcgcgcagatctggcggtgagcgctgccgccccggggcccccagccatgtcggccgaggagatggtgcagatccgcctggaggaccgctgctacccggtgagcaagaggaagctcatcgagcagagcgactacttccgcgccctctaccgctccggcatgcgcgaggccctgagccaggaggccggcggcccggaggtgcagcagctgcgcggcctcagcgcgccgggcctgcggctggtgctggacttcatcaacgccggcggggcccgcgaaggctggctcctgggcccgcgcggggaaaagggcggcggggtggacgaggacgaggagatggatgaggtgagcctgctgtccgagctggtggaggcggcctccttcctgcaggtcacgtccctgctgcagctgctgctgtcccaggtgcggctcaataactgcctggagatgtaccgcctggcgcaggtgtacgggctgcccgacctgcaggaggcctgcctgcgcttcatggtcgtccacttccacgaggtgctgtgcaagccccagttccacctcctggggtctcctccccaagctccaggggatgtcagcctgaagcagaggctgagggaggcccggatgactgggactcctgtcctcgtggccctcggggacttcctggggggacccctggcccctcacccctaccagggggagcccccgtccatgctcaggtacgaggagatgactgagcgttggttcccgctggccaacaaccttcctcccgacctggtcaatgtcaggggctatgggtctgccatcctggacaactacctcttcatagtgggcgggtacaggatcactagccaggagatctccgctgcgcattcctacaaccccagcaccaacgagtggctccaggtggcctccatgaaccagaagaggtctaacttcaaacttgtggctgttaattcaaaactctatgccatcggagggcaggccgtttctaacgttgagtgttacaaccccgagcaggatgcgtggaattttgtggcgcccttacccaatcctctggctgagttctctgcctgtgagtgtaagggaaaaatttatgtcattggaggatacactaccagagaccggaacatgaacattttgcagtactgcccctcttccgacatgtggacgctctttgaaacatgtgacgtccacattcgcaagcagcagatggtgtctgtggaagagaccatctacatcgtgggggggtgtctccacgagctggggcccaaccgcaggagcagccagagcgaggacatgctcaccgtgcagtcctacaacaccgtcacccgccagtggctctacctcaaggagaacacgtccaaatcgggtcttaacttgacttgtgcgctccataacgacggcatctacatcatgagcagagacgtcaccctgtcgaccagcttggaacaccgagtgttcctcaagtacaacatcttttcagatagttgggaagcatttcggcgttttccagcttttggacataacttgctggtttcttctctttatctgcccaataaagcagaaacatgactgaattgaattggtagatgaaaaaaacctggttcaagttttttttaaaatgtggtgtcccattccaagggagaccaattcctaaagggtaaagaagggttaaagtaggtcacatatatacagtagcagctgtaaataagcttacttgaactaattacttgaaaactggtggaaaaaagagaccaactttgttattttttaaattattgatttttaaattatgggagcaaatccatctccaaacatgatactcttgggccaatgacggatcatcaaaatgtagattcattgtgtctgtgtggtaaagggccaaagtcaataattgggacaaatggtaaagatgattttaaaatctgttgtatttaggtcccttgacatatcattagcaccttaagtgagaggttttctttttcttatcagtgtccttgacaagcattcatattaacatattcattctctcttctccatcacccatacccacacatacatctagtatgtttagggttctgtgttcagatattttgtttgcacactactttttaggaaacttataatgatggagccctacagtgaatccttaccagtgttcagtcctccccaaaacttgcataaaaatattcttagctatttttccagccttttttgcagttacaaatgctggataaatagactgataaaacctcttattttatttatgtggcaggttgcatatttatgtggacacataggttgcactgctaggcattctgtattgttttaaagaggatatattatttagaaaaatggacatatgaatattattaaaaattgagtcttaaatttaaatgggaagggaagaaaacaccaaataagaaaaaaatttgcctttaagagttacttttgttgaatgtatttgacttagttcttattttaaggctaaaaaaactttgtcatatttaagtcggcagctttctaatttaatcttagctttgtaattcatgttttgcttttgtggactaaggtaaggacagcatttaaatatttgtgctggagtgaggggaagaagctgttacagaagtggaatggtttctggtggtatttctgaagttaggtaaagtgctttacttgccttggttgttaattgaaatagaattcagctcaagcagttgttttcagtgagtgagttaacaataaaagcttctgccaatcatagatcaacattcctcaaaaatacatacactcatacttatggaaattttattttgattgaaaacactctgaaattatctgatattttgtaatggcatcagttaaactgtgagctggattccatctttctgcagtaacagcgggcagaaccatttcagttagcatgtgcctcactttaagaaagtcctgtaggggaaaaaaaaaactgtcagagcgaattcatgcattcaacaaacacttatgagtgcctggagtatgccgtccactgtgcagatgtaggacaggggctaatcacttagagttcttcagtttattagaggagtgactacaggttttctttacaaccatggcctctagtatacttaaaataagcgtccagttataaaaagcctatttgcacaactttttgggaatacttctattaactaaaatgaggtaagccattattttggacatagaaacagatctttgtatcttgtcaccaaataatcttacctctagtctacttacaactttgtaagggtttctaagctatgcccatttattcccaaatattaagcccttaaaaaaataaaacctctgaaccaaaatcttcccaggaatagtacttaatagattttaatgttaatttatattcattgtagaattgaatttccagtgacctgtaatttcattacatatattttaaaatctatttattttagatggtgttaacttttcgttgctgaagagcttaactttttaaaggctttgtcctatacatttagaagatgagtcagttgaattagtactggacaaacagttggagattagtttgcaaataagcatatcatatcaaatacaatattccagccaaccagttaattctcttcctggttacattcattgggtctatttgcctaatgttgacaattagattcttggaccaagtgagggtgtactctgatccacaaagctcttttataaaccaggtttgaggttgtgtgtgtgtgtgggggtgtgtgtgtgtgtgtgtgtgtatgtttgcatattatagctctctttaagacagacatctaaaaagattttggttattctgggctgccagcagtacgtgggaaaggtggaatgtgcaataggaacagatctgtgcattttgtgacatcgtccttcctgctgtgcacatcagctgtgatgacattttgagggtagttttaatttagctcggttctcttgttggtgccagtattacattgaagactacctatgatagaggcaatgttgctttgaaaatctcccttcaggcggaggttgcagtgagccgagattgtgccattgcactccagcctgggcgacagtgcaagactctgtctccaaaaaaaaaaaaagaaaaaagaaaatcccccttcatcccccaggactgtcctttactctttgatagtatccctctattttcttcccaattctctaaatgctttatcattttttcctgagatgcttctgagggatgctgacctcccactatggggaaaagggttgcttggaggacctggggtggcagccccccgaccagaagcaccctattttatagatagcagtctgaatggtagagagtcctgtgtgtgggttgttagaaggttggttcttcctgttattctctctggctttcctttcaacccacttattttcagaggcctctccccttagcatcctttaaaaggttttctgatgaatgtgtgaaagagttgattatttcaacagtattggttaagtcacaacgacgaagtgctgagaaggttatgggtaccaggaagaaacaaacagaagtcttaagattagaatgagaaccaaagagaatttaaccctgccatttttttttttttaacaccaagatcctaagtaattccaaatgccttagatatcaatgaaagctacacaccattgagatgggcaaaattctttctctacaaagggagtaatcaagtaaatacctgttctctttcaatggactgttgcctattgagcattgtggatgatgtgttttcagatttccaggtgaagttctgaccctacctgtttggccaaagacgtaaattgagaggaaaggccttggtcttcctgatcaaccagcatttaacgaacagtggcttaatgcagatcactcaagaggcagcatagcaatgtaaaaggaatataagtaggtgttggatgcctttttcctagaccaggaatggggaatatataacacctgtgccaccgctcttttaaggaggcattatgaatgagtgcagcattcctgtcctctgtgccaggatttggtcttagaatccatgtcagattggtgcttccagacatctattcccagtccatcagagtgaaatgaaggctatttgccatccctgccttagacagaggagtgaaagaattaagtgggtagacaccaaccaaaatgactttgaaagcagtgagctgattgagctccagttctgtggttaccagaaatactgagtgtctgtcatgtgcaagacaatgctaagaacagaatacagacataaataagtcacggcccatgaccttgaagagcttacggccttataaagaggttcactgtaattgtcttcaccagggcgtccttctcaaagatgcccacttttgtctggcacattggggctcggtggtctggtggtcccttcggtcttggccctatctgtcctttgtttttgtgatttactaacaatcatcacgaaccagttttgtttttcttttaaatttgaacatcacatcttgtgttttagttttttgctctatgatttttttctcactgcttttcagtcttctctgtacttcatttttgtgaaaaagtgaaaatcacatataatctttatttaaaaatgctcaccaagcactgcagactttggagttagggattcagcagcttgttccagtgaaaaggaggagtgaagctggggaagttagtatctaagaggggcaagctgattgcatgtgcatttatacctatgcctttaaaacattcccataaaaagtattaataaagaaatttccattccacactagtactgatgaaaaggtggttgattttgccttgtgataattatcaaaggatagtttttcatccttagattttattcacatgagagattttttttattttctctgttgacttaggaacacatcataaattcacaccaactgacacgttgctgacgtctgtacttgacataaccatttttattcatacaggaagcattaaatataaaagatggtcagttttgaagagcaaagggtgctgaaatgacttgtacggttggctggtgctttctcaaatggattgccatagttcattactagtaaagaaaaggaaaatgtgatttacgttgtcatttttcctattaaaaaaaacccttaagaatggggcacttgagctgtccctgcaatgttttcatatctagtagtcattttagggaaagtgataatctgtagaatgaatagttatgttttgatatgactgatactttctttgttaaaaggttgtattaagtcttcaatttcaagtctagcttaaaagtgtaaacattatgtgattcatttgaatacaagaatgcctatgaaatacccactataacagcattccttttgtgtttagaactatagaagaaaatgtcttcaaataaagtagttttcagtcaaaaaaaaa

SEQ ID NO: 4918 - DNA, 2010 bp, Homo Sapiens
  NM_020799
gcagcggcagcagggacggttgctgcaggttcggggtcggccggcctgcgcgtgggcttgcgaggacgctgttcgtcccctgcgctggggtgtccgacagcgaggaggagaacgacgcacggagcccgcgcgactggaaccagcaaagctccatctgtcggcagaggagaagggggaggaggcacggccgaggcaaacgagcggacgcctcgtcgccgggtgccggtatcaccccgctgcaacgccttccagcaaaagccaccgcggcccgggttgcagcagccggacggatgccaaggccacacggcagccacgggggcagccgtcgcagtcgccgtcccacacgggctgcggacaccaagggttgctaatgaagtgattgagaagaaacagtgaacatcctcatttcacagataagacaacatggatcagccttttactgtgaattctctgaaaaagttagctgctatgcctgaccatacagatgtttccctaagcccagaagagcgagtccgtgccctaagcaagcttggttgtaatatcaccatcagtgaagacatcactccacgacgttactttaggtctggagtagagatggagaggatggcgtctgtgtatttggaagaaggaaatttggaaaatgcctttgttctttataataaatttataaccttatttgtagaaaagcttcctaaccatcgagattaccagcaatgtgcagtacctgaaaagcaggatattatgaagaaactgaaggagattgcattcccaaggacagatgaattgaaaaacgaccttttaaagaaatataacgtagaataccaagaatatttgcaaagcaaaaacaaatataaagctgaaattctcaaaaaattggagcatcagagattgatagaggcagaaaggaagcggattgctcagatgcgccagcagcagctagaatcggagcagtttctgtttttcgaagatcaactcaagaagcaagagttagcccgaggtcaaatgcgaagtcagcaaacctcagggctgtcagagcagattgatgggagcgctttgtcctgcttttccacacaccagaacaattccttgctgaatgtatttgcagatcaacctaataaaagtgatgcaaccaattatgctagccactctcctcctgtaaacagggccttaacaccagctgctactctaagtgctgttcagaatttagtggttgaaggactgcgatgtgtagttttgccagaagatctttgccacaaatttctgcaactggcagaatctaatacagtgagaggaatagaaacctgtggaatactctgtggaaaactgacacataatgaatttactattacccatgtaattgtgccaaagcagtctgcgggaccagactattgtgacatggagaatgtagaggaattattcaatgttcaggatcaacatgatctcctcactctaggatggatccatacacatcccactcaaactgcatttttatccagcgttgatcttcacactcactgttcctatcaactcatgttgccagaggccattgccattgtttgctcaccaaagcataaagacactggcatcttcaggctcaccaatgctggcatgcttgaggtttctgcttgtaaaaaaaagggctttcatccacacaccaaggagcccaggctgttcagtatatgcaaacatgtgttggtaaaagacataaaaataattgtgttggatctgaggtgatatgttctgaatgtaagcaccgtcaacatcagacacctactcatggacatgtggttgccggattttcttaagatgtttccagaaatgactgatattttatatttatacattttagatgacaaagcttgatatttattgctgttgcacattttaaagttttctttttgggttgctctgtgtcaagagaggttacatggtgttaaatcggtacctgataatgtacccaaatactatggccagataataaattgtgctgcaaacaaaaaaaaaaaaaaa

SEQ ID NO: 4919 - DNA, 4178 bp, Homo Sapiens
  NM_020801
agcttttagccgcccgtctttgtaaggagaccactgagacgagcgggagcgcggagcagcagcctctgctgccctgactttttaagaaatctcaatgaactatttgtagagaatcactgatccggcctgcaagcattttgcacggcaaaaatatcgatcagtgttaagtgaagatcacattttatatgcgatcttgacttttttgtcttacattatatttttatagattttgttataaacatggtgctgggaaaggtgaagagtttgacaataagctttgactgtcttaatgacagcaatgtccctgtgtattctagtggggataccgtctcaggaagggtaaatttagaagttactggggaaatcagagtaaaatctcttaaaattcatgcaagaggacatgcgaaagtacgctggactgaatctagaaacgccggctccaatactgcctatacacagaattacactgaagaagtagagtatttcaaccataaagacatcttaattgggcacgaaagagatgatgataattccgaagaaggcttccacactattcattcaggaaggcatgaatatgcattcagcttcgagcttccacagacaccactcgctacctcattcgaaggccgacatggcagtgtgcgctattgggtgaaagccgaattgcacaggccttggctactaccagtaaaattaaagaaggaatttacagtctttgagcatatagatatcaacactccttcattactgtcaccccaagcaggcacaaaagaaaagacactctgttgctggttctgtacctcaggcccaatatccttaagtgccaaaattgaaaggaagggctataccccaggtgaatcaattcagatatttgctgagattgagaactgctcttcccgaatggtggtgccaaaggcagccatttaccaaacacaggccttctatgccaaagggaaaatgaaggaagtaaaacagcttgtggctaacttgcgtggggaatccttatcatctggaaagacagagacgtggaatggcaagttgctgaaaattccaccagtttctccctctatcctcgactgtagtataatccgcgtggaatattcactaatggtatatgtggatattcctggagctatggatttatttcttaatttgccacttgtcatcggtaccattcctctacatccatttggtagcagaacctcaagtgtaagcagtcagtgtagcatgaatatgaactggctcagtttatcacttcctgaaagacctgaagcaccacccagctatgcagaagtggtaacagaggaacaaaggcggaacaatcttgcaccagtgagtgcttgtgatgactttgagagagcccttcaaggaccactgtttgcatatatccaggagtttcgattcttgcctccacctctttattcagagattgatccaaatcctgatcagtcagcagatgatagaccatcctgcccctctcgttgaaggaacacttggttgaatcaagttgatgtgggttccgaactgtatctcttccggctgaggacagagaagtatcttggagacacgtttcagaggaagtggaattacttttgcccagaaaaatggcgaatacatgaaacaaccagtgatcatgctttagaagcctacagcaacattctgagactgctccaacatgcttgaagatctaagcttttctcttttaaaactggcacatactcagagcagtcttcttagcctatggtcgtacgtgtcaagacatcacgttgtaaagagggatgatttccttcttttgatttgaaaatttgcacatgctcaatgcttacattgtgcggttcgacgtcactacagcttctttttttttttttttttttttctatttttgccagactcttgatactcttaaaacttgtttgtggtcagcacaacaaggaacaaaacaaagctttgaaaaaactttaacatgaaaaaacgcactgacatttttttttatttaatatagcctggactttacctgcgtatgcacatgctcagaattgtctactaggctgactatgtatcacctcttcagcttggatccaattgtggatttatttacaaacatcaaatgccttcaagccaatcctttttgctgtatgttttgcagcctactgtagtagatacgcaacagataatgtgggaaaaaaagagataagaggaggaagctaataagagactgtcaagattgtataccttcttggtttcttttaagaatttgttgcctttctactattacagcaaagcagcattttgttactgactgcctaaaatcacttaatctcaggtgaacgcatcacttgccaaactgttggaatgctatttgtgttttgttgcactgtttttttcgtttgtttgtttgtttatttggttggctttttggagagggaaatttggaaacgggacatacacaaaagttacacacccacattccctttttatcatgacatacaagaagaaactagcagagctaagaatggagtgaagaaaggcagtatggcaggcaccagcaaagagttgagggctgttgctcttaaaaattattttttttattattattttgaaagtatggaagttttccattcactggggaaaggagggaaaagtgcatttatttttatacagagttacttaattacctccaaaacacatatgttggaaatcgcttttgctggtgcaaagtatattaatgagcaggaatacatacattgaggttatgaatagagagctcaatttgtacctttgctgtcttgctcaagcttggtatggcatgaaaactcgactttattccaaaagtaacttcaaaatttaaaatactagaacgtttgctgcgataaatcttttggatttttgtgtttttctaatgagaatactgtttttcattacctaaagaacaatttgctaaacatgagaaatcactcactttgattatgtatagattacataggaagaacaatcacatcagtaagttatagtttatattaaaggtaattttctgttggctcataacaaatataccagcattcatgatagcatttcagcattttccaaggtaccaagtgtacttattttgttgttgttgttgttgttgtattttagaaggaattcagctctgatgtttttaaagaaaaccagcatctctgatgttgcaacatacgtgtaaaatgggtgttacatctatcctgccatttaaccccacagttaataaagtggctgaaaataatagtagctctggcttggtgcttgacctggttaaatactgtcttaaagctcatacaaaacaaataggcttttccataagtggcctttaagaaaacatggaagacaattcatgtttgacaaatgctgacagggtgaagaaagcccagtgtaaaaatgaatcgcgttttaagtgattcggttaaagagtttgggctcccgtagcaaactaatactagataataaggaaatgggggtgaaatatttttttattgttgaatcattttgtgaatgtccccctcaaaaaaagctaatggaatatttggcataaagggcatttggtggttttatttttgtttgagggggattgtcagaaaatcccttttctctcttacgtctaactgactagggaacaattgttgatatgcatagcattggaatacttgtcattatatactcttacaaataacacatgaagcaagaatgaccaatattctgataattggcactggatcacaaaatgtgataaaactttaaatgtataaaactttatcaaataaagttttattttcccctttaaaatgtatttctttagaggcattacttttttaaaaatattggtcaattcctgacataagatgtgaggttcacagttgtattccagtattcaagatagattcctgatttttcaattaggaaaagtaaaatccaaaatgttagcaaaacaaagtgcaatattaaatgtttgctttatagattatattctatggctgtttgtaatttctctttttttccttttttatttggtgctgaatatgtccttgtaggctctgttttaagaaaacaatatgtgggaaatgatttaatttttcctattgctcttccttgtggaaaataaagtgttttgtttttttctgttttgtataaaaaaaaaaaaaaaaaaa

SEQ ID NO: 4920 - DNA, 4576 bp, Homo Sapiens
  NM_020803
cgcgcggggttggtgaggttccgctgagggcggccggggctctgggagcgtggtaacgtggctgcaaccttagcgacatcaggaagaacagggtcgaggatcgagtcacagcaaactgtacaatggcagttgagtgggttttgaaaaacgtctgaattgtagtgtctacatctaccttctgccttctctctaccctttgaaaaaaaataaatggcatgtttgagaagagagctctattaaaagaggaatattgcaaatggcttcagattctatgagtagtaaacaagctaggaatcacattacaaaggggaaaaggcaacaacagcaccagcaaataaagaacagatcctcaattagtgatggtgatggagaagattcctttatttttgaagcaaatgaagcttggaaagattttcatggttctcttcttcgattttatgaaaatggagaactctgtgatgtcacactcaaggttggctcaaagctaatctcttgtcacaagctggtattggcttgtgttattccctactttagagccatgtttctttctgaaatggctgaagccaagcaaacgctgattgagattagagattttgatggtgatgcaatagaagacttggtaaagtttgtctattcttcacggctcactttgactgttgacaatgtccagcctctcttatatgcagcctgtattctgcaggttgaactggtggctagagcttgttgtgaatacatgaagttacattttcatccctccaattgcctggcagtaagagcctttgcagaaagtcacaatcgaatagacttaatggacatggcggatcagtatgcctgtgaccattttactgaagtagtggagtgtgaagactttgtaagtgtatcaccgcagcacctccataagcttttgtcctccagtgatctaaatattgaaaatgaaaagcaggtctataatgctgccatcaagtggcttcttgccaatcctcagcatcattccaaatggttggatgaaacacttgcacaggttcgcctgccattgttgccggttgattttcttatgggtgttgtggcaaaagaacagattgtcaagcaaaatctaaaatgtagagatttactggatgaagcaagaaattaccaccttcacttgagtagcagagcagtacctgactttgaatactccattcggactaccccaaggaagcatactgctggtgtgctgttttgtgtaggtggtcgaggtggatctggtgacccctttcgcagtattgaatgctattctatcaacaaaaacagttggttctttggaccagaaatgaatagtcgaaggcgacatgtgggtgtaatctctgtggaaggtaaagtgtatgcagtaggtggacatgatggaaatgaacatttagggagtatggagatgtttgatcctctcactaataaatggatgatgaaggcatcaatgaacacaaagaggcgaggaattgccttggcttccttaggaggcccaatttatgcaattggagggttagatgacaatacttgcttcaatgatgtggagagatatgacatagaatctgatcagtggagtacagtggcaccaatgaatactccccgtggaggagttggctctgttgctctagtaaaccatgtttatgcagtaggtggcaatgatggaatggcttctttatctagcgtggagagatatgatccacatctggataagtggatagaagttaaagaaatgggtcagcgaagagcaggcaatggagttagcaagcttcatggttgcttatacgtagttggtggttttgatgataattctcctctgagttcagttgagcggtatgacccccgaagcaacaagtgggattatgtggcagcacttactactcccagaggtggagtgggaatcgcaacagtgatgggcaaaatctttgcagttggtggtcataatggcaatgcatacttaaatacagtagaagcgtttgatccagtgctgaataggtgggagcttgttggatctgtgtctcactgcagagctggagcaggagtagctgtgtgttcctgtttaactagccaaattcgagatgtaggtcatggatccaataatgtggttgactgtatgtgatttgagttctggccaccaacaatttagtcatatctgataggtacaaaagaaaaccaagattttgatatgaccacctttcaacactttttactgcaactagagtcttatttaaatgttaactgttgtattgtgactaagtacaacttttggaatgatacctgaagaattattagtaatagagttaaatttgatacttcctgcttttgcaaataatggagtagggaagaagatagtcgaacttaaaatcatacctaccctgaaaaatgcttaaagtagtgccaaaaatcttgaaatctctctctctctctctatttggatgaatcaaaatgtaatttgttgagttttgccttttcttttgcctaaagatgttaacgtcaggcagtgggtttttcctagaggagagattagtacctattcattaacacaaggatacataagagacttgccccttttgaagatcatttctacttggtgctgatgaatttatgcctagctttttttttctaggtggtgatttttcaatttcttttatatttacggaagtagaaaaaatgttctgtctttttgaatgccacttagctgcattttcagaagcttataggctataagaagcctttaatttcagtttgaattgctaggacaccaaaagacctagctgggctaactccatccaaatgattttacagttttattttttcatcttttgcaaaaagtatttgttacataatcaaaaggtgaaccagaggaaatattgaacaaggttttagatctgatgttattctggtgcccaattgagagaccttgagaaagaatgatgcagattacatgactctaatgtgggcagtctgaaaatatctttaactgtcttctttgatcatttgattttggatccaagatttatcatctctctattttgctatttgccaccatcctggtttttctgactgtacagaatcaatctgcatttatttattatcagaaatgaatgcatttttacaaaaacctttttgtagactgtagtttattgattagttcaagcccatcacgaactaattaaacatattgttggtaaaaacagagattgaaattactgtttttatcatatttaaatccctctggtgtatttattgaaatttaattaaaaatatttctacatattgatttgaagccaggatattgatggacctacagatttaacagctcttcaaagttttaactagcattataaaatggcctattcattatatgtatatttttttataaatatttatcaagaacatgaaaatattttattttgtatttgcagtgcagtttggcacctctcttccaggccttcctaagtttttgttagttgtgtcttcgaatttattgtagttcaccgctggtcagtaatctggttcataaggaagctggggcagtgaaaaacacttcgttgatccatccagccctaaagttcattgactaatagctcatgcatcttattaaatgggattctggacttctacaatagtgtggaaagccacatcacaaaaaaagccacatcacaaaaaaaagccagtgcctattgagtatatcaaaccaaaaaagaaaaaaaaaagttttaagaggggtcaggctggcagataaaagtctcttatgaagcagatataaatccagtaagctatttttttctacctatgggcaagttcataagtcattgctggatctgaaccagtgttcttttgtgtaagtacaaccatatttcagtcagtccagaggcagttaaccctgtagcacttactagactggtgacaactggctggatgtggagaataagtgtcaaaacctggcttcaatgtctatttcttatgtctaatggagttcttatattacagtgtttgtttagctatggttactaatatgtttgttatatttattttcggggagaggatcttgttattgtttcctgagattatttaaaatgttttttctttgatgtatttctgtctttcttatatgtaaggagttataagggttattatattttcatttctggtttttactatacaatggttatctaacatactaagttggtaccctacctacccgtaaaatatgaaatactcagaagtaaagtgtgtgggcaatcagaagcatagccttgaaggacctgacagcagtatgaaaagataaataggccaggcatggtggctcacgcctgtgatcccagcactttgggaggccgaggtgggtggaccacctgagatcaggtgttcaagaccagcctgaccaacatggtgaaaccctgtctctactaaaagtacaaaaattagccaggcgtggtggcgcatacctgtaattccagctactcaggaggctgaggcaggagaattgcttgaacccaggaggtggaggttgcaatgagccgaggttgagccatcgcactccagcggtgaaacaagagtgaaactccatctc

SEQ ID NO: 4921 - DNA, 5325 bp, Homo Sapiens
  NM_020804
atccttcccccctctccgcctcagctctgaccttcctccttcccgcagccccggcgagatcccagagcgacgcggtggcggcggcagcgccagccccctcctcccccgggaagtcggccgggcttgaggccgggccccagacgtcccgcttcgccccgagtcgccgccgatggtccccggagctcctgcccccagtgcatgagcagccgagcctgctaaccgcagctccgcacttgtccatccccctgcggctacaccatgtccagctcctacgatgaggcctcactggcgccagaggagaccaccgacagcttctgggaggtggggaactacaagcggaccgtgaagcgcatcgatgacggccaccgtctatgcaacgacctgatgaactgcgtgcaggagcgcgccaagatcgagaaggcgtacgggcagcagctcaccgactgggccaagcgttggcgccagctcatcgagaaaggcccacagtatggcagcctggagcgggcctggggtgccataatgacagaggcagacaaggtgagcgagctgcaccaggaggtgaagaacaatctgctgaatgaggacctggagaaggtgaagaactggcagaaggacgcctatcacaagcagatcatgggtggcttcaaggagacgaaggaggctgaagatggcttccgcaaggcccagaagccttgggccaagaagatgaaggagctggaggcagccaagaaggcctaccatttggcttgcaaagaggaaaagctggccatgacacgggagatgaacagcaagacggagcaatcggtcacacctgagcagcaaaagaagctgcaggacaaagtggacaagtgcaagcaggatgtgcagaagacacaggagaagtatgagaaagtgctggaagatgtgggcaagaccacaccccagtacatggagaacatggagcaggtgtttgagcaatgccagcaatttgaggaaaagcggctggtcttcctcaaggaggtgctgctggacatcaaacggcacctcaacctggctgagaacagcagctacatccatgtgtaccgtgagctggagcaggccatccggggggctgatgcccaggaagacctcagatggttccgcagcaccagtggccccggcatgcccatgaactggccccagtttgaggagtggaacccagaccttcctcacaccaccaccaagaaggagaaacagcctaagaaggcagagggagtggcgctgaccaatgccactggggcggtagagtccacatcccaggctggggaccgcggcagtgttagcagctacgacagaggccagccctacgccaccgagtggtcagacgacgagagtgggaacccctttgggggcagtgagaccaacgggggcgccaacccctttgaggacgactccaagggagtgcgcgtgcgggcactctacgactatgacggccaggagcaggacgagctcagctttaaggccggagacgaactcaccaagctgggcgaggaggatgagcagggctggtgccgtgggcggctggacagcgggcagctgggcctctaccctgccaactacgtggaggctatctagaggccccctccctccatactcccgtcactcctccccactgccgcccctcccctcccactctcgtctccttcccctcgccatagagttccagacatattttccgatcaagcttttatttttttaaaagtcaaaacagaacaaaacaaagtatgcagagacagagcatttgcagggccacctggaggctggggtgctggggcttggggtggccccagggtaggtaacagtcttaggacttagcccaacatcacaacatctgctcttcgggttccaccaaagagtctcctgagccctgagggatggatgtctcctgacccttccaccccgcctcactccctccgtcccactccactccaggctgccggcacctgccccattccctggcctggtttcctaacctcttcttcctcccctgccctgcttcccttcctccaccaccctgctctcaaaggcctcctctccagacccctggaagggaggcttccccatctttagttttccactctgccccggggagcacccttctactcctagccacgtcccttgggaccggtgggactggaggaggaacggtcaccctcctcccccatggaggtttccaggggtcccccagacatgaaagaggggtgagctggaggaagtcatggtgtcactggggtacaggagggtgaatgaagggcatgcaggccctcagcccgggctgtgccagccctcccagccccaggcccatctgagggaccaagacgctgttacgcaggcccttctttccagctatcagcactttcagcatcggctcttcagcagatccaaaccccctcagcaacttgcagaggacctgtcccctctcaaaagtcccctggcctagggtggggacccccaaacctacggcaaagccagcaacagtagcagcctgctcccatttgctggggaggagatcatcttgttcccctggccccccactctccctccatgtccatccaaaaaccataaaatcactgggttccacatcagcctccatgaggccaagccttgtacctgcaaggctcttggcctaaccattcctctgtcctcttctctggcctgcctggggagcccgtgaaggccgcacgggtgcctccagcctgagacatcaggggagagcctgcagctgagttcagcagaaaggaggaatcctggccctcaggaagaagatagtcacatgtttttcttccttgtccccacggcccccagaacaacattctccctgctggcagcccttccatgtctccaaacctgggtcagagtgaaaggacctttgggggtgggtgggagcaaagggcccacctgctggttggtgaaagcagtggtgccggagtgctaggtaccgcacgagagggtgcgggggcttgggaagcagaccagggttggacaaaaccccatgagggcggggagctggaagaaaagtctcttggggacctctggggcaaggagctgagaagtcctgcagcaccaggtgagacttgcttacagtggatgccacttctaggcctctggaccgcagatgccctcctccctcctgcacacctggcctcctgggcctccaggtaaagagagagagccagcccagccctgtttcccctcagtcctcctttgctcctgctgcttctcccaacagcccactgttaggaggtagtagaccccagcctcaaggctctgaccttcttcatgtgggcacagagggtcctgacactctggcagggcctgagctggggcaggcctccctcagggccaggggcgatggcaccccggggacaggcagacctccttcctgccgtcagcacccccttccttatcactgtctggtctccgagcttcggctgcagcctgaggtgtgtcctgggctcctcagagcctgaagcaagcttttggaagcctgcagtcctcccagctccagtgcagaagcctctctctccagcctttccccaggcaggagttggggttgggggcctctgtccctcatcgcttaccttggaaaggtgggaagctggcaatctgcaccttggggcctgggctccccctctctgtgccagcggcttcccagcacctgggaggggctgcagccccagctggactccagcctgtccctcttagcactctagctgcccactccagggcagggactcgaaaccccctccgtcctgagcagccacctccagggccctgtttgggaccactctctcagtccccaggtcctcagggccccagagcgggagggtctcctacctggaagtccccctgagctccagggcccagccctacctgccagtgctggtgtcagggcactcaacaccgagtgtgggggccacgccccttgccatgcccacggcctcctcctgtagctcctgcctgcacccacgatgctgcacgggcccgccctggtggggctcggcgagtaatgtgttttgtccccagttaaccaccattctgcggcctggttctgcaaggaaccagggctgccccaccgcccgccgtctgccgccctaggcttcctgactccattagttccgacacttgtgaaactccgagaagtgctgtggtctcagcaatgcacctgttttgtacatgattgtgtaatttaaaggtatataaatacaaatatatatatatatcagttgtgattgtatgactgtggataaaatccagaactgtgtcaacctggctgcgcattgtcatcttgagtctgtgcaccttcagtcctgggggtttctgagccctctgagagctatttgtggttgggatgcaggggggtaggggtggtgcccgagcaggactgggtgctgtcctggcccaccatccacagactaggccactgagagccggtcccttcgccctgcgggggcctgggtcttgtctggactggggagggtgatactggaggctcctggagctctggcccattcaggttccgggtgcctggtgacaggccctgaccaggagagctggggcattcagggttccacattcatggatcaagagtgaatgaggtcctcaaataggttttgctttttaaagcagaattctaaaagtgactgctgaggcccacggttcctggctgtccacagtgccaagctccctgtgcggtgatgttgggctgtgccatgccttcctgcgtctcgcctggctctgaatgcatttctgtgtgggacccgtgggagggctccttggggagaatttctcaggggcatgggcaggaccggagctctgggttcttggctgttctgccagccccaagcccagcccttgctctagctccctgactccccctgcatccagccccaggggatctcttccggggtatcgcagaagtcccagggccggtcccagttccgctgtcagctcactgtgttcccaccctcacctgggcctcagcttccccagtctggtgagatgtctctctgagggtcctctggccctggcagcctggcagggccgtcacacaagcccattactcggggcaaatatacccctgtcccttccctgacaccccttgcccccaacctcagggtgtgccaggcagggagaaaggttgagatggagattgaatctatttgccaccccatcttccttactcctcctgaatctatttgccaccccatcttccttactcctccaaacttacctctatgtgaagccctgcttttagccaaacagagaaatcttcaaataaagacaaaagattgttgtattgtctta

SEQ ID NO: 4922 - DNA, 4220 bp, Homo Sapiens
  NM_020807
cacagcggacctacaggcgctcagagaagcccaccttccccctctctgtcccgagaaggcttagagtggtacctgcttgctcaagcaacctgctgcctccacccagagcagccgctcctctcctccctcccttccggaagatgctgaggatgacagcttttagcctgactcttacatttctttggcagagcagttagaggccagactgtcctgtgaaggcttctccttccttcttcctctgctcaggagaaaacttacaaacttttaaatgtaagaggcagatgagctgggaacctggaagtgggttgcatctgactctgaaagttcctccctctcgctggcattacctcatgctgccacaaagtgaacggatcactggggaaggcagagtctccccggcactgctgggaccctcccttgaagagcccccatgtcctgtaggcagagccttgtagtctgtccgcttggttactgactcgggctgtctgaccagcccctcttctgtgccttgtctgaggtccttgtccatctctgtgattgggcagcttctctctctggattgggtcacgtgaagcgggaaactgaagccattactctccaaaccctgtttcatcttcccaagcatgtcggaaagctggcaacagccgccacagacgcagccgcagcagccacagccaccgcagcctcagcaccatgcagagccaccgccagccctggcagagcacacgctgcctccgggcacggcggagaaccccctgggctgtgctgtctatggcatcctcctgcagccagaccccggcctgcagcccccacaacacgcacccctgcaggcagcaggagagccaggccccaaatgtggcgtgtgtggtcacgacctggcgcacctgtccagtccgcatgagcaccagtgtctggcgggccatgaccgctcattccagtgcacacagtgtctcaagatcttccaccaggccactgacctgctggagcaccagtgcgtgcaggctgagcagaagcccttcgtctgtggggtctgcaagatgggcttctcactactcacctcactggcacagcaccacagctcccacagtggcctggtgaagtgttccatctgtgaaaagacctacaagccagctgaggcagcggagccagccaccacagccgccccgtcgcttcccgcagcacccgcgccttccactgtcacccctgctgaacaggccgacaagccctacagctgccccatctgccaaaagcccttcaagcacctgtcggagctctctcggcatgagcggatccacaccggtgagaagccctacaagtgcacgctgtgtgacaaaagcttcagccagtcgtcgcacctggtgcaccacaagcgcacgcacagctccgagcggccctacaagtgcgcagtctgcgagaagaccttcaagcaccgctctcacctggtgcgccacatgtacgcgcactcgggcgagcaccacctgttccgctgcaacgtgtgcgagttgcatttcaaggagtcgtcggagctgctgcagcacccgtgcacgccaagtggggagcggcccttccgctgcggcgagtgccagaaggccttcaagcggccctcggacctgcggcagcatgagcgcacacacagcgccgagcggcccttcaagtgcgacctgtgccccatgggcttcaagcagcagtacgcactgatgcgccaccggcgcacacacaagaccgaggagcccttcaaatgcggcctatgtgagaagggctttgggcagcccagccacctgctctaccaccagcacgtgcacaccctcgagactctcttcaagtgccccgtgtgccagaaaggctttgaccaatctgccgagctgctgcggcacaagtgcctgcccggcgcggccgagcggcccttcaagtgccctgtgtgcaacaaggcctacaagcgcgcgtcggccctgcagaagcaccagctggcccactgtgcggcggcagagaagcccctgcgctgcacgctttgcgaacgccgcttcttctcctcttccgagttcgtgcagcaccgctgcgatccggcccgcgagaagccactcaagtgcccagactgcgagaaacgcttcaagtacgcgtcagacctgcagcggcaccggcgggtacacacaggcgagaaaccctacaagtgccccaactgcgacaaggccttcaagcagcgggagcatctcaacaagcaccagggcgtgcacgcccgcgagcagcagttcaagtgtgtatggtgcggggagcgcttcctagacgtggccttgttgcaggagcacagcgcgcagcacagtgccgccgccgcggcagcggagggcgcctaccaggtagccgcctgcctgccctgactctgcggctgtggcccctgccagcctgacctgagtcggcgccgtgggcccagcaggcctcgcgcagcctagctcctcacagctgccttgcaccaagggccccacccagctcggtgttctgagacctcgggagtgaggacgcaggggtatgaggcagggagagggtgtgccgctcgtactcctggcaccagcgggcagtgcgggcggccagattgctgtggcccatccggattccacaaacctctttcccatgacaagattcactttcttgagagccatcagcaccccccttatttccggggcactggagccaggctggaagtcaagtggcttctccctgccctaaggagggtgtgatgccagcccagccttcccatatctttcaagctagcagccacataggttaggaaagcggaggctcatggtggggctggggccccagaggtgggctaggtgtaaggcatcagttgccgtgtgggggagaaggccagctttaagacgtaggcctggggactgggagggcagagggtgagtcacagccctctccgtctgctctagccaggggcgacgtgtccccaggtttctggcaggggagatgtgcagggtgggtcttggggctgggtctgcctggagaccagtgggcccagggggaagggggaagctgagaagttcgtgtgacaccctcagccaagggacagtgccatccttggggacaggaggaaaagcagcctgtctctgctaagggcaaatcctccggttttggaagcgcccctcccacctttgtagtgcagttcctaggtgtggtggggaatgtgccgtgctctcagcagacagaactgctggtgtgaaaggcagggattgtcagcccacctgaggctgggaggaagcaggaccaggcctaggatctccccagcagatgcaaacaagtgtcctcccctgaattgtgtgaaccaaagcgtcaggggcttggggcacagccccagtcagctcaacccagtcctgcttcagagccaagactaggccagggtggggacccccccagtaccctccctacatcaatgtggctgctggcctggaccccaggggtctggtacagccaagatgttctggacaacatccagctacttcaaaggccagagtgtcctttgggtcctcctagagtccccctaggtctctggctgcccatgaggctcatgaagcagagggtatcccagtcatagggagcagaaagagcaagtgggttaaggaagcctgtgggggacctggtggatggagttgaccaacatcgctgggtggctacggccctccttaggaagcccagaaggacctttattattaaaataatcattttgaaccctgctctatcccctgccctcttccagccccacccctccctggtcttgaaagaagactaatcagtgggcacaccaagggccctgaggggcagggagatgccaccatgcttctctgtcaccgtaagaaggctgaccagccacgcccacctcctctgtctgactgagttccttcctgtggccacagggaggggctggtccttccccttggtgctggctctctgtcacaatgcctcaaaagacatggaacccaggcctacaaccgtcccaactgctaattcttttcctttcattttgctttctgaaagcagtttgttatactattcataacattgtagagtttaatttcatgtcattttggatcttatataaaaatgtgaggatttggatttttaaaaagaatgactccattttaggtagccacttttgatgttaatatatagtgagtccaatgtatgctttagaagtaaagacattgaccgtcacagaccactgc

SEQ ID NO: 4923 - DNA, 6501 bp, Homo Sapiens
  NM_020808
gtattctgaggatgttgtttgctttgggctaagaaaagaaaaaatacaactacagacaaagcctttatatctgcaagtattatggcgtggtcggtagcaatgtaattagatttacatcagtcttcctggtgagacttggaggctcttcctcggtagacatgagtgacccaaggcagtcacaagaagagaagcacaagctaggcagagcctcttcaaagttcaaggatccccctagaatcatgcagtcagatgattattttgctcggaaatttaaagccattaatggcaacatgggacccactacttctttaaatgcctcgaattccaatgagactggcggtggtggtccggctaatggtaccccagctgtgcccaagatgggtgtgagagcaagggtgtctgaatggcctcctaaaaaggactgttccaaggagctaacatgcaaggcactgtgggaaagccggtctcagaccagttatgaaagcatcacttctgtcctgcagaatgggcagagtgaccagagtgaaggtcagcaagatgaacagctcgatctggacttcgtggaggccaagtacacaatcggagacatctttgtccattccccccaaagaggacttcaccccataagacagaggagcaatagtgatgtcactatcagtgacattgatgccgaagatgtcttagaccaaaatgcagtcaaccccaacaccggggctgccctgcacagggagtatggaagtacttcatccatcgacaggcaaggcttatctggtgaaaacttttttgctatgctcagagggtaccgagtagaaaattatgaccacaaagcaatggtcccttttgggttccctgaatttttccgctgtgaccctgcaatctctccgagccttcatgcagcagcacagatttctaggggagaatttgtccgcatctcaggattagattatgtggacagtgccctcctgatggggagagacagggacaagcctttcaaacggaggttgaaatcagagtcggtggaaacatctctcttccgaaagcttcgaactgttaaaagtgagcacgaaactttcaagttcacgtctgagctggaggagagccgactggagaggggcattcgcccttggaattgtcagcgatgttttgcacattatgatgtccagagcattttgtttaatatcaacgaagccatggctacgagggctaatgtggggaaaaggaaaaacataaccactggggcatctgcagcatcccagactcagatgcctacgggccagacaggcaactgtgagtcccctttagggagcaaggaggacctcaactccaaagagaacctggatgccgatgagggtgatgggaaaagtaacgacctcgtccttagttgtccttactttagaaatgagactggaggggaaggcgacaggcggattgcgctctctcgagccaactcatcctctttcagttctggggaaagctgctctttcgaatcgtcactcagctctcactgcacaaatgcaggtgtctccgtcttggaagtgcccagagaaaaccagcctattcacagggagaaagtgaagcgctacatcatagaacacattgaccttggggcctattattaccgcaaattcttctatgggaaagagcaccaaaactactttggaatagatgaaaaccttggtccagtagcagtcagcatccggagagagaaggtggaagatgccaaggagaaagaaggatcccagttcaactacagggtggctttcaggacaagtgagcttacaacactgagaggagcaattttagaagatgctataccctctactgctaggcatggtaccgcacgaggactacctctcaaagaagttttggaatacgtcattccagagctgagcattcagtgtttgcgacaggcttccaactcacccaaggtctcagagcagctgctcaagcttgatgaacaagggctgagctttcagcacaagatcgggatcctttattgcaaagcaggccagagcacagaggaagagatgtataacaatgagacggcgggaccagcttttgaagaattccttgatcttctgggccagagagtccgactgaaaggatttagtaaatatcgagctcagctagacaataagactgattccacgggcacgcactctctctataccacatacaaagactacgaactcatgttccacgtgtcaaccctgcttccctacatgcccaacaacagacaacagctactgaggaaaaggcacataggaaatgacatcgtcaccatcgtcttccaggagcctggggcacttccttttactccaaaaagcatccggtctcactttcagcatgtctttgtcatagtcaaagtgcataatccatgtaccgaaaatgtgtgttatagtgttggagtttccagatcaaaagatgtgccaccatttggcccaccgattcccaaaggtgtaacttttccaaagtcagccgtgttccgggacttccttttagccaaagtaatcaatgcagaaaatgcagcccataaatcagaaaagtttcgagcaatggccactcgaacgaggcaggagtacttgaaagatctggcggagaactttgtcacaaccgccaccgtggatacctctgtgaagttcagcttcattacgctgggtgcgaagaaaaaggagaaggtaaagccaaggaaggatgcccacttgtttagcattggggccatcatgtggcacgtgatagcccgggacttcggccagtctgctgacattgaatgtcttctcgggatctccaatgagttcatcatgttgattgaaaaggattccaagaatgttgtattcaactgttcctgcagggatgtgattgggtggacatctggattagtgagtatcaaagtgttttacgaaagaggagaatgtgtcctcctgtcctcggtagacaactgtgctgaagacatcagggaaattgttcagcgattagtaatagtgacgagaggctgcgagactgtggaaatgaccctgaggaggaacgggctgggccagcttggcttccatgtgaattttgaaggaattgtcgcagatgtggaaccttttggctttgcctggaaggctggccttcgccaagggagccgcctcgtggagatctgcaaagtagccgtggccactctgacccacgagcagatgatcgacctgctccgtacttctgtgactgtgaaggtggtcatcatccagccccatgatgacggctcgccccgaagagggtgttcagagctctgccggatccctatggtggaatataaactcgacagcgagggcaccccctgcgagtataaaacccccttcaggaggaacaccacgtggcaccgggtgcccactcctgccctgcagcccctctctagagcttcccccatccccggcacgcccgaccggctgccgtgccaacagctgctccagcaggcccaggctgccattcctcgaagcacctccttcgaccggaagctgcccgatggcacgagaagctcacccagcaaccagtcatcctccagcgaccctggacccggcgggagcggaccctggagaccacaagtgggctacgacgggtgccagtcccctctactgctcgaacaccagggctcaggccctttggaatgtgacggagccagggagagggaagacaccatggaagcaagcaggcacccggaaaccaaatggcatggcccaccttccaaagtcctgggttcctataaagaaagagctctgcagaaagatggaagttgcaaagattcccccaataagctttctcacattggggataaaagttgctccagtcactccagcagcaacacgctctccagcaacacctccagcaacagtgacgacaagcactttgggtctggcgacctgatggaccccgaattactggggctgacctacatcaaaggggcctccaccgacagtggcatcgacacggccccctgcatgcctgccaccatcctcggccctgtgcacctggcaggcagcaggtccctgatccacagccgggccgagcagtgggctgatgctgccgacgtctctgggcctgacgacgagccagccaagttatattctgtgcatggctacgcgtccaccatctccgccggcagtgctgcggaaggcagcatgggcgatctcagtgagatatcctctcattccagtggttctcaccattcaggaagcccttcagctcactgttcaaaaagtagtgggtctctggattcatccaaagtctacatcgtgtctcacagcagcggacaacaggttcccgggtccatgtccaagccctaccacagacaaggggcagtgaacaaatatgtcatcggctggaagaaatcggagggcagcccaccgcccgaggagcctgaagtgactgaatgtcccgggatgtatagtgagatggatgtcatgtccacagcaactcagcatcagacagtggtgggagatgctgttgcagagactcaacatgttctgtctaaagaagattttctgaaattgatgcttcctgacagccccttagtggaggaggggcgaagaaagttttcgttctatgggaacctgtctccaaggaggtcgctttaccgcacgctgtctgacgagagcatctgcagcaacaggagggggtcctcctttggcagttcccggagttccgtgcttgaccaggccctgcccaacgacattctgttcagcaccaccccaccctaccacagcacgctgcctccgcgggcccaccccgcacccagcatggggagcctgagaaatgagttctggttctccgatgggtccttatcagataagtccaagtgcgcagatcctggcctgatgcccctcccggacacagccacagggttagattggacccacctcgtggatgctgcacgggcatttgaaggtcttgactcagatgaagaactggggctgctctgtcaccacacgtcctatctagaccagagggtggcatccttctgcaccctgacagatatgcagcatgggcaggacctggaaggggcccaagagctgcccttatgtgtagatccaggcagtggcaaagagttcatggacacaactggggagcgttctccatcaccactgaccgggaaagtcaatcagctggaattaattcttcgacaactccagaccgaccttcggaaggaaaaacaagacaaggccgttctccaagcagaagtgcagcacctgagacaggacaacatgagactgcaggaggagtcccagaccgcgacagctcagctgcggaaattcacagaatggtttttcaccaccatcgacaaaaaatcttagccaatccgcacctcatcaagggaccactgggaaatgccccttgtccctttgaagtcacaaacatgtggtttttctgtgtgctttcaaccaatcgtagatgtttttgctgttccattctgtgtagcaccattcaccacagcaggatagggagcctcgactctttctcggtaaccacggcagagagcagcgccgatgtgaagatgaatgaatgtaactcctggtgtgaagatgaatgtaaaccctggcgacagttgagacctttttcttttagactctgctaaaacagtgctctggcttgggcttacctcaagagggaagatagttgagttttatttcctgtatatcaggtgacctggtagagatgtaaagcaatttaccatagtttgggctttagtattgtaaaataaacatgagaacaaataatcagacatatactttaatgttaaaggtgctctatttttttggatgtacagtagttttatttccacagccacattaccatagcaataagaaaggaggcatagtacatagttggaaaagctttgtggggggattaaaaaaaaaaaaaagcactgttgtgtttaacactagttcagatgcagttaccttagagacttatttatttgcaggaacaaatggtgcctgaatattaacagtgttctgattaaaaacaaaaaaaagatacatatgccttgtaaatggctcaccgagtggtcagtagtcacttcaactcttagttcacttttgtatagttgctctgctggaaagaaatgagagtgaatctgcttactcactagaacttccctgtgtgctgtgagccagcggaaccacttgtacaatgccagatttgtttatctttgtacagaagctttgatgaagtgtcttgtatttaacacccttatttaagcttatttaaccttaaattgttaattttataaaatttggtttggcctgcactacgatgagggatggaggtagctgcaggctcagaagagactgagcttgcacagatcagaccgagaagcagggtgagagattctaacgactggatgctgctagtaacacattgtttgtattgctttaccatttttaactgttagatttgagatgaacatacattttgcttttttaataaatgtttaaaagaagtccacataagaaaaaaaaaaaaaaa

SEQ ID NO: 4924 - DNA, 3956 bp, Homo Sapiens
  NM_020811
gctgtgccactgccaccgccgccgccgctgcatcccgcccggtccgagtccgcccgccacgcccgccgagccgctgccgccgccagctctccctggatccatcgggtcccgagtgggattgcccactgggctccaaggacctggaggaagagggcccctggggagggggctctggcctgccgcccacaggctgcttccctggctcctggcgccaggacgtgggcctggactgcaagggatcccccgagggggccgaggcccgggcttggactgtctactactacagcctcctgcagagctgtctgcagcaagctggccttccggagactcaggaccgcggccaggtgccccgcacaggctgtcctggggcggaggtgaccttgtgcgttctgggctcccccagcacctttctgcctgtgctgctggagggtggggtccagagcccgggaaacatgctcctttgcctgtcccctgcttggctgatgaaggtgccagcacccgggcagccgggtgaggcagccctgctagtctccaaggctgtgagcttccaccctgggggcctgacattcctggatgactttgtccccccgcgccgtgccacctactttttggcaggcctgggcctggggcctggccggggccgagaggcagcagaactcgcccgtgacctgacctgccccacaggagcttcggctgagctggcccggctgctggaggaccggctgctgacaaggcagttgctggcccagcagggtggtgtggctgtgccagcaaccctggctttcacctacaagccgccggggctgctgcggggaggggatgccagcctagggctacggctggtggagctgagtggcaaagagggccaggagacgctggtgaaagaggaagtggaggcttttctgcgctccgaggccctgggtgatatcctgcaggtagctgtgaagctcagtggctggcgctggcgggggcggcaggcatggcgtctgcacccgcgggcagagctgggtgcagtggtggacacagtgctggcgctgctggagaagctggaggaggaggagagtgtcctggtggaggctgtgtacccacctgcccagctgccctgctcagatggtccttcacccggccccggcctggccgtgcgaatctgtgctgtggtgtgtcggacacagggtgataggccactgctgagcaaggtggtgtgcggcgtgggccgcggggaccgccctctacggcaccacaactccctgccgaggacgctggaggtggcgctggcccagtgcggcctgggcgaggaggcgcaggtggcggctgtgcggcagcgcgtcaaggcggcggccgaggccgcgctggccgccgtgctggctctggaggccggcctgagtgccgagcagcgcggcgggcgccgggcgcacacggacttcctgggcgtggatttcgcgctgacagcggccggcggcgtgctgaccccagtggccctggagctgaacggcggcctgtgtctggaggcgtgcggcgcgctggaggggctgtgggccgcgccgcggctggggccggcggccgacgaggcggtggcggcgccgctggtggagaccatgcttcggcggtcggcgcgctgcctcatggagggaaaacagctgctggtggtcggcgctggcggcgtcagcaagaagttcgtgtgggaggcggcgcgcgactacgggctccagctgcacctcgtggagtcagaccccaaccactttgcatcccagttggtacagaccttcatccactttgacatgacagagcaccggagggatgaggagaacgcacggctgctggcagagttggtgcgggctcgcggcctcaagctagatggctgcttctcctactgggatgactgcctggtgctcacagccctgctctgccaggagctaggtctgccctgcagctccccagctgccatgcgcctggctaagcagaagagcctcacccagctgcacctgttgcaccaccatggcccaccctggcctgcgccctccctccatgctgtgccctgctgcccactggagagtgaggctgatgtggagagggccgtgcaccaggtacccctgccaggtgtcatgaagctggagttcggggcaggtgcagtgggtgtccggctggtagaggatgcgccacagtgccatgagcacttttcccggattacccgagacttgcagggcgaggccgaccacccaggcattgggctgggctggggcaatgccatgctgctgatggagtttgtggagggcaccgagcacgacgtggacctggtgttgtttggtgggcggttgctggctgcctttgtctccgacaatggccctacgaggctgcctggcttcactgagacggcggcctgcatgcccaccgggctggcaccagagcaggaggcacagatggttcaggcagccttccgctgttgcctgggctgcgggttgctcgatggagtcttcaacgtggagctcaagctgaccggggctgggcctcggcttatcgagatcaacccccgcatgggtggcttctacctgcgtgattggatcctggagctctatggtgttgacctgctgctggctgctgttatggtggcctgtggcttgcgtcctgccctgcccacccgcccacgtgctcgtggccatctggtgggcgtcatgtgccttgtgtcccagcacctgcaggccctgagttccaccgccagccgtgagaccctgcaggccctgcacgaccgtggactgctacgcctcaatctgctggaggaggccctggtgcctggcgagtatgaggagccctactgcagtgtggcctgtgccggacccagccccaccgaggcccgtctccgcctgctgggcctctgccagggcctgggcatcgatgggcccagctaccctgttgcccacttcctgtctcacttcaaatagcactggggtcagggggcagggaagcagtgctgggtggaggcactgtggtgccctctgctccctggagctcttcctgcttctctccccatcaccatgccccagccccagcctggcccgctgcaatgcctaggtctgttccagagcagcagggcaatttagacaccaaggcatcctggactcaagggcctcttgccctcccgaaggccccagtccagcctacagcttccccagcattctagccttggagaaatgacaatggccacacacacacacacacacacacacacacacctctgacgccagctccccaggtgggagtgggcccaaacccagcccctcctgtccacctctccaggtctcactctcttcctgccatctacaagaggagaggacctggctgggccccaagccttggacaaatcctgggaaaacctgagactagaacccttgtcttcctcttacccaaattctaggatagctctgaagcctgctggaaacttggtggcatccaacctgcctcattcggcctgaccggtagaggcaggtggcctgtggacagaagtaatcctctttctgctcaccccaggcagacacaactgcctatgttcccccgatgagaggaaacaggctgagagaagaaaaatgactgctccaggattataccacagtggagagcgggtcacaggacatgatgcagggtccaggtttctgttttgatcaagtcttacatgcccattcagcttctaggcccccctcacctccctgccctcattcacaagtggccctgagacacgtgaacacctccctcctatgcatcacaaaccttctccaccgagctttggtgctttggcctctggcacacctaactagcattggcagaggagagtctacactctcttcctcattcagggaagatgctttaagaaatcctgcctctgtgcagcagaggagctggaggcagctccccaggcatccctccccaaataaaggcttatgtactggtgaaaaaaaaaaaaaaaa

SEQ ID NO: 4925 - DNA, 3996 bp, Homo Sapiens
  NM_020817
gcctcgtgggagtggtggttcgacggtgtcctatgcctgctttccttgcgggcggaggaactacaattcccagcgtgacccggaggcagcccgggcagaagggcggttgctgcagctttggccgaggttcgggctcgaacttggaaaatgctcctggcgcctcagggaaggtccttctcaaagaaaaggatggggctgaatcgctggaaacggttcacaaggaagccgagtcccaagcctacttttggtcctgacagtgtggaacactggataaagagagtggagaaagcctcagagtttgcagtgtcaaatgcattttttactagaaattcagatttacctagaagtccctggggccaaatcacagatttgaaaacatctgagcaaatagaggatcatgatgaaatctatgcagaagctcaggagctggtcaatgactggttagacaccaaacttaagcaagaattagcaagtgaggaagaaggtgatgctaaaaacactgtgtcaagtgtcactattatgccggaagccaatggccatttgaaatatgacaagtttgatgatttatgtggctatttggaggaagaagaggaaagtaccaccgttcaaaaatttatagaccatctgctccataaaaatgtggtagattctgcaatgatggaagatcttggaaggaaggaaaaccaagacaagaagcagcagaaggatcctcgtcttaccatggagatgagacataagcaggtaaaagaaaatcgcttaagacgtgagaaagaactggagtaccagagaatagaaaagaccctgaaaaaatcggccttcttggaggctcagtgtctggtgcaagaagagaagaaaaggaaggctctggaggccaagaaagaggaagaggagattcaaagggagatggtgaagctgcggagggagataattgagaggagacgcactgtgaaagcagcatggaaaatagagaagaaaaggcaagaagagaattctcaaaatagttcagaaaaagtcatgtttcaaagtactcacattcttccagatgaggaaaaaatggtgaaggaaagaaaaaggaaattgaaagaagtattaatccaaactttcaaagaaaatcaacagtgtcaaaaacggtatttcgctgcctggcacaagctgattcttgatcataggattaagctggggaaagctgggaccctgtctgactggaagattcagctgaaggtcctgcgggcctggagagactacacaagattccagaagttggagcgggagactcaagccttggaaaatgatcttagggaagaaaacagaaaacaacaactggccactgagtataaccggaaacaagttctccgacactgctttacagaatggcagcattggcatggcgccgagctcctgaagagagagctggctctcacaaaagaggaaactaggaagaagatggatgcactgctgcaggcagcatcactggggaaactcagtgccaatgggttatcaggcatcagtctacctgaggaggcaacagccatggtgggtccaccagtaaaaaatggacaggagactgctgtgccccctttgtgggaaaagcctcccttgggaagcagtggttgtatgctcagtcctcccctgggaagaacaacaacaggcaacttgcagggttcccttcagaatgtctctctgagtgcacctggcaataagcagcacaagaccctgggtgctgaaccctctcaacagcctggcagcaacgagacactcagaactaccagccagaaagcagaaccgctttgcttgggtcatttccacaaccgccatgtcttccagcaacagctgattgagaagcaaaagaagaaacttcaggaacagcagaaaacaattctcgagctgaagaaaaacctgcagctggcagaggctcagtgggcagcagagcatgccttagcagtcacagaagcacagagccacctgctgtcaaagcccagagaagaggaaccaagaacctgccagatgcttgtgaattcacctgttgcttcccctgggactgaaggcagaagtgactcccgaaattctctttctggactcagaaggaaaccaaagcaattgatgacaccgcatcccatactaaaagctatggaagagagagcaattcaacgagctgaatgtaggcggatcttggcagagaagaagaaaaaacaagaagaagaaaaattggcccagttaaaggcccaagaggaggaacgtcagaaaagggaggcagaagaaaaggaggcacagcttgaaagaaaacgagaagagaagagactgaagaaaatgaaagaacttgagaagcagaagagaattaagaggaaccagcagctggaagcaatagccaaagaacattatgaaagggtcttgctaaggaaaaaaggtctagagccttggaagagattgagaatgcaaagcaaacaaaacatccaggtggcagaagaacattactctttgttcctgcagaggaaatacatgctgacgtggttccagcgtagtcaggaaagtctggctagaaagatggcccaggctgatcaattttattcccaaatactgcttaagagagtcatccagagctggctacagtacgtgattgatctgcaggaagaagtaagaaaattttgtgtacattttcttcaaaagaagattttcagggcctggtttaacatggtcagggaggtgaagatcgattctcagggcaagcatgagattgcagcggagcacagtgacaggaggatcctctggatcacccttcggacatggaagaagtttgtaaaatttatgaaagaggaaagagtaaaagaagaaaggcgacagcaacttcgtaggaaggtagttgaaattcttccagacttccaggtacctggaaggtaccacgagctatatcagcaatcagatacttggtccttgagtaagacaagtctggtgaacgaatgagccagattagtgtaatatttaggacaggaagctcgactagtctgtatgtgtgttatctccacccacccacacacatacatacatacacctggtttattctctacgagctacttcttagatcaaaggaattattttgagaatttttattcccttctttgacttttcctggattgctagtcattcactatagcatttatcacagtgggatcatccaaaggaacattctagagatcgtctgttcaaatatatcctatatatttttagcatagtaaactttaaaaaggacaagtgtttgcctgactgagcctgtgaagaaaatgtgtccgtatagcacgacaggagttgctgatgtgaccttaatgaaacagaaataaacaggggtgagtgctcggaaaggaagggcgggccaaggcactcagccttctagtgcagtagcatcagtgacacgcaccccaccagacctcgtccactttcaccacccctgaaggcagaccatgtatgaaaaggttctctacacagctgctgcagaggacagcagcttatcctgatttcagagaaactgaggcaccagagatgcttctcttccgtgcaccttgataagcatgaaggacattccaaaaggtaataactctatcatgacagtccagcaattcattaaattatctgttcatgctcccacctgcaactgctgaataatacactcagtttgtcttctagtactcagctcagtttgatctagatattgagatacctatcttgaattcaaagaatgttttcatctttaagatgctataaagactgataaaatgctctcttctatgaattgtgttagagaattacctgctagaaaaataatttttcattataaaatacacatttattatataacaaattcaagtagtccataaatgcatatggtaaaatgagaaagtcctgtgcagtcctgagatgattactcttatttggtgtgctgaaaatttgagttgacaaaataaaattctgtggttttttaagtgaaaaaaaaaaaaaaaaaaaaaa

SEQ ID NO: 4926 - DNA, 5610 bp, Homo Sapiens
  NM_020819
ggtgagagaggccgggggcggggccgtgcggccggggacctgttgatcgcaggtatagccggctggcccgggctccctcgggactggggcgactgcgcatgctcgctggccgcgctgggccagtagccgagccgcggtgacgaaccggctccgcggttgcggtgtttgcggttgctgtgatggcgatgtgagggggcccggggcgggatggtgctgacccgggtcgggccgtcttcttgcagctggacaacgagctcctccgttcgacaggcgggggaagaggccgagccgggcgagagggggaacggtgtatttttaacaacgggaatcagtaactggaagtacaagattggttatttaataatgttaaaaatgaggctttgaaaagcagaggtgctgttatcagaatagtcttctgggtataaattaaaaatgactgaagttcaagcaatggtagaattctctgtggagctaaacaagttctacaatgtggatttgtttcagagaggtaaaacatttcaaattttgtacaaaaatgaagaggttgttttaaatgatgttatgatcttcaaagtaaaaatgctattggatgaaagaaagattgaagaaacccttgaggaaatgaattttctattatccttggatctacacttcacagatggagattattcggcagatgatctgaatgccttgcaactaataagtagccgaacattgaagctgcactttagcccccatagaggccttcatcatcatgttaatgttatgtttgattacttccacctttctgttgtgtctgttacagttcatgcatcattggttgcactacaccagccactaataagctttcctcgccctgtgaagacaacttggttaaatagaaatgcaccagcacaaaacaaagattccgtgattcctactcttgaaagtgtggtctttggtattaactacacaaaacagttatcaccagatggttgtagcttcatcattgcagactccttcctacatcatgcgtatcgttttcattatacactttgtgccactttgctgctagccttcaagggattgcacagctacttcattacagtaacagaagagattccttcttgtcagaaactagaactggccaaggccaacatgcagctcctatatgagcgtcttctcagaagaaaacagctacgaacacagaaagacaaccatctagaggaaatggatgtagaagctcgacttactgaactatgtgaagaagttaagaaaatagagaatcctgatgaactggcagaacttataaatatgaatcttgcgcaactttgctcacttttgatggctttatggggacagtttctggaagttataacgctacacgaagaactaagaatattattagcacaagagcaccatactttgagggtacgcagattttctgaggcattcttttgttttgagcatccaagagaagctgccattgcataccaggaacttcatgctcagagtcatctacagatgtgcaccgctatcaaaaatacttccttctgcagttctcttccacccttacctattgaatgtagtgaattagatggagatctcaattcattacctataatctttgaagataggtatttagattcagttactgaaggtaaacttgatatctcccaggacgatagtgaaattacacaaatggaacacaatctggcatccagaaggtcatcagacgattgccatgatcatcaaacaaccccatctttgggagttagaacaattgaaataaagcccagtaataaagatcctttcagtggagagaatataactgtcaaactaggaccttggacagagcttcgacaagaggaaatacttgtggataatttactacccaactttgagtccttagaatctaatggtaaatctaaatctatagaaataacatttgaaaaggaagctttgcaagaagcaaagtgtctttctattggagaatcattaactaaattacgaagtaatctacctgccccttctacaaaagaatatcatgttgtagtaagtggagatacaattaagttaccagatattagtgccacatatgcctcatctagattttcagattcaggtgttgaaagtgaaccgagttcttttgcgacacatccaaacactgatttagtctttgaaactgtgcaagggcaaggtccttgcaatagtgaaagattatttcctcagcttttgatgaaacctgattataatgtaaaattttcattaggaaatcattgtactgagagtacaagtgctataagtgaaatacagtcatctttgacatccataaactctctaccctccgatgatgaactgtcacctgatgaaaattctaagaaatctgttgtacctgaatgccatctaaatgatagcaaaactgtattaaatctaggaacgactgatttgccaaaatgtgatgatactaaaaagtcaagtatcactttgcaacagcagagtgttgtattttcagggaacttggacaatgaaactgtagcaatacattccttaaattcaagcattaaagaccctttacaatttgttttttcagatgaagagacttccagtgatgtgaaaagtagttgcagctccaaacctaacttggatactatgtgtaaaggcttccagagtcctgataaatctaataactctacagggacagcaattacattaaattcaaaactgatttgtttaggcactccttgtgtcatttcaggttccatttctagtaatacagatgttagtgaagatagaactatgaaaaaaaatagtgatgtattaaatctcacacagatgtattcagaaatccctacagttgaaagtgaaactcatctgggtacaagtgatcctttttcagccagtactgatatagtaaagcaagggcttgtggaaaattattttggttctcaaagcagtacggatatttctgacacatgtgctgttagctacagcaatgcacttagccctcagaaggaaacttctgaaaaagaaattagtaatcttcagcaggaacaggataaagaggatgaggaggaagagcaggatcaacaaatggttcaaaatgggtactatgaagaaacagattattcagctttggatggaacaataaatgctcactatacaagcagagatgaactaatggaagaaagacttacaaaatctgaaaaaataaacagtgactatctgagagatggtataaacatgcctactgtctgtacttctggttgtttgtccttcccgtctgcaccacgagagtctccttgtaatgttaaatattcttccaaaagtaaatttgatgccattacaaagcagccaagcagtacttcttacaacttcacttcttcgatttcctggtatgaaagttcaccaaaacctcaaatacaagccttccttcaggcaaaagaagaactgaagctactaaaacttcctgggttcatgtacagtgaagttcctctgctggcatcctcagtaccttattttagtgtagaagaagaggatggttctgaagatggagtacatctgattgtctgtgtgcacggtttagatggaaacagtgcagatctccgattagtaaaaacttacattgaacttggattgcctgggggaagaattgattttcttatgtctgagagaaatcagaatgatacttttgctgattttgatagcatgactgatcgtcttttggatgagataatacagtatattcagatatatagtctaacagtctcaaaaataagctttattggacattcgttgggcaatttaataattcgttcagtgcttacaaggccaaggtttaaatattacctcaacaaacttcatacctttctgtctctttctggacctcaccttggtacactctacaacagcagtgctcttgttaatacaggtctctggtttatgcagaaatggaaaaaatcaggttcgcttttgcagctgacatgtcgagatcactcagaccctcgccaaacttttttatataagcttagtaacaaagcagggcttcattatttcaaaaatgttgtgctagtgggatccctacaggatcgctatgttccttatcactctgcccgcattgaaatgtgtaaaacagctttaaaggacaaacagtcaggacagatctattcagaaatgatccacaacttgcttcgacccgttctgcaaagcaaggactgtaatttggttcgctataatgtcatcaatgcattgcccaatacagctgattcactcattgggagagctgcacatatagctgttcttgattcggaaatatttttagagaaattctttctggttgctgccctcaaatatttccaatagtataaaagcattgttagcgactggacaattacctcattcaacaatgtttcaaataatgtattatattaaaatgtagatgctgataagttctaagaaatatttatacctttttatatggaagataatttatatcatccatgtttagtgctttttaaacatcaactttactttctaggtaatgtggctgtgcaatatttttttaattttatctttttacttttctattactttttcatatattttgctacctaagtatttcagtgaaactttaagcccatacctgtgtctgattgtttattattggctttccacaattcttacatcagactacattatattagagaccattattgctagaatagcatgggatttaaaattttctaatactgggggtattatttagttaattataaatttttcttttcacattttactgtgttttaactggaaataaaattatggctgctacaatatattttttgaaatcaacttctgtagttctaaaatacaactttatcatacaatcaaaccaggtagttcatataaaacagtgtaatacaagttttctataaagtcattactgttgcttaaacatatttcatgcctattaaaatatattttctactggtgatttcaacattatttctcatactgacttttattactggaaatgttcctgtacatgttggcagcagataaagatttttgaatgtttgaatgccctctgccttgatttggttggaatttttgctaaattggtaatgttgcttgaactttatgactacattttcttttaacttttttcatggacttccttatatgtacataataattaaatgttgaaatttatgaaatacttttatgaatttagataatttttaaatattgttaaaatttattgaactaaaaagtaatgtaaataaaataattcatgttaaagatggaacaaaataattaactttacatgtttggtgatacagatgcaaatgtttttgatatatggagatgttgagtcttttgactttactaaaggtgctgaatagcattaaattcactattttccttttctgttttacttgtgaaaataaaaatgcactaaggttgggtagaagttctgtttgcactcactaattgtgacagacagaggtttttgtaagtatttattgtacaattgatgcatgtttatttttagcgttgttattgcctctggtgttaataaatgaacaaatggctatctggaggaacagctacaaaaaaaaaaaaaaaaaa

SEQ ID NO: 4927 - DNA, 5397 bp, Homo Sapiens
  NM_020823
cgcggaggcggatgggcgcggctccctcccccactcaggcctcttcacggggcggggggccgggtcccccagcccccacccgcgccgtgtccagctcctcgcgtgctcgcggcggagccctgagcgcactgggtccgagtcctgcgcgccccctcaccacctcccccgcacctgctcctcctcctcggtcccgcccagcgcgccagcagcccgatccccagtgctgggagaagagagggggcgcaggcggcgacacaaagggtggagcggcgggaccgggacccgggaggctgcgcggcatggacgccgagtaccctgcctttgagcccccgctctgcagcgagctcaagcacctgtgccggcggctgcgggaagcgtaccgcgagctcaaggaggacctcacgcccttcaaggatgaccgctactacaggctggcgcccatgcggctctacacgctctccaagcgccactttgtcctcgtgtttgtcgtcttcttcatctgctttggcctgaccatcttcgttgggatcagaggacctaaagtgatccagacttctgcggctaatttttcactaaataatagcaaaaagctaaagccaattcaaatactttcaaatccactgtctacatacaatcagcaactatggctgacatgtgttgttgagttggatcaatcaaaagaaacttctattaagacaagctttcccatgactgttaaagtcgatggtgtagctcaagatggaaccacgatgtacattcataacaaagttcacaaccggacaaggaccctcacatgtgcagggaaatgtgcggagattattgtggctcaccttggctacctgaactacactcagtatacagtgatagtgggatttgaacacctgaagctccccatcaagggaatgaacttcacatggaagacttataaccctgccttctcccggttggaaatctggttccggtttttctttgtggtgctcaccttcatcgtcacttgcctgtttgcgcattccctccggaaattttccatgagagactggggcatcgagcagaagtggatgtctgttctcctgcctctgctgctactttacaatgatccgttcttccccctctccttcctggtcaacagctggctcccagggatgctggatgacctctttcagtccatgttcctgtgcgccctgctgctcttctggctgtgcgtgtaccacgggattcgtgtccagggagaaagaaagtgtttaactttctatttgcctaaattcttcattgttggactattgtggttggcttctgttacgctaggaatatggcaaacagttaacgaattacatgatccaatgtaccagtatcgagttgataccggaaattttcagggaatgaaggtcttcttcatggtggtggcagcggtgtacattctgtacctcttgttcttgatagtgcgggcgtgttccgagctacgtcacatgccttatgtggatctcaggttgaaatttttgactgcattgactttcgtagtacttgtcattagcatcgccatcctttatttgagatttggggcgcaagtactacaagacaattttgtagcagagctgtcaactcactaccagaattcagccgagttcttatctttctatggcctgttgaacttctatctctacaccttggcctttgtatattctccatcgaagaatgccctctatgagtcccagctgaaagacaatcctgccttctccatgctgaatgactcggatgatgatgtgatttatgggagtgactatgaggaaatgccgctgcagaacggccaggccatccgggccaagtacaaggaggagtcagatagtgactgagccccggccagcccagcgaggcgacaagatgcctggatgctttccccggtgaccgtctgctgaccttcccctgttatattcagatttttcttacaagcagagatttcctgttcatttgtttacatatttttttaaaggaaaaccaaaactgagggtaaatttaaatgtttagccaaatttattgtcatggtggctacgagaagaggcattgataacaagtttcaacagccaaatccttttttacagagatttcagatgagcgtgttttcagtgatgaggaaatttcacgtttttagtacagtgaattatgtacttttttttcctgtaatcattcactgattccaagttcacgggcagcctgtgactaggtcctcagcgtgacagcatcaccctctttcttcccttttccatggtactgttttgtgaccctttaaactcaaagggaagccttatctgtggctgcttcagggcagtccttcctcgttgagtggccagtgccctgggtaaccaggtggctgaagtgattggtcagttatgtggactgcgttttgtgcagtgtgtgagttatgactcatcgggaatgggagatgctggggttccaacccttcacgtcaccaaaggggaagtaatagtgtggagttctgaggagggtttgataagttgaataaggaaaggctaagataatttacaggttaccaactcatgtggggaaggtcttactgccatggtgcttttcaggggcctgtgtgtacacacatgattaaatggatttgcctgtgggaggtatgggcaggagaggaacccttaccattccagtaaatagcagtttctgcaattctgttgaatatgaaatgccatagagctttatttatttatgtaagtaaaagctaaatgaggggccaggtgcagtggctcacatctgtaatctcaacactttgggaggccaaggtgggaggatcacttgagcccaggagtttgagaccagcctgggcaacacagggagaccccgtctctataaaacatttagaaagttggctgggcatgctggggcatgcccatagtcccagctactcaggaggctgaggtgggaggattgcttgagccctggaggtcaaggctgcagtgagccatgattgcaccactgcactccagcctgggtgtcagagcgagaacccgtgtcataaataaataaagctacatgaaagattgatagaatattttagattatttattggccaaaagtttttaaaactcatatttggaagcaaaatgaaaagcaagtaaaatgttttaaatggttcatggaaaacgtatttgggtagaaggcaactcgtgcttccggaaggggttccctgtcctccatgtgtccacatggcggtcaggtagggacgacctgttctgtaaagtccttggcactgctgaatctgtggcatcatagaaggccctggagcttccccgttcctttcagtcagggactccatatagagtctcatgtggacgtctcccgtgctttcctcttgacctctacagtcacacttctgttaacatctggtaactgtgggcaacctgactgatgccgtcttggcaattgaggtccagaagatgatagttccgcaacgcaagcagtacctactttttttcttcatctatgcattgactctcagattaccatgcagagcttcacgttatcatccacgttaagtagtgctaggtaggaccttagagatgttcatgagaaactatttgttatgactttcctttgtatctttccttttaatttaaactttaatgataatgtacttttaatatggattctattcacatttgttttaaaaaccttgtaaatatgaatgtttaagacaacttactgcaagggtaattcaagtttacatgatttttaaatttgcaatgatgttttttttattctgtgtattgaaaaaaattttctgttaccaaattttacaacttctaataagactactataactttatgtaaactgatgaagatgtgctgattaacatattctgtgatatggtttacaacttttaatcataattgtccatgattttggaatgctgttatttatcagtaaatgtaaaatatttgaggcatttagccatacacacactagaactttttaaaactttgtcctatagtgtaattataaactgatgactattatcttcatacattgagtcttcatgcatcaatgaaatgaaaaatataggattatttatttactttttgtaactaagtgggaaataagaaaaaaagttagaaagtacttaaggggaaaatcgttcttactaagtcatgtattttcaacttgtcttccctggtatatcataaataccgacatattacataccccatgtaaaattttgcttaaactctctagcacttggcatgtagaatatgtaccataggtatcaggttaaaacactaaagtctgccagaaacttttgacagtagcaagaaaattgttgaagaaaaaataaattatttactgagggtagttatgttaaagttttgcgaacttaaagggctgactttagttccttcatggtaatggcttgagtaacatcatctttgggattttttaaatactggtccagtctaggagaacctggaagatgaccagaggtatttcagtttccctagggagagcttcgttatccatgtggatgataagtctgcttgatttattattaaatcattatagcagtgaagtggtgccattttctctctcttaagccccatttgaaaggctagagaaggggatatatatactatgttcaaggtttgtaaggttgttaatgtacataattgcagattgcaataaaagcttagatacattttgtaaacccaacccactaaatgagcaggttacaagacaaatgtcaccagcctcaagtattttatgaactatttactgagggtagttatgttaaatagattataatgtggtaaattatttcctgaatcctttatcacaggaaaaacacagaccctcataaaagggataattaaaacggatgtgtctgaacatttagtgaagatgagacttaaaacatgaaagtgtatttgtgtattttgagggttttagaaaccggttgccttagaggttagacttttgaagaaaaaaaaaaaaagatacagatcttttcccctggccaaagggaagttgtattagtctgtgacatcttgtgatgctgtttatcttggtttgacattggagatacgctagtaactgtgataccatactataaaacagaagaattttctgctactaaaaactgcctttttacaaaatgactgtaaatatttgtaaaataaaataacactaaactttaagcccaaaaggagagatagagccatgtgttcagttgtggacctgtccgtggggcacagtgccaccccatcacagtgttgctgtcatcaggcaaaagtgaatgtttgtttatggcaaattcgtcttttgcgaatggcttaattctgacactacctttctgggaaatgttaataaatttttaatattcacttcta

SEQ ID NO: 4928 - DNA, 7702 bp, Homo Sapiens
  NM_020825
atgacagtgaagttgggcgacggcggcagcggggaggacgggctcaagaagctgggcaagcgggcggccgatgaggagtccctggaaggagaaggggccggcggcgcagacgcggccgaggagagcagcggcacaaagagggacgagaagaccccccgggccggcgccgacggcccccccgcgccccccggcgcgccgcaggcgccgtccccgccgcagggcagcccccaggaccagcaccacttcctccggtccagcgtgcggccgcagagcaagaggcccaggaaggatcctccgagcgctgtggggagcggcaacgccggtggctcggggccccgcggaaaaggagctgaaggtggtggatcatcgtctggaaatgtgtctggggttgcccctgctgcccctgcagggggctcgcgctcctcctcccggaacttagggtcttctggtggcgagaaggaagaaggcaaaaaggtccggcggcagtgggagtcgtggagcacagaggacaagaacaccttcttcgaggggctgtacgagcatgggaaagactttgaagcgattcagaacaacattgcgctgaagtacaagaagaaaggcaagccagcaagcatggtgaagaacaaggagcaggtccgccacttctactaccgcacctggcacaagatcaccaagtacatcgactttgatcatgtgttctctcgaggcctgaagaagtcatcccaggaactgtatggcctgatctgctatggcgagctgcgcaagaagattgggggctgtatggatgacaagaatgcaacaaagctgaatgaactcattcaggttggggccaccactgtacgttacaaagggcggaacctgcggatcaaagcgcccatgtgccgggccctgaagaagctgtgcgatccagatggcttgagtgatgaagaggaccagaagccagtgcgcctgcctctgaaagtccctatagagctacagccgcggaacaaccacgcctgggcccgtgtgcagagccttgcccagaacccacgcctcaggatgatcgtggagctacatcgaaaggtctccagcctcatcgaattcttgaagcagaagtgggcgctccatgaggtgcgagttcggaagacactcgaggagcggcagctgcaggactcatgctccgcaccgatgcaggagaaggtgacactgcacttgttcccaggcgagaactgtacactgacaccgctgccgggcgtggctcgcgtggtgcactccaaggccttctgcacagtgcactggcaggagggcggccggtgcaagcagagtgccaaggacgcccacgtgctgcccccagcccagatcctgggcatccagagtgggcagggcacggcccggggccaggtgaaatgcccgcggagcggagctgagggcaagggtgtggggcggccccctcctgcggctgacgccttgcagagctccggagagagttcccccgaaagcgcccccggggagggggctgccctaagcttgagcagcccggacgctcctgacaggcctcctcccaggcaccaggacactgggccatgtcttgagaagacccctgcagaaggcagggacagtcccacccgggagccaggggccttgccgtgtgcctgtggccagctcccagacctggaggacgagctctcgcttctagaccccttgccccgctacctaaagtcctgtcaggacctcattgtccccgagcagtgccgctgtgcggacacacggcctgggagcgagcagccccctctgggcggggcggcctccccagaggtgctggctcctgtcagcaaggaggctgctgaccttgctcccactggcccatccccgaggcccggccccgggctcctgctggatgtttgcactaaagacttggcagatgcacctgcggaggagctccaggagaaggggagccccgcggggcctccgccgtctcagggacagcctgccgccaggcccccgaaggaggtccccgccagccggctggctcagcagctccgtgaggagggctggaacctgcagacctccgaaagcctcacgctggccgaagtctacctcatgatgggcaagcccagcaagctgcagctggagtacgactggctggggcccggccgccaggacccccgccccggctccctacccaccgccctccacaagcagcgcctcctcagctgcctcctgaagctcatttccaccgaggtcaaccccaagctggctctggaagcaaacaccatctctacagcctcagtaaggcccgcccaggaggagcagtcgatgacgcccccagggaaggtggtgaccgtcagctctcgcagcccccgctgccctcggaaccaggcctccctccgcagcagcaagaccttcccgcccagctctgcaccctgctcctcaggtttgagaaaccctccaagacccctcttggtgcctggtccctccagcacaggaagcaatgactcagatggaggcctttttgctgtcccgacaaccttgccacccaacagccgacacgggaagctcttctctcccagtaaagaagcagagctgactttccgccagcatctgaactccatcagtatgcagtcggatttcttcctgccaaagccccggaagctgcggaaccggcacctgcggaagccactggtggtccagagaacactgctccctagaccatcggaaaaccagtcccacaacgtttgttccttctccatcctgtctaactcttccgtaactgggagaggttcgttccggcccatccagtcttctctgaccaaagcagctctgtctcggccgatcgtgcccaaggtccttccaccccaggccacgagtcacctggccagtgctatcgacttagcagctacaagtgccggcatcctttccgggaaccccctccctgccttggacaccgagggcttgtctggcatctctccactgtcttcagacgaggtgacgggtgccatctcggggcaggactctactggaactcaccaggatggagacaccctccccaccgtggggggctccgacccatttgtcagcatcccttcgaggcctgagcaggagccagtggcagacagtttccagggctcatctgttctctccttatctgagctgcccaaggcccctctccagaatggcctctccataccgctgtcctcgtcagagagctccagcacccggctgtctccaccagacgtctctgctctgctcgacatctccctgcccggcccacctgaggatgcgctgtcacagggcgagcctgccacacacattagcgactccatcattgagatcgccatcagctccggtcagtacggtgaaggagtccctctttctccagcaaaactgaatggcagtgacagttccaagagccttccctccccgtccagcagcccccagccacactggatcgcctctcccacccacgacccccagtggtaccccagtgactccaccgactcctcgctcagcagcctgtttgcaagcttcatctccccagagaagagccggaagatgttgccgactcccattgggaccaacagtggcacttccttgcttggccccagcttgttggatggaaactcgcgggactcatttgtgtccaggtccctggctgacgttgcagaggttgtggattcccagctggtgtgcatgatgaacgaaaacagcattgattacatttctcggttcaatgacctggcccaagagctgtccatcgctgagcctggccgccgagaagctctgtttgatggtggtggaggcggccccgctgtcagtgacctgtcccagtgaccacacgtcctggtggcggatgaagccctcttcgagctagagaaaaatagataagcccagcagccccagaagatggtctgaacagaggcatctccgcacccaagactgtgcaacgggcaggaacgtggtcacagagctgcttccccacgagcagcaggcaacggcgtccaaggagactaggatgagttcttggcaagggccagcgttagaaatcactgtggtactagagccgttcttcaccacgcctgggcccatgttagggtctgcataatgatcccatttcagcctgtgctctgcctcgattgttgtgttggacattccggtggcatttccttctgagacaagggagtatgtgtgccttggtgtagttgctgtgcactaggagctgtgatctccctctctgcagggaggccccagcccctgctgcttgctttctgccaaacctgtgctatgcatcagctgtgccctctgtggactgtaacgggcaggacagttgggtgtggcctgggctcatgcctggtggtgtcacatcccaaggcagcaagagcatggataccgatcacagggctgctgcggagtcgtggggccctgggctggtgcctcccctccctagaggttttgttcgtactcttaacagggagtgggggcaggaagagtcctgtactatgcaggttgtgtggactttacatgggaccctgctaagctggttgaaaatgtttttcttgtgttttaagaattaggagacatggaagaggaagaacaaagtcccctctgtagttggtttccttcctgtgtccctttgcaagcttccaggcgatctaaggtgtcatttctccctcctggggtgacccttaggcgctaatatgattacagcgaagactttcctgataagttctcaaactcgatgtgtgactgtttggcacttgagacaaacctgcctttgcagggaaagtgtctctcacgggcattggtgtgggcgtgcctgacatacgtgttcagtcccttgcatacctttgccttgagacttctgtgtctccttcccatttgggacacccaggtgagggcccagacatctggatgtggtcagacctcaccaaatatatgccttcgtggtggtctccctccttgcgccctcttgggtggccagcgttcctactgcagacggcccaacatccagtctttccccaggacagagctaacaagggcccctttgccttctcatcctcaggagttccaggcacatgagtcaccgtccatccacatccagtgtggcctggagctgctacagaggtgttgggcaggccatgcctgtgccgccatctctcccttcctgcctcatttcatcccccgcagcagccgggattgattgtgctttcctaacccccttggacctactctccctcctccccaccattcctcttcccccacatgtgtggcacgctgcagccctcaaggccagccctggcccctccactgcttctctccccatccacaatggagaaggtgaaaagaggagggaaaggcctttggtgtggacaagcatgtggacgccctccgtcctgcagtcttgccagcccaccacagccactgtagaccacaggcaggccgtgtactgcaccactgggaggacgtggagaggacagtgaacttccaggcaagagcttccttcttttgtctcacgagtttttcttagagctcttgcctgagctggcttccctccttcagacattgacatgagatcttaagcaaacagtcccaaacctcttaggggtgaaaaaagaaacatgccacttgattaggagagagacagcagtgtttgaactacagcatctttacactagcttgtgttttgtgctacgtataccagcttccaaaattagcatctcattgagccagagaagacaaggagatctccctctgggcatctggctttgctgcgtctctagagggttaggataccaggccgagttcaggccactgctagctttctcatactcccacaggctagaccagagatgccaagtcccaacagcactgagctgtgtgcactgtgccagggacaggagggtttgtgaactgcctgtcagggtacctgttagcccctgacaactcagtggggtgaagttttggaggtcagagtctgctttcgtaggctctttagacagcacctaccacttggttctccagcgtagactcctgggagcagccaactgcagccattgccatccagtggggagatgggttagggaggaggacgggctgactcctctcctgtaataaagctgacaagagttctagaggattctgcttctctagtaactagacaggtgatacgcatttgcttgccacattaagggaaaatggtgtcatttgttgcagaaaaacaatggatacattttcttctggcctaaatgaatatttatgtgcaaacataggcaactgttaaaggctggaattttcaaaagatccaaacagagacttcctgcatcttctgcctttccaacagaagcggtgatcgtctaagtatgagcctgtggcttcctttgtgcatttgagcatgctgtaattaagatgagatcagtttcttagaaaaagctttcctgaatccctctgacgttgcctgggatctttctgttgattcgtcttttctggagattgggacagagcatctgtggtccagggaagttagtcctctggcctcaattctgttgtggatgtgcagtgataagcgggcattgcgtgcctcgggggatgcctagttcgtggcttcctggctgttttgtccttctgtgtcttgtagctgtagggtgccagctcagggagtggggtgttggcggcgtttccgcggttggcctccttgctttgccgcacctccaggttctgggcatgagaggccgtggcctcatttctggtggataacctttttagtttaatagcatctttaattagatcacagcattgaattcaaaatttcttctgcaaagaaagttgtggggcataagacaccgggaatgagggaggaggaagacagttgtgttttctctttaaaccttgagctctagccgatgcatttgtcaggaaatacagcactttgtcttaagaaaacaaggaaggaggccgggcgcagtggctcacgcctgtaatcccagcactttgggaggccgaggcgggcggatcacctgaggtggggagtatgagaccaccctgactaacatggagagaccctgtctctactaaaagtacagaattagccgggcgtggtggcgcatgcccataatcccagctactgaggagacttgaggtaggagaatcacttgaacctcagcggcggaggttgcagtgagtcgagatcgcgccagtgcactccagcctgggcaagaagagcgaaactgggtctcaagttaaaaaaagaaagcaaggaaagagtaatttacaacgaaggaaaaaaacccacagcacacccttcgcggctgtcagcgctctcctgatgtcacagtggctgcgtgtccttggggtgggtgaggtgtggggagcccagcccctggccctgcctcccgcgccccgctccccttctctctcttactcggttaagccatagcgaggcctccgctcgtttcagatatgaatttgttttatagattataaatatgcatatacagtgtatgtataaagcagaatgcctgcctttcctggttattttttgtaccatattgtaaattatattatttattctttaccaattttgggaataaaaggtgttttggttatttaatataataagagctgttaaacttctgtttaaatttccagttcaacttgtaaatgtttttattgtgcataaatacatactaatgttgatctaaaaaaaaaaaaaaaaaaaaaaaaaaaaaaa

SEQ ID NO: 4929 - DNA, 7259 bp, Homo Sapiens
  NM_020841
cactagaatgtgaaggatcttcgcggttctgggtgcccagaaaggcggcgacgcggcggatgacaacattaggccgcgacgcgctcctggccaggcggcggctgtagtgttagctttggacgccgcagtagccgctgccggtagcaagccgactgagggaaggtgggggtccgcccgggctggtggacctcggggccgaaagttcccgccccgctcgggggctgagccggcagtgcctccgcggccgctgggcagcgcccttcgtccaggctcgcgccccagctgccgccgacgacagcggccgagagaagttggggtctgactagacgcttacggggcctcggaccccggcgccgcggcgacctcggaggaaccggctccttgcgtcccgcctccctgggagctccgcacgggatttgcagatttacagaatggctgcacattaatggaaagagaagcataaacctatcttctttcattatggagggaggtttggcagatggagaacctgatcgaacttcgcttcttggtgatagcaaagatgtccttgggccatcaactgttgtagcaaacagtgacgaatctcagcttctgacaccaggaaagatgagtcagcgccaaggaaaagaagcttatccaacgccaaccaaagatttgcatcagccatctcttagtccagcaagtcctcatagccagggttttgaaagagggaaggaagatatttctcaaaataaagatgaatcttcactttctatgtcaaagagcaagtctgaatctaaactttataatggctcagagaaggacagttcaacttcaagcaaactcacaaaaaaagaatctcttaaggtacaaaagaaaaattaccgagaagaaaagaaaagagccacaaaggagctgctcagtacaatcacagatccttctgttattgttatggctgattggttaaagattcgtggtactctaaagagctggaccaagttatggtgtgtgttgaaacctggggtgctactgatctataaaacccaaaaaaatggtcagtgggtaggaacagttcttctgaatgcctgtgaaatcattgaacgtccatcaaaaaaggatggcttttgtttcaaacttttccatcctttggagcaatctatttgggcagtgaagggtccaaaaggtgaagcggttggatccattactcaacccttacctagcagttatttgatcatccgagctacttcagagtcagatggaaggtgctggatggatgctttggagttggctttgaaatgttctagtcttcttaaacgtacaatgatcagagaaggaaaggaacatgacctgagcgtttcatcagatagcacacatgtgactttctatggcttactacgtgctaacaatctccacagtggtgataacttccagttaaatgatagtgaaattgaacgacaacattttaaggaccaagatatgtattctgataaatctgataaagaaaatgatcaagaacatgatgagtctgataatgaggtgatggggaaaagtgaagaaagtgacacagatacatcagaaagacaagatgactcatatatcgaacctgagcctgttgagcctttaaaggagactacctacactgaacagagccatgaagaacttggagaggcaggtgaggcttctcaaacagaaactgtatctgaagaaaacaaaagccttatctggacactattgaaacaagtccgtcctggcatggacctatccaaggtggttctgcctacatttattttggaaccccgttctttcctggataaactttcagattactactatcatgcagatttcctatctgaggcagctcttgaagaaaatccttatttccgtttgaagaaagtagtgaaatggtatttgtcaggattctataaaaagccaaagggactgaagaaaccttataatcctatacttggcgagactttccgttgtttatggattcatcccagaacaaacagcaaaactttttatattgctgaacaggtgtcccatcatccaccaatatctgccttttatgttagtaatcgaaaagatggattttgccttagcggtagtatcctggctaagtctaagttttatggaaactcattatctgcaatattagagggagaagcacggttaactttcttgaatagaggtgaagattatgtaatgacaatgccatacgctcattgtaaaggaattctttatggtacaatgacactggagcttggtggaacagtcaatattacatgtcaaaaaactggatacagtgcaatacttgaatttaaactaaagccattcctagggagtagtgactgtgttaatcaaatatcagggaaacttaaactgggaaaagaagtcctagctactttggaaggtcattgggatagtgaagtttttattactgataaaaagactgataattcagaggttttctggaatccaacacctgacattaagcaatggagattaataaggcacactgtaaaatttgaagaacagggagattttgaatcagagaaactctggcaacgggtaactcgagccataaatgccaaagaccaaactgaagctacccaagagaagtatgttttggaagaagctcaaagacaagctgccagggatcggaaaacaaaaaatgaagagtggtcttgcaaattatttgaacttgatccactcacaggagaatggcattacaagtttgcagatacccgaccatgggacccacttaatgatatgatacagtttgaaaaagatggtgttattcagaccaaagtgaaacatcgtactccaatggttagcgtccccaaaatgaaacataagccaaccaggcaacagaagaaagtagcaaaaggctattcctccccagaacctgacattcaagactcctctggaagtgaagctcaatcagtaaaaccaagtacaagaagaaagaaaggaatagaactgggagacattcagagttccatcgaatctataaaacaaacacaggaagaaattaaaagaaatattatggctcttcgaaatcatttagtttcaagcacaccggccacggattattttctgcaacaaaaagactacttcatcattttcctcctgattttgcttcaagtcataataaacttcatgttcaagtagaagttctctaccattgaatcagtgaactagaaagatctgatttggcctgggaccagtgttcaagttggtttggtctttattaaaaatcacaatattccgaaaacaaaaaaacctaggagataaatgtagaggtattgacttttcgtatcttttatcttcacactgaaacaagagctatcctatttgattattaaagtgagctatgtgttaagtgccaggacatttctagcttttgtgagaatgtgtctacatatgagtataataaacccacatgtatacacaattgtctcttatgtactcctacctgacagtagtctttgtattctatagtatgttctgagatataatgttaacattgttcataacaaaaaatgctatcaatcttataaatatatgtaatctattttcttcataaaacaggcacaaaagttttatcagtaaggaattacagattgagaaatgatggaataatagacataattaattcaatacactactgttaaaatcatttgcaaagcactcagctcaattatcttcttagaaagaaagaaaaagtatgaatggtcaaaatgaatacatcgagagagataaatggcaaattgcttttttaaaagtttacataagttttttttaacccctagaatttaatatttgtagatgcaggtaaatatatatacttacgtgtatatcagtataaaaacactggtgtgcaattaattggattgattataataccaccttaagcacttgctgaaaaaagtgtggtcaaaattgattgctgtccttttgtcttatttttgtttttcttaagtcagctggttcataacataggccaaattctagagatgtttatagagcatttgaagtgctgataatttatgttttttcattatgaaaacttattttagctttagactccagtgtgttcagtgaataagtagaatataaaaaaatataaccagtattttacttcaaaagccaaaaagaggcaataagaaaagacactttgtggtggcctttatgtgtgcattaaaattggtttctgtaaaacgtgtaataagttgagtatctacgaagagtatcaagttctgaagtttaatttttttattatcctcctctcttcttagtaacttctttctgtggcaaaaccacaattctttaagattcctattgttcaggctaaggcaaatttttttgtttgtttcttcagtttaatattttgattttgtgtttttacgtaaatatttatattccttgaaagcaatttttgccaaggtagttcagtttaggaatatgttgttctaaaatatgtcttagaatcctgaaagcatagattttgaaatgtttttttaatgaaaatgaaggtcagagagaataattgccctgaccacatttgcctttcagtaggaggaggctgtgaaatagtaaaattataatcgtttatgccatgataaatacaagattggtaaataaatacattgattggtaaattatgagaatcaaaatgataaaaagagcctgcttttttccctaaccaatatagctatcttaagtatccttaggtttctgtgaagaaccatttcccatgttttcttggcaaaataatgctgtattccatatgtacatgtgaaatgatgttttaaattgataaaagcttaaataagatctacctatacccagtattttcatgatattagaacaaatgggtttttggttatattttatatttgtcaatataatttttgtattcacattctgttacactctgcctattcattgatatatgatattctgtaaatattgtacaatttgatcttttttatggtttaaattagttaattacatacaaattgattggcttatcacaaaaatcatttcatcagtaaaccttgttaacattttgtactggtgacccacctcttaggactttggtcttatccacgtgtatgttgttttcatttggtccaaataatattttatttgtatgggtatcttctaagactaaataggtagttgtgttctttatttttaaaatttctttttagagcaaatgttatgggttcttacccaaagagtcaaaaactatttcttaagaaagagcagagttattcatgactgttctttatacactaaaagcatgcatctaatctaatagtcctcttattatgcttttagttgtatgagtctctttctatgaactgaacacaaaactcaggaattggtggcttaattttagatcagtgcttgtactaggcttagttatatgaatctttataacacataattactaactttgtagccatatatgtaattgactttgaatgttatttacctgaaattaatcttccttcacacatggaccgtaaacggttcccagttgtctgagagcctcatgagggtttctaggatttatgaccttatgaccagtttttttcatttaccaagattttattttcctacatgaaaatttaattgagtaataattattcacatgtgcattttctttttagctgttaaatgtactatgccatcatccaccatttagtaaaatgtagctggcccaggacatgtaaaaaaaaaaaaaaaacaacaacaataaatagggcatgtgaaatgttaagttacagcaatagatattttatttgtatttcatgttagtacttttttgttttatatcacttataaaggtacagtgtactctttgtcacagctcagttggtaaccgcattccattgaaaagttggccttgtaaaatacaactctcatttaatattcatgcttttgtgcctttaagaaaatattttttgtcattttttgtgttacagaactataatgtgattcaaggtgtttataggcttgtcataaaagggtcatttctgtgtgttactttctttttatatagctatagtatatttaaacaataatactatcttttataggggtttgtctatttacctattctttactcagacattgatgtagacttgtcagattattctgagtattgttaacagtgccttttcgatggaatcacactttttggctgtcaccttgtgccatatacacacaaaattttgtggaaggcagttttaactttctgaagaatatctgtcaaaatttaagaaaacaaatgtataaaattccattttttccagtgtttagcatttctagtaagcagtgaggttgtttgacatacagtgatgatggcattattgataagccatacatgagactgcagattatattgaatcatattaaatgtacagaaataaaatattagatttatatcaaattttccaatttgaaccagtggggaaaatcccacagaaatcagtaagtttacatttcaatttctatcttatttgactaagtggaaagagattctttaaaatgtataacctgccattatgtaatttggtttcattttattctacctgttgtgtgagtttagtatatttaatttactttttgttactctttacatactgtttatttttgttagtttttaattgaagatggactgttgaaattgtataggaccagtgtcttattaatatgattaatatatttagaagagccacgtgaaacccatgacaaaatgaatgtgaatattctttctaaaaatttagaaaatgttatctttttgcatttattatgtaaaactgttttacagtatcaaaatttttcacttaaagaaaaaaaatgccatgaaacatttgaactgatgagccacagaacttcagttgaaatttttttcactttttagcatgctaaatatacatctgagtttaaatgttctgtttaatggccattcataaattcaagcactaccactggtcagttttgtgtgatagaataaaaatatgttacctgcagtgtaagtacagcacactgtcaaattcttttccttaaggtgcacagtaaatgtacagatagttataggccactgttttgtaatgtagtacatttctaatctattattcctaacctattataactgtttgcagaaagaaaagaatttttctaataatctgtaaaattatgctaacttctacaagtaggcttctaaataaaatttttaaaaagagcaaaaaaaaaaaaaaaaaaaa

SEQ ID NO: 4930 - DNA, 4725 bp, Homo Sapiens
  NM_020853
gcacgcgcaccggggcctcagccatggcgaccgtgctgtccagggcgctcaagctgccggggaagaagagcccagacctaggggagtatgatccacttacccaggctgacagtgatgagagcgaagacgatctggtgcttaacctgcagaagaatggaggggtcaaaaatgggaagagtcctttgggagaagcgccagaacccgactcagatgctgaggttgcagaggctgcaaagccacatctttcagaagtcaccacggagggctacccctcagaaccccttgggggcctggaacagaaggcggcctcctccctggtgtcatatgtgcgcacgtctgtcttcctgctgactttggggatctcgatgatcctggtgctcctgtgtgctttcctgatcccctgtcctcccagagatctgcacagcacctggagccgccacttgggctcccagggaggtggggacctgtctccattggaattggctgatgtgaatggagatggcctgcgtgatgtgcttctctcctttgtgatgtcaaggaacgggagtgcagtaggtgtctcaagaccagctgctaatcttgtatgcctttcggggatgaatggcagcacactgtggtctagtcttctccctgaggaggctcgagatatcacatgtttggagctgatgccaggaagcttggctgaaaccatctgccttgtgacagggacacacaagatgctcagcgcattcaatgcaacgtcagggaaagccatttggactttaaacccaaactacttgtccaacggtaccttggctgccccagttgtggtactgccagacttggatgaagacggtgttcgagaccttgtggttctggccattggggaattgcagccagatctgtgctttctgctggtgtctggccggaccggaaatccagtgggtcgacctgtgaagtacaacatcgttggagttgggaatctgattggtcctcaggtttacatcaccacaaatggggctgtctacatcctgtttggctttggaaatatacaagctgtcgcactgcgggacatttttgttcaggcccaaaatcgagacagctcaccaccttctctgcagatagaagagccagaatgggaaaagcgaagatccatcaacctgtctgagctcattgatgtttacagtgatggtgttgaactactccagatggtgaaggcaccagattccaactgcagcaaccttctgattacaaccagacaaagccttgtgctgcttcgggggcaaaatctgacaccttactgggcattgagacttcaaggcctgcgcagccagcctactcctggatatttcactgatgatcagacattagacttccttctgcagatacaggatggagttgggatgaaaaagatgatggttgtggatggtgactctggctccattgtttggagttaccgtgctccgtgtcacatgaaagaaacgccagccacctcagcagttacttcagaccagaagtctgtcttcctcttctgggccgaagggctgtcagctgcatctcccaattccgatatcatcctaggaactgagccgcccagccttcaccacctttacctcctgcatcctgcgttcccctccatccttctggatctggccaacaccaccggcacagtgacggcttcagaggttggaattaacgacctctggaaagatgccttttatgttaccaggacaacagggccaagctccgaaggccatccagcagccctggtggtcagcaagcttagtctacggtgggcactaatggagggccagatggctcagctacaggagtccacccccaaaattggccgtggggagctgcgaagatttctctctaggataaagtttgttgaagctccctacgagatctaatctgatggaatcttcagttgcagaagaagtgaacagagtggataccctctctactctcctgtcactgtaaaatcagttctatggagagaagacttcttcgtcctcatttaccacctccctgatggttgcaaaggcttgggaaggcatgttggagtctttgacggcagcatgatctatttggctggggcatcttacctaccttttcagtccctgcattaatcccctctaggaactctgcgtggatcgtttggaaatgtgaatctcttaagtatttaatttttttggtatgtctaatttatgaagtcttgctgggaaagccagtgaagtctatgactaggaaacattttgttgtacattgtgctgtgtgtgtgtatattttagtgttgtggtgaagttattttccaggtatgtcctaagcttcagggatccagtttcttgtccttctgaaatatatctggtttgtttggtcattttgagacttccagatgccctacctctgatgttgagggccacttatttctctccttattctttcccacctgtaccttggctacttccaaattgtagacagaatgagaaagatttatagtggaagactgagttagccatccaagcattttcatctctcttgttttatatcctatttccttagattttccatccatgtctattaagtgaccacaagaataactatattcctatcacaaggggagcaagaggatgtagtctcagtgacccatctctgaccaagtccacatgttgtgttatatgtggctctgatggttctgccagtcatgatcttttttctgtggcgacatcagaagtgtatgtttgcatgctgtcttcaacttagaggagaactggaagtcaggagcctttgatgtccttatcctgctgtatgtcttctctgcatctttttctatagggcaccctccttagctcccctcactctgttttctcttctattcagggatatgtttctggactttttcttctgctacttgagtccaggatgcaaccattttgtcctgcatctcttctttcctgtagagcctttgaagcattgtattttgggaaaattcttctgtaaatactataacttttataaatggttaagttatttagaattatctccagtgcttacttctcccttcttctgtataaatctgctacttcaattaagttctcctctaaacttttaggtcattgtttatatagcagaaaattcaatgttagcggatggaaaactgcttcttgaataaccttgataggtcatccctgagtgcacctcaggttctctctttacctgggcttgtatcttttttttttttttttttttttttttgagacagagttttgctcttgtcgcccaggctggagtgcagtggcacaatctcggctcactgcaaccttcgcctcctgggttcaagcgattctccagccttagcctcccaagtagctgggactacaggtgcccgctaccatgcctggctaatttttttttttgtatttttagtagagacggggtttcaccatgttggccaggctggtcacgaactcctgacctcagataatccacctgcttctgcctcccaaagtgctgggattacaggcgtgagccaccatgcccggctgggcttgtatcttttagcttgtgttagtaaaaggattctagaaaattatgaagtccagattcaaagggatctctgttaattacccactgacaggcattatgacctaacaggaggttggtagcagtagatccaagcatgcatgttgcctggcctgtagattggccttatcaggtttctgggtgcctctgccttaagatcctgaaggcaaattttgtttcaacagtttggaagtcatctgtgggtccagcttgactttggaggaataagaagatacttctagagtatgggaatgattccagataatttctgggatttgaatctacttgagtttaagggcctgggacctaatttggtttagtatagaatttgaagaattaatttataggcagctgaatacccaaaacttgggtggtggtcctgtggtttggctgagctgtccgggcataacctggttctctgttatgttaaggctttctgggaagccagccactctgcgcaggagtgaaacatgaagttgttttctgaggacctgttttggtgggattgtttgggcagaggactgtgtttatgcagggcaaatcccagaaagataagaggaagctagagaaacttaatgtacctgaattcttcatggtgtatttgcaaactaacttaacatagattcttttgactatggtaagtttgaatctctccttgccaaacaacattataagtttagttttcttcttcctcttgcagccggtacagaaaggtgtaagtggtggctgaaaattgaggaagcttcatctgaccaatgtgggtgctggtttcttgtgaaatgtgtccctaagcctccttctccttgcaggcagccacccacccaggtgtctaagataggacatgctcctttctttctctaatcccatcctgaggttgccggcaaagccaatatgaccactactgagaaatagtaatgacttctacaaatgcaagggtcttaccctcctctttcccttaaacaccctcccttttccttagaccccgtttttgccatcccccaaatgtgtggtatggtgaaactaatcccctgaatgtgaattgctatccttattgccctattaaagaagagccagctggtatattgtcaggaagcactatttaaaatgtgaactgttatagagtaaataaataaatactctacaggaaaaaaaaaaaaaaaa

SEQ ID NO: 4931 - DNA, 4995 bp, Homo Sapiens
  NM_020856
tccctccctgtcctcagcccggcagcggcggcggcggcggcagtggcagtcgccggagaagcatcatgccgaggaggaagcagcaggcgccccggcgcgcagcagcctatgtttccgaagagttaaaggctgctgccctggtggacgaaggtttagacccagaggagcatacggcagatggagagccctcggccaagtacatgtgcccggagaaggagctcgccagggcctgccccagctaccagaactccccggccgccgagttttcctgccatgaaatggacagcgagtcacacatcagtgagaccagtgaccgaatggctgactttgaaagcggctccatcaagaacgaagaggagaccaaggaggtcacggtcccactggaagacacgactgtgtcggatagcctggagcagatgaaggccgtgtacaacaacttcctctccaactcctactggtccaacctcaacctcaacctgcaccagccctcctcggagaagaacaacggcagcagcagcagcagcagtagcagcagcagcagctgtggcagcgggagcttcgactggcaccagagcgccatggctaagacgctgcagcaggtgtcacagagccgcatgctcccggagcccagcctcttcagcaccgtgcagctgtaccggcagagcagcaagctctatggctccatcttcacgggggccagcaagttccgctgtaaggactgcagcgctgcctacgacaccctggtggagttgacggtgcacatgaacgagacggggcattaccgcgacgacaaccatgagaccgataacaacaaccccaagcgctggtccaagcctcgcaaacgctccttgctggaaatggaagggaaggaagacgcccagaaggtgctgaagtgcatgtactgtggccactcctttgagtccctgcaggatttgagtgtccatatgatcaaaacaaaacactaccaaaaagtgcctctgaaggaacccgtcactcctgtcgccgccaaaatcatccctgccactcggaagaaagcttccctggagctggagctccccagctccccagattccacaggtggaacccccaaagccaccatctcagacaccaacgatgcacttcagaagaactccaacccttacatcacgccaaataatcggtacggccaccagaatggggccagctatgcatggcactttgaggcccggaagtcgcagatcctgaagtgcatggagtgtgggagctcgcatgacaccctgcaggagctcactgcccacatgatggtcactggccacttcatcaaggtcaccaactctgctatgaaaaaggggaagcccattgtggagacgcctgtcacacctaccatcacaaccctgctggatgagaaggtccagtccgtgcccctggcagccaccaccttcacgtccccctccaatacacctgccagcatctccccaaaactgaatgtggaggtcaagaaggaagtcgacaaggagaaagcggtcactgacgagaaacctaagcaaaaagacaagcctggcgaagaagaggagaagtgtgacatctcttccaaataccattacttgactgaaaatgacttagaagagagtcccaagggggggcttgatatcctcaaatccttggaaaacacagtgacatccgcaatcaacaaggcccagaacggcactcctagctgggggggctatcccagcatccatgccgcctaccaacttcccaacatgatgaagttgtccctgggctcgtcggggaagagcacgcccctgaaacccatgtttggcaacagtgagattgtctccccgacgaaaaaccagaccctggtctctccacccagcagccagacgtcccccatgcccaagacaaactttcatgccatggaggagctggtgaaaaaggtcactgagaaagttgccaaagtggaggagaagatgaaggagccggatgggaagctttccccgcccaagcgggccactccctccccatgtagcagcgaagtcggggaacccatcaagatggaggcatccagcgatgggggcttccgcagccaggagaacagccccagccccccgcgggatgggtgcaaggatgggagccccctcgctgagccggtggagaatggcaaggagctggtgaagcccctagccagcagtttgagtggcagcacggccatcatcaccgaccacccgcctgaacagccttttgttaaccctttgagcgccctgcagtcagtcatgaacattcacctgggcaaggccgccaagccctccctgcctgccctggaccccatgagcatgcttttcaagatgagcaacagcctggcggagaaggctgctgtggccaccccgccgcccctgcagtccaagaaggcagaccacctcgaccgctatttctaccacgtcaacaacgaccagcccatagacttgacaaaagggaagagtgacaaaggctgctccttgggttcagtgcttctgtcacccacgtccacagccccggcaacctcctcatccacggtgacaacggcaaagacatctgccgtcgtatcattcatgtcaaactcgccgctacgcgagaatgccttgtcagatatatccgatatgctgaagaacttgacagagagccacacgtcaaaatcctccactccttccagcatctccgagaagtctgacattgacggggccactctggaggaggctgaggagtcgacgcccgcccagaagaggaagggccgccagtcaaactggaacccccagcacctcctgatcctccaggcccagtttgccgccagcctccggcagacctcagaagggaagtacatcatgtcagacctgagcccccaggagcggatgcatatctccaggttcaccgggctgtccatgaccaccatcagccactggctggccaacgtgaaataccagcttcgaaggacaggtggaacaaagttcctcaaaaacttggacactggccaccccgtcttcttttgtaacgattgtgcgtcccaaatcaggactccttccacgtacatcagtcacctagagtcacacttaggcttccggctacgggacttatccaaactgtccaccgaacagattaacagtcagatagcacaaaccaagtcaccgtcagaaaaaatggtgacgtcctcccccgaggaagacctggggacttcctatcagtgcaaactttgcaatcggacctttgccagcaagcacgctgttaaacttcaccttagcaaaacacacgggaaatctccggaagaccaccttctgtatgtctctgagttagagaagcagtagcatttgcttttgatagaaaggactgcagtttgctttgagggaaactgtggaaggcaccttcaggccccctctgacttgttgttcttggcacatgttcttattttaactgcagagaatcactctgggctggactgttttgtataactgtacagtgtttaatagaggtgcataatcagctgttgttactggtaaaatatgaaggttaaaatgcagtggtaagtgtttggaactttgtgtaaacgggatttagttgtgagcatcctcccgatgcttcaagctgcatgcattaacagacagtttaattaagcatttataacggaatcaggcacaccttttccacgagactcgagtgtgctggcatttctcaccctttcatctttagccctctgagtactttgaagcacttttgcattaatttggttaaaaaataaaataaaataataataatgtatgaagctctgttttttaaactccttaccagcttagttataatgaataatatgaacctccatttatgcaggtctgcaggggtataacacgccttgaaatttaaaagaatattattttcacattgaaacatagatgtatatattgtatagatttcagactctcttatgaaaaaaaatgtgattgtggttaaatgacctttttcttgcatttatagcaacagtgttttatgcacctgctatgctctgggcataagctgtgcctatgtatagtgtatatttctttttttcttttttttaaggtctatgggttttgttttttacatgcaaacattgtaaattatacagaagataccacagatagcatttataaagtatacagaaacattatctgaaagcaaagtatgatagtttgttttgctatacagtacatctatattgatagaggttcatgtttaaattatacatatttattagcatcatattgtcatttgttttgagcagtctgaataaacgagaccgggaaagacatccctggcaggcatcagaactattttgcacatgatttttaaaggtatttattagaaatcaaagaacactcaaaataaactcagtgctcaaagggttaagtctatttgaaaaggttaaaaaaaagaacaaaaaaaaaaaaagaacttgtactgtatttcctaaacattgataaagcctttaaaatgtttgtactgtaatactttgcttaaaagtcatgaggcattctgtgatccaacctctttcacttatttataagccctcttggttgctattccatattgtaggatgcctttctatttcaattggtaactttctgttttgttcttcctaattattctcccaagatcccacactgcagctttatctttaggcttatgaaaggtaacccgtggttaccggctctccaagtgattctgttcttctccatttttggcagttaatttgcagaagtaactgacagctgacaccatatgagaacctttgtataaaatattggcatgtaaacagcacagacaccgtaacacactctgtgccctgtttggttgttgacaatgaagcaccattatgtgactcttcatataacccttttttctacggcagcattaaaattgtctttttgctataaaaaaaaaaaaaaaaaaaaaaaaaaaaaaaaaaaaaaaaaaaaaaaaaaaaaaaaaaaaaaaaaaaaaaaaaaaaaaaaaaaa

SEQ ID NO: 4932 - DNA, 5154 bp, Homo Sapiens
  NM_020860
gaggcgggggattggtatgcgagcgaatgtgcgaggggagggaggcgtcccggcggagcgtggtactacgaccagcgcgggccggagggggcggggggatgcgccgcggcggcggcggcgcgggagctggggttggtgtttggcggcgccagagcagcggatcccggtctcgccgcagcagcagcgcgggtgtcgtgcaccgcctgaagacgccgtacctttctaccccccaccttttttttttttttttttaaataaccggaaccaatgaacgcagccgggatcagagctccggaggccgccggtgccgatgggaccaggctggcgcccggcgggagcccgtgtctgaggcggcgggggcggccggaggagtcgccggcggcggtggtggcgcctcgcggagccggcgagctgcaggcggccggggcgccgctgcgctttcacccggcttctcctcggcgccttcatcccgcctcgactcctggcccagcgtggggctggctgctgcggcggcggcgctgggctgcgttgctggtgctcgggctgctggtagccggagcggcggacggatgcgagcttgtgccccggcacctccgcgggcggcgggcgactggctctgccgcaactgccgcctcctctcccgccgcggcggccggcgatagcccggcgctcatgacagatccctgcatgtcactgagtccaccatgctttacagaagaagacagatttagtctggaagctcttcaaacaatacataaacaaatggatgatgacaaagatggtggaattgaagtagaggaaagtgatgaattcatcagagaagatatgaaatataaagatgctactaataaacacagccatctgcacagagaagataaacatataacgattgaggatttatggaaacgatggaaaacatcagaagttcataattggacccttgaagacactcttcagtggttgatagagtttgttgaactaccccaatatgagaagaattttagagacaacaatgtcaaaggaacgacacttcccaggatagcagtgcacgaaccttcatttatgatctcccagttgaaaatcagtgaccggagtcacagacaaaaacttcagctcaaggcattggatgtggttttgtttggacctctaacacgcccacctcataactggatgaaagattttatcctcacagtttctatagtaattggtgttggaggctgctggtttgcttatacgcagaataagacatcaaaagaacatgttgcaaaaatgatgaaagatttagagagcttacaaactgcagagcaaagtctaatggacttacaagagaggcttgaaaaggcacaggaagaaaacagaaatgttgctgtagaaaagcaaaatttagagcgcaaaatgatggatgaaatcaattatgcaaaggaggaggcttgtcggctgagagagctaagggagggagctgaatgtgaattgagtagacgtcagtatgcagaacaggaattggaacaggttcgcatggctctgaaaaaggccgaaaaagaatttgaactgagaagcagttggtctgttccagatgcacttcagaaatggcttcagttaacacatgaagtagaagtgcaatactacaatattaaaagacaaaacgctgaaatgcagctagctattgctaaagatgaggcagaaaaaattaaaaagaagagaagcacagtctttgggactctgcacgttgcacacagctcctccctagatgaggtagaccacaaaattctggaagcaaagaaagctctctctgagttgacaacttgtttacgagaacgactttttcgctggcaacaaattgagaagatctgtggctttcagatagcccataactcaggactccccagcctgacctcttccctttattctgatcacagctgggtggtgatgcccagagtctccattccaccctatccaattgctggaggagttgatgacttagatgaagacacacccccaatagtgtcacaatttcccgggaccatggctaaacctcctggatcattagccagaagcagcagcctgtgccgttcacgccgcagcattgtgccgtcctcgcctcagcctcagcgagctcagcttgctccacacgccccccacccgtcacaccctcggcaccctcaccacccgcaacacacaccacactccttgccttcccctgatccagatatcctctcagtgtcaagttgccctgcgctttatcgaaatgaagaggaggaagaggccatttacttctctgctgaaaagcaatgggaagtgccagacacagcttcagaatgtgactccttaaattcttccattggaaggaaacagtctcctcctttaagcctcgagatataccaaacattatctccgcgaaagatatcaagagatgaggtgtccctagaggattcctcccgaggggattcgcctgtaactgtggatgtgtcttggggttctcccgactgtgtaggtctgacagaaactaagagtatgatcttcagtcctgcaagcaaagtgtacaatggcattttggagaaatcctgtagcatgaaccagctttccagtggcatcccggtgcctaaacctcgccacacatcatgttcctcagctggcaacgacagtaaaccagttcaggaagccccaagtgttgccagaataagcagcatcccacatgacctttgtcataatggagagaaaagcaaaaagccatcaaaaatcaaaagcctttttaagaagaaatctaagtgaactggctgacttgatggaatcatgttcaagtggcatctgtaaactattatcccccaccctccactccccaccttttttttggtttaattttaggaatgtaactccattggggctttccaggccggatgccatagtggaacatccagaagggcaactgtctactgtctgcttatttaagtgactatatataatcaattcatcaagccagttattactgaaaaatcattgaaatgagacagtttacagtcatttctgcctatttatttctgctttgttctcagtgatgtatatgcaacattttgttgaaagccacgatggacttacaagctttaatggactcgtaagccagcatgggcttgcaaaaatttcttgtttaccagagcatcttcttatctttccacagagctatttacatcctggactatataacttaaaagaagtaaaacgtaattgcactactgttttccagactggaaaaaaaaaaaatctctgcaagtgaaactgtatagagtttataaaatgactatggataggggactgttttcacttttagatcaaaatgggtttttaagtagaacctagggtttctaattgacttgatttctggaaatgaaaacccgcgcttttattatgggaagcttcttgaactgcatttactattgtgaagtttcaagtcccgctgtaaagatcatgttgttttgttttccccagggctttcactgtgatttactgcattgcaggctgtatgataaaacacacataatttaaagagagaaggctcttgattccttatgcaagtggaagagttgaaacttgattgaaggacttaaaacattcacaaccttaagccgaggtggggggatatggggattcaggcaattgtttacacactttgaataactgcaaaggatttacggtttgtgaaaaatgtgtactgtggaaaagataataaattgaagacattattgtgtgggattgtgctgatttttgttgataacacaaaaaacactatgttttctggagagctgtgtaagctgtcttgttgcttagttgcaatataagaaatagtgatgttttggacgtaagttgtcaacaaatttctattttatattgttatatttttatgtagtttgaaatgtaaaaatgttctaatatcaagattaacaaatataaatttatggtgcatttagattgcgttgtattaatttataaagtatggtgttcattaaattggtgggttgtataagggtagcttttgttgttaaaaaaacagtagagagttaagttccatatagcaacaaagtatgttaacatctagggagtttctgcttataccactttaaaaatatgcaatcataagtgatttggttactgcaatgcagatggatgtttggatgaacaactgatacattttagttagaatgctttttcagcattatggctaaaatatatgtctaacccagtgctatttaggtgaaaatgctaattgataaaccagaagtttcttttgagatttgctttaaagaaatgctttagtaagaatatgaacaatttcctgatgtctcctataaattgtgattgtttattctattactattgttaaaaacttgaatggtatttatattggctgatatttatatacttaatagattgagttctgtaagggcaaaaacggattgaaatgaacatagcgttttgcactaatgataagataacctgagaggtagggttgaggaacacagggttgaaagctgttggagaggggaaaagttgtgcataaagaactgaaaagggttctggagtgttcattcagagtgaagggaaaactttatccttctatttcttataaccagacaggaggagttcttccctttgaaaattgcaaaaggaatgagaactttgcagttggatgaatagagaagggaaaagttgctggagcacggagtgaagatgggaggagctgttagcaaggcccactgctgctcctgggtgagaagggagctctggagcaggaccagctgggggccggcactgctgcttagagtggaggaggctggccaaagagactgtgggctgttttcagtcagggagcatgtgcattgtttgtgctcaatttcagacactcatttataaacaaattcaaccaagggatatttactgctttatgttgcttatgataattattttgcattaatacagtatacacatttgtaaattcaacaggaaattattgagttttggaaagctacagtaatttctgtattacatcatttatatgtgaaaagttggacatttctgtaagtttttaaaattatccatttgttactttaacattttaaaattatggtgttttcctgattttaaaagcaatattttccttactgt

SEQ ID NO: 4933 - DNA, 5265 bp, Homo Sapiens
  NM_020870
ggcgccggctgcgtcccggcctcctcctcctcttcctccgccctccttggctgggaaagtgggaggcggcggcggcggcgtggtgtgtgtgcgcgcgtgaggggggcagcagagaggagtctcccggtgccgccgcggcgtcagagacactgcgagcggcgagcgcggtggggccgcatctgcatcagccgccgcagccgctgcggggccgcgaacaaagaggaggagccgaggcgcgagagcaaagtctgaaatggatgttacatgagtcattttaagggatgcacacaactatgaacatttctgaagattttttctcagtaaagtagataaagatggatgaatcagccttgttggatcttttggagtgtccggtgtgtctagagcgccttgatgcttctgcgaaggtcttgccttgccagcatacgttttgcaagcgatgtttgctggggatcgtaggttctcgaaatgaactcagatgtcccgagtgcaggactcttgttggctcgggtgtcgaggagcttcccagtaacatcttgctggtcagacttctggatggcatcaaacagaggccttggaaacctggtcctggtgggggaagtgggaccaactgcacaaatgcattaaggtctcagagcagcactgtggctaattgtagctcaaaagatctgcagagctcccagggcggacagcagcctcgggtgcaatcctggagccccccagtgaggggtatacctcagttaccatgtgccaaagcattatacaactatgaaggaaaagagcctggagaccttaaattcagcaaaggtgacatcatcattttgcgaagacaagtggatgaaaattggtaccatggggaagtcaatggaatccatggctttttccccaccaactttgtgcagattattaaaccgttacctcagcccccacctcagtgcaaagcactttatgactttgaagtgaaagacaaggaagcagacaaagattgccttccatttgcaaaggatgatgttctgactgtgatccgaagagtggatgaaaactgggctgaaggaatgctggcagacaaaataggaatatttccaatttcatatgttgagtttaactcggctgctaagcagctgatagaatgggataagcctcctgtgccaggagttgatgctggagaatgttcctcggcagcagcccagagcagcactgccccaaagcactccgacaccaagaagaacaccaaaaagcggcactccttcacttccctcactatggccaacaagtcctcccaggcatcccagaaccgccactccatggagatcagcccccctgtcctcatcagctccagcaaccccactgctgctgcacggatcagcgagctgtctgggctctcctgcagtgccccttctcaggttcatataagtaccaccgggttaattgtgaccccgcccccaagcagcccagtgacaactggcccctcgtttactttcccatcagatgttccctaccaagctgcccttggaactttgaatcctcctcttccaccaccccctctcctggctgccactgtccttgcctccacaccaccaggcgccaccgccgctgctgctgctgctggaatgggaccgaggcccatggcaggatccactgaccagattgcacatttacggccgcagactcgccccagtgtgtatgttgctatatatccatacactcctcggaaagaggatgaactagagctgagaaaaggggagatgtttttagtgtttgagcgctgccaggatggctggttcaaagggacatccatgcataccagcaagataggggttttccctggcaattatgtggcaccagtcacaagggcggtgacaaatgcttcccaagctaaagtccctatgtctacagctggccagacaagtcggggagtgaccatggtcagtccttccacggcaggagggcctgcccagaagctccagggaaatggcgtggctgggagtcccagtgttgtccccgcagctgtggtatcagcagctcacatccagacaagtcctcaggctaaggtcttgttgcacatgacggggcaaatgacagtcaaccaggcccgcaatgctgtgaggacagttgcagcgcacaaccaggaacgccccacggcagcagtgacacccatccaggtacagaatgccgccggcctcagccctgcatctgtgggcctgtcccatcactcgctggcctccccacaacctgcgcctctgatgccaggctcagccacgcacactgctgccatcagtatcagtcgagccagtgcccctctggcctgtgcagcagctgctccactgacttccccaagcatcaccagtgcttctctggaggctgagcccagtggccggatagtgaccgttctccctggactccccacatctcctgacagtgcttcatcagcttgtgggaacagttcagcaaccaaaccagacaaggatagcaaaaaagaaaaaaagggtttgttgaagttgctttctggcgcctccactaaacggaagccccgcgtgtctcctccagcatcgcccaccctagaagtggagctgggcagtgcagagcttcctctccagggagcggtggggcccgaactgccaccaggaggtggccatggcagggcaggctcctgccctgtggacggggacggaccggtcacgactgcagtggcaggagcagccctggcccaggatgcttttcataggaaggcaagttccctggactccgcagttcccatcgctccacctcctcgccaggcctgttcctccctgggtcctgtcttgaatgagtctagacctgtcgtttgtgaaaggcacagggtggtggtttcctatcctcctcagagtgaggcagaacttgaacttaaagaaggagatattgtgtttgttcataaaaaacgagaggatggctggttcaaaggcacattacaacgtaatgggaaaactggccttttcccaggaagctttgtggaaaacatatgaggagactgacactgaagaagcttaaaatcacttcacacaacaaagtagcacaaagcagtttaacagaaagagcacatttgtggacttccagatggtcaggagatgagcaaaggattggtatgtgactctgatgccccagcacagttaccccagcgagcagaatgaagaagatgtttgtgtgggttttgttagtctggattcggatgtataaggtgtgccttgtactgtctgatttactacacagagaaacttttttttttttttaagatatatgactaaaatggacaattgtttacaaggcttaactaatttatttgcttttttaaacttgaacttttcgtataatagatacgttctttggattatgattttaagaaattattaatttatgaaatgataggtaaggagaagctggattatctcctgttgagagcaagagattcgttttgacatagagtgaatgcattttcccctctcctcctccctgctaccattatattttggggttatgttttgcttctttaagatagaaatcccagttctctaatttggttttcttctttgggaaaccaaacatacaaatgaatcagtatcaattagggcctggggtagagagacagaaacttgagagaagagaagttagtgattccctctctttctagtttggtaggaatcaccctgaagacctagtcctcaatttaattgtgtgggtttttaattttcctagaatgaagtgactgaaacaatgagaaagaatacagcacaacccttgaacaaaatgtatttagaaatatatttagttttatagcagaagcagctcaattgtttggttggaaagtaggggaaattgaagttgtagtcactgtctgagaatggctatgaagcgtcatttcacattttaccccaactgacctgcatgcccaggacacaagtaaaacatttgtgagatagtggtggtaagtgatgcactcgtgttaagtcaaaggctataagaaacactgtgaaaagttcatattcatccattgtgattctttccccacgtcttgcatgtattactggattcccacagtaatatagactgtgcatggtgtgtatatttcattgcgatttcctgttaagatgagtttgtactcagaattgaccaattcaggaggtgtaaaaataaacagtgttctcttctctaccccaaagccactactgaccaaggtctcttcagtgcactcgctccctctctggctaaggcatgcattagccactacacaagtcattagtgaaagtggtcttttatgtcctcccagcagacagacatcaaggatgagttaaccaggagactactcctgtgactgtggagctctggaaggcttggtgggagtgaatttgcccacaccttacaattgtggcaggatccagaagagcctgtctttttatatccattccttgatgtcattggcctctcccaccgatttcattacggtgccacgcagtcatggatctgggtagtccggaaaacaaaaggagggaagacagcctggtaatgaataagatccttaccacagttttctcatgggaaatacataataaaccctttcatctttttttttttcctttaagaattaaaactgggaaatagaaacatgaactgaaaagtcttgcaatgacaagaggtttcatggtcttaaaaagatactttatgtggttgaagatgaaatcattcctaaattaaccttttttttaaaaaaaaacaatgtatattatgttcctgtgtgttgaatttaaaaaaaaaatactttacttggatattcatgtaatatataaaggtttggtgaaatgaactttagttaggaaaaagctggcatcagctttcatctgtgtaagttgacaccaatgtgtcataatattctttattttgggaaattagtgtattttataaaaattttaaaaagaaaaaagactactacaggttaagataatttttttacctgtcttttctccatattttaagctatgtgattgaagtacctctgttcatagtttcctggtataaagttggttaaaatttcatctgttaatagatcattaggtaatataatgtatgggttttctattggttttttgcagacagtagagggagattttgtaacaagggcttgttacacagtgatatggtaatgataaaattgcaatttatcactccttttcatgttaataatttgaggactggataaaaggtttcaagattaaaatttgatgttcaaacctttgt

SEQ ID NO: 4934 - DNA, 3823 bp, Homo Sapiens
  NM_020873
aaagcggggcgcaccgcgggcgccggcaacgagccggtgaacgaggcgaggcccgtgcgcccgcggctgcaagcgcccgcctggcggggagaggggccgacggcgtcagcccgggcggcggcatccctaggcgcctggggcgccttcctccggacctggccgctcgctgccccgccctctgcaccccacttctccgaccctccttcccagtcctgcctccccctgccctggcctctgagagccgactgagcccagccccgtgcagcagcggttgcctgtgtcgccgcctagtctccggtcttggtgctctcccgggggtgccccaaggagccagtgcgcgctgcgggctgggaaggaggcgccgctcagctagtcctcctcctcctcctcgtctttctcctcctcctgctgctgctgccgccgccgccgccgtgggtgccgggtccgcgcgcaccccaacacccccaccagctgggcctcggggcacatctccagacttcaatttggctgaaataattcatgccacggacctgtgcacatgcctggaattgagagacacagttaaaagactccaagttgctttctgccttttgaaaactcctgaaaaccatccctttggactctggaattctacacagctcaaccaagactttgcttgaatgtttacattttctgctcgctgtcctacatatcacaatatagtgttcacgttttgttaaaactttggggtgtcaggagttgagcttgctcagcaagccagcatggctaggatgagctttgttatagcagcttgccaattggtgctgggcctactaatgacttcattaaccgagtcttccatacagaatagtgagtgtccacaactttgcgtatgtgaaattcgtccctggtttaccccacagtcaacttacagagaagccaccactgttgattgcaatgacctccgcttaacaaggattcccagtaacctctctagtgacacacaagtgcttctcttacagagcaataacatcgcaaagactgtggatgagctgcagcagcttttcaacttgactgaactagatttctcccaaaacaactttactaacattaaggaggtcgggctggcaaacctaacccagctcacaacgctgcatttggaggaaaatcagattaccgagatgactgattactgtctacaagacctcagcaaccttcaagaactctacatcaaccacaaccaaattagcactatttctgctcatgcttttgcaggcttaaaaaatctattaaggctccacctgaactccaacaaattgaaagttattgatagtcgctggtttgattctacacccaacctggaaattctcatgatcggagaaaaccctgtgattggaattctggatatgaacttcaaacccctcgcaaatttgagaagcttagttttggcaggaatgtatctcactgatattcctggaaatgctttggtgggtctggatagccttgagagcctgtctttttatgataacaaactggttaaagtccctcaacttgccctgcaaaaagttccaaatttgaaattcttagacctcaacaaaaaccccattcacaaaatccaagaaggggacttcaaaaatatgcttcggttaaaagaactgggaatcaacaatatgggcgagctcgtttctgtcgaccgctatgccctggataacttgcctgaactcacaaagctggaagccaccaataaccctaaactctcttacatccaccgcttggctttccgaagtgtccctgctctggaaagcttgatgctgaacaacaatgccttgaatgccatttaccaaaagacagtcgaatccctccccaatctgcgtgagatcagtatccatagcaatcccctcaggtgtgactgtgtgatccactggattaactccaacaaaaccaacatccgcttcatggagcccctgtccatgttctgtgccatgccgcccgaatataaagggcaccaggtgaaggaagttttaatccaggattcgagtgaacagtgcctcccaatgatatctcacgacagcttcccaaatcgtttaaacgtggatatcggcacgacggttttcctagactgtcgagccatggctgagccagaacctgaaatttactgggtcactcccattggaaataagataactgtggaaaccctttcagataaatacaagctaagtagcgaaggtaccttggaaatatctaacatacaaattgaagactcaggaagatacacatgtgttgcccagaatgtccaaggggcagacactcgggtggcaacaattaaggttaatgggacccttctggatggtacccaggtgctaaaaatatacgtcaagcagacagaatcccattccatcttagtgtcctggaaagttaattccaatgtcatgacgtcaaacttaaaatggtcgtctgccaccatgaagattgataaccctcacataacatatactgccagggtcccagtcgatgtccatgaatacaacctaacgcatctgcagccttccacagattatgaagtgtgtctcacagtgtccaatattcatcagcagactcaaaagtcatgcgtaaatgtcacaaccaaaaatgccgccttcgcagtggacatctctgatcaagaaaccagtacagcccttgctgcagtaatggggtctatgtttgccgtcattagccttgcgtccattgctgtgtactttgccaaaagatttaagagaaaaaactaccaccactcattaaaaaagtatatgcaaaaaacctcttcaatcccactaaatgagctgtacccaccactcattaacctctgggaaggtgacagcgagaaagacaaagatggttctgcagacaccaagccaacccaggtcgacacatccagaagctattacatgtggtaactcagaggatattttgcttctggtagtaaggagcacaaagacgtttttgctttattctgcaaaagtgaacaagttgaagacttttgtatttttgactttgctagtttgtggcagagtggagaggacgggtggatatttcaaatttttttagtatagcgtatcgcaagggtttgacacggctgccagcgactctaggcttccagtctgtgtttggtttttattcttatcattattatgattgttattatattattattttattttagttgttgtgctaaactcaataatgctgttctaactacagtgctcaataaaatgattaatgacaggatggggttcccctgtgcttttaccagtagcatgaccccttctgaagccatccgtagaaagtactttgtcctccaaaaagctaacatacggttttgaagcagcattgaaacttttgtagcaatctggtctatagacttttaactcaagaagctaaggctagacttgttaccttcgttgaatgatgttagttgactgtactgtaatgttgtatcaactgaattgaatgtttgcctttaaacaatgaattttctttttctttccttttttttttttttgttgtaatagttaaagaggcttagaacaagctaacaggcaatagaaatatgtatatcagattttttaatgtaacaaactacatgttaattgttatcttattctttttatctttagtagacacttttaaaagaaaagacaagtttgttgtgtttaactcaccaacacgtggtgtataatgaagacagaactataataaattagttttgttctgattttttagaacacttgcaataatgtatcatttatagttcttgctagttgcagtggtaatatttttcacatccataaaaacaactaccaaaata

SEQ ID NO: 4935 - DNA, 3333 bp, Homo Sapiens
  NM_020879
ataccaaggacgcgacttcttgtttggagagggtggagctttggagtgagacccaggaggccaaatcccaaagagaaaaataggagcctaaataaggatcaggaccaagggaagggaatcgtgaaaaatggaagacagtagcacagacacagaaaaagaagaggaagaggagaaagatgaaaaggatcaagagcccatttatgccatagtgcccacaattaacattcaagatgagcggtttgttgatttatctgaaactccagctttcatttttctgcatgagttacatgctatgggaaaacttcctggaaccagaatggcagcgttaaaagccaagtataccttgctgcatgacgccgtgatgagcacacaagagtcagaggtccaactgctacagaatgccaaacgtttcactgagcaaatacaacagcagcagtttcacctgcagcaagctgataattttccagaagcattctccacggaggtctccaaaatgagagaacaacttctcaagtatcaaaatgaatataatgcagtgaaggaaagagagttccataatcagtacagattaaatagcttaaaggaagaaaaaatcatcatagtaaaagaatttgagaagataacaaagccaggagaaatggagaagaagatgaaaatattgagagaaagcactgaagaattacgtaaagaaataatgcagaagaaattagaaattaaaaatttacgagaagatttggcatctaaacaaaagcaattattaaaagagcagaaggaactagaagaattgttgggacatcaggtcgtcctaaaggatgaagtggcccaccatcaaaccattccagtacaaattggaaaagagatagaaaaaataacacgcaaaaaagtagaaatggaaaagaaaaaaattgtcttggaacaagaagtcaaaacgctaaatgactccctaaagaaagttgaaaacaaggttagtgctatagtggatgagaaggaaaatgtaataaaggaagttgaaggcaaacgagccttacttgaaatcaaagaacgagaacataaccaattggtcaagctattggaattagccagagagaatgaagcaacttcattaactgaaagagggatcttggatctcaatttacgcaacagtctcattgacaagcagaactaccatgatgaactttctcgtaagcaaagagagaaagaacgagattttcgaaatttaagaaagatggaactgctcttgaaagtgtcctgggatgcacttaggcaaactcaagcactgcatcaaaggcttctattagagatggaagctatccccaaagatgattctacattatctgagagaaggcgagagcttcacaaggaagttgaagtagctaagaggaatttggcccaacagaaaattatatcagaaatggagtctaagttagtagaacaacaacttgcagaagaaaacaagcttttaaaggagcaagaaaacatgaaagagctagtagtcaaccttctccgcatgactcaaatcaaaattgatgaaaaggaacaaaagtccaaggatttcctgaaagctcagcaaaaatacaccaacattgttaaagaaatgaaagcaaaggatcttgaaatcaggatacacaagaagaaaaaatgtgaaatttatcggagactgagagagtttgctaaactgtatgacaccattcgaaatgaaagaaacaaatttgttaacttactccacaaagctcatcagaaagtaaatgaaataaaagaaaggcataaaatgtcattaaatgaacttgaaattctgagaaatagtgccgttagtcaagaaagaaagctacaaaattccatgctgaaacacgccaacaatgttaccatcagagagagcatgcaaaacgatgtgcgcaaaattgtatcaaaacttcaggaaatgaaagaaaagaaggaagcccagttaaataacattgacagacttgccaacacgatcacaatgatcgaagaggagatggtgcagcttcgcaaaagatacgaaaaagctgttcagcatcgaaatgaaagtggcgttcagctgatagagcgggaagaagaaatatgcattttttatgaaaaaataaatatccaagagaagatgaaactaaatggagaaattgaaatacatctactggaagaaaagatccaattcctgaaaatgaagattgctgagaagcaaagacaaatttgtgtgacccagaaattactgccagccaagaggtccctggatgccgacctagctgtgctccaaattcagttttcacagtgtacagacagaattaaagacctggagaaacagttcgtaaagcctgatggtgagaatagagctcgcttccttccagggaaagatctgaccgaaaaagaaatgatccaaaaattagacaagctggaactacaactggccaagaaggaggagaagctgctggagaaggatttcatctatgagcaggtctccaggctcacagacaggctctgcagcaaaactcagggctgcaagcaggacacactgctcttagccaagaagatgaatggctatcaaagaaggatcaaaaatgcaactgagaaaatgatggctcttgttgctgagctgtccatgaaacaagccctaaccattgaactccaaaaggaagtcagggagaaagaagacttcatcttcacttgcaattccaggatagaaaaaggtctgccactcaataaggaaattgagaaagaatggttgaaagtccttcgagatgaagaaatgcacgccttggccatcgctgaaaagtctcaggagttcttggaagcagataatcgccagctgcccaatggtgtttacacaactgcagagcagcgtccgaatgcctacatcccagaagcagatgccactcttcctttgccaaaaccttatggtgctttggctccttttaaacccagtgaacctggagccaatatgaggcacataaggaaacctgttataaagccagttgaaatctgaatatgtgaacaaatccaggcctctcaaggaaaagacttcaaccaggcttccttgtacccacaggtgaaaaatgtgagcataatacttctaatattattgataagtaaggtaaccacaattagtcagcaacagagtacaacagggtttctatttacccaccaactactatacctttcatgacgttgaatgggacatagaactgtcctacatttatgtcaaagtatatatttgaatcgcttatattttctttttcactctttatattgagtacattccagaaatttgtagtaggcaaggtgctataaaaatgcactaaaaataaatctgttctcaatgaa

SEQ ID NO: 4936 - DNA, 4187 bp, Homo Sapiens
  NM_020882
ataagctccagccttcctgtggccacagcaggaccagagtggaccagcacaccccaggagagaggactggggtcccaggagtaggaggagcccgagcaccatgagctccggagaccctgcacacctcggcctctgcctctggctgtggctgggcgccaccctgggaagagagcaagttcaagcaagcggtctcctgaggctggctgtgctgcctgaggaccggctgcagatgaagtggagagagtcggaggggagcggcctcggctacctggtgcaggtgaagcccatggcaggggactcggaacaggaggtgatactgaccaccaagacccctaaggccacagtggggggcctgagcccctccaagggctacaccttgcagatcttcgagctcactggctctgggcgcttcctgctagctcggagggagtttgtgattgaggatctgaagagtagctccctggacaggagcagccagaggcccctcggctctggagccccggagcccaccccctcccacacggggagcccagaccctgagcaggcttctgagccccaagttgccttcacaccaagccaggatccgcgcactcctgccggcccccagttccgctgcctgccccccgtgcctgctgacatggtcttcctggtggacgggtcctggagcattggccacagtcacttccagcaggtcaaggacttcctggccagtgtcatcgcaccctttgaaatcgggccggataaggtccaagtaggcctgactcagtacagcggggatgctcagactgagtgggacctgaactccctcagcaccaaggaacaggtgctggcagctgtgcgccgcctccgctacaagggggggaacacgttcacaggccttgccctgacccacgtgctggggcagaacctgcagccggcggctggcctccgtccagaggcagccaaggtggtgattctggtgacggacggcaagtcccaggacgatgtgcacactgctgcccgtgtcctcaaggacctgggcgtgaacgtcttcgctgtgggtgtgaagaacgccgatgaggctgagctgaggctcctggcgtccccgccgagggacatcaccgtccacagcgtgctggacttcctgcagctcggcgcgctggctggcctgctcagccgtctcatctgccagaggctccagggtgggagcccgcggcagggcccagcagcggctccagccctggacaccctccctgcccccaccagcctggtcctgagccaggtgacctcctccagcatccgcctgtcctggactccagccccccggcaccccctcaagtatctgatcgtttggcgagcctctagaggtggcacccccagggaggtggtggtggagggacccgccgcctccacggagctgcacaacctggcctcccgcacagagtacctggtctccgtgttccccatctatgagggcggggttggcgaaggcctgcggggcctggtgaccacagcacctctgcctccgccccgggcgctgaccctggccgcagtgacgcccagaaccgtccacctcacctggcagccctcggccggggccacccactacctggtgcgatgttctcctgcttcccccaagggtgaagaggaggagcgagaggtgcaggtcgggcggcccgaggtgctgctggatggcctggaacctggcagggactatgaggtctcggtgcagagcctgcgaggccctgagggcagcgaggcccggggcatccgtgccaggacccccaccctggcccccccgagacacctgggcttctcagacgtgagccacgacgcggcacgagtgttctgggagggtgccccgaggcctgtgcgcctggtcagggtcacctatgtgtccagcgagggtggacactcggggcagacagaggctcctgggaacgccacctcggccacgctggggcctctctcttcctccaccacctacactgtccgtgtcacctgcctctaccctgggggtggctcctctacgctgactggccgggtgaccaccaagaaagctcccagcccaagccagctgtccatgacggagctgccaggggatgcagtccagctggcgtgggtggccgcagccccgtctggcgtgcttgtctaccagatcacgtggacgcccctgggagaggggaaggctcacgagatctctgtcccagggaacctcggcacggccgtcctgcctggcctagggaggcacacagagtacgacgtcaccatcttggcctactacagggacggggcccgcagtgaccctgtgtccctccgctataccccctccacggtgagcaggagcccaccctccaacctggccctggcctcggagacccccgacagcctgcaggtcagctggacgcccccgcttggccgcgtgctccattactggctcacctacgcccccgcctctggcttgggacccgagaaatccgtctctgtgccaggagccaggagccacgtgacactgcccgacctgcaggcagccacgaagtacagggtcctggtctcagctatctatgcagcaggcaggagtgaggctgtgtctgccacgggccagacagcctgcccagccctccgccctgacggctccctcccagggtttgacctgatggtggccttcagcctggtggaaaaggcttatgcgtccatccggggcgtggccatggagccctctgccttcggtgggaccccgaccttcacgctcttcaaggacgcccagctgacaagacgggtcagtgacgtctacccagcccccctacctccagagcacaccatcgtcttccttgtgcgcctacttcccgagacaccccgtgaggccttcgcgctgtggcagatgacagccgaggacttccagcccctccttggggttctgctggatgccgggaagaagtccctgacctacttccaccgtgaccccagggctgccttgcaggaggccaccttcgacccgcaggaagtgaggaagattttcttcgggagcttccacaaggtgcacgtggctgtgggccgctccaaggtcaggctctatgtggactgccggaaggtggctgagcggccccttggggagatgggcagcccacccgctgcgggcttcgtcacgctggggaggctggccaaggccaggggcccccggagcagttcggccgcgtttcagctccagatgctgcagatcgtgtgcagtgacacctgggccgatgaggaccggtgctgtgagctccctgcctcgagggatggagagacctgccccgccttcgtgtctgcctgttcctgttcctcagagacccctgggcccccaggacctcaaggacccccaggcctccctgggaggaatggcaccccaggagagcagggcttcccagggcccaggggtccaccaggggtcaaaggagagaagggagaccatgggcttccaggcttgcagggccaccccggccaccagggcatccccgggagagttggcctccagggaccaaagggaatgagaggcctggagggaactgctggcctgcctggaccccctggccccagggggttccagggcatggcaggggccaggggcactagtggagagcgaggacctccagggaccgtggggcccacaggactgccagggcccaaaggggaacgaggagagaagggcgagccgcagtcccttgccaccctctaccagcttgtgagccaggcctcacacgtgtcaaagttcgactccttccacgagaacaccaggccccccatgcccatcttggagcagaagctggagccgggcactgagcccctggggtcccctggcacccgcagcaaggccctggttcctggagaatgggggcgtggtggccgccaccttgagggcagaggggagcctggagctgttggtcagatgggcagccctgggcagcagggggctagcacccagggcctctgggagtgacaggacattttctgcactgccccgaggaacgctgagccttcctccctgggtttgtctggacaccgagagcgaccacatcctggagaagccaggagaaaagctcaggaagagcctgcaggtggaaggagagggaagcagcggcctcggccaaggcccaccccatactcttggctctgtagcatttccaagttcagataaacccctgagtgctcacccaaaaaaaaaaaaaaaa

SEQ ID NO: 4937 - DNA, 5860 bp, Homo Sapiens
  NM_020883
ccgcgcgccgcctcacgctaccctgcaggccgcccgcgtctgccctcgcggcgcgctcccgggcccggccgcggttccccactcgggccggctggctcgcgggttctctcgccccgcccccctcggcgccaccgctgggcgcttgcgcggggcgcgtggccgtggccagggtctccgccgcagcccgagcagccgccgccgcctcagtcagtcagtcagtccccagcaatggcggacggaggtgagcgagaggagctgctctcgccgtcaccggtctctccggctaagcggcagtgttcgtggcccagcccgcaggctcatcaccctcgcggttcgcctggggcagccggcggaggggcagggggcgtcggcagcagctgcctggtcctcggggcccgcccccacctgcagccggattccttactggactgcgccgccaagacggtggcggaaaagtgggcatacgaacgggtggaggagcgcttcgagcggatcccggagcccgtgcagcgccgcatcgtctactggtccttcccgcggaatgagcgggagatctgcatgtactccagcttccagtaccggggcggccccggcgccggcgctgctggcggcgccgcgggggcttcgccggccgaggaggggccgcagccaccccccggggccgccgctccggccggctccgcccccgggggcgtcgcggctggggcatcccccgggctgggcgcaggggccggcgcggccggctgcggtggcgaggggctcccgttccgccggggcatccgtctgctggacagcggctccgtggagaacgtgctgcaagtcggctttcatctgagtggcacagtaactgagctggccactgcctctgaaccagcagtgacttataaagttgcaatcagttttgatcgatgcaaaatcacctcagtgacatgtggctgtgggaacaaggacatattctactgtgcccatgtggtagcactctcactctacaggatccgtaaaccagaccaagtcaaattgcgtcttcctatctccgaaacccttttccagatgaatagggaccagctacaaaagtttattcaatatttaatcacggcacaccacactgaagttcttcctactgcacagaaactggcagatgagattctatcctccaactcagaaatcaaccaagtgaatggtgcccctgaccccacagctggggccagcattgacgatgagaactgttggcatttggatgaagaacaggtgaaagaacaagtgaagctttttctctcccagggcggttactgtggctctggaaagcaactcaactcaatgtttgccaaggttcgagaaatgctgcggatgagagattccaatggagcaaggatgctgacactaataactgagcagtttgtggctgacccacgactcacactctggaggcagcaaggaacaaacatgacagacaagtgcaggcagctctgggatgagctaggggctttatgggtgtgcataattttaaatccacactgcaaactggaggagaaatcctgctggctgcagcagctgcagaagtggagcgacctggatgtctgtcccctggaggatggaaactatggacatgagctgcccaacatcaccaatgcacttccccagagtgccattcacagcccagactccttatccagaccaagacgaacagtattcactagagccattgaggggcgtgaattacattggcaggatagccacctacagcgaataatcagcagtgatgtttatacagctcctgcctgccagcgggaaagtgaaagactactctttaattcccaaggccagccactgtggcttgagcatgtgcctacagcctgtgctcgagttgacgccctgcgttcccatggttatccaaaagaggccctcagactcacagtggccattattaatactctgaggttgcagcagcagcggcaactggaaatctacaagcatcagaagaaagaactgttgcagagaggaaccacaaccatcacaaacctggagggctgggtgggccaccccctggatcccatcgactgcctgtttctcactttgactgaggcctgccgcctgaatgatgatggctatctggagatgtcagatatgaatgaaagcagaccccctgtgtaccagcatgtacctgtggctgcaggctccccaaacagcagtgagtcctacctgtcattggccctggaagttgcactgatgggcctgggtcaacagaggttaatgcctgaaggcctctacgcacaggacaaggtatgccgtaatgaggagcagctcctgagccaactccaagagctgcagctggacgatgagctagtgcaaacactgcaaaaacaatgcatcttactgctggaaggaggtcctttcagcggtctgggagaagtcatccaccgagagagtgttcccatgcatacctttgccaagtatttgttctcagctctgctgcctcatgatccagacctgtcctataaattagccttacgtgccatgaggttacctgttttagaaaactcagcttctgcaggcgacacatcccaccctcaccatatggtgtctgtggtgcccagccgttatcctcgctggttcacgcttggacacttggaatcacagcagtgtgaactggcctccaccatgctgactgctgccaaaggagacactttgagactccgaacaattctggaagcaatacagaagcacattcattcttcctccctcatcttcaaactggcccaagatgcattcaagattgctactcccaccgacagtagtactgacagcaccctgctcaacgttgccctggaacttgggttacaggtgatgcggatgaccttatcaacccttaactggagacgcagggagatggtacgatggttggtgacctgtgctacagaagtgggtgtgcgggccctggtgagcatcttgcagagctggtacacactcttcacccctactgaggctactagtattgtagctgccacagccgtatcccacaccactatcctgcgcctcagtcttgactatccacagcgggaggaactggctagctgtgctcgcacactggctctacagtgtgctatgaaggatccacagagctgtgccctgtcagcccttacactctgtgagaaagaccacattgcctttgaggcagcctaccagattgccattgatgctgctgctggtggtatgacccattcacagctgttcaccatcgcccgctacatggagctccgtggctacccgctacgtgccttcaagctggcctcattggccatgagccatcttaacctggcctacaaccaggatactcacccagccatcaatgatgtgctctgggcttgtgctctcagccactctctgggcaagaatgagctggcagctctcatccccctggtggtgaagagtgtgcactgtgccacagtgctttcagacatcttacgacgctgcacagtgactgcacctggcctggccggcatcccaggccgccgaagctctggaaagctcatgtccactgacaaagctccattgcgccagttgctggatgccaccatcaatgcctatatcaacactacacactcacgcctaacacacatcagccctcgccactatggagagttcattgagtttctaagcaaggctcgggagaccttcctgctgccccaggatggccacctgcagtttgcccagttcatcgacaacctcaaacagatctacaaaggcaagaaaaagttgatgctgctggtgcgagagcgctttggctgagagagcagatagctcactgccagagcagcctgggttcccaggtagtatcaggtcaggccaagggcactgaaacatttgtccaccctgagagaactctgagcacctgtggatgaggccaaaggaccacagggctaaggatggggaaagtccagctctagtcgataatgcctaccttggcaagcttctgactacagcctactgttcatggaggagctgggccctgcagatcgaccagaaaccccacaacatgccacctcatgcccctatatcctgcgtgtcctgagcattggccctgtctcccttggcaaacacagaacactgttccatctcagggattgcttaaccagagaaacagacacatttgtgggactgtaaatactatatgtgttgctaattattgtaaacttgtaactatttataattctgcttctgatttgatgggcacttgaagtagctgtgggtaggaggatatgcttattttctgaggagactcacaaccatttctcaggtttcccttgcagagtgtttgctggtagcagtggaagagtgggggtgccaaggagaaaaatggccagttaggatcaacccaagtctagtctatgcagaatcccccacctacagacagggcatttatagtccagtggtgagtgagggacagaggccaggactggacttagacttttgcctcacaaaactgtgaggacattgaagctcctgcctcacacagcctcttcaggagcctgctgaacacctgagaaacaagtgcagggagaagatgaaggtctgggaagccgctgagttcataatattcatctactgtggtcacctttgtgttagcaagtgtgtggtttcatctataattgtgtgtgtgtatctttatggctaagtacatgtgtgtatgtacatagatacatctgtgcatgcctgtttgtgcacatatatatttatgtgtatgtgtcagttctatggctgtgtacctgtttgaatatgtgcacactggactgtgagtttctacgtgaggatatacacattttgtgtacatgtgaggatgcacatctttgtgcaaatgcactcatgtttgtgcatgtttagtatgtgtatctgcgtacacgagtgcatgtgtataaacatgtttgtatccatgtgtatgcttgttatccatgcatctgtgtctttatatgtgtaactgagcgtatttctacatgtagggatgtctgtgtattcatgtttgaggatctgcatcaatgtgtcctttttgccagatttctctttcccattcctcttaaatctctctcgccagctaaacgtttgttccccatctctgtgcctcctctattcattctctcaccaaacaagcttctaagcaccaatctccctctgccatcagattggctgctttagctccatagttctcttctcgcctcatacttgctttcttcccctgcctttctacctcaagcttcctcgccggcttttgtcacagtctcattgctcgctgacttggaggctagggctggtctgcacttagcctctcccttcctaatttctagccctagtgggcagtcctgtcttagccctggctgacctccatagtgtatcatgttcctgctaccttcctgacccctgtgctcagcctggaattgttataggaggtagcaagggcactcagaaaagtcagttggaaccagtgtcttggtgtttactgtttcatgtcttagttcctgagttgggggtggggtttgatagggaaggggtggtatagctagaatgtgaactaagaacttctccatctgctttactttttctttcttcgacaaactgtcaccttttttactccaaactgaccaagaagttgtatttgccatttgtggctactcaagtcttactgtccagccaagggcccctacgtctcagcccaatgggttggttaaaaaaaagagagaagccactctcatttctgtatcacagttgcccttttttagcaagtgtgtgaattcacagtgcttttctatgaataaatcatggatcacataaaagatcatttttctaaaaaaaaaaaaaaaaaaaaaaaaaa

SEQ ID NO: 4938 - DNA, 2672 bp, Homo Sapiens
  NM_020895
gtcgggtgggggcggcggccgcggaaggccaggccggtgccctgcggggacgcccagcgcagcccagccccgcgcagcccagccctgccctgccctgccctgccctgcgcccggggcgcgcccaccgcgccgcatccatgttcgacaccacaccccactctggccggagcacgccaagcagctccccatcgctccggaaacggctgcagctcctgcccccaagccggcccccacctgagccagaaccaggcaccatggtggagaagggatcagatagctcctcagagaagggtggggtgcctgggacccccagcacccagagcctaggcagccggaacttcatccgcaacagcaagaagatgcagagctggtacagtatgctgagccccacttataagcagcgtaatgaggacttccggaaactgttcagcaaactccccgaagcagaacgcctcattgtggattactcctgcgccctgcagcgtgagatcctgctccagggccgcctctacctctctgagaactggatctgcttctacagcaacatcttccgctgggagaccacgatctccatccagctgaaggaagtgacatgtctgaagaaggaaaagacggccaagctgatccccaacgccatccagatctgcacggagagcgagaagcatttcttcacttcctttggggcccgtgaccgctgcttcctcctcatcttccgcctctggcagaatgcactgcttgaaaagacgctgagtccccgcgagctctggcacctggtgcatcagtgctacggctcagagctgggcctcaccagtgaggatgaggactatgtctcccccttgcagctgaacggtctggggacccccaaggaagtgggagatgtgatcgccctgagcgacatcacctcctcgggggcagctgaccgcagccaggagccaagcccagtgggttcgcgccgtggccatgtcacgcccaacctttcccgagccagcagcgacgcagaccatggggcagaggaggacaaggaggagcaggtagacagccagccagacgcctcctccagccagacagtgaccccggtggctgaacccccgagcacagagcccacccagcctgacgggcccaccaccctgggccccttggatctgctgcccagtgaggagctattgacagacacaagtaactcctcttcatccactggggaggaagcggacttggctgccctgcttcccgacctctccggccgcctcctcatcaactctgtcttccatgtgggcgctgagcggctccagcagatgctcttctcggactcgcccttcctccagggcttcctacagcagtgcaagttcacagacgtgacgctgagcccctggagtggggacagcaagtgccaccagcgccgggtgctgacgtacaccatccccatcagcaacccactgggccccaagagcgcctccgtggtggagacacagacgctgttccggcgcggcccccaggccggcgggtgtgtggtggactccgaggtgctgacgcagggcatcccctaccaggactacttctacactgcccaccgctactgcatcctgggtctggcccggaacaaggcgcggctccgagtgtcttctgagatccgctaccgaaagcagccgtggagcctggtgaagtcgctcattgagaagaactcgtggagcggcattgaagactatttccaccatctggagcgagagctcgccaaggctgagaagctgtctctggaggaaggcgggaaggatgcccggggcttgctatccggcctgcggcggcggaagcggcccctgagctggcgggctcacggggacgggccccagcacccagatcctgacccctgtgcccgggccggcattcacacctcgggctccctcagctcccgcttctccgaaccatctgtggaccagggccccggggcaggcatccccagtgccctggttctcatcagcattgtgatctgtgtgagccttatcatcctcatcgccctcaacgtcctgctcttctaccgcctctggtccctggaaaggacagcccacacctttgagtcctggcacagcctggccctggccaagggcaagttcccccagacggccacagagtgggccgagatcctggcgctgcagaagcaattccacagcgtggaggtgcacaagtggaggcagatcctgcgggcctccgtggagctcctggatgagatgaagttctcgctggagaagctgcaccaaggcatcacagtctcagaccctccctttgacacccagccccggcccgatgacagcttttcctgaggaccccggccacgcagctgttcccccacatggacagatggacacacagagcctcggcggccactgctggcacggtgtgagcgccaggcatctcccacccgcccctcccgacggcccaaccaggggctgtgcagacgtggggaccacggaaccgagatgcactttagaccagggagctggcccggcctctggcaggccccccactaacttattttgcccggctgaggttgtggggggcgcctcctggggtgcacgattccctcagctctgggtttaatgtattatatttatttggggccgacagtgccccaataaagggtcagaagtgaaaaaaaaaaaaaaaaaaaaaaaaaaaaaaaa

SEQ ID NO: 4939 - DNA, 3904 bp, Homo Sapiens
  NM_020896
ctccctccgccgcgccctcgctccgcctcgcgcggggggaccatctgctggcatttcctgcagccaggcccgcgccgccagtggagcccccgcgcgcccggccggcccggagcaccgagctcgcggcacggtaggagaagcccccgagcgcccacagcatgaaggaggaggccttcctccggcgccgcttctccctgtgtccaccttcctccacccctcagaaagtcgacccccggaagctcacccggaacttgctcctcagcggagacaatgagctctacccactcagcccagggaaggacatggagcccaacggcccgtcgctgcccagggatgaagggcccccgaccccaagctctgccacgaaggtgccaccggcagagtacaggctgtgcaacgggtcagacaaggaatgtgtgtcccccaccgccagggtcaccaagaaggagactctcaaggcgcagaaggagaactaccggcaggagaagaagcgcgccacacggcagctgctcagcgctctgacagaccccagcgtggtcatcatggctgacagcctgaagatccgcggcaccctgaagagctggaccaagctgtggtgcgtgctgaagccgggggtgctgctcatctacaagacgcccaaggtgggccagtgggtgggcacggtgctgctgcactgctgcgagctcatcgagcggccctccaagaaggacggcttctgcttcaagctcttccacccgctggatcagtccgtctgggccgtgaagggccccaaaggtgagagcgtgggctccatcacacagcccctgcccagcagctacctgatcttcagggccgcctccgagtcagatggtcgctgctggctggacgccctggagctggccctgcgctgctctagcctactgagactgggcacctgcaagccgggccgagacggggagccagggacctcgccagacgcatcaccctcatcgctctgtgggctgccagcctcagccaccgtccacccagaccaagacctgttcccactgaacgggtcttccctggagaacgatgcattctcagacaagtcggagagagagaaccctgaggagtcagataccgagacccaggaccatagccggaagacggagagtggcagcgaccagtcagagacccctggggccccggtgcggagagggaccacctatgtggagcaggtccaggaggagctgggggagctgggcgaggcgtcccaggtggagacagtgtcagaggagaacaagagtctgatgtggaccctgctgaagcagctacggccaggcatggacctgtcccgcgtggtgctacccacgttcgtactggagccgcgctccttcctgaacaagctctccgactactactaccacgcagacctgctctccagggctgcggtggaggaggatgcctacagccgcatgaagctggtgctgcggtggtacctgtctggcttctacaagaagcccaagggaatcaagaagccgtacaaccccatcctgggggagaccttccgctgctgctggttccacccgcagactgacagccgcacattctacatagcagagcaggtgtcccaccacccgcccgtgtctgccttccacgtcagcaaccggaaggacggcttctgcatcagtggcagcatcacagccaagtccaggttttatgggaactcgctgtcggcgctgctggacggcaaagccacgctcaccttcctgaaccgagccgaggattacacccttaccatgccctacgcccactgcaaaggaatcctgtatggcacgatgaccctggagctgggtgggaaggtcaccatcgagtgtgcgaagaacaacttccaggcccagctggaattcaaactcaagcccttcttcgggggtagcaccagcatcaaccagatctcgggaaagatcacgtcgggagaggaagtcctggcgagcctcagtggccactgggacagggacgtgtttatcaaggaggaagggagcggaagcagtgcgcttttctggaccccgagcggggaggtccgcagacagaggctgaggcagcacacggtgccgctggaggagcagacggagctggagtccgagaggctctggcagcacgtcaccagggccatcagcaagggcgaccagcacagggccacacaggagaagtttgcactggaggaggcacagcggcagcgggcccgtgagcggcaggagagcctcatgccctggaagccgcagctgttccacctggaccccatcacccaggagtggcactaccgatacgaggaccacagcccctgggaccccctgaaggacatcgcccagtttgagcaagacgggatcctgcggaccttgcagcaggaggccgtggcccgccagaccaccttcctgggcagcccagggcccaggcacgagaggtctggcccagaccagcggcttcgcaaggccagcgaccagccctccggccacagccaggccacggagagcagcggatccacgcctgagtcctgcccagagctctcagacgaggagcaggatggtgactttgtccctggcggtgagagcccatgccctcggtgcaggaaggaggcgcggcggctgcaggccctgcacgaggccatcctctccatccgagaggcccagcaggagctgcacaggcacctctcggccatgctgagctccacggcacgggcagcacaggcaccgaccccaggcctcctgcagagcccccgatcctggttcctgctctgcgtgttcctggcgtgtcagctgttcattaaccacatcctcaaataggagccctgagggcagagctcctggccggtcctgagccctccctcccaggcacccagcactttaagcctgctccatggaggcagagaggcccggcaagcacagccactgtgacggggagtccaggcgcaggagggacccggggccacaaggcgctgcgggcccaggtgtgctgggcccctctcaggggcactggcctctctgcagggccttccgcccagcgctggccttaatgctaaagccaaatgcagcttctgctgtgcgacgcactcctggccatcttgccgtgtcaccccctgtccggcctccacttgccatgggggatggatggatttagggtgggagggcctgtgggggccctggacagtcacaccccagcagcagtgagtgggcaggtttggaggagccccgagtggcccaggagtccccccacacacagatgcataggcctgccttccggagaccctgtccacattgccgggaccaccctggtggggccactggtgggtgccagggacaggttagggccactctggggaaggcattttggttttttattccacgctgtgctgtttggatgggagccccacagaggcaggtcctggaaccaccccacccccacacctggacgctcgctctggtgggggcacacgcaggtggaggtggttgtgggtgcaggtgtgtgcaggggtgtggggggcgcaggggtgtggcttagctggccccgcacccaggccggggaggctcaagttcgccactttactcagaccgatgcacagtcttcccattttacacttttttaataaacataattgcaatattttaggtgggctgcgagctgcagtcagccttcacgtctggcctcagtccccgtgtcagtgccgctctgcgtgtgcgtgtgcgcgtgtgtgagcctctacacatatatatacgtacagagccttaaaccacatcgtggcggtgccgtctgagctgtagcgggtggctttgtttccagtttttgtacccgtgtccttgtctcccctcctcccccatctggggatgtgtctgtgttccacaccttgaaataaacagacacatacgtgttctcttaaaaaaaaaaaaaaaaa

SEQ ID NO: 4940 - DNA, 5961 bp, Homo Sapiens
  NM_020899
agagtcgtgggtaaaccccccgctcgctggttgggcgaccttttgaagtgacagggagagaagaatttttttctttaatcccaccgcctctcctcgctgctcccttttgcactgaggcttaaggtttgaagactcgagggtaaaattgggccgctttcattctagtttggacaacggtttcatcttcagcaaaagcctctcattcgtagccccccccagctggaaaatggtctgctctgcgaatcgaaggaagaggcccagcagaagggactcgctgagccaccccccgccccactccatgttggctgtgctctcaggctggcaccatgcccccccctgcagaggtgacggacccgtcccatgcccccgccgtcctgcgccagctcaatgaacagcggctccgtggcctcttctgtgacgtcaccctcatagccggagacaccaagttccctgctcaccgcagcgtcctggctgcttcaagtcccttcttcagagaggccctgctcacttcagccccactaccccttccaccagctactgggggcgccgcacccaaccctgccaccaccacagctgcctcttcctcctcctcctcttcctcgtcttcttcctcttcttcctcctctgcttcttcttcttcttcctcttcctcttcctctccccctccagcctctccccctgcttcttccccaccccgggtcctggagttgccaggagtcccagcagctgcgttttctgatgtcctcaacttcatctacagcgcccggctcgcactgcctggtggtggaggggacggggcagctgtagcagagattggagctttggggcgccgtctgggcatctcccgccttcagggcctgggggagggaggtgatgcctgggtacctcctaccccagcccccatggccacctcgcagcctgaagaggacagctttgggcccgggcccaggccagctggggagtgggagggtgacagggctgaggcccaggcccctgacttgcagtgctccctgccccggcggcccctcccctgcccccagtgtggaaaaagcttcatccatcccaaacggctgcagacccatgaggcccagtgccgacgaggggccagcacgcgggggtctacagggctgggagctgggggcgctggccctggtggtcctgcaggggtggacgcctcagccctgcctccaccagtgggcttccgagggggccccgagcacgtggtgaaggtggtgggcggccacgtgctgtatgtgtgcgcggcctgcgagcgttcctacgtgaccctgtccagtctgaagagacacagcaatgtacactcgtggcggaggaagtacccctgccgctattgtgagaaagtgtttgctctggcggagtaccgcacgaagcatgaagtgtggcacacgggggagcgcaggtaccagtgcatcttctgttgggagacctttgtcacttactataacctgaagacccaccagcgagccttccacggcattagcccgggcctccttgccagtgagaagacacccaatggaggctacaagcccaagctcaatacactcaagctctaccgcctgctccccatgcgggcagccaagcggccctacaagacctacagccagggagccccggaggctcccctttctccaaccctcaacacaccggcccctgtggcaatgccagccagcccgccgcctgggcctccacctgccccagagcctggccctccaccctctgtcatcacttttgcccacccagccccctctgtcattgtccatgggggcagtagcagtggtggaggggggagtgggacggccagcacaggagggtcccaagctgcctcggttatcacttacactgctcccccgaggccacccaagaaacgagaatacccacctcctccccctgagcctgcagccacacccaccagcccagccacagcagtcagcccagccaccgctgcagggccagccatggccaccaccacggaggaggccaagggccggaatccacgggctggaaggactctgacttacacagccaagccagtgggcgggattggtggaggtgggggtccccccacaggggctggccggggcccctctcagctgcaggctccacctccactgtgtcagatcactgtgcgaataggggaggaggccatcgtcaagcgccgcatctcagagactgacctgcgtcctggggagctgagcggagaggagatggaggagagtgaggaggacgaagaggaggaggacgaagaggaggaggaggaggatgaggaggaatcaaaggctggtggggaggaccagctctggaggccctactactcctacaagcctaagcgcaaggctggagctgctggaggtgccagtgtggggggcagtgggctgccccgaggccgccggccaccacgttggaggcagaagctggaacggaggagctgggaggaaaccccagcggccgagagcccagcgggacgtgcccgcacagagcggaggcaccgatgcggggactgtgcccagaccttcaccaccctgagaaagctgcggaagcaccaagaggcccacggtgggggctcccacagctcccgggccggacggaggccctccacccgctttacctgcccccactgcgccaaggtgtgcaagaccgcagctgccctgagccgccacgggcagaggcatgctgctgagcggcccgggggcaccccaacccctgtcattgcctattccaagggcagcgctggcaccaggcccggggatgtcaaggaggaagccccccaagagatgcaagtctcctcatccagcggtgaggcaggtggcgggagcactgctgctgaggaagcttccgagaccgcctcactccaggaccctatcatttcagggggtgaggagcccccagtagtggcaagcgggggcagctatgtatacccacctgtgcaggaatttccactggccttgattgggggcggccgggaacctggcggtggcaggggaaaatctgggagtgaagggccagtgggggctggtgagggggaccggatggaggggataggggctgccaaagtcactttctaccctgagccctacccgctcgtctatggcccccagctccttgccgcctacccttacaacttcagtaacttggccgctctcccggttgctctcaacatggtcctacctgatgagaagggtgcgggggcccttcccttcctaccaggggtctttggctacgcagtgaatcctcaagcagcaccccctgccccaccaacaccacctcccccaactcttcctccaccaattccccctaagggagaaggggaaagggcaggggttgagagaacccagaagggcgatgtggggtgaaccctggggctcaatccccctttcaccagatgccaccctccctgaaccccccaccactaccagctccctggcctccctgccccttgggagccccttcacactcttgtgcagggacttgggggcccctggagctcaggggtcaggctgctttgtgtgagatgtagttttcccatctcctgggaagggatctttcgaggttcccctctcagtcttcctccagggaatggcctccatgaggggcagggccagcttccatcccttctccagcccttggggcaactgagcaatatacttaacctgaatctctactcacagcccccaccagctctgaatgtctaacctgctcccctgattcgtaaacctaggggaaaccatctctctcacctaatgacccgccttgttctgaagctttctctaagcccttcccagttgcttcctagcacattccattctttgtggcccagggcctggaccagaccattgtgatacctgaccccgcccacctgggagtgtggctttgggtttcatccttccccagcgtgggtctctacgtccctgtttcccttgtatcaagacaccttcctcagcttccatgcctttggatcttccatgttcctccccatattcctggacttcggagatggcctctcccaagccaggtcaaggaggtttgggggagggttgcccctctgcccctctgttctgtggctgagcactttcccagtccagggcagggaaatattggccctatcttgacccccaaatccagtgagctccagattcttccaaggcaaaagaggtaagcagatcacacctctttctgcctctacatatggcctattctgggctagaccagatttgggggccaggagggaagaactccatatgggatggagaagggaatctactttctccctgtttttttttcctgatggtttctcccagactagaccaaatagccagaaaaatgataggggtcggatgggtgggtaagcccaggatttgcacatgaccttccatccttacctgtattcccatctccccagtgtcactcccctcaccaatcactccagatggttttgggggaaccattctactcttctggtgggctttggggtatccccaccaactttcccttcaaaatagcaccttacaccccatctttgactcagttccccacacccaaagatcccagcctagggatggggtacagggactttaaatagtccctaatccctaatttgcactagttaaccctggtcagggtccctgtatttccttccagtgggggagataaatgtttgctcctaattctctttgaaaactgggcctccctgctctgtgattggataaatatttcccatcccacccacctccccccaaaaaatagctcacaaggggagagccagtatgggggagcaaatttgacaaatgggaattagaggagtgcagttttaaaaggaaaagttgctgtcatcaaaatggcagccttttccccagctactgtttttggggccaagatggctgccctagcagcaatcactgccaagggcaagatcatggcttttggagggaggtgagtttagggagggccaggaccatcctcctacccctcataccctcccagcatatacaaaaggggaggttttagacaggctccctgaatgttaaccacagaggagtcactccttcattcctcctctgtctctttgcacttttcttggtcttggccacagcctgagtgacgaatttcctactgaatgtaccaagttccaatttttaagggggggaaaggtttcaaatggggaaaaacacacaaaaaaaaaatcactaaaaattcccacaaatcttgtttctggcactttagaaaaactgcaaaaaaatacgtaataaagaatacatatatatatatctacacacaaattatatatctatctatctatacagcggaaccacaagagagactgaggaaggcctggaggcaggggcagaggtgacgacagtgcccctatatccttaacccatactcctctgaggcaaacaggcatgggaaaatggaagggttgaggatggaccggagaattggaacttcagaataggtcaaaattccaaaaccatggacatttttttttgggagaattgagattgtagacattttttttttcttaaatatgatcaaggaaaatagcttccagaatgtggtggttctgggcaacaaatgagattgtggcgacgtggagattaaaatatatgtatttgagctggggaatttgaatattgtgagtttcagatgttggaaatttgggattttgcagttttgtcttttgaaaatgatcaagtcttgtcagttcgtgccctctttccccatgttccctgggaagacgggtggtggcagagtgagaaggccactggttctgtgccgcagcacgcaaaatttagaattctacagactagctctatacgtagtgaggacccagatttagagaaactgaccaatatttatctccgcatttgtgtgtgtgtccaactctgtaggccaataaaccaacaagacaaatgaactgtgctccacaaaaaaaaaaaaaaaaaaaaa

SEQ ID NO: 4941 - DNA, 1602 bp, Homo Sapiens
  NM_020905
accgtcaggggccgacccgccgcgccccagcgttctccgcgtacaggtggtctcttgggttccggtaaggcggcggctgcggaactcccgtggaggggccggtgggccctcgggcctgacgatggcagtggccactgcggcggcagtactggccgctctgggcggggcgctgtggctggcggcccgccggttcgtggggcccagggtccagcggctgcgcagaggcggggaccccggcctcatgcacgggaagactgtgctgatcaccggggcgaacagcggcctgggccgcgccacggccgccgagctactgcgcctgggagcgcgggtgatcatgggctgccgggaccgcgcgcgcgccgaggaggcggcgggtcagctccgccgcgagctccgccaggccgcggagtgcggcccagagcctggcgtcagcggggtgggcgagctcatagtccgggagctggacctcgcctcgctgcgctcggtgcgcgccttctgccaggaaatgctccaggaagagcctaggctggatgtcttgatcaataacgcagggatcttccagtgcccttacatgaagactgaagatgggtttgagatgcagttcggagtgaaccatctggggcactttctactcaccaatcttctccttggactcctcaaaagttcagctcccagcaggattgtggtagtttcttccaaactttataaatacggagacatcaattttgatgacttgaacagtgaacaaagctataataaaagcttttgttatagccggagcaaactggctaacattctttttaccagggaactagcccgccgcttagaaggcacaaatgtcaccgtcaatgtgttgcatcctggtattgtacggacaaatctggggaggcacatacacattccactgttggtcaaaccactcttcaatttggtgtcatgggcttttttcaaaactccagtagaaggtgcccagacttccatttatttggcctcttcacctgaggtagaaggagtgtcaggaagatactttggggattgtaaagaggaagaactgttgcccaaagctatggatgaatctgttgcaagaaaactctgggatatcagtgaagtgatggttggcctgctaaaataggaacaaggagtaaaagagctgtttataaaactgcatatcagttatatctgtgatcaggaatggtgtggattgagaacttgttacttgaagaaaaagaattttgatattggaatagcctgctaagaggtacatgtgggtattttggagttactgaaaaattatttttgggataagagaatttcagcaaagatgttttaaatatatatagtaagtataatgaataataagtacaatgaaaaatacaattatattgtaaaattataactgggcaagcatggatgacatattaatatttgtcagaattaagtgactcaaagtgctatcgagaggtttttcaagtatctttgagtttcatggccaaagtgttaactagttttactacaatgtttggtgtttgtgtggaaattatctgcctggtgtgtgcacacaagtcttacttggaataaatttactggtacaaattcttaaaa

SEQ ID NO: 4942 - DNA, 6621 bp, Homo Sapiens
  NM_020909
gggcggagctgggagggagctttaaggggtggacgggcgggaggtcggggtcctccggggattagagccggtgggctcgttgtgggcgccatttctcggcgtctaccgaggagccgcccctttctcagccttgctcggctcttccccgctctggtcgccggggctgcgccgtccccagctcagtgacaaaaatgctgagtttcttccgtagaacactagggcgtcggtctatgcgtaaacatgcagagaaggaacgactccgagaagcacaacgcgccgccacacatattcctgcagctggagattctaagtccatcatcacgtgtcgggtgtcccttctggatggtactgatgttagtgtggacttgccaaaaaaagccaaaggacaagagttgtttgatcagattatgtaccacctggacctgattgaaagcgactattttggtctgagatttatggattcagcacaagtagcacattggttggatggtacaaaaagcatcaaaaagcaagtaaaaattggttcaccctattgtctgcatcttcgagttaagttttattcctcagaaccaaataaccttcgtgaggagctaacccggtatttatttgttcttcagttaaaacaagatattctcagtggaaaattagactgtccctttgatacagcagtgcaattggcagcttataatctgcaagctgaacttggtgactatgatcttgctgagcatagtcctgaacttgtctcagagttcagattcgtgcctattcagactgaagagatggaactggctatttttgagaaatggaaggaatacagaggtcaaacaccagcacaggctgaaaccaattatctgaataaagccaaatggctagaaatgtatggggttgatatgcatgtggtcaaggctagagatgggaatgactatagtttgggactaacaccaacaggagtccttgtttttgaaggagataccaaaattggcttatttttttggccgaagataaccagattggattttaagaagaataaattaaccttggtggttgtagaagatgatgatcagggcaaagaacaggaacatacatttgtctttagactggatcatccaaaagcatgcaaacatttatggaaatgtgctgtggagcatcatgctttcttccgccttcgaggccccgtccaaaagagttctcatcgatcaggatttattcgactaggatcacgatttagatatagtgggaaaacagagtatcagaccacaaaaaccaataaagcaagaagatcaacatcctttgaaagaaggcccagcaaacgatattctagacgaactctacaaatgaaagcatgtgctacaaaacctgaagaacttagtgttcacaataatgtttcgacccaaagtaatggctcccaacaggcttgggggatgagatctgctctgcctgtgagtccttccatttcctctgctcctgtgccagtggagatagagaatcttccacagagtcctggaacagaccagcatgacaggaaatgcattcctctgaatattgatttgctgaatagcccagacttattggaagcaacgattggtgatgtaattggggcatctgacactatggaaacatcccaagcactgaatgacgttaatgtagccaccaggcttccgggattaggggaacctgaagttgaatatgagacattaaaagacacctcagagaagctcaaacagcttgagatggagaacagtcctttgctgtcccctcgatccaacatcgatgttaacataaacagccaggaggaagtggtgaagttgactgagaaatgccttaataatgtcattgagagcccaggattgaatgtcatgagagttcctcctgacttcaagagtaacattttgaaggctcaagtagaagcagtgcataaggttacaaaagaagatagcttattaagtcataaaaatgccaatgttcaggatgctgccacaaacagtgctgtgttaaatgagaataatgtgcccctccccaaagagtctcttgagactctgatgcttatcacacctgccgacagtggttctgttctaaaggaagctacagatgaattggatgccttgcttgcatctctaactgagaatctaattgatcacacagttgcacctcaggtgtcttccacatccatgatcacaccccggtggattgttccgcagagtggtgccatgtctaatggacttgcgggatgtgaaatgcttttgacagggaaggagggacatggtaataaagatggaatctcactgatctctcccccagcgccattcttggtagatgctgtgaccagctctggtcccattttggcagaagaagctgtcctgaagcagaagtgtttactgaccactgagctctgagggcctgtagctggaatacgcatctctccagcattccgtcctgggatccgtttcagctagaatatgttggattcaggagcttgtccattatttgtaggtaaaaaaagctgcacgtagatttgacttcaactccgtaaaaaagacagctgtattttccgtccaactggaattgttgaatcacactgcatagctgcccaaaagagagtgtttggtcttgaactttctatacttttataaatgttacaaattcccgaaagaagggaatttctttttctggggtttccttcaaactcttggctccacctagcggttctatttgttcataacaacttcataacaagcctgcctctggtagtcaacagccttttgaaagctatttccatctagtatcagggtgagagcatccttgatctggctgcctgttagagaaattgcacttttcctgacttacctagaaatcaagaatttaggaaattaatgtggacactataaaggcagacttagggccaacttttttttttttttacaattattacaacactaaagagaagtttagaatatagagagtttttaaatgtctcccattcttttgatttcttactgtactggctatcttaatatttcaagtttacatcaagataaaccctgagaagaactacggagaaatcaaataaaatcctgtcatatttttttcaccctgcctttccacaggaagcactcacaggcaccacacacgtatcatgtaacttatcagtggggtgggttactgttgaagagaccctggggcatttacctcaggcatctgcactcctccgagcccggtggagaatgcaggctgctgtagtctcaggtaatgaaggcacagcacagcagtactccacattgtttcctatttggacatagacttcatttcctttcagtataagctgaataaatttagagctttcaaactggaaaaaaaaatgaaacaaaacaaatacaccaagaccaaaataggcaataggaacaggggtgaagggatgttgtttcttaaatacctaccatgtatgaagctatacacagcatataccgaaagaacctgcattgcactaggaattctgtgttagtttaaaagagatctctaaaacttccccatccctttgggcctgtacaaagaaattctggatgttaaaataatatatactcatcacagaaaaataaagtatagcaatgtccatctgtaattctaatacccagaaataacgctatttagctttataattttcgaatgaacaaggtaaacctcggttgccatggggaagaaggatgatgtggaaaccatattggtaaagttgttaatccctcgttatggagaactgatcttaagctatacctcctggaatttgctttctagttttctgtcctgcaatatgtatataattaagcactaatttgtactgcttagcataaaagaacatccagtcttagatccttaaaacttcatggattggactttcctgggctccttataacataatcgtgtgtccaggcaaacgcacactagtgtctgactggaaagctcaggaattttaatcttgcactgtttcccagggagctgtagtgattggaacccacgtttgcacaaaacatttttgcagaaggaaagtcaacacttcttgctggctgcctccccttagccattatgctaaaaacagcttctgagtttcactggtggggctcttgccagttcttaattataggacatattttctcaaagctgaaggtgacacctagaaccaggggcttgacccaggacatgatggaatgagcatcaaattttcagtgtcttggcaaccgtagatgtcctacagggttaccgttgtgctgctcaccacagagcagctgaggcattatgccttggaagacctaaatctcccatccagttcaggaggtgacaacatccttattttaaacttcctaaaattaggaattaggtagttggacatagtctgtgacctttatgtcgttggatacctgtattcttgacagttagaatattggtagggactttgttaaaattcacttgaatttcaagctcagaggaaactttgtctcatgccctgacatgaagtggcaaacacggaagttcatacttgaatgctgaattggccccgacagattaaatgcgtgttggggattggtttcctgtcatagctgctgctgctgccatgcgcagagctgctgtaacagctcttcctgttctgctcccctgagaacagtgtggtggggagaggcagggctgaggtggtctacgaatgtggcaggtagggaaggggagatgtctgtctcttgagaagagagaggcatgtgtgccggcatccttgatgggttcaaagagaaaggttggagatgatagtgggtgagaagcaggctggtgagactgggctgaggttggagaaggggcagccgggggcactgctgagggtttgccgtgcacgcctcggacggagcacggtggggtggcggggagcagatagtgctgcctccctgcgggcagacaggagaggaacctcaactcagtccatttcatagccctgataggggaagtgggagttgacaggatggtttaaaataagacgtgaaggtttcagttacctgctctagactttgcctgagaacttgtaaattaatcagtgagacctaatttgtgacatgtcagtagcatcatcttttgacacacaggaggtcatggtcatttcattcctactcttcaggagacactgctgaacagaggaatgattctgttccttgtgtgcttacttccttaacatttatacattgttttaagaaaaaacttttaaaaatatttcttatagtctcctaacatttgtctctagcctttgcctttgtacaatcacagatatcctatggagatttaaggatgaaagccctgagttgttcttgggttcttggatctggactacttgttatcttatgcttctcacttctggctaaaacttgcacctcttcttctcttagctaagccccaaaatgaagatttccttcagaagtcttgttagcagaattatttatcagtcacagagagaaaaatctgctatttttctaagtaagagtctcgagaagcagagtttttgtcttgtcattgagaggagtcagcagtcttgttctgtaaaggaccagagatggtaaatactgtcccactcagctctgctggcgcagtacagcagcagcagccccagcacagctgtgttcctgcggagtcccctttacaaagccgctgacccctgatgtgaaactttgtagagcagcagagtggctgcgtgaaacgggaggctggcaggtcctcagataggttctgcagtgttacctgtcacttggaggcagccaacacttctggacattgcatccttattcacacatgtggcagctgaacgaggtgctgttgtgggtgtctcagctctgagggtctttgtgagctcccactgttgtgggtgtctcagctctgagggtctttgtgagctcccactgttgtgggtgtctcagctctgagggtctttgtgagttcccaccaacttttaattattcatgcccttgaccatgtggttgcttggagacctggggtcttctgcagactgaagaagacacatttctagattatttgtcctttttatcctctcaaaaatttaaacactgtacctcttcagtggtcagaagaaagttggaaacttttcctacatattaggcgttagtatgaggacatttgtttgaattatagaaatttgccctgagctgaactgggttgtgttaacacattggtagagctatgattccttcccagttctaagagatacgatctgtaagtccctatgtcaccacattgcttgagatgatcattcagttacttgtcaggatttctcctcttcagagagatttttttttatagcacagattcctttgccccttttatctccttatctggatatgataagtggttatgagggtctcactaactattttgtgtttaccttttatatgtgtaaaactttgcagtagcatttaaagtgtaatttatttttctatcaagtgcactattcatttagtgtgttccagttttatatgacttgtattagaaacactgcactgagttgtttgtacactgaaatgagaactctagatgtaactctattcaaataaaccttcgtgagacattcatgaaaaaaaaaaaaaa

SEQ ID NO: 4943 - DNA, 7502 bp, Homo Sapiens
  NM_020917
gcagttctttccggcttcgctgctggtgtcggctccgagagctctggcttatcaggactccatagttctccaacagagaaatcttgaaaaggactgaccagtttttgcagttctaaaaccatggcccatggttcagtgacattcagggatgtggccatagacttctcacaggaagaatgggaattcctggatcctgctcagagggacttatatagggatgtaatgtgggagaactacagcaacttcatttcactaggaccttccatttctaaaccagatgtgattaccttattggatgaagaaaggaaggaacctgggatggttgtgagggaagggacaagaagatactgccctgatttggagtccagatacaggaccaatactttatctccagaaaaggacatttatgaaatatattcatttcagtgggatataatggaaagaattaaaagctatagccttcagggttccatttttaggaatgattgggaatgcaaaagcaagattgagggggaaaaggaacaacaagagggatattttgggcaagtgaaaattacctctgaaaaaatgaccacttacaaaaggcacaattttcttactgagtatcagatcgttcataatggagaaaaggtgtatgagtgtaaggagtgtaggaagacctttattcgtcgctcaacacttagtcaacacctgagaattcatactggtgagaaaccttataagtgtaaggaatgtgggcaggcctttagacagcgtgcacatcttattcgacatcacaaacttcacaccggtgagaaaccctatgaatgtaaggagtgtgggaaggcctttacagtgctccaagaacttactcaacatcagagacttcatacgggtgaaaaaccctatgaatgtaaggaatgtggaaaggcctttagagtacatcagcaactggctcgacatcagagaattcacactggtgagaaaccctatgaatgtaaggactgtggaaagacctttagacagtgtacacaccttacacgccatcagagacttcatactgctgaaaagctctatgaatgtaaggaatgtgggaaagccttcgtatgtggtccagaccttagagtacatcagaaaattcattttggtgagaaaccctatgaatgtaaggagtgtggaaaggcttttagaatatgccaacaacttactgttcatcagagtattcatactggtgagaaaccctacgaatgtaaggaatgtgggaagacttttagattaagacaacaactagttcgccatcagagaatacatactcgtgagaaaccctatgaatgtatggaatgttggaagacctttagtagttactcacagcttatttcacaccagagcattcatattggtgagagaccctatgaatgtgaagagtgtggaaaggcctttagactgctctcacaacttactcagcatcaaagtattcacactggtgagaaaccttatgaatgtaaggaatgtagaaaaccttttagactgctctcacaacttacccaacatcagagtattcacactggtgagaaaccttatgaatgtaaggaatgtggtaaggcttttagactttattcatttcttactcaacaccagagaattcatactggtgagaagccctacaagtgtaaggagtgtaagaaggcctttagacagcattcacaccttactcagcatcagaagattcataatggaatttaatagaagaaagccttcaaatgtatatgatgttacagaacatcagaaaattcatttttgagaaaatgtgtttcatgctcaattccaagcataataaattttatattagagaaagaatatgttgatttaaaagccttccaacaccatttaaacatggtttatcttcagcaaattcctatgagagaataatgtaatgaatgtaggaaaatctttagccttatctgtcattatctccctttctccacttgattaccagtttgatttattggacaagatactaagcttctgtgcctcattttgctgacttgtaaaatggtaataatagtacttatatgtattagttatttattgctgcgtaataaattaccacagacttagtagcataaaataacatataattatatcttataatttggatcaggagtataggcatgacttagttgggtcctctgcttcagggtctcttgcaaggctacagatttcagccagggctgaggtctcatctgaaggctcaactggggaaggatccacatccagactaacatagttgttacccaatgtatttccgtgaggcctgttgcattgagattctcagtttctagctggctgttggctgaacgctgactgcagctcctggccacaatagcctcatcaacatggctgcttgcttcatcaaggcatgcaagccaaaagggaggacagtctgctagcaagatggaagttaccatcttgtgtaatctaatcatggaagtaacattccctcaccttctactggtagaagtaagttactaggatagtccacactcaagagaacgggatgatacaagagtgtgaataagtcctggagacaggaccactggggggcctgtttagagtcagcctgccacactgtggaataggattgttgcaaggagtaagtagttaatacttggaggaatcacagtcatatagcatgtattctgtaaatattatctgtaattgttattattgtcattagtattagtgaattcacgtaaaaggaagatctgtagacataataaatgtagaaatgcctcctgtcacctctcagaaattattaaacataatttattctaggtaaaatttagattgtagtgaatgtaggaagttcttcagcacttgagctgcattagaaatttcatgccaaaaatgaatttcatgaatgtgaggtcactagtaatacagctgttgaagaattagagggaaataggaaatgattttcccataattccagaaagcaaaaggcttacaatccctgttgtctgaccacagtttaaaattaattagaaactatcaaaaatgtggcttaaaagaaattaaccacctaggaatttaatattgttgtgtatatttatgtgtgtgtataaaactcctgtgggaaagaaacaaaacatcattctataagtcagtatacttttggatgctcaaaatgccatatcttcaaccagtaggagttgtttcaagttgagtttttgatgtgatcccaccaataatttgatagtttacttgattgtggctgcataatttggtaacctatgaaagatgctagagcaccaatgtataatttttttgagacagggtgtcactttgtcccccaggctggagtgcagtggtacaagcacagttcactgtaccctgttcctcctgggctcaagtgattcttccacctaaattttttttttttttttagagaaagggtctcactatgttgcccaggctggtcttgaacttctgggctcaagtgatcctccctccttggcctccaaaggtgctggggttacaggtatgagccaccacacccagcccaactcattattcttgaaatcaataaatcagaggaaaaattgtcatttagtttccttttcccatgtgaaccaaatttcagggtcaccagaagttcatcaaattcaaatgaatttggcctggcacaggggtcacacctgtaatcccagcactttgggaggacaaggtgggtggatcacttgaggccaggagtttgagaccaacctggttaacatggtgaaaccctgtctgtactaaaaatacaaaatttagccaggcatggtggcacacacctgtagtcccaggctgaggtgggaggatcacttgaacccaagaggcagagtttgcagtgagctgagatcgtgccactgcactccagcctgggtgacagagtgagaccctgtctcaaaaaaaaaatttgttttttgaatgggtttttcttttttgaagaagtctaataaatctagaaggaattagaggattagaaaaatcaccattttctagaccttaatggaataatgggtccagaaaacatgatcttcaatgggtactacaactaataggtgaaatattttatagcgagatttttatggtggatctatcaaactggccacctctgaaccctttgatctgttttaaccttaataaaaatgggtctatcagacaacacacttcctgacgtaatgcaataggaagtccacaccaccatctacaaagccttattgctggaataatgaactgaaagcagacagggactagatgaacagtatatggtcatcccttggtatccatggggaattggttccaggatcctccactgatggtaaaatctgaggatgctcaagtcccttgtataaaatggcatagtatgtatttgcatattacctactcacatcttcctgtatactttaaattatctttagatcacttatacctatcacaatgtaaatactatgtaaatagttgttatactgtatttttcaatttgcattatttttattgtattttatttttattgtttttttttgagtattttctatttgagattggttgaatctgcacatatggagggctggctataaagggcaccacaaggaagaagccaaacagatccagaatgtgtgaaattctacagagcaaattacctgatttcttcaactaacaggtagcatgaaaatacaaggggaagggcaaccattaacagattaaaagagacttaaagagacatatcaactaaattcagtatgttggcattacttggacctggtttgaacaaaacataaaaagccattttggagacagtgagggaagtgtggacatggactaaatattaaatgatatttacatatattaatttggttagggattatgtcagtgtgattataaaaaataaaagatcgtatgatatgagatacatactatgaaatgaagatagacacatttggattaaaatattctagcaaaagaaataattggcaaagagagctggaaactaaattggcaacatgttgataatttaagtggagtgttttgttcatggagacttattgttctaatatttctacttttgtatgtgtttgaaatttcaataataaaatgtttaaaatcaaaaccaaaattatagactatgtagaaatgaatgacagtgagatgcctgcacatctaaccttgtcagatataatcaaagttctgttcagtgacaaattaatgccctgtaatgtggtaaggaaatcttatttgtggatacagtcttcatcttcttcacttacccacagcagcaacaccaggcctgtcacacagatgaatgtgttgagggaatgaataagtatttccgtcaagaaaaaggaaacaacaaaataaaaccaacccaagtaaagaacagccaagtggccaggtgcggtggctcatgcctgtaatcccagcactttgggaggccatggcaggtggatcacctgaggtcgggattttgagaccagcctgaccaacactgagaaaccccatctctattaaagatacaaaattagccaggcatggtggtgcatgcctgtaatcccagctacttgggaggctaaggcaggagaatcacttgaatccaggaggcggagtttgtggtgagttgagatcgcgccactgcactccagcctgggtaacagagcaagagtctgtcaaaaaaaaaaaaaaaaaaaaaggaacagccaagtaacagtagaaagtagaaattaagagaatggagaatattagacttgattcaatgttaatagtgattagattttggcagttataatcaaggaagagaaaatgaaagataatacatttagagtattaatgatgataaaagagacacaactctagattatatcaagcagatttttaaaattataaggcaaaactaggccgggcacagtggctcacacctgtaaccccagcactttgggaggccgaggtgggtggatcacttgaagtcaggagttcgagaccagcctgaccaacatagcaaaaccccatctctactaaaaatacaaaaattagcctgtcatggtggcgggcacctgtaatctaagctactggggagcctgaggcaggagaattgcttgaacccaggaggcagaggttgcggtgaaccaagatcacgccactgcactccagcctgggtgacagagtgagaacctgtctcaaaaataataaacataatatggtaaaactatacatgcacacatgcacaaacgtgtatattcattccagtacaagtaaaaatgtaggattgcatttttcccccaaaaggaatatgttttacaattaactcaccgtataacccaaatagattaacaaaaaatgtgtgtgtgtgtgtgtgtgtgtgaactccctgtttaaaaaatctgatacttataaaaactttaaggaatagataatcctaaagattttaccaattaattctgcaaggtaaaataatcctaataaaaattagatgaagatagtttctgaaagcaaattctagaccaccttcattatgaagattctatttttcacaattctaaataaagtttatttagaatttattacaaaatctatctttgctaataggtcagtgtttcttttcccaagcaccaaatacctccagaaagcctgtgtttgacccctaaattcaacattctccagaagtttgcttcaaggaatattaattctcgatggtatttgaaaaaaagatttcttgggaaaataggcaaatgaagcaaaacataaaacatctacttttggccaggcacggtggctcacgcctgtaatcccaacattttgggaggccaaggcgagcagatcacttgaggtcaggagtttgagaccagcctggccaacatggtgaaaccctgtctctactaaaaatacaaaattagctgggcgtggtggcttgcacctgtaatcccagctacttgggaggctgaggcaggagaattgcttgaacccaggaaatggagattgcagtgagctgagattttgccattgcactccaacctgggcaacaagagtgaaactcagtctcaaataaaataaaataaaaatctacttttgaggaattcaaagtatacatgatcagtttgccaaagatttagtaaagacatttttatttaactgagtgtatctcaaatttattgtggaattctcagtccgaatatctggaataggaacagctttgttagatgctaccataaccacaatgaatgtcttcaagggtgtaattttagatatggtgagtggttgtgttgggggcggcataagtcagggcaattttttgcagctcatatcatgctctgaaagtagctacctgctttaatggatggttagtgcttttctatagaatggaaaagattccagcccgatccttgatatgtttgtgttaaacatgcttatatattatattaaacaatgattaaggacataaatgagtttctgtggtaataaagatgctatattgaatatcaaaaaaaaaa

SEQ ID NO: 4944 - DNA, 6390 bp, Homo Sapiens
  NM_020918
gtgcgccactgcagctggcattggccgggactggaagtgcgggcttctgcagcagccgaagctggagctgctaggcagcggctcccctgttgtatggacattctgcacccgaaactgatagctgagtcctgaagttttatgttatgaaacagaagaactttcatcccagcacatgatttgggaattacactttgtgacatggatgaatctgcactgacccttggtacaatagatgtttcttatctgccacattcatcagaatacagtgttggtcgatgtaagcacacaagtgaggaatggggtgagtgtggctttagacccaccatcttcagatctgcaactttaaaatggaaagaaagcctaatgagtcggaaaaggccatttgttggaagatgttgttactcctgcactccccagagctgggacaaatttttcaaccccagtatcccgtctttgggtttgcggaatgttatttatatcaatgaaactcacacaagacaccgcggatggcttgcaagacgcctttcttacgttctttttattcaagagcgagatgtgcataagggcatgtttgccaccaatgtgactgaaaatgtgctgaacagcagtagagtacaagaggcaattgcagaagtggctgctgaattaaaccctgatggttctgcccagcagcaatcaaaagccgttaacaaagtgaaaaagaaagctaaaaggattcttcaagaaatggttgccactgtctcaccggcaatgatcagactgactgggtgggtgctgctaaaactgttcaacagcttcttttggaacattcaaattcacaaaggtcaacttgagatggttaaagctgcaactgagacgaatttgccgcttctgtttctaccagttcatagatcccatattgactatctgctgctcactttcattctcttctgccataacatcaaagcaccatacattgcttcaggcaataatctcaacatcccaatcttcagtaccttgatccataagcttgggggcttcttcatacgacgaaggctcgatgaaacaccagatggacggaaagatgttctctatagagctttgctccatgggcatatagttgaattacttcgacagcagcaattcttggagatcttcctggaaggcacacgttctaggagtggaaaaacctcttgtgctcgggcaggacttttgtcagttgtggtagatactctgtctaccaatgtcatcccagacatcttgataatacctgttggaatctcctatgatcgcattatcgaaggtcactacaatggtgaacaactgggcaaacctaagaagaatgagagcctgtggagtgtagcaagaggtgttattagaatgttacgaaaaaactatggttgtgtccgagtggattttgcacagccattttccttaaaggaatatttagaaagccaaagtcagaaaccggtgtctgctctactttccctggagcaagcgttgttaccagctatacttccttcaagacccagtgatgctgctgatgaaggtagagacacgtccattaatgagtccagaaatgcaacagatgaatccctacgaaggaggttgattgcaaatctggctgagcatattctattcactgctagcaagtcctgtgccattatgtccacacacattgtggcttgcctgctcctctacagacacaggcagggaattgatctctccacattggtcgaagacttctttgtgatgaaagaggaagtcctggctcgtgattttgacctggggttctcaggaaattcagaagatgtagtaatgcatgccatacagctgctgggaaattgtgtcacaatcacccacactagcaggaacgatgagttttttatcacccccagcacaactgtcccatcagtcttcgaactcaacttctacagcaatggggtacttcatgtctttatcatggaggccatcatagcttgcagcctttatgcagttctgaacaagaggggactggggggtcccactagcaccccacctaacctgatcagccaggagcagctggtgcggaaggcggccagcctgtgctaccttctctccaatgaaggcaccatctcactgccttgccagacattttaccaagtctgccatgaaacagtaggaaagtttatccagtatggcattcttacagtggcagagcacgatgaccaggaagatatcagtcctagtcttgctgagcagcagtgggacaagaagcttccagaacctttgtcttggagaagtgatgaagaagatgaagacagtgactttggggaggaacagcgagattgctacctgaaggtgagccaatccaaggagcaccagcagtttatcaccttcttacagagactccttgggcctttgctggaggcctacagctctgctgccatctttgttcacaacttcagtggtcctgttccagaacctgagtatctgcaaaagttgcacaaatacctaataaccagaacagaaagaaatgttgcagtatatgctgagagtgccacatattgtcttgtgaagaatgctgtgaaaatgtttaaggatattggggttttcaaggagaccaaacaaaagagagtgtctgttttagaactgagcagcacttttctacctcaatgcaaccgacaaaaacttctagaatatattctgagttttgtggtgctgtaggtaacgtgtggcactgctggcaaatgaaggtcatgagatgagttccttgtaggtaccagcttctggctcaagagttgaaggtgccatcgcagggtcaggcctgccctgtcccgaagtgatctcctggaagacaagtgccttctccctccatggatctgtgatcttcccagctctgcatcaacacagcagcctgcagataacacttggggggacctcagcctctattcgcaactcataatccgtagactacaagatgaaatctcaataaattatttttgagtttattaaagattgacattttaagtacaacttttaaggactaattactgtgatggacacagaaatgtagctgtgttctggaactgaatcttacatggtatacttagtgctgctgggtaatttgttggtatattatctggttagtggttaatgcttcctttaaaaataattgagtcatccattcactctttttcagttttatctgtcaatagtagctacatttttaatgggagcaccttttatcccaaagtgctttataaattgagtggactgatatatatcacacccaggtatcactgtgctgtcctttgctgtcagatttagaaatgtttttaagagctatgtgaaaacagacaatattagtttaggtcgggaactgagatattgtaatcaaatagttaacatcaggaagttaatttggctggcaaaattctagggaaacttggccagaaaactggtgttgaaggcttttgctcatataaacaagtgccattgagtttcaaatgaccagcaaatatatttagaacccttcctgttttatgtctgtacctcgtccacccctcaggtaatacctgcctctcacaggtacagctgtttcttggaaatcctccaaccaaatagcagttttcctaacttgattagcttgagctgacagactgttagaatacagttctctggccacagctgatgagggctttctgtactgcacacagattgtgtactgcaccccagtccaggtgactggtacccactcgagttgtgccgtgcacaacctgtccagtatatgcatgtggtggccctactgactggtaatggttagaggcatttatggatttttagctttgaggaaaaaccatgacttttaacaaatttttatgggttatatgcctaaacccttatgccacatagtggtaaataattatgaaaaatggtctgttcataattggtaggtgccttttgtgagcagggagcataattattggtttattatggtaattatggtgattttttaaatatcatgtaatgttaaaacgttttctaacagtttactgttgcttatctccaagatattatggaattaagaatttttccagatgagtgttacatagattctttgaatttagtataaaagtactgagaattaagtttgtacttccataagcttggattttaaacactgatagtatctcatgagtaatgtgtgttttgggagagggagggatgctgattgatatttcacattgtatgaaataccatgtttgaaactcatagcaataatgctatgctgttgtgatccctctcaagttctgcatttaaaatatattttttctttataggaattgatgtataccatgaagtcattgtcagttgtagtagctctgatgttgaatgagatatcatgttttagcattccattttactgactagggtagaagaacacttttcttggctacatttggaggatacccagggagtcttgggtgttccttatctggggaagcaaacatttcactagtctctttttttcatcctttaaattgtaaattaaggattactcaagctcaccattattcaagattgggactcgcttcccagtcgacactctgccctgcctgtcattgctgcaaagagctgctgctttgccaacctaagcaaagaaaatacggcttctcttgcattattttcccttttggttggtttgttttctagaagtacgttcagatgctttggggaatgcaatgtatgatttgctagctctctcaccacttaactcactgtgaggataaatatgcatgctttttgtaattaactggtgctttgaaaatcttttttaagggagaaaaatctcaaccaaagttatgctcatccagacaagctgacctttgagttaatttcagcacaactcattcttcagtgcctcatgactgaaaacaaaaaacaaaaaaacgaaagcatcttcacaatgaagcttccagatagcaccgttttgctaaaagatacattctcattgttttccaacagtgatggcttccacataaggttaaacaaactaggtgcttgtaaataatttattacagtttactctatcgcatttctgtaacatgaaatgcatgcccttcttcaggggaagactgtggtcaagttaaaaaaaaaaaacaatattaaacaacatgaaactgcagtctgtttttgaaaatgagaatgtcctaagtgattcagaagagaggagggaagttgtgcactctgaaaatgcatgaaaaacaaaggcaaaaactagtgggaaatgtgtagaactgttaactgagatggcttcgagtcttccttctggaatctgttaaatttcacaaagtcatgagggtaaatggagaaaatatttctgggattacaatgaatgtaagcccaaattgtggaattgccagtaacctggatggggaaaagcatttcccatagcactccatgtaatatgagtgctctgtgagatgttcatcagtgttttatagaaatggtgttgctgggaaaccaagtttgcacctggaaacttacaatgcactttagcgcagtaagggcttggcatccggtagtgaaaaactgtctaacccagcattgcccaaactattttgacaccaggacctttttctcctttgggatacttatgaacctctcactaatgtcctgtggagaacattttgggaaacactatgttagatagttctttaaggagacaaaacggtaatgaacagatagcactggggcagaatatgcatgcattttgtaacgtccagtgtggcgttgaatagatgtgtatttcctcccctgcagaaaataagcacagaaaattataatgtaggtgatcggagctctttcctttgatagagagaacagccccaatgatcctggctttttcactgaacgtatcagaatacatggatgaattggggtaaataaggttttaattcagatctagaagaaagtattgtacgtttgaatgcagatttttatccacagatagttgtagtgtttagacatgacaggacctatcgttgaggtttctaagacttactatgggctgtaaacctgttttttaaaactattttagaaacctgagacttgccgtctggcattttagtttaatacaaactaatgattgcatttgaaagagattcttgaccttatttctaaacgtctagagctctgaaatgtcttgatggaaggtattaaactatttgcctgttgtacaaagaaatgttaagactcgtgaaaagaattactataaggtactgtgaaataactgcgattttgtgagcaaaacatacttggaaatgctgattgatttttatgcttgttagtgtattgcaagaaacacagaaaatgtagttttgttttaataaaccaaaaattgaacatacaaaaaaaaaaaaaaaaaaa

SEQ ID NO: 4945 - DNA, 6935 bp, Homo Sapiens
  NM_020919
gatagctccgccctaaactaagggagagactgtgctcccaagtacgtagcctgcagtgcctaacgcattctcagcaattttgacccccaacagacgccgtcgacagtctcccaagaacaattcccaggagctcggattccaagagccgcccgcgccctcgtttaccttcgctagtcgccctgcagccccgccctgtccggaggccccgccctccatgaatcagctgatcccgcggacccactgggttgccaagctcgcgccggatgcggagcgcggtgctgccggtggagcttcaggtcttgatagactttctgtaaagaaggaatgatttggtgatggagtgttcccactgaccgatggactcaaagaagagaagctcaacagaggcagaaggatccaaggaaagaggcctggtccatatctggcaggcaggatcctttcccataacaccagagagattgccaggctggggaggaaagactgttttgcaggcagccctcggagtgaaacatggagttcttctgactgaagatggtgaggtctacagctttgggactcttccctggagaagtggaccagtggagatttgtccaagtagccccattctagaaaatgccctggttgggcaatatgttattactgtggcaacaggaagcttccatagtggagcagtgacagacaatggtgtcgcgtacatgtggggagagaattctgctggccagtgtgcagtagccaaccagcagtatgtgccggaaccaaatcctgtcagcattgctgattctgaggccagccctttgttagcagtcaggattttacagttggcgtgtggcgaggagcacactctggcattgtcaataagcagagagatttgggcatggggtaccggttgtcagttgggtctcattaccactgccttcccagtgacaaagccgcaaaaggtagaacatcttgctgggcgagtggtgcttcaagttgcctgtggtgctttccacagcttagcccttgtacaatgcctcccttcccaggatctgaagccagtcccagaacgatgcaaccagtgcagccagctcttgattactatgactgacaaagaagaccatgtgattatatcagacagtcattgttgcccattaggtgtgacactgacagaatctcaggcagaaaaccatgccagcactgctctcagcccctccactgaaacccttgacaggcaggaagaagtatttgagaacactcttgtagcaaatgatcagtctgttgctactgaactgaatgcagtaagtgctcagatcacaagcagcgatgccatgtcctctcaacaaaatgtcatgggaacaactgaaatttcctctgccagaaacataccatcataccctgacacccaagcagtcaatgaatacctacggaaactgtcagatcattcagtaagagaggactcagagcatggtgaaaagccagtgccatctcagcctcttttagaagaagcaattcctaatctccacagcccgcctaccacaagcacctcagccctaaacagcctggtggtctcttgtgcatctgctgttggtgtgagagtggctgctacttatgaagctggtgccttgtcactgaagaaagttatgaacttttatagtacaaccccttgtgaaactggagctcaggcaggcagtagtgccattggccccgaaggtttgaaagatagcagggaagaacaggttaaacaggaatcaatgcaaggaaagaaaagttcaagtcttgtggatatcagagaagaagaaacagagggaggcagtcgaagactctccctccctggattgttgtcacaagtttcccccaggctcttaagaaaggctgcacgggtgaaaacgaggacagtggttctgacccccacatacagtggagaagcagatgcgctcctgccttctctgagaacagaagtgtggacctgggggaaagggaaggaagggcagctggggcacggcgatgttctgcctaggcttcaaccgttgtgtgtaaaatgtctggatggcaaagaagtaatccatctggaggcaggtggttaccattctcttgcacttactgcgaaatcccaggtttactcatggggtagcaatacctttggtcaacttgggcattccgattttccaacaacagttcctcgtcttgcaaagataagcagtgaaaatggagtctggagcatagctgcaggcagggattattccctgtttttagtggatacagaagacttccagcctgggttatattacagtggccgacaggaccctacagaaggtgacaaccttccagagaatcacagtggttctaagactccagtacttctctcctgtagtaagcttggatatataagcagagtgacagcaggaaaagatagctatttagccttggtggataaaaacattatggggtatattgccagtctccacgagttagctactacagaaagacgattctattcaaaactaagtgatatcaaatctcagattctcaggcctcttctcagtttagaaaatttgggcactacaactacagtccagctgttgcaggaggtggctagccgattcagcaagctgtgttacctcattggtcagcatggagcctcattgagcagcttccttcatggggtaaaggaagccaggagtttggtcatcctgaagcattcaagtctcttcttggatagttatacagagtattgcacatctattacaaatttcctggttatgggaggattccagcttcttgctaagcctgccattgatttcctaaataaaaaccaagagctgttgcaagatttgtcagaagtgaatgacgaaaacactcagttgatggaaatactgaatactttgtttttcttgccaatcagacgacttcataattacgcaaaagttttgctaaagcttgctacttgttttgaagtggcatctccagaatatcagaaactgcaggattccagttcttgttatgagtgtcttgctctccatctcggcaggaaaaggaaggaagcagaatacacactgggcttctggaagaccttccccggaaaaatgacggattccttgaggaagccagagcgtcgactgctgtgtgagagtagtaaccgagccctgtctctgcagcatgctgggaggttttccgtgaattggttcattctctttaatgatgccctggtccatgcccagttctccacgcaccatgttttccctctggccacgctgtgggcagagccactgtctgaagaagctggtggtgtgaatggcttaaagataactacacctgaggagcagttcactctcatttcatctacaccccaggaaaagacaaagtggctacgagctataagccaagccgtagatcaggctttgagagggatgtctgatctccccccttatggaagtggtagcagtgttcagagacaggaaccacccatttcacgcagtgccaaatatactttctacaaggatcctcgcctaaaggatgccacctatgatggacgctggctttcagggaagcctcatggcagaggggttttgaagtggcctgatggaaagatgtattctggcatgttcaggaatggcttggaagatgggtatggagaatacagaatcccaaacaaggcaatgaacaaagaagaccattatgtgggccattggaaagaaggaaaaatgtgcggtcaaggagtctacagctatgcttctggtgaagtatttgagggctgttttcaagataatatgcgtcatggtcatggtcttctacgaagtgggaaattgacgtcctcttctcctagtatgttcattggccagtgggtaatggataagaaagcaggatatggtgtctttgatgatatcactaggggggaaaagtatatgggaatgtggcaagatgatgtgtgtcaagggaatggtgtggtggttacccagtttggattatactacgagggcaactttcaccttaataaaatgatgggaaatggggttttgctttccgaagatgatactatctatgaaggagaattttcagatgactggactcttagtggaaagggaacactgactatgccaaatggagactacattgaaggttattttagtggagaatggggatctgggataaaaatcactggaacctacttcaaacctagtctatatgagagtgataaagacagacctaaagttttcaggaagctaggaaacctggcagtgccagctgatgagaagtggaaagcggtgtttgacgaatgttggcgccaactgggctgtgagggcccaggccaaggggaagtttggaaagcatgggacaatattgctgtggccttgaccaccagtcggcgccagcacagagacagtccagaaatactgagtcgttcacagactcagacactagagagtttggaattcattccacagcatgttggtgccttctctgtggagaaatatgatgacatcaggaaatatttaataaaggcctgtgacactcctctgcaccccctgggcaggcttgtggagacactggttgcagtgtatagaatgacatacgtgggcgtaggagccaaccgcaggttattgcaggaggctgtaaaggagattaagtcctatcttaagcgaattttccagctggtgaggttcttatttcctgagctgcctgaagaaggcagcacaattcctctctctgctcctctgccaaccgaaaggaagtctttttgcactgggaagtcagattcccgatctgaatcaccagagccaggttatgtagtaacgagttctggattattgcttcctgtgctgctacctcggctctacccaccgctgtttatgctttatgctttggataatgatcgcgaggaagacatttactgggaatgtgtccttcgactaaataagcagccagatattgctctcctgggctttcttggggtgcagaggaaattttggccagcaaccttgtcaatccttggagagagtaaaaaggttttgccaaccacgaaagatgcttgttttgcctcagcagtagaatgtctgcagcagatcagcacaacatttaccccatcagacaaacttaaggtcatccagcagacttttgaggagatctctcagagtgtcctggcgtcactccacgaagacttcttgtggtccatggatgacttgtttcctgttttcttatatgtggtgctacgggccaggattaggaatttaggctctgaggtacacctcattgaggatctaatggacccctatcttcagcatggggaacagggtataatgttcaccaccttgaaggcatgttactaccagattcagcgtgagaagcttaactaggctgcataacagcttgaaaactggattatctactacagagtgttataacaccatctggagtcttcctgtagtggcaaaaaagaacagtgttgaaattggaaaggactttgtgttatttaggttgttagaatgagccttaccaataataagagccctgagcccagaaaaaaggactgtatagtttaaagggaggattgaaagggaggtaaaaaatcagattagaccagttcttggcctatgataagttccaaaaataccatttatctactatttgaaaaaagaagaggatatcccttcctacagtaaagggtatgtcagctacatgaagttgtaagaaaagcttccagtagagcttcttatattaaagaagttgatggatatttttgaatttctggtttgcctgaatccacctgcagttaccccgatccgtttgcaagaaccagatcgtacttgaaactatagtggccacactctgccttcctgagtcccttccagtcatgtgtgcatcatgtctctttgccaagggaggggagaaaggaacttttaaactgcagttttaactttttctaagctgtttcttgatgggagaggttctgtgcaaaactaccacattctgtccccaaaatgtggaatgcatccaaataggagtcttctgcctcttaacttaaaagaacataggaattttgtttttggtttctttatcatgctacagagagtgaatacactggaattcagacaccgactctgagctgctaggaacctcatttgtccatgtgcaaacgctgtattccaaggcctgtgaatggcagcctgaggaagttttgcatgcaggctgtgttttcgagcaggactaacaactgggaaataagcaaaaaactgcatcgatccccagcctggtgttgttcttccctatacttcacactgaactcaggatgggaagaaaaaggaaacaagctttggctttttccatctcaaaagtattgtggcacctcaacatttcagtgttttgctttttaaaaaatgccctattgtaagttgttggtttatactgtataagtaacactagtagctgttttgaataacataggtgctcttcctcatctcatctcctacaccgtggtgagcatacagagtgtcctgatttgtgttaagtgactgagaagatgttaattacttttgaaaaaggatcatggtttttgctctactttataatcaagacaagtgtttattaaaatactgttttggaatgttggctgtaatgtaacagcaattttcataataaaaggcattcatctttatgtggttgttttatgattgtagaagaaatgaacagggcagcctaaaagatgaaaggaaacccagacttagtatttctttagcccacattgtaatccatgcctctaagtattggcctcaaaagtccctctggggttttagaaatctctgtctttaaaataaacgtaaaccaatagttatagcaccctttctagcaaagagcaaattaactttctgaccccaataacccaaggacacgggtctccaaagaaatctattatttctttgaataaaaagcatattttgatagttaaaaaaaaaaaaaaaaaa

SEQ ID NO: 4946 - DNA, 10293 bp, Homo Sapiens
  NM_020921
ccgagccgggagccgagcgcgctgggcgcggccgtcccgctgccgccgccaagcccggagtgcgccagcggccatggttcccgcggcggcgccgggcgcctgagccccgggacgcaagcgctggaggcgggctgccggctgtgcgggcgctccggagagaccgacagaaggtgagcactgtgggctatgggatggatgaggtggagcaggaccagcatgaggcccgactcaaggagctgtttgacagttttgacacgacgggcacagggtccctggggcaggaggaactcaccgacctttgccacatgttgagcttggaggaggtggccccagtgctgcagcagacattacttcaggacaacctcttgggcagggtacattttgaccaatttaaagaagcattaatactcatcttgtccagaactctgtcaaatgaagaacactttcaagaaccagactgctcactagaagctcagcccaaatatgttagaggtgggaagcgttacggacgaaggtccttgcccgagttccaagagtccgtggaggagtttcctgaagtgacggtgattgagccactggatgaagaagcgcggccttcacacatcccagccggtgactgcagtgagcactggaagacgcaacgcagtgaggagtatgaagcggaaggccagttaaggttttggaacccagatgacttgaatgcttcacagagtggatcttcccctccccaagactggatagaagagaaactgcaagaagtttgtgaagatttggggatcacccgtgatggtcacctgaaccggaagaagctggtctccatctgtgagcagtatggtttacagaatgtggatggagagatgctcgaggaagtattccataatcttgatcctgacggtacaatgagtgtagaagattttttctatggtttgtttaaaaatggaaaatctcttacaccatcagcatctactccatatagacaactaaaaaggcacctttccatgcagtctttcgatgagagtggacgacgtaccacaacctcatcagcaatgacaagtaccattggctttcgggtcttctcctgcctggatgatgggatgggccatgcatctgtggagagaatactggacacctggcaggaagagggcattgagaacagccaggagatcctgaaggccttggatttcagcctcgatggaaacatcaatttgacagaattaacactggcccttgaaaatgaacttttggttaccaagaacagcattcaccaggcggctctggccagctttaaggctgaaatccggcatttgttggaacgagttgatcaggtggtcagagaaaaagagaagctacggtcagatctggacaaggccgagaagctcaagtctttaatggcctcggaggtggatgatcaccatgcggccatagagcggcggaatgagtacaacctcaggaaactggatgaagagtacaaggagcgaatagcagccttaaaaaatgaactccgaaaagagagagagcagatcctgcagcaggcaggcaagcagcgtttagaacttgaacaggaaattgaaaaggcaaaaacagaagagaactatatccgggaccgccttgccctctctttaaaggaaaacagtcgtctggaaaatgagcttctagaaaatgcagagaagttggcagaatatgagaatctgacaaacaaacttcagagaaatttggaaaatgtgttagcagaaaagtttggtgacctcgatcctagcagtgctgagttcttcctgcaagaagagagactgacacagatgagaaatgaatatgagcggcagtgcagggtactacaagaccaagtagatgaactccagtctgagctggaagaatatcgtgcacaaggcagagtgctcaggcttccgttgaagaactcaccgtcagaagaagttgaggctaacagcggtggcattgagcccgaacacgggctcggttctgaagaatgcaatccattgaatatgagcattgaggcagagctggtcattgaacagatgaaagaacaacatcacagggacatatgttgcctcagactggagctcgaagataaagtgcgccattatgaaaagcagctggacgaaaccgtggtcagctgcaagaaggcacaggagaacatgaagcaaaggcatgagaacgaaacgcacaccttagaaaaacaaataagtgaccttaaaaatgaaattgctgaacttcaggggcaagcagcagtgctcaaggaggcacatcatgaggccacttgcaggcatgaggaggagaaaaaacaactgcaagtgaagcttgaggaggaaaagactcacctgcaggagaagctgaggctgcaacatgagatggagctcaaggctagactgacacaggctcaagcaagctttgagcgggagagggaaggccttcagagtagcgcctggacagaagagaaggtgagaggcttgactcaggaactagagcagtttcaccaggagcagctgacaagcctggtggagaaacacactcttgagaaagaggagttaagaaaagagctcttggaaaagcaccaaagggagcttcaggagggaagggaaaaaatggaaacagagtgtaatagaagaacctctcaaatagaagcccagtttcagtctgattgtcagaaagtcactgagaggtgtgaaagcgctctgcaaagcctggaggggcgctaccgccaagagctgaaggacctccaggaacagcagcgtgaggagaaatcccagtgggaatttgagaaggacgagctcacccaggagtgtgcggaagcccaggagctgctgaaagagactcttaagagagagaaaacaacttctctggtcctgacccaggagagagagatgctggagaaaacatacaaagaacatttgaacagcatggtcgtcgagagacagcagctactccaagacctggaagacctaagaaatgtatctgaaacccagcaaagcctgctgtctgaccagatacttgagctgaagagcagtcacaaaagggaactgagggagcgtgaggaggtcctgtgccaggcaggggcttcggagcagctggccagccagcggctggaaagactagaaatggaacatgaccaggaaaggcaggaaatgatgtccaagcttctagccatggagaacattcacaaagcgacctgtgagacagcagatcgagaaagagccgagatgagcacagaaatctccagacttcagagtaaaataaaggaaatgcagcaggcaacatctcctctctcaatgcttcagagtggttgccaggtgataggagaggaggaggtggaaggagatggagccctgtccctgcttcagcaaggggagcagctgttggaagaaaatggggacgtcctcttaagcctgcagagagctcatgaacaggcagtgaaggaaaatgtgaaaatggctactgaaatttctagattgcaacagaggctacaaaagttagagccagggttagtaatgtcttcttgtttggatgagccagctactgagttttttggaaatactgcggaacaaacagagccgtttttacagcaaaaccgaacgaagcaagtagaaggtgtgaccaggcggcatgtcctaagtgacctggaagatgatgaggtccgggacctgggaagtacagggacgagctctgttcagagacaggaagtcaaaatagaggagtctgaagcttcagtagagggtttttctgagcttgaaaacagtgaagagaccaggactgaatcctgggagctgaagaatcagattagtcagcttcaggaacagctaatgatgttatgtgcggactgtgatcgagcttctgaaaagaaacaggacctactttttgatgtttctgtgctaaaaaagaaactgaagatgcttgagagaatccctgaggcttctcccaaatataagctgttgtatgaagatgtgagccgagaaaatgactgccttcaggaagagctgagaatgatggagacacgctacgatgaggcactagaaaataacaaagaactcactgcagaggttttcaggttgcaggatgagctgaagaaaatggaggaagtcactgaaacattcctcagcctggaaaagagttacgatgaggtcaaaatagaaaatgaggagctgaatgttctggttttgagacttcaaggcaagattgagaagcttcaggaaagcgtggtccagcggtgtgactgctgcttatgggaagccagtttagagaacctggaaatcgaacctgatggaaatatactccagctcaatcagacactggaagagtgtgtgcccagggttaggagtgtacatcatgtcatagaggaatgtaagcaagaaaaccagtaccttgaggggaacacacagctcttggaaaaagtaaaagcacatgaaattgcctggttacatggaacaattcagacacatcaagaaaggccaagagtacagaatcaagttatactggaggaaaacactactctcctaggctttcaagacaaacattttcagcatcaggccaccatagcagagttagaactggagaaaacaaagttacaggagctgactaggaagttgaaggagagagtcactattttagttaagcaaaaagatgtactttctcacggagaaaaggaggaagagctgaaggcaatgatgcatgacttgcagatcacgtgcagtgagatgcagcaaaaagttgaacttctgagatatgaatctgaaaagcttcaacaggaaaattctattttgagaaatgaaattactactttaaatgaagaagatagcatttctaacctgaaattagggacattaaatggatctcaggaagaaatgtggcaaaaaacggaaactgtaaaacaagaaaatgctgcagttcagaagatggttgaaaatttaaagaaacagatttcagaattaaaaatcaaaaaccaacaattggatttggaaaatacagaacttagccaaaagaactctcaaaaccaggaaaaactgcaagaacttaatcaacgtctaacagaaatgctatgccagaaggaaaaagagccaggaaacagtgcattggaggaacgggaacaagagaagtttaatctgaaagaagaactggaacgttgtaaagtgcagtcctccactttagtgtcttctctggaggcggagctctctgaagttaaaatacagacccatattgtgcaacaggaaaaccaccttctcaaagatgaactggagaaaatgaaacagctgcacagatgtcccgatctctctgacttccagcaaaaaatctctagtgttctaagctacaacgaaaaactgctgaaagaaaaggaagctctgagtgaggaattaaatagctgtgtcgataagttggcaaaatcaagtcttttagagcatagaattgcgacgatgaagcaggaacagaaatcctgggaacatcagagtgcgagcttaaagtcacagctggtggcttctcaggaaaaggttcagaatttagaagacaccgtgcagaatgtaaacctgcaaatgtcccggatgaaatctgacctacgagtgactcagcaggaaaaggaggctttaaaacaagaagtgatgtctttacataagcaacttcagaatgctggtggcaagagctgggccccagagatagctactcatccatcagggctccataaccagcagaaaaggctgtcctgggacaagttggatcatctgatgaatgaggaacagcagctgctttggcaagagaatgagaggctccagaccatggtacagaacaccaaagccgaactcacgcactcccgggagaaggtccgtcagttggaatccaatcttcttcccaagcaccaaaaacatctaaacccatcaggtaccatgaatcccacagagcaagaaaaattgagcttaaagagagagtgtgatcagtttcagaaagaacaatctcctgctaacaggaaggtcagtcagatgaattcccttgaacaagaattagaaacaattcatttggaaaatgaaggcctgaaaaagaaacaagtaaaactggatgagcagctcatggagatgcagcacctgaggtccactgcgacgcctagcccgtcccctcatgcttgggatttgcagctgctccagcagcaagcctgtccgatggtgcccagggagcagtttctgcagcttcaacgccagctgctgcaggcagaaaggataaaccagcacctgcaggaggaacttgaaaacaggacctccgaaaccaacacaccacagggaaaccaggaacaactggtaactgtcatggaggaacgaatgatagaagttgaacagaaactgaaactagtgaaaaggcttcttcaagagaaagtgaatcagctcaaagaacaactctgcaagaacactaaggcagacgcaatggtgaaggacttgtatgttgaaaatgcccagttgttgaaagctctggaagtgactgaacagcgacagaaaacagcagagaagaaaaattacctcctggaggagaagattgccagcctcagtaatatagttaggaatctgacaccagcgccattgacttctacacctcctttgaggtcatagccaaaccaaagggtacactcatatttgtgcactttactgaaatagatgaacatttcagtaggttctcaacttaaaattaagcctaacctaaaactgccagcaacacaactggagtttccatttatcataattagtttttctaaatagacccttatgggagtttgaaaataaatactcacatatttcactacttaaattattcccaagatttgaatttattttaaaattttaatagccaccaagaatgtggacatatgaaaattcaagaacctaaaaaataccagttttgaatgagtttttgtggttttggttttttttttaattattacaaatctatgtgtaaaatctagatatttgaagtttgagatctgatgagaatggttgttataaactttattttaaaaccaaatttaggtgttcttacatatttaaatactggaaagtcattataatagttttggttctttgaattggtagacaattagtagagtataattggttaggaggcagggcttattaagtggttattaaccgctgacatcagacaaacccaaatctgtagaattctaaccttctaacacctgtgacagtattaccactcttcttgtattatagatttagaactgatttactcaattgcactcttaactaatgttaaaagcttacttgctttaaacagccttttcttctttctcttaaaagtttcatttggggagctggtcttctaagaaacggataaagccacataattaaagcagttgaactatagggaaagcactgaacaaaccactttggagtaaatagctactcttagaaaagagggataagcagaccatgtaggttttctgtctctcaaatcttagagttcataaatttacttgaggttgcctcaagaactcagggaacaatactgtaaactgtcttcctgaactactgtagggcctctctaagaatttgaaatgtataaaccatgtgacctcatttatttgtcttatatatttacagccatactagaatttttatttctacgtttttagtaaatttaatattctgggggaaaaaaggccttgattttagggttaaaaacctgacttatagaagagtttatttaatataggtcaaaattttctgtgtttcttattccttctatacctcaaatctgattctaagaatttcttactgtgataatcattggcatgccacctgaggtcaaggagtgccaaataggactttccactcatgctcaagatcaaaactttatagaacagtcaacattttagattcggtaaccttttttttcttccaattataatctctgctagccacttccgccagcagttggtggaagacttactaggtgcagggcactttccaagttcatcacaacaacctgcttgttttcatgagacaataatccgaaaagttcgctttgatatattcctggagggccaagcccatctatttacaaaaggtgaacagcaaaatcaagcactgctttatgggcaggaacacaagagaaagcaaactgcccaagaagtcatcatgtcagaaactcaatctcaacaaaataatttccatcagggaacttcagggtttcttgggggcttatgagtctcaccggtcaacccaggaggcctcactacaagagccttgacaaggcactgttttttgtgggactgggagttcacactgatgaagcaaacctttgaatttttgcacagctcttgtcagaaagccctgagttccccctggataaagagttaattttaatccttccctataattatacttcaaaatatttgacatctgctattatgccttctttagatctttcttctgtggtgcagacatttctagtaagtgtttgactacttgtatggcattagctttcacagaaaattgtttcacttaaaactgtggattggcctaggctaaggacaaaaataaactaagtacctgtagtgtatttatgtgatatgtgtcaagttactcaaagttattgctgttggaactgaacaataatatttcccagatagctggccttagcatgtgatcacggttgttgtatttttaatttttgtcttttacagtatgagaggtgtaggttaatttgtttatttcctataaatttgtatttatgtgtatataaaatgtacaatgaatgtaaatatgactttctggaaagtttagactacatttagaatctctattcaaaatcaaaatgctgctcaaatgaatttaaccaacatctaggtgcttaatttctcattttatcccacttatgagattgggaaaaagatcaatatgagaaataccatacagataccttaaatgtatgcatttgtgcaacaatttttgagaaggtgagtggcaatttataatttagttggcaatttataatagaacttatagcttttaaaagaccttttaaagacattaaatgtaaacttaaaaatgtttagatcttgtttcaaactttacaatagcattcttcaaaatattaagttatatattttataggcatttagttgcttattaaaagcactgattttcaaactttttgatttaagaacaattatttaagatcgtctcagaagatgggatcttcgtttcaagaaaagggaatcaagtttgcctttgagataatacgttacactaagaaaaggaaaatgtggatagtaaaacccacctctctcatcctattgtactctcttctgctttttagaagcctgcacttaagcttagatttgtgaagggagagtagaaggggagaagtagaaccacagtgttttatttatttttctaaaactcttactaaatccagattttttaaactgttttaaatgtgaattcttcccagaaatttcaatgcattgcatatttagccttcggcatatttttcatgaatagatcatgaagtcataggcttccaaggcataggaagagatcttgcaggtctagtattttaataatgcactattacccagggcagatattatgagaaactgtttcttctctaagggtttatggcagactttgcttttttaacatgtgagaaatgaattttttattttgtgatttatgtgatttcttttgctgagtgaaggaaaggagaaattgttgctattgtcagcatcttaaaggtatttccagtcaaggcaaggctaagtgctttgtgatagtattaagcaagtcatgttttgaatggattacctgtagtgactcattggaatgatataattatacaagtaatgccaaaaaccaagtcaaagcctaattaaccaaagcactcatttaaaaatcatcatgtttggacctatctggacctctcagcactgtaaaatagttttggttttgtggcatatgaatagctgtttaacaaatcaaagttagctttttgcttctcagcttttttgggcaatacaagttaagttcttaatggggagacattatcatggcatgacttaagggaacattggtttgtgaaggaaaaacagattatctaaagccatctctatgtttctgttcagataaagattaatgagttctgtgtttatatcagctttgtatatttcatcttagccattctatcctagaaagattttaatgtgagcttaagatgtaaataaataattttgcaaacatgccttttgttttctatataccctgaccttttaataaagtttcagtgtatttatca

SEQ ID NO: 4947 - DNA, 3676 bp, Homo Sapiens
  NM_020926
ggtccccggctgcccgcagcccgctcgcggcgcttctccggcccggctccttctccgctcgttaacgtcgccaaccccccccacccctcatatctctctccacccacccaaccgccccccgctccttctcgccgcctcgagtccgcttgggggaaaacttcaaagagccggatcgcaggctccctgcctactcccccaccggggatttcagactagacgcttgaagcaaagctgccatcccagaagacgacatgctctcagcaacccccctgtatgggaacgttcacagctggatgaacagcgagagggtccgcatgtgtggggcgagcgaagacaggaaaatccttgtaaatgatggtgacgcttcaaaagccagactggaactgagggaagagaatcccttgaaccacaacgtggtggatgcgagcacggcccataggatcgatggcctggcagcactgagcatggaccgcactggcctgatccgggaagggctgcgggtcccgggaaacatcgtctattctagcttgtgtggactgggctcagagaaaggtcgggaggctgccacaagcactctaggtggccttgggttttcttcggaaagaaatccagagatgcagttcaaaccgaatacacccgagacagtggaggcttctgccgtctctggaaaacccccaaatggcttcagtgctatatacaaaacaccgcctggaatacaaaaaagtgctgtagccacagcagaagcgctgggcttggacaggcctgccagcgacaaacagagccctctcaacatcaatggtgctagttatctgcggctgccctgggtcaatccttacatggagggtgccacgccagccatctaccctttcctcgactcgccaaataagtattcactgaacatgtacaaggccttgctacctcagcagtcctacagcttggcccagccgctgtattctccagtctgcaccaatggggagcgctttctctacctgccgccacctcactacgtcggtccccacatcccatcgtccttggcatcacccatgaggctctcgacaccttcggcctccccagccatcccgcctctcgtccattgcgcagacaaaagcctcccgtggaagatgggcgtcagccctgggaatcctgttgattcccacgcctatcctcacatccagaacagtaagcagcccagggttccctctgccaaggcggtcaccagtggcctgccgggggacacagctctcctgttgcccccctcgcctcggccgtcaccccgagtccaccttcccacccagcctgctgcagacacctactcggagttccacaagcactatgccaggatctccacctctccttcagttgccctgtcaaagccatacatgacagttagcagcgagttccccgcggccaggctctccaatggcaagtatcccaaggctccggaagggggcgaaggtgcccagccagtgcccgggcatgcccggaagacagcggttcaagacagaaaagacggcagctcacctcctctgttggagaagcagaccgttaccaaagacgtcacagataagccactagacttgtcttctaaagtggtggatgtagatgcttccaaagctgaccacatgaaaaagatggctcccacggtcctggttcacagcagggctggaagtggcttagtgctctccggaagtgagattccgaaagaaacactatctcctccaggaaatggttgtgctatctatagatctgaaatcatcagcactgctccctcatcctgggtggtgcccgggccaagtcctaacgaagagaacaatggcaaaagcatgtcgctgaaaaacaaggcattggactgggcgataccacagcagcggagttcatcatgcccgcgcatgggcggcaccgatgctgtcatcactaacgtttcagggtcagtgtcgagtgcaggccgcccagcctccgcatcacccgcccccaatgccaatgcagatggcaccaaaaccagcaggagctctgtagaaaccacaccatccgttattcagcacgtgggccagcccccggccactcctgccaagcacagtagcagcaccagcagcaagggcgccaaagccagcaacccagaaccgagtttcaaagcaaacgagaacggccttccaccaagctctatatttctgtctccaaatgaggcattcaggtccccaccaattccctaccccaggagttacctcccttacccagcccctgagggcattgctgtaagtcccctctccttacatggcaaaggacctgtctaccctcacccagttttgttacccaatggcagtctgtttcctgggcaccttgccccaaagcctgggctgccctatgggcttcccaccggccgtccagagtttgtgacctaccaagatgccctggggttgggcatggtgcatcccatgttgataccacacacgcccatagagattactaaagaggagaaaccagagaggagatcccggtcccatgagagagcccgttacgaggacccaaccctccggaatcggttttccgagattttggaaactagcagcaccaagttacatccagatgtccccaccgacaagaacctaaagccgaaccccaactggaatcaagggaagactgttgtcaaaagcgacaagcttgtctacgtagaccttctccgagaagaaccagatgctaaaactgacacaaacgtgtccaaacccagctttgcagcagagagtgttggccagagcgctgagccccccaagccctcagttgagccggccctgcagcagcaccgtgatttcatcgccctgagagaggagttggggcgcatcagtgacttccacgaaacttatactttcaaacagccagtcttcaccgtaagcaaggacagtgttctggcaggtaccaacaaagagaacctagggttgccagtctcgactccattcctggagccacctctggggagcgatggccctgctgtaacttttggtaaaacccaagaggatcccaaaccattttgtgtgggcagtgccccaccaagtgtggatgtgacccccacctataccaaagatggagctgatgaggctgaatcaaatgatggcaaagttctgaaaccgaagccatctaagctggcaaagagaatcgccaactcagcgggttacgtgggtgaccgattcaaatgtgtcactaccgaactgtatgcagattccagtcagctcagccgggagcaacgggcattgcaggtgagcccccccacctgaatttcagttactttaccagttgtcagttttttaatgtgtaaacaggattgggggagtatggtagggcagggcaccaggcagatttggtgaatgaagcttgtggtaatttgaatatatgcaatgtggccagtaagagaacgtgagtggtagcactgaggcgtgtctggatgctttaagttattctgtagattataagggaactccactcaattgctgataaccgatgttttaattattgtgaagggtatctaaagactgcatgacgtttacctatcaattgctttgatttctctgcctgtaagatagcaaatatacctagaagtgctgcttagaatgccttacttgatacctggtagagatgtgtagcagccgcatgtctgtgggattcatgcaaatttttcaccaaaaaa

SEQ ID NO: 4948 - DNA, 3714 bp, Homo Sapiens
  NM_020932
agagccagtctgcgcctgcgcggactgcggcagagggcggggtgtgagaagcagagtacagtgagactagcattcactgctggccagtgcctgcctttttcaccacctctaatttcagcttcagcagttgcttggaactttggttctggcagcagcagcaacatcattaccgctagcggcagttttgtgccgaggcacctacacacctcccgtcctctctgccagatcgcgggcctgtcggtgtctgctcctacacgccaacgccggtgggcaggaccatgtctctggtaagccagaattcgcgccgccgccgccgccgcgttgcaaaggctactgcgcacaacagcagctggggcgaaatgcaggcccctaatgcccccggtctccccgctgatgtgccaggctcagacgtcccccagggtcccagcgattcccagatcctccagggcctctgcgcctctgagggcccaagcacctccgttctgcccacctccgctgagggcccaagcacctttgtgccgcccaccatctctgaggcctcaagcgcctccgggcagcccaccatctctgagggacctggcacctccgtgctgcccacccccagtgagggcctaagcacctccgggcctcccaccatctctaaggggctgtgcacctctgtgacgcttgccgcctctgagggccggaacacctccaggccgcccacttcctctgaggaacctagcacctccgtgccgcccaccgcctctgaggtaccgagcacctccctgccgcccacccctggtgagggaacgagcacctccgtgccgcccacagcctatgagggaccaagcacctccgtggtgcccacccctgatgagggaccaagcacctccgtgctgcctacacctggtgagggaccaggcacctccgtgccgctcgccgccactgagggcctgagcacctccgtgcaggccactcctgatgagggaccgagcacctccgtgccgcccaccgccactgagggcctaagcacccccgtgccacccacccgtgatgagggaccgagcacctccgtgccggccactcctggtgagggaccgagcacctccgtgctgcccgccgcctctgacggacaaagcatctccttggtgcccacccgcggtaagggatcaagcacctccgtgccccccaccgccaccgagggcctgagcacctccgtgcagcccactgctggtgagggatcgagcacctccgtgccgcccacccctggtgggggactgagcacctccgtgccgcccaccgccactgaggagttgagcacctccgtgccgcccactcccggtgagggaccaagcacttccgtactgccaatccccggtgagggactgagcacctctgtgccgcccaccgcctctgatggatcggacacctccgtgccgcccactcctggtgagggcgcaagcaccttagtgcagcccaccgcccctgacggaccgggaagctccgtgctgcctaaccctggtgagggcccgagcacattgtttagctctagtgcttctgtggaccggaacccctccaagtgttcccttgttttgccaagccctagggtaaccaaggcctccgtggactcagattctgagggtcctaagggtgcagaaggccctatagaattcgaggtcctgagagactgtgagagccccaactccattagtattatgggcctcaatacttcccgggttgcaattaccctgaagccccaagaccctatggaacagaacgtagctgagctgttgcagttcctgctggtgaaggatcagagcaagtaccctatccgggagtctgaaatgcgggaatatattgttaaagaatatcgcaaccagtttcctgagatactcaggcgagcagcagcccacctggagtgcatttttaggtttgaattgagagaacttgaccctgaggcacacacctacattctgttaaacaaactgggacctgtgccctttgaagggttagaagagagcccaaatgggccaaagatgggcctcctgatgatgattctaggccaaatattcctgaatggcaaccaagccaaggaggctgagatttgggaaatgctctggaggatgggggtgcagcgggaaaggaggctttccatttttgggaacccaaagagacttctgtctgtggagtttgtatggcagcgttacttagactacaggccagtaactgactgtaaaccagtggagtatgagtttttctggggcccaagatcccacctagaaaccaccaagatgaaaattctgaagttcatggcgaaaatatataacaaagatcctatggattggccagagaaatacaacgaagctctggaagaagatgctgccagagcctttgctgagggttggcaggctctccctcactttaggaggcccttttttgaggaagctgctgcagaggtaccatcccctgattcagaggtttccagctattcctcaaaatatgccccacattcatggcctgagtcaagattggagagcaaggcaaggaagctggtgcagttatttctgcttatggattcaactaagctgcctataccaaagaaaggaattctgtactacattggccgagagtgcagcaaagtgttccctgacctcctgaatcgtgctgcccgcaccctgaaccatgtctatgggacagaactagtggtacttgatcccaggaatcactcctatactctgtacaaccgaagggagatggaagaaactgaggagatcgtagacagtccaaacaggcctggcaacaactttttgatgcaggtcctaagcttcatctttattatgggcaaccatgccagggagtctgcagtctgggcctttctgcggggcttaggggttcaagctgggagaaagcatgtgattacctgcagatacttgagtcagcgctatatagacagtttacgggttcctgacagtgatccagtgcaatatgagtttgtatggggtcctagagcccgtttggaaacctctaagatgaaagccttgcgatatgtggccagaatccacagaaaggaaccacaggactggccacagcagtacagggaggcaatggaagatgaggccaatagagctgatgttgggcacaggcaaatctttgttcacaacttcaggtagaggaatgcatggcagtcagaggggccttgcaaggaggggcctttgagcctcagttctcatgtattggggggtgggggtgggtacatattgtatttggtatttgtgttccagttatatttatgtcttttcatatttagttctggtgtggtgtctggaaatgtttcaactgttttaatatattgtctgattgggtaaatgtgattgaccacttgctgtctctgttgtattttggtatgagttttgatagctctataaaatgttttggaaatctttccatcttgttgcattatctagaaaagaatatagcatatagctatagatataggcttttccttgaaagcttgaaaaaaattcgccagtaaaataatctagcttaaagtgataaactaacaaacaaatataacaacaactgaaaaggcactctaaattgtggctggcttccctttctgtctgctattgtatgaagaatactgatgtttacctgtatttgctttgctgtactaaaatgtaatgaaaaataaaagattaataaatgaaacataatgctaaaaaaaaaaaaaaa

SEQ ID NO: 4949 - DNA, 4098 bp, Homo Sapiens
  NM_020933
gagaattggaaggcggcagtgaagcggaagccattactctctggagtcgattgccccgagacacatgggccaaggaggggtcagcggcgaattctttcggcctgttggggacccctcgtgtccccacgccagactggacctcccgtatgaacttctcttcgcatcggcggcggcttccgtcacctccgctcccccgatcctattcccagtcgtatgccagcttggagagtcacgtgagagcaagagagtagctttctggttgtcctggtgccctgctcaggcaaactgactgccattctctgaggatggcagctctgtcccccacatttgccacgtccacccaggattccacctgtctccaggactcagaatttcctgtttcttcaaaagaccattcctgtccccagaatttggacctgttcgtgtgcagtggtctggagcctcacacacccagtgttggttcccaggaatcggtgactttccaagatgtcgctgtggactttaccgagaaggagtggcccttgctggattcttctcagagaaaactgtacaaagatgtaatgctggagaactacagcaacctcacttcactggggtatcaggtcggcaaacccagcctcatctcacacttggagcaggaggaggagccgaggacagaggagaggggcgctcaccagggcgcttgtgcagattgggagactccatctaaaaccaagtggtcacttcttatggaagatatttttgggaaggaaacgcccagtggtgtgacgatggaaagagccggtcttggagagaagtccactgaatacgctcacttgttcgaagtctttggcatggaccctcatctcactcagccaatgggaaggcacgctggcaagaggccctatcaccgccgcgactatggggtagcgttcaagggcaggccgcacctcactcagcacatgagcatgtacgacgggagaaaaatgcatgaatgtcatcagtgccaaaaagccttcaccacgagcgcgtccctcacacggcacaggagaatccacaccggggagaagccttacgagtgcagcgactgcgggaaagccttcaacgacccttcagcccttaggagccacgcaagaactcacctcaaagagaagccctttgactgcagtcagtgtggaaatgcattccggaccctctcggccctgaaaatccacatgcgagttcacactggcgagaggccttacaagtgtgatcagtgcgggaaggcttacggccggagctgccacctcatcgcacacaagagaacgcacaccggagagaggccctacgagtgtcacgactgtgggaaagctttccagcacccctcccacctcaaagagcacgtgaggaatcacacgggggagaagccctacgcgtgcacgcagtgcggcaaagccttccgctggaagtccaactttaatttgcacaagaagaaccacatggtggagaagacctacgaatgtaaagaatgcgggaaatcctttggcgatctcgtgtcccggaggaaacacatgaggattcacatcgtcaagaaacccgtggaatgtcggcagtgcgggaagaccttccgaaaccagtccatccttaagactcacatgaactctcacactggagagaaaccatacgggtgcgatctctgcgggaaagctttcagcgcgagttcaaacctcaccgcacacaggaagatacacacgcaagagagacgctacgaatgcgccgcctgcgggaaagtcttcggtgactatttatcccggcggaggcacatgagcgttcaccttgtaaagaaacgagttgagtgtaggcagtgtggcaaggccttcaggaaccagtcaacgctgaagacgcacatgcgaagccacacgggggagaaaccgtacgaatgcgatcactgtgggaaggccttcagcataggctccaacctgaatgtgcacaggcggatccacaccggggagaagccctacgaatgccttgtctgcgggaaagccttcagcgaccactcatccctcaggagccacgtgaaaactcaccggggagagaagctctttgtgtcatccgtgtggaaaaggctccagtgagcgcgcctgctttagagacacaggatgattcagaccggaaacagacctcgtgggtgtaagaggaagcctctgtgagctcgcaccttactgggtgcaaaagaatccacggaacttgggagaagtccagttcctgtaaaaactgggaagacgaggcgttctcatcccataggaggtttgtgagaactcacgccgggggtgaaaatgtacgtctgtagcatggagaagccttcagggtacattcagctcttaacaaacacaggaggacttaatggcagcttggcatttaatgtcaaaatccaagccgtggcatttaatgtcaaaatgacttcagaccacttctagccttctgggcccatgagtaataatgagcacactagggagcatctctgtaaacacagtggctggggaaacccttcctagtctcacttgattcctcatgacggaaatcacactaaagagagaaatcagtgaagtaaggaacgtggaaggtcatgaatgggccgcaaaccacggccagctgcttgtctttgtatggcttgccagctaacaatagtggttccatctttaaggaagaagaatgtttgatggagaaaatttgtggccaatgaagtctgaaatacttcctgtcatctgcccctttccagaaaaacttggccgacccttggtctacagcacgggttctcagtcgggcgacgatttggctgtctaggcgtcatttggcaatgtctagagacatttttggtagttagaatggggggaagatactcctgacttgtaataagaagacatcagagatgctgctaagtcggctccagcacacaggagccccccacaacgaagagttagtgcccccaaacgtcactgttgctgaggttgaaaataatcatgcagtcattcctcaattactgcctgcagcaattcctccatttttatgaatcttgtgagcacttacgctaggagaaatttcttttacaaaacttttaaaatacaattagtgctgataattcctatgtggaaatgattccagccatggtcccctcacttgagcatgtgaatattctcacggagagaagccccagcgagattttccggtgaatacgggattgcacttactctttcatcacggaaacagaccccccgagagaagccccaacgagattttccggtgaatacgggactgcacgtactctctcatcatgaaaacagagccccgttcataaatttttcatctttatttttaaggttatactcctctaaataacccttaagcctcatcaagaaaggtttgtttatagtatttttactatagcttcatccttgataacgtcctaatttccttctggacaacctccttgaccaatggcatattgagatctatgtgacatgaggatatttctcagtaccactttgttactggtacctgatgcacacggattgcgaccagagcatgatgcctccatcaagtggtaatatgtttgcagcctgctgtccagccaagagtgacagatacttctagtgacttccccggtatccactctcatcttcttccaatatcaagagaatccaggttctgtcagattagtaaggtgtgctaatctaaattttaaaaaatctcttacaggttttcttgcagctggtaccatccatgtctcacagccctggccactgacagatcagcagatgtcaccacatgggcttctgagaaagctcttgaatggggatcgttcttaaacatgaattcctccctgtatgttttgttctttgctttacttttcaccttgcaaagagatccagtacctagtattggaagatccaccttaacgaccgtgcatatgaaaaccacagtctaaggaagtgactgcagaaagctcacagcgaccctggcctcccctgtggcctctttgagtgtctgcagcagccctggacttccagacttctatcacatgagaaaaaataaaactgattattggtttaagctgctaaaaaaaaaaaaaaaaaaaaaaaa

SEQ ID NO: 4950 - DNA, 8032 bp, Homo Sapiens
  NM_020935
gtgcgtgcgtgtttgcgtgtggtcacagttcccgccatcagccgctctccctgactaggggtagctagcggcctccctcctttgggttcggtatccctacttccattaccctcggctcctcccactcctcgcgggctccgtgctttccgcgggtctgtccgggggctccggaccctcggcgcagctgagttgatggcttccggagaactggcatagctgcagaatatgagtagtgtcccaagaagagtgctttgcctttggcacaaggatcagaataaaggtgaattgctattacatagggtttttcggtaaaagtcactgaaaattatttgccatacagtaaccagagacctccaactaggggcccccaaactgtatcctgcctgtagccagaagcaatttttaaagaaaatatgtctcctctgaagatacatggtcctatcagaattcgaagtatgcagactgggattacaaagtggaaagaaggatcctttgaaattgtagaaaaagagaataaagtcagcctagtagttcactacaatactggaggaattccaaggatatttcagctaagtcataacattaaaaatgtggtgcttcgacccagtggagcgaaacaaagccgcctaatgttaactctgcaagataacagcttcttgtctattgacaaagtaccaagtaaggatgcagaggaaatgaggttgtttctagatgcagtccatcaaaacagacttcctgcagccatgaaaccgtctcaggggtctggtagttttggagccattctgggcagcaggacctcacagaaggaaaccagcaggcagctttcttactcagacaatcaggcttctgcaaaaagaggaagtttggaaactaaagatgatattccatttcgaaaagttcttggtaatccgggtagaggatcgattaagactgtagcaggaagtggaatagctcggacgattccttctttgacatctacttcaacacctcttagatcagggttgctagaaaatcgtactgaaaagaggaaaagaatgatatcaactggctcagaattgaatgaagattaccctaaggaaaatgattcatcatcgaacaacaaggccatgacagatccctccagaaagtatttaaccagcagtagagaaaagcagctgagtttgaaacagtcagaagagaataggacatcagggcttttacctttacagtcatcatccttttatggtagcagagctggatccaaggaacactcttctggtggcactaacttagacaggactaatgtttcaagccagactccctctgccaaaagaagtttgggatttcttcctcagccagttcctctttctgttaaaaaactgaggtgtaaccaggattacactggctggaataaaccaagagtgcccctttcctctcaccaacagcagcaactgcagggcttctccaatttgggaaatacctgctatatgaatgctattctacaatctctattttcactccagtcatttgcaaatgacttgcttaaacaaggtatcccatggaagaaaattccactcaatgcacttatcagacgctttgcacacttgcttgttaaaaaagatatctgtaattcagagaccaaaaaggatttactcaagaaggttaaaaatgccatttcagctacagcagagagattctctggttatatgcagaatgatgctcatgaatttttaagtcagtgtttggaccagctgaaagaagatatggaaaaattaaataaaacttggaagactgaacctgtttctggagaagaaaattcaccagatatttcagctaccagagcatacacttgccctgttattactaatttggagtttgaggttcagcactccatcatttgtaaagcatgtggagagattatccccaaaagagaacagtttaatgacctctctattgaccttcctcgtaggaaaaaaccactccctcctcgttcaattcaagattctcttgatcttttctttagggccgaagaactggagtattcttgtgagaagtgtggtgggaagtgtgctcttgtcaggcacaaatttaacaggcttcctagggtcctcattctccatttgaaacgatatagcttcaatgtggctctctcgcttaacaataagattgggcagcaagtcatcattccaagatacctgaccctgtcatctcattgcactgaaaatacaaaaccaccttttacccttggttggagtgcacatatggcaatttctagaccattgaaagcctctcaaatggtgaattcctgcatcaccagcccttctacaccttcaaagaaattcaccttcaaatccaagagctccttggctttatgccttgattcagacagtgaggatgagctaaaacgttctgtggccctcagccagagactttgtgaaatgttaggcaacgaacagcagcaggaagacctggaaaaagattcaaaattatgcccaatagagcctgacaagtctgaattggaaaactcaggatttgacagaatgagcgaagaagagcttctagcagctgtcttggagataagtaagagagatgcttcaccatctctgagtcatgaagatgatgataagccaactagcagcccagataccggatttgcagaagatgatattcaagaaatgccagaaaatccagacactatggaaactgagaagcccaaaacaatcacagagctggatcctgccagttttactgagataactaaagactgtgatgagaataaagaaaacaaaactccagaaggatctcagggagaagttgattggctccagcagtatgatatggagcgtgaaagggaagagcaagagcttcagcaggcactggctcagagccttcaagagcaagaggcttgggaacagaaagaagatgatgacctcaaaagagctaccgagttaagtcttcaagagtttaacaactcctttgtggatgcattgggttctgatgaggactctggaaatgaggatgtttttgatatggagtacacagaagctgaagctgaggaactgaaaagaaatgctgagacaggaaatctgcctcattcgtaccggctcatcagtgttgtcagtcacattggtagcacttcttcttcaggtcattacattagtgatgtatatgacattaagaagcaagcgtggtttacttacaatgacctggaggtatcaaaaatccaagaggctgccgtgcagagtgatcgagatcggagtggctacatcttcttttatatgcacaaggagatctttgatgagctgctggaaacagaaaagaactctcagtcacttagcacggaagtggggaagactacccgtcaggcctcgtgaggaacaaactcctgggttggcagcatgcactgcatatttgttactgctgcccacctcacctttcctctgctgaaggagaatttggaattctacttgatgcgggagcaacaaacagctcagggccaaaccaaaagacaaaaattggagtaacgtagaatgctccatgctattttatggaaactttggtctcacatccgtagctgattatcctctttttctcctatgagtggcacttcttttgtcttaggaatacatgttgtaaatatatatctgtgtatgtgtgtatacacacacacagacacacacacacacacacgggatgaatggagccttaaagagttaggatgagccaccagaatatgcctgctcaaaattaatagcacagcagtttggagaagaaatgaaggtgtcaaagagtccattcacctgagaaatgtgtgaagacatacttatcagttggcttttagcttttatgttccttgagtagtttcactcaagtctgtaaccttttgtgtttccttattagtaaaattcactggaaagccagctcttcatgttacactaatgacagtttgttctctttgcaagagaggggcattactgtcacctgacttgaggagctgttttgttgttgttgttgtctgcaaatttcatgaatttgtgatgtctttgctgtttacatgcagtcccaagaaatggattgttggtgctttggaatatgttacagtcccacatttgatatttcttatatactttgttttctctaaggagatttcttcacacagtatgttcatcatatatcatcatcattattatggtggtaaagatagaatcttttttcttttttgtcattctgccatggagcagcattaccctaatggattgcaaccaaaactttaaacaagtagaaagataatatttctccaattgggactccccagcaggaatacttagggataaggaagaatgctagcatctctgtctctcaaacatagggaggataagaagagtgttcttctggtaaagctaaaattctggaccactgaagctaaaagccctattgcaagtatgaaattaagtacttgagctgtaggacaaaccttgggcatttaaccatttactgtctggctttgcccttaaaatagggttgcaattaaaatgtgattggcttaggtaatcccaaaaactaacaaataacaaaggtgcataatttatttatctactttttaggtgctctgagttgaggcaaagtagagcggcaacattaagtgctatgctagtcacttagctgacgtaaccagcttggttaagcagcttatgaaaccatataaagaattcttttgaggatggaattctgtccacaaaataattttgtgagcccagatatcattaggatcacacagagttaaatatagaaaaatgaaaccatcattatattctttcgtgttttttcttttattataaacaaggggattattctttagttctcagaggtagggacaaaaccacatcaggttttcagaaggaaaaaacatttaaaaacccaccatcacatgagagaatcacttgaacccaggaggcagaggttgcagtgagctgagatcgcatcattgcactgcagtctgagtgacagagtgagactccatctcattaaaaaaaacgaaaacaaaaacaaaaaaaacacaaaccatcatcacagaagatgcaacatcttttctgaaagattgccttaagagagctccagtcctactcttggaacttggatgtattctaatgtagtaaactattctaagttttcattctttgaattataaatggcctcagcagttttgctcaactactgataaatgctttgcctcctaccatctacctatataccttattgtaatgaatgttccaaaatggtagagtggtagaaaacgccagagtagtttagagcagaggaaaatatttgttttaaaactagctttaaagttttgtttcatttctaccaggagcctctttggtttggtttgattttgcttggaaataattggttttcttataaatgagtgaagcggtgataaaattctttggctagttattaattcttttacgtgtctttgcatttgagaggcactgttaaaaattattgggaaagatttaaagtgcaggctgcaattaaaacatggagaaaagtagaaataatgccataagtctagattgcctcatgaagcagcctcatttgaattgctttcatagctttcatgtgtgtatggtttagaagtacacttacctcagaaacctgatttgatcttcatgtcttgggcaggagttgttgaaaataggttattggaatatataagttatctcactgctcatgtacttgcatgtttgggactcaaattttacttgatgtctgtccattcttgtggccctatcagccttctccttcctttactcctttaatctacttctttgactaccagtggagatttcagctggactatgttgatggggtttgttgttgtttttgagctggctgtatatattttaaaattataaatagataatatattattttttgcacattgtgatcagtttgcccagaattggggatggggcagttagcatgttggggccaggaagggacaagttagataaggactgagtgcttccgttgcaggcagtttgcacaatacctaattaaccttcctattgaaaataccaaatgtgtggttacattactttaaatgacattgaattggaacttgatggcaattagttctagatacaaccttttgatctttgttggaattttaagggaaaaatgaactaaacttcatatttgttgattttaatcacctaatagtactgaaggttggaaagttgcatgtggctggatgctgttaatttctttaatagccatgactataatttaagcctatgagaagatagactgtttcgtagggatatattcacatgtgtgtgcacactcatgagttttgtctcagcaggatagaataagcaaatccatgaactggtcttctattaatactttgattctaaaaattatttgtttacttgctatggtctgttcattctgggcctaaccttaaaggctcaataacaaatacaacaaatgtaaatatgtttacattttaagacatatgcagtggttcttacagatcagttaattaactccagaaagcaaatgttagactacacatttatttttctccttgatcaagtataaaattctgaaacagaggctttaaaatttaaaacctcagcaaaataatccatgaatttactgattcttctgtatcgtgtgtagttaccattatgtaactatacacacatacagctacggatataatgaaaattatctgcaaacacctaaattaaagagaaaaaaaagtagtttgtaaactcatttgtgatctactgaaaagaggttatattaaagcaaattaaaatattttccttctctgtcctctgaaatgactgcagtagatactcttagttatcccatttagggtggttggagggcctttttaatttaattgaccccccgaggtggtcttttgttttaaacagggggcaacagctggatctccaagtacatatggattttgtatatataggagatttttagaaaaatcaacaacctaacaccagattcaagtcacataaaagtgttccaataaaatggatggatgtctttttcctccccattttgctttatactgagtaatgcactcttgcaagtgtatacaaaaactaaatagacttctgccctccaacatctttttattgcattacttcaaaatcctaattttgtctctactgatatgtcttattaacatctgaaaaaatatatattttttattggaaaattctaatttgttaggccttgaaagttttgtgacaattattttgctgtgtttaaccacaatcattcaccttatggcatgctttgattactagacttcaggcagtctcattcattgtatcatacttacacacaattagtaagttgtctccatgtgtgctatatgtctgaggtgtatggagtttttatttaaaaagtgtgccagtctgaatataagcatttgattttgtaacattggacttttcttaaaagtacagaggttcaaagtataggtatgtccattggcataagaatagagtgggtgagggtctggaccaggttccaggttggtccagtcagatgccagaacaaagaagaacagtcaactaaactggtctacttcaaaaatagtgggcctgtgtgaagagtgagaccacatgtgggtgtgcacacctcttgtccccaggtttccctccctttgagcttttctttccctccctaacttctctggcctattgtcattgttgtttctttaaacttaaggagagaaaaacaaaaatgagattcctacactttgcctaattgagccactaccaggttttctggcagctgtggccacattatttgtgagatgattttttttctttatgttcagagtgacttttgattctgattctttatgttttgtatggagcggcacttttatctgtgttttagcagaactgttcctctgtatcctttacggtttttctttgtttttgtttcctttttaaattatgcatagagtttttttgtgtgtatgaaattaaagcctttattaaccttc

SEQ ID NO: 4951 - DNA, 2638 bp, Homo Sapiens
  NM_020936
accgacgcggcgaaggagcgcgccatggagcatgtgacagagggctcctgggagtcgctgcctgtgccgctgcacccgcaggtgctgggcgcgctgcgggagctgggcttcccgtacatgacgccggtgcagtccgcaaccatccctctgttcatgcgaaacaaagatgtcgctgcagaagcggtcacaggtagtggcaaaacactcgcttttgtcatccccatcctggaaattcttctgagaagagaagagaagttaaaaaagagtcaggttggagccataatcatcacccccactcgagagctggccattcaaatagacgaggtcctgtcgcatttcacgaagcacttccccgagttcagccagattctttggatcggaggcaggaatcctggagaagatgttgagaggtttaagcaacaaggtgggaacatcattgtggccactccaggccgcttggaggacatgttccggaggaaggccgaaggcttggatctggccagctgtgtgcgatccctggatgtcctggtgttggatgaggcagacagacttctggacatggggtttgaggcaagcatcaacaccattctggagtttttgccaaagcagaggagaacaggccttttctctgccactcagacgcaggaagtggagaacctggtgagagcgggcctccggaaccctgtccgggtctcagtgaaggagaagggcgtggcagccagcagtgcccagaagaccccctcccgcctggaaaactactacatggtatgcaaggcagatgagaaatttaatcagctggtccattttcttcgcaatcataagcaggagaaacacctggtcttcttcagcacctgtgcctgtgtggaatactatgggaaggctctggaagtgctggtgaagggcgtgaagattatgtgcattcacggaaagatgaaatataaacgcaataagatcttcatggagttccgcaaattgcaaagtgggattttagtgtgcactgatgtgatggcccggggaattgatattcctgaagtcaactgggttttgcagtatgaccctcccagcaatgcaagtgccttcgtgcatcgctgcggtcgcacagctcgcattggccacgggggcagcgctctggtgttcctcctgcccatggaagagtcatacatcaatttccttgcaattaaccaaaaatgccccctgcaggagatgaagccccagagaaacacagcggaccttctgccaaaactcaagtccatggccctggctgacagagctgtgtttgaaaagggcatgaaagcttttgtgtcatatgtccaagcttatgcaaagcatgaatgcaacctgattttcagattaaaggatcttgattttgccagccttgctcgaggttttgccctgctgaggatgcccaagatgccagaattgagaggaaagcagtttccagattttgtgcccgtggacgttaataccgacacgattccatttaaagataaaatcagagaaaagcagaggcagaaactcctggagcaacaaagaagagagaaaacagaaaatgaagggagaagaaaattcataaaaaataaagcttggtcaaagcagaaggccaaaaaagaaaagaagaaaaaaatgaatgagaaaaggaaaagggaagagggttctgatattgaagatgaggacatggaagaacttcttaatgacacaagactcttgaaaaaacttaagaaaggcaaaataactgaagaagaatttgagaagggcttgttgacaactggcaaaagaacaatcaagacagtggatttagggatctcagatttggaagatgactgctgattccagtgccacagatgaacccacaaggacatagctgttccctaacttggtggatggctccagtttgcttttaacgaaaatcacaacttcaggagacatctgaaaagaatgatgtctctgaaagctgtcctttcagatgagggagaaatgaaggatttcacacttcagaatattttactaaaaacattccagtcttggccgggtgcggtggctcctgcctataatcccagcactttgggaggctgaggcaggaggatcacttgagcccaggagttcaagaccagcctgggaacacagcgagaccctctcattaaaaacaacaaaacaaaacaattccagtcttggagtagtctaacagaagaaaatgtaaaattatttgagtgtaaataatagatgtcagtatttatcatgatgggtcacatatagacatatgtacatattatatatatatatatatatatatatatatatatatatatatatatataagctcttttttctgaggctattttatagttatttttaaacataaagatacagaagtcttcttgacttctgattttcaaaaccattcctcagtatcttcaggcatttgacctcctgaatgtgcttggccctgggcttcagttatcctttgatgtcctgcaggggtggctaatgtgctggggtttttctgtgttaatagtcacagtattgttttattggtgaatagctgaaaaacagagggattaagtcatattccgggaaagagaattatagtttttatgcctcctgttgaataaatggtgtcctgataaaaaaaaaaaaaaaa

SEQ ID NO: 4952 - DNA, 3339 bp, Homo Sapiens
  NM_020939
agtcgctccggaggaggcgtgaatcgcgcagggattgactaatttggggtggggggtgcggtgggcgatggagcagcctgaggacatggcgtcgctgagcgagttcgactccttggcgggcagcatcccggccaccaaggtggagatcaccgtgtcctgcaggaacctcctggacaaagacatgttttccaagtccgacccactgtgcgtcatgtatacccaagggatggagaacaagcagtggcgggagtttgggcgcaccgaagtcatcgacaacacgctcaatcctgacttcgtgcgcaagttcattgtggattactttttcgaggagaagcagaacctccgttttgatctatacgacgttgactctaagagtcctgatttatccaaacacgatttcctgggccaggccttctgcacccttggagagattgtggggtcccctgggagccgcctggaaaagcccctcacgataggcgcattcagcctgaattccaggacgggcaaacccatgccagctgtgtccaacggtggtgtcccaggaaagaaatgtggcaccatcatcctgtccgctgaggagctcagcaactgtagggatgtcgccaccatgcagttctgtgccaacaagctggacaagaaagatttctttgggaaatctgaccccttcttggtattctacagaagcaacgaggatggaacgttcaccatttgccacaagaccgaggtcatgaagaacaccctaaatccagtctggcaaactttctccattcccgtgagagccctctgcaacggcgactacgatcggaccatcaaggtggaggtgtacgactgggatcgggacggcagccatgacttcattggggagttcaccaccagttaccgggagctggcccgtgggcagagccaattcaacatctatgaggtggtaaacccgaaaaagaaaatgaagaaaaagaaatacgtgaattctggcacagtcaccctgctttcctttgctgtggagtcagagtgcaccttccttgactacatcaaaggagggacccagatcaacttcactgtggccattgatttcactgcctccaatgggaacccctcacagtccacatccctgcactacatgagcccctaccagctgaacgcctacgcgctggcgctgactgccgtcggagagatcatccagcactacgacagtgacaagatgttccctgccctgggcttcggggccaagctgcccccggatggcagagtgtcccacgagttcccactgaatggcaaccaggagaacccctcatgctgtggcatcgacggcatcctggaggcctaccaccgcagcctgcgcactgtgcagctgtacggccccaccaactttgcccccgtggtcacccacgtggccaggaatgcagcggccgtgcaggatggctcccagtactcggtgctgctcatcattactgatggggtcatctcggacatggcgcagaccaaggaggccattgtcaacgctgccaagctccccatgtccatcattatcgtcggcgtgggccaggcagagttcgacgccatggtggagctggatggcgacgacgtgcggatctcctcccgggggaagctggctgaacgcgacatcgtccagtttgtacccttccgggactacgtggaccgcacaggcaaccacgtgctgagcatggcccgcctggcccgagacgtgctggcagagatccctgaccaactggtgtcctacatgaaggcacagggcattcgcccgcgtcccccacccgcagcaccaacccactcgccctcgcagtccccagcccgcacgccccctgcgtcccccctgcacacgcacatctgaacctggtctcagcaggcaggtggctggggcctgggagaggccaggtgaatgggaggccagggccccagactccccgaagttggcctgcccggcctttgggacatctgtgtgcctgggaggctgccagggggtggggcttctgaagacccctcctcaatttcttggcctcacttattgcccaaacccagggagttaggggggtacgggtgaaagaggggtacacagggacccagcccttctcttcttccccaatacctggctctaacccagccaggaaggtgtaaacaataagggtgattggggtccctgtcgcccacccccggcaatcctatttgcttacctgtcaccctgaagcctgggcttggcctcctccagccccccatctccgtcccatcctcccatggtgtctactcctgtccctgagccccgccctgtggtctatcctgtgcccgatttccagtgaaccccatgaagctgatgggtttgcaggaaggcctgaacatgtgcaccctcccagggacactggatgcgctgggagccccggggaccccatggggtgctgtaatcatggaccgtaggccatgtgatgggcctgaagtggaggctgctcagcacagagccctttctggtgcctctcgaactcagtacgatgcaagttctagacacacagatggcctgtggaggcctctccctggtgtgggcccacaggtacttccatggttgactcctggcttcaggaatcccttcctccctccagaggcttcccagggccctcggtgcccacgcctctgcccatctggaggcctgagtaaggagtggctcagccccacgttcccacactgctcctgctctttgccctgtatcccatgaggctaggagacaggagtcctgggtttgagccctgcctccccccactgcctaatgtgggaacccaagcaaggcccttctaccttttgggcctcagtttccatgtctgtaccacaagagggttgaccagatggccccaggttttcctttaggtctgacatcctgagggtcattcatcccatgcccagttccccccatcctactcctaacagatgtgaccctacttgaggccgccttggcttttgggtcaccctgtctcatcccatcaccccaaacataccctagtccttcagcctggggctctggcatctgagcccgagctcctgcccctgctgtgggaaaggtggggaagaaggggatctccctcccgggcccacccagctgcccagcctttgcccactcggggagcagatcatgcatgccaatccctgttgccgcatggagctcctcagcccactgacctctccgtgcctggtgcaggccaggcccccgtcttccgcctgcctctgcttccccgtcatgcatggtggtggtgtttctacggtgtctggttctgtgcccgtctctgagacagtctctgtgtggaatttgccttaaactgaagtaaatttggttcttttagt

SEQ ID NO: 4953 - DNA, 5828 bp, Homo Sapiens
  NM_020940
gcaggccgcggcgggcagagcggggggaaggaacccgagccgggctgccaccgtgtcccaaccggtgccgccgccggagcttctccgggccccgagtcctcgccgaacgccctcctcgccgcccgccgcgtcccggcgccctccggagccgccgagccgcccgcgcacacctgaagcggccgggccaggccctgcctcgatcctcagctcgtcctccccgccccgcaccggccttcactctggagcggccccggcagccgcagcaggggcggcggcggcggatcgaggagctctccaggtcgtcccgggagaggctgctgcagtcccgggacaggatgttctccaagttcacctccatcctgcagcacgccgtggaggcgcttgcaccttctcttcctttacaagaagattttgtttatcactggaaggcaattacccattactacatagagacttcagatgataaagccccagtgaccgatacaaatattccatcgcatctggaacagatgttagatatactggttcaagaagaaaatgaacgggaatctggagagacagggccatgtatggaatatttgcttcatcacaagatcttggaaacattatataccttggggaaagctgattgtcctccgggaatgaaacagcaggttttggttttctatacgaaacttctgggaagaatccggcagccactacttccacacattaacgtgcacaggccagtgcagaaattaattagactctgtggtgaagtcctagcaacaccaacagaaaatgaagagattcagtttctttgcattgtgtgtgcgaagctgaaacaggacccctacctggttaactttttcctagagaataagatgaaatcattggcttccaaaggagtaccaaatgtaatttcagaagatacattaaaaggtcaggattccttgtcaacagatacaggacagtcccgtcaaccagaggaactatctggtgctactggaatggagcaaacagaattggaagatgagcctcctcatcagatggatcacctgtccacaagcttggataacctcagtgtcacctcactgccagaggcctcggttgtttgtccaaatcaggattacaatttagtgaattctttgttaaatcttactagaagtcctgatggcagaatagctgtgaaggcatgtgaaggcttgatgctgttagtaagtttgccagagcctgcggctgcaaagtgccttacacagagcacttgcttgtgtgaactactgacagacagacttgcctccctgtacaaggccctacctcagtcagtggatccgttagatattgaaaccgtggaagcaattaactggggcttggactcatatagtcataaagaagatgcttcagcatttccaggaaaacgagccttaatttcatttctttcctggtttgattattgtgatcagctcattaaggaagcccaaaagactgctgctgttgctcttgccaaagctgttcatgaaagatttttcattggtgttatggaacctcaattaatgcaaacttctgagatgggtattctcacatccactgctctgcttcatcgcatcgttcggcaagtgacctctgatgttttgcttcaagaaatggtgttttttatccttggagaacagagggaaccagaaactctggcagaaatcagcagacatcctttaaggcataggttaattgaacattgtgatcacatatctgatgagataagcataatgacattacgaatgtttgaacatcttttacaaaaacccaatgagcacattctttacaacttggtcttgagaaatcttgaagaaagaaattatacagaatataaacctttgtgcccagaagataaagatgtggtagaaaatggattgatagcaggagcagtagatctggaagaagatccattatttactgacatttcaccagaaaacactttgccaaaccaagagtggcttagttcttcacctcctgctactccagaccaccccaaaaatgatggaaaaactgaagttcataaaattgtaaatagttttctctgtctggtaccggatgacgcaaaatcctcctaccatgttgagggcacaggatatgacacttacctccgagacgctcataggcagttccgagactactgtgctatctgcttaagatgggagtggcctgggtctccaaaagcattggaaaagtgcaatttagaagctgctttctttgaaggtcattttttgaaagtgctgttcgacagaatgggaagaattcttgatcagccatatgatgtaaacttacaagtaacctcagtgttatctagactttctctcttccctcatccacacatccacgagtaccttttggatccttacgtgaacctcgctcctggctgtagatctctcttctctgtaattgtcagggttgttggagaccttatgcttcgaatccagcgtattcaagactttactcccaagcttctgttagtcagaaagcggttacttggtttggaacctgaaggccctattattgaccacatcacactgctagagggtgtgattgtgttagaagagttctgtaaggagctggcggcaatcgcatttgtaaaatatcatgcttcctccacaccataaataacatctttcatgtaactgggggaacagaactactgtgtacatttcaccaaaaaagactcagttccacccagccacaagaggataaaaagcctttttaaacgcagtattgctgtaaactggacagaaccattaagaacctattgagtggacattcttggtgaaatgttgtataatgttgttttcattggctttatcataatggttctatatatacaattgcacattgttgaatccaggatacaatcaaaggaacttcaggaaataagcatttctaatgactgtgaaaagctgcaatatttccaatgtcatgactttgatgatatttctgttatattaatgtccttttaggtagcaaggcattttgacattctctgggactcaaatgcttgtattcttttggattaataagtagcaaaaaaaaatcactaattttataactttttaaggtcagaattcttatcaaacaaaatatgaaaactgtaaatgagaaaaaaatacaattcagaaaccattgaatgaattaattataggcgataaaaatgtgtagagcaccattaactttcttcagcttttttaagaataacaatttaatatgataaattcttgattaatataatatatctatatttttaaagaaatgttcttttactcttttgtgcacatagccatgttagtgattttcttcatgtgtgggtcccagtttatttaaactgtgtcgttttcgcagcagtgttcaatttgctcaccattggtagtgtttgctaaaattgtatttttttaagctaagtaacatgtactgggttgagaacctttttcccccctctccctctcagaaaattgctttataaaattgctttataatttgattttcttactgaaacgcatggtggtgtctaggtggggaactgactgataacccttggcagcaatcaaagtgccagtggctcctcgatgtttacatttttttctattttgttcagtcttttgttttaaatgattctaaagagattaaagaaaacagagttttaaatgtcctatttacatgttaaaggatttggggaaattgggtatgtatgtgaatgggtgtacatgtaggaacctgtagttcagcaaagctgcgctgggcacagcatgcttgtacttgattgacaaaatcgtgtttgccagtccactttctatttttcctttaagtgatgctgatcactcaaataatgcttttaagctattgtttgtttttatttgacatgttaagccgcagcactttcttcttcatctttccatttactgatatttgggggaacaggctatcaaaggttccggcttgaagggaactgtcactaccccctctaggaagttattttatgtagcatgtttgcatatacgcattgtgtggcatgtgcatagaggcttgttttacacctatctgctcattttgttgtgttagcttttctggtttatttcatagtttgttcttgctatttattaagaacagaatatcaaaagattatgaatagcctcagctctagaatgcttaccactgttaaaacaacaaaaagactaaacctctaatttcatgcaaatctttgttagcttattctaagaaatttattaagtaaaacaaagaaaaaacagaagtgggagatagttattttgtgcgtaattttctttaaatcattttgaatgatgtgaaggcattcagtttgctgtatttttttaatcacttcatacaaggaaaacttcgacatttacatttctagatgtagtaacagtctactttgatatatgagtatttaaactaaggcattaagagatattagatatttcttaatgttttcatagtgctcaataggtgtagtagcaatgatattacctctgaaaccaaatactcttttatccttgattccactatgggaccttataactagtccatgaaaccaagctcagaaaagctttaactcttatatttgtgtatatgtatgctgcttctgaaaatataatttttctaagttgttgtaatgactttaatttgtaatcagctaaggcttaagatttcatttgtttctaagtttctgtttttcatcccttcttttttcttttatatttagttcagacctagagccagtagaagctctcacagtgagttcaatttgttagtgaaacattgtactgcatcaccagtttttcttaccttctgttgacagctgaatatttctgttactcagtacttgcaaaaacagtaactaaaatgcactatgctgagtggaaagcaccgtcataacaattgattgccatagcaagttccaaagtgaatttcagccttgcttcacatttgtatcaataaatatgcacattttttaaaactttctaacaatatagtctttggatttgtttttagttatgagccgcattctttacttgatagaactcagatttgtcttagcctattgccatatagtactcaccttataactatgtaactttctcgtaatgtatctgtttgtgcaatatggaagctgtgagtggattcatagctttttggtttaattgtacattattgtgtgtgtatatatgtatatatgtatatatataaggaccaaaattcttagctcgcttacactgttgctagtgtaaacattgttacacttaattttacagggcacaaattatggaattacttcataaattcatggtaatgttttcataaattattgcattaacatacaattgccatttaattatgaagtccatcagtattgacagaagacgttacagtgaagtgctaaaaccacactatatggtaattatattttgggttatgtagtaaatcaaatatgcatgtcattgtgacactttatgtgttaaaacatggtagataatcacattttctgggccctgtaaaatagtgttactgtaatactctgttttgcctcctgccttgtttacattaaacaggatatttggtaaatttttttgtattgaaagttgtgtaggttactgacagtgttaccagcgtctggaattcttggtccctccgtggagaaactcttcagatggtcattgtgtacctactctctcttcaaaggaagttgtgatcaagttcaactttttgtgctaacaatgcatgcaggactaagagggatgatctaaaaaataaataatgtaatttaaacaaaaaaaaaaaaaaaaaaaaaa

SEQ ID NO: 4954 - DNA, 5643 bp, Homo Sapiens
  NM_020948
aggagggcggaggcggaggggagggcagagggttggtggagctggaggaagctccggacgacgactggaagaaggaggcgggcggcccgggcctcaggcccctcccaggctctgagtctcccggctgcaggcggatggatggggcttcttcaggcggtggcggcagcagcgaaggtggcggcggcagcagcggcagcggctatggtgtggtcgctcgattctcccagtgcctggctgagtttcggacgtggttaagaaccaactggttgaggttcaatgcagacaagacggatgtgatgctgaaaatgtgcatcagatgtttatgtttaattggtttacagactgtctgtggactcttttcctgtcaaattaccagccatctgttgaatcttcaagtccaggaggttcagcaacatcagatgaccatgaatttgatccatcagctgacatgctggttcatgattttgatgatgaacgaacattagaagaggaagaaatgatggaaggagaaacaaacttcagctctgaaatagaagatcttgcaagggaaggcgacatgccaattcatgaacttctcagcctttatggttatggtagtactgttcgactacctgaagaagatgaggaagaggaagaagaggaagaagaaggtgaagatgatgaagatgctgataatgatgacaacagtggctgtagtggggaaaataaagaggagaatataaaggattcatcaggtcaggaggatgaaactcagtcttccaatgatgatccatcacaatctgttgcttctcaagatgcccaggaaataatccgcccacgtcgatgtaaatattttgatacaaatagtgaagtagaagaagaatctgaagaagatgaagattatattccatcagaagactggaaaaaggagattatggtgggctccatgtttcaagcagaaattccagttggcatttgtagatacaaagaaaatgaaaaagtatatgaaaatgatgatcagctcctgtgggaccctgagtacttaccagaagataaagtgattatatttcttaaagatgcatctagaagaacaggtgatgagaagggtgtagaagcaattcctgaaggatctcacataaaagacaatgaacaggctttatatgaattggttaaatgcaattttgatacagaagaagcattgagaagattaagatttaatgtaaaagcagctagagaggaattatctgtttggacagaggaagagtgtagaaattttgaacaagggctgaaggcctatggaaaggattttcatttgattcaggctaataaagtccgaacaaggtcagttggtgaatgtgtagcattctattacatgtggaaaaaatctgaacgttatgatttctttgctcagcaaacacgatttggaaagaagaaatataatcttcatcctggtgtaacggattacatggatcgtcttctagacgaaagtgaaagtgctgcatctagtcgagcaccatcccctcccccaactgcatcaaacagtagtaacagccagtctgagaaagaagatggcactgtaagcactgctaatcaaaatggagtgtcatctaatggaccaggtgaaatattaaacaaagaggaagtaaaagttgaagggttacacattaatggaccaacaggtggaaataagaaaccacttcatgcagatatggatactaatggttatgaaacagataaccttaccactgacccaaaacttgcccatatgactgcaagaaatgaaaatgattttgatgaaaaaagtgagagacctgccaaaaggcgaagggtaaacagcaatggaaaagaaagtccaggttcttctgaatttttccaagaagcagtctcacatgggaaatttgaagaacttgaaaacacagatgactaaattttagacctattttactttctttggagtaaattctggtgtgactaaaattttcagggttgatgggttaccttaaaaagttgatttccttgaagcagtttgaaaatttgaattgagtcttaactttaggaaatgaggtttcataattctgccttttgcagatttttttactttaaagctgtcagactcttttaagggtattttaaaaattagtaaatttgaatgaactaaagatatatctctaccttctcatttgaatatctttagttcattcagatttactaattttggtaaatctgaatgaactaaagatgtatctgtaccttctcatttgatgtattaatcataaaatttcactacaaggtaatttttgcttagtttgatggatgaatgggaaactcaagtccaaatttctgcttaataccaatttctctgagtttcttgaaatgtctttaaaacagacatttttctcaccaaacagtttgagtatctttattaaggaaacccttacgaatcctgaaaattatgctagcatgatttttttatatatagaagtttaaaaataaaccaggtcaggtttgtatatgtaaaattgttgacatcaatgatgtctttccatattcttatctgggcttaagaaatacattctgtatttttccagattctttgtagcctttgaaagatttttacagtacatatgtcttgactgagctgtcctttcttaatacaaaagcgtgtataattttcttaacttgtacagttggtaaacttttatgagaggaattgttattctgagtctgtcagctttcattttattttgctaaggtttttctaatgaatttttaagtgtttgtgtagtaattaagtcatatttcttatccaggtggttaaagcattcataaaggattataaaatttttttttttttttttttttttaaatttctacttaagggcaagtaatttgagaattctgaaattaagcatgatgcttagattgcagtttgttttgcatttgctataattttcaaaattatttttgaagcaagacaaaagtttaatgtcagcttaagtgcttaaatatatcatgctgaccagaatcctgttatttttatatgcatcataaaatttcccatttctgcattaaataaacagaggaggggggtcaagtgatacttagatattggcacacacaaggaacaactgttggcaggcagtatcgattttatgaagagaaagtgaagtttgaaaacttttcaaacttttctagttacaatccaatttttcagatttgataatgcttttccaaagtgaaaataagatacacaataatcattgctctgtgtgattacagataggattatccatctgcatagccttgtaaaagtgccattttatttttagtgctaaattcttgttaaataatgtagttttatatagctgatagaccaacctatatccaaacttttataaaatattaattattcttgtttttctcacacaggcatactccaaatgcttcttccagttcatttttcagccatcagttcaagagccaatgcctttttaaaataaagcttctgtggtcttgtttttaatggctcaactgtctgatgtaattgagtgaaggtttgcactgagaaattagcattcaggccttacccccatgaagtattactgttaacatatgttcggactgcttcccttcaccaatgtgaacaactttttttcccaaacagtgttaaaagccactttgcaacacttgacttcatcttaatgtacattcactgttgttacatacatatctaagtaaatcaaagttttgggtggaagtgttgagaagtatgagttttttgttgtttttgttttacttaaaacttttaatttatccagaatggcagtagctttagcaagcagatggtcacaatctgttttctaaatcattttttattaaatgaatccaaagtatcctagctctttgtcaaagatggtctgtagaaatgtttttaaagattagggatgctgtactttttgaattgttgcagtgttggagatgccattttcacctttttaaaaagatgcattttatttgcaggtttgtgaagttcttgcaaactcttactacagaaatgttttaaatacattctcaggcatgtttgcaaaaatatggcacatgtatacattttaggaaatgttacttttgttaatctttaaaaaatacacctaatgaaagacattccactattatgcgtaatgctcagctttttgtaaagaaatatttaattgtattttgtgtttatacaggtatttcacacaataatttgttcttaatgcagccactataacttgataagtcattgcactatttaaaaagttttagtaatatcatgaatttaatttgcttaagatttagtacatttcagaacttttgaacttttgacaaattgcattggaaaaagaagtctgttaatagtgatttagtctccccgcctcattcccacccccaacaaagcactatcattttcatttggaatgggtattttctgtttcatgatgtattttcaaatagagttcaggatctgcaattcagttcaacacaagtttgttgagctttaaaatgtatttgaagtaatatttaaataggcatttaaaatttcaaattagatgttaaatttatgcatagtaattttgcactgtaaaataattcccttctcccattccttgtctgccattctgaatatgcttattaaaatatttttttaaacatatttgcctacataatactgtgtgaatattttcattagattaattcactaagattttattagagattgtttgaatgatgcatgttattgacaaggcaaatatatatatatacacagtctgtttcttctattcctagacatattgcactactttttcagtggttcttggtcccctttaccacatcttgggtgatgtatttttgtcttcttcccctttgccacaagagatcctttcagtccctagacctccattcactctgtttctcttctgctggattatataatttaaaaataatgtgttcccgtattttgtagtggagttcatatcacattatgttttgcaaaataaaacttgttttgtcacaatattttctttgctatcgatggataattaggagtgggcacttggaataactgagggctggtgaatataataggcaatatttacatggggtgtgtaactaaataccaaatcagatagtaaggttttcccaactataatccatattcatgaaaaatgccagtgtggaaaaccatgtaacatacagaagaacaggagtttccaaattttaaccttttattctaaaaatgactctcttctctcaaaatgactttttctgtatcacataattctactgatacaactttttaccgtaaaaattaactctcttctttaatatcaagttcatcctttgcagaatcttaaagggttttccacacatccatccacccacttacagactgatttcatgtatctgaatatctgattaacctttcttttctaataccagttttccataaactcttgtcatgtacccttagtattgtgctgatcttttgccaactatacggacgtggagtttttccttttcagaatatgattattttcaatttgtctttagttagtataaagaattatagaatgtataatgtaattaaaatgtcattttgcttgcaaaaaaaaaaaaaaaaaa

SEQ ID NO: 4955 - DNA, 5160 bp, Homo Sapiens
  NM_020951
gttgtggttattgagttaagcctggcgagtcgaggtgacccgggccgggctgcgggaggagctcgcggtgaggtggccccgcgctgccgggcgaggtcggtccacgtggagccgggagcctgaggcctctgtacgcgggagctgcggacgatggtgttctgcaagtgaaggccccctgaagtggaagacagcattggtactaatggccaactcaagtttcattggggatcatgtccatggagctcctcatgctgtcatgccagaagtggaattccctgaccaattctttacagttctaaccatggaccatgaactggtgacactcagggatgtggtcatcaacttctctcaggaggaatgggaatatctggattctgctcagaggaacttgtactgggatgtgatgatggagaactacagcaacttactctcactggatttggagtccaggaatgagactaagcatttatctgtaggaaaagatattattcaaaacactggttctcagtgggaggtaatggaaagtagcaagttatgtggccttgaaggttccattttcagaaatgactggcaaagcaaaagcaagattgacttacaaggacctgaagtgggatatttcagtcaaatgaaaatcatctctgaaaatgtgcccagttacaaaactcatgaatctcttactttacctcggagaactcatgacagtgagaagccctatgaatacaaggaatatgagaaggtcttcagttgtgacttagagtttgatgaatatcagaaaatacatactggtggaaaaaactatgaatgtaatcaatgttggaaaacctttgggatagataactccagtatgttacaactgaatattcatactggtgtgaaaccttgtaaatatatggaatatgggaatacatgtagtttttataaagactttaatgtataccagaaaattcataatgagaagttctataaatgtaaggaatacagaaggacctttgaaagagttggaaaagttactccacttcaaagagttcatgatggtgagaaacactttgaatgctcattctgtgggaaatcctttagagtgcatgcacaacttactcgacatcagaaaatccatactgatgagaaaacttacaaatgtatggaatgtggcaaggacttcagatttcattcacagcttaccgaacatcagagaattcatactggtgagaaaccctacaaatgtatgcactgtgagaaggtttttagaattagttcacagctcattgaacatcagagaattcacactggtgagaaaccttatgcatgtaaggaatgtgggaaggcttttggagtatgtagagaacttgctcgtcatcagagaattcatactggtaagaaaccctatgaatgcaaagcatgtggaaaggtctttagaaatagttcatccctgactagacatcagaggattcatactggtgaaaaaccctataaatgtaaagaatgtgagaaagcatttggagtaggtagtgaacttactcgacatgaaagaattcacagtggtcaaaaaccttatgaatgtaaggagtgtggaaagttctttagacttacgtcagcccttattcaacatcaaagaattcatagtggtgagaaaccttatgaatgtaaggtatgtgggaaggcctttagacatagttcagcccttacagaacatcagagaattcatactggagaaaaaccctatgaatgcaaggcatgtgggaaggcctttagacatagttcatcctttaccaaacatcagcgcattcatactgatgataaaccctatgaatgtaaggagtgtgggaattcctttagtgttgttgggcatcttacttgccaaccgaaaatttacactggtgagaaatcatttgactgaaataaatgtataaagtggttttttatttctgattttcacaggaaaatactgtggatggatttaataggtaatcaaggcaattcagtatctccctctcttaaagtctgtttttagacttcatggtcattctgtatgtagacgtagaattgcttagtcatagctgatatatacttatagctttgttagatgttgccaaatatttctcctttttatgttaaaaagtttttttcatgagtttctcatcctggcatgttttgtttacaatagcttttgatgtttgtattattgctcttttgactattcagttttttaattgtaatattacttcaatatcttttctgcattgtaattctttgcttgtgatatctatacttacttattttcctccacagagttagcactcctagtcagatacaatgtatttttacagtcttacagctcatcattttgtgtaatgttgttttgttttgttttaaatgatagaagtgtgatctcctttccattttcatccaattgttgacttctctttaaatttctactttattttgatacaacatattccccccaaaaaaacacatacataggaactggttatattccaccataacacacacacacacacacacacactatatacatatagtgtatatacacatatagtgtatatagtgtatgtgtgatgtatactatacatatcacatatactatatgtgtgtatatagtgtgtgatgtatatgtgtgtgatgtatactatatatgcccacacatgcactacataacacactatatatatatatatatatacacacacacacacacaatatatgtatatatagtatatacactatatactgggcactatatatatatagtgtgtatgtgtgttatattggaatataaccagttcctttaagcagtctttttacctgcaggctataccaaccaggatccaaatgaagagaactcttttaaatatttgataaaactactcacccagtaagtctcttaaaatttatcattctcttaaagtatcactctaaaatttgtcaaacacctttaaaaggggagaaaaaatgaccactgaacttacattaagagaatttacaactatatattaacatggcttcaattgtttttttaatctattatcattatttttctttttattccctctcagagttgacttactaggtttgggcatttcaacaatcagcagaccttctttggtttaactaatctcatttaactccaaaatcatctctctcttaggactgctgacttggttatgcagtcaatgagatcacgagccactggttattggattttttttctttttttttagacagagttttgctcttgttgcctaggctggagtgcagtggcgcagtcttggctcacctcaacctctgcctcccaggttcaggctattctcctgctcagcctcctgattagctgggattacaggcatgcgccaccatgaccggctaattttatatttttagtagagacgggatatctccgtgttggtcagtctggtctcaaactcccgacctcaggtgatccacccgcctcagcctcccaaagtgctgggattacaggcatgagccaccgcacccagcctggttattggatttatttatttattttgagatagagccttgctctgtcaccaggccggagtgcagtggtgtcatctcagatcactgcaacctccacctcccaggttcaagcgattcccctgcctcagcctgccaagtagctgggattacaggcatgcgccaccatgcccagctaattgtattttagtagatatggagtttcaccacgttggccaagacagtctcgatttcctgaccttgtgatccccctgcctcggcctcccaaagtgctgggattacaggcatgagccaccacgcctgtccggttatttgatttttataagaaaattttactattattttcagataaatttatgtcactgtcattcattacattttaatttttgaaactgatgtctttcccagaatttatgtactctataacggtgtgaatgattaccagtattaagccattttctcatctgatatattgagctatgttttatgtaagtattgcttattcaagtagttttaaaagatatgtaattggttgttgtttcatgtcctacacagtaagaacaagagtatgttaacctttttgtcaggatatttgctatttcatatctttgaaatagagtagtagctctatttctaactaaattctatttatgtaacaacacagctaatttactcttggatctcattctccctttttatcctgagttaccatcagtgctaatgttcctcttttgggtatagttctccaggagaacttgtcctatatttctttgtgtgtgtttttttccttccagcttaaacaaattaaaactaaatatctaaaccttgtatacagacattaaaattagtgagagaaacaaaatatccttgtgtcttggcttttactttttgaagtcattaacaaataataaattaatgaataaaatgtgtccttattatgttttccttgtttgtagttacagctatatttttatcatattaacatttttcacttaacttcgtaatgaacttatggcatttcacacttactcgaaaccataatataattattattggtggtattactgtttggtttttactatttttactcaaaaacataaaacttcaccattctttccattttcatttgcccctttattctttctgacttttctctaagcctgcataggagctttattctcatattcaataggataggatattgcagtctcatcctgttttctgctgtcctgcaccattaaattttatatgtccttgaaggaattcaatttaatggcaactaatatatgtatgttagggacaggtaaagagtctgtgactgagatttctggagttatataacccctgcgccaccccccaccccaactccaacttgccagaattcaccccttaacctgcaatgtgattgtatttggacatagggcaatgaggacataagaatgtgattctaatttgatacaaatggtgatcttatgagaagaggaaggagagacgtctcttcctatgctcacacacaaaggaaagtccacatgaggacacaaggagaagccaagagagcccttaccaggaattaaacctgctaatccctattttaattagaacagtgagaaaataaatatctgtatttaagcctcaaaaaaaaaaaaaaaa

SEQ ID NO: 4956 - DNA, 5330 bp, Homo Sapiens
  NM_020954
cagcgcgcggcaggcggcgagctcgggggccgcagaaaatgaaactgaagccgtggtcacgtgacaggacatgtagtatatagcaggctgccagcgactcctgctcttgcttctggatctgcagggcagtcccagcaggacccatggagtgtccttcgtgccagcatgtctccaaggaggaaacccccaagttctgcagccagtgcggagagaggctgcctcctgcagcccccatagcagattctgagaacaataactccacaatggcgtcggcctcggagggtgaaatggagtgtgggcaggagctgaaggaggaagggggcccgtgcttgttcccgggctcagacagttggcaagaaaaccccgaggagccctgttccaaagcctcctggaccgtccaagaaagcaaaaagaagaaaaggaagaagaaaaagaaggggaacaagtccgcttcctcagagctggcttccttgcccctttctcctgccagcccctgtcacctgactttgctttcaaacccgtggcctcaggacacagccctgccccacagccaagcccagcagagtggccccactggccagccgagccagcccccaggcacagccaccacgccactggagggtgacggcctctccgcgcccaccgaggttggcgacagccccctgcaggcccaggctttgggagaggcaggagtggccacaggaagtgaggctcagagcagcccgcaattccaggaccacacggaaggggaggaccaggacgcttccatcccctctgggggcagaggcctgtcccaggaggggaccggtccccccacctctgctggtgaaggccattctaggactgaagatgctgcccaggagctcctgttgcctgagtcaaaaggaggcagctctgagcccgggacagaactgcagaccaccgagcaacaggcaggggcctcagcctctatggcagttgatgctgtagctgagccagccaatgcagttaaaggggccgggaaggaaatgaaagagaagacccagagaatgaaacagccaccagcaaccactcctcctttcaaaacacactgccaggaagctgagaccaagaccaaggacgagatggctgctgctgaagaaaaagtcggtaagaatgaacaaggggagcctgaagacctcaagaagccagaggggaagaacagaagtgcagctgctgtgaaaaacgagaaggagcaaaaaaaccaggaagcagatgtccaggaagtgaaggcaagcacgctgagcccgggtggaggagtcaccgtgttcttccacgccatcatctctcttcatttcccattcaatcctgacctccataaagtcttcatcagaggaggagaagaatttggggagtcaaaatgggacagcaatatctgtgagctgcactacaccagagacttgggtcatgaccgcgttcttgttgaaggcattgtctgcatttccaagaagcacctagataaatacattccttacaagtacgtcatttataatggggaatcttttgagtatgagttcatttacaagcaccagcagaagaagggcgagtacgtcaaccgctgtctgttcataaaatcttcacttctgggctcaggagactggcatcagtactatgacatagtttatatgaagcctcatgggagactccagaaagtcatgaaccacatcacagacgggccgaggaaggacctggtgaaggggaagcagattgccgctgcgctcatgctggacagcaccttcagcatcctgcagacctgggacaccatcaacctgaacagcttcttcacccagttcgagcagttttgctttgtcctgcaacagcctatgatttatgaaggacaggcacagctgtggaccgatttgcagtacagggagaaagaggtgaagagatacctgtggcaacatctgaaaaaacacgtggtaccattgccggacggaaaaagcacggactttttgcctgtggactgcccagtgaggagtaaactgaaaacaggcctgattgtcctttttgtagtggaaaaaattgagcttttattagaaggcagcctggactggttgtgtcacctcctaacctcagatgccagctcaccagatgagtttcaccgtgacctaagccacatccttgggatacctcagagctggcggctgtacctggtgaacctgtgccaaagatgcatggacacaaggacgtacacctggctgggcgccctgcctgtcctgcactgctgtatggagctggccccgcggcacaaggatgcctggagacagcctgaggacacctgggccgctctggagggactctccttctcaccgttccgggaacaaatgctagatacgagttccctacttcagtttatgagagagaagcagcatttgctgagcatagacgagcctctcttccggtcctggtttagtctgctacctctgagtcacctggttatgtatatggaaaacttcattgagcacctgggtcgttttcctgctcatatcctggactgtctttcagggatttactaccggcttccgggacttgagcaagtcttgaatacgcaggatgttcaggatgttcagaacgttcagaacattttagaaatgctgttgcgactcctggacacttaccgggacaagattcccgaggaggccttgtcaccatcctacctgactgtgtgtctgaaactgcatgaagccatctgcagcagcacaaagctacttaagttttacgagctgccagccttatctgccgagattgtctgcagaatgattagacttctatctctggtggattctgcaggacagagagatgaaactggaaataattcagtccaaacagtcttccaagggacccttgctgctacgaaaaggtggctccgagaagtttttacaaagaacatgctcacatcttcaggtgcctcattcacatacgtcaaggaaattgaggtctggaggcggctggtggaaatccaattccccgcggagcatggctggaaggagtcgttgctgggagacatggaatggaggctcacaaaggaggaacccctctcccagatcactgcctactgcaatagttgctgggacaccaaaggcttagaggacagtgtggccaagaccttcgagaaatgcatcattgaagccgtgagctcagcctgccaggtgaacaatctctcctcctgggaaacggattcgggctcacagctgtgttctgccatgacccagctaagggctatgaagcacccgctgggtctcagctcctccgctaactcagagattgggaagtgggcaccctcctccctcgccaagggcaatggcgctgaaatctagttctctccggattcctcagtgtgctgcacagtccctgctgctcgcaccatcctgcatgtgttccatatggaatcacggccgtgcgcgtgtggcacaagtcacacgggcttgcaggccgttcctcagatggccctgtcatcactgtggctgctggtttgattgattgttaacacttgctcagtaggtgtgcgggaagagactccaaaggttgacagaacatttatggaagcaaaatatgtgaaatggaaaattgtatcaatttatttagctcttttcggcaaaggggaagagattgtgcccccctgtctcccaggaacagtctcgcaggcaatgccacatgaggaagctccctgctggccacggctgccctgctcacatttcctaattggacacttaacccctgtacaagcacagccttgcggccacaggggaagtccagaaacattgaggtcattgaattccggggaccaaggggttctaattttttaagtgactgatacctttgataaggttttcctttccctttttcgttaactctttgttgagatattgttcgtatgccatacggtacatctgtcaaaagttccagttcagcaggttttggggtagtcacagatatgtacagtcatcaccacagttaatgacagagcattttcatcacttcaaagagaaacccggcccctttagccatcatcctcctcccctctagtcacccactcccctctgcaggcataaacaattgctgaacataaacaactgcttctgtggctttctctgttctgactgtcatatgaatggaatcatatcatatgtggccttttgggtatggcttatttcactgagcataatgtttttttgttgttggtggtggtggttgtttgttgtttttgagacagagtttcactctttttgcccaggctggagtgcaatggtgcgatcctggctcaccgcaaccgctgcctcccgggttcaagtgattctcctgcctcagcctcccaagtgctggaattacagctactttttgtttaaagagtcttttaattgtttaaagaacaatgtgccgccacactcggttccttttgtatttttagaagagacagggtttctccatgttggtcaggctggtctcgaactcccgacctcaggtgatccacccaccttggcctcccgaagtgccgagattacaggtgtgagccaccgcgcccggccgagcataatgttttgaaagaccgctcaggctggacacggttgctcacgcctgtaatcacggcactttgggagcccaggagttcaagacaagcctgggtaacagagtaagaccctgtctctataaaaactaaaaaataaacaaaaaaaattagccaggcatggccgggcacacctgtggtcccagctacttgggaggctgaggtgggaggctcccttgggcccagaaggtcaaggcagcagtgagccatgatcacaccactgcacttcaacctgggggacagagcaagaccctgtctcaaaaagcaataacaacaaaagtccatccatattgtagcttgtgtccgtttacgttaagtattccttacccaaaatgcttgagaccagaagtgttttggatttcagatgttttcaaattttggaatatttgcatttacataatgagatgtcttccagatgggacccagagtctaaccacaaaattcacttgtttcatatacatcttatacacatagcctgaaggtaattttatacaatatttttaacaattttgtgcatgagacaaagtttgtattaagtatttgtatgttgaatttttcacttgtggcatcattatactcaaaaagtttggattttgtagtattttggatttggggattaggaatgctcaacctatatttcatttttttccatggccaaatattccccgtttatccatgtgtccattgacggccatctatgttgcttcttcggctattataaatctgctgatacaaaaaaaaaaaaaaa

SEQ ID NO: 4957 - DNA, 3209 bp, Homo Sapiens
  NM_020967
gcctcgtgcccgcgccggtcggttggtggcgcctttgtcctacggcgggcaggtgggccgacgcggaggcggcagcggcgggcctgaggcgaaggagcggccgggagcccgccgcgctggtagcgatattaataaggcagcggaaagaagaaatatgaatacggctccatcaagacccagccccacacgaagggatccatatggctttggagacagtcgagattcaaggcgtgatcgatccccaattcgaggaagtccaaggagagagcccagggatggcagaaatggccgggatgcccgggacagcagagacattcgagacccccgagacttgcgggaccacagacatagtagagatttgcgggatcacagagacagcaggagtgtgcgcgacgttcgggacgtgagggatcttagagactttcgtgatctaagagactctagggattttcgagatcagcgagaccccatgtacgacagatacagagacatgagagactcccgagatcctatgtacaggagagaaggctcttatgaccgatacctacgaatggatgactattgcaggagaaaggatgactcttattttgaccgttacagagatagctttgatggacggggccctccaggcccagaaagtcagtctcgtgcaaaagagcgtttgaaacgtgaggaacggcgtagagaagagctttatcgtcaatattttgaggaaatccagagacgctttgatgccgaaaggcccgttgattgttctgtgattgtggtcaacaaacagacaaaagactatgctgagtctgtggggcggaaggtgcgagacctgggcatggtagtggacttgatcttccttaacacagaagtgtcactgtcacaagccttggaggatgttagcaggggaggttctccttttgctattgtcatcacccagcaacaccagattcaccgctcctgcacagtcaacatcatgtttggaaccccgcaagagcatcgcaacatgccccaagcagatgccatggtgctggtggccagaaattatgagcgttacaagaatgagtgccgggagaaggaacgtgaggagattgccagacaggcagccaagatggccgatgaagccatcctgcaggaaagagagagaggaggccctgaggagggagtgcgtgggggccaccctccagccatccagagcctcatcaacctgctggcagacaacaggtacctcactgctgaagagactgacaagatcatcaactacctgcgagagcggaaggagcggctgatgaggagcagcaccgactctctgcctggcccgatttcccgccaaccactcggggcgacctcgggtgcctcgctgaagacacagccaagctcccaaccgctccagagcggccaagtgctcccctctgctacacccactccatctgcaccccccacctcccagcaagagcttcaggccaaaatcctcagcctcttcaatagtggcacagtgacggccaatagcagctctgcatccccctcggttgctgccggaaacaccccaaaccagaatttttccacagcagcaaacagccagcctcaacaaagatcacaggcttctggcaatcagcctccaagcattttgggacagggaggatctgctcagaacatgggccccagacctggggctccttcccaagggctttttggccagccttccagtcgcctggcacctgctagcaacatgactagccagaggcctgtgtcttccacaggtatcaactttgacaatccaagtgtacagaaggctctggataccctgatccagagtggccctgctctctcccacctggttagccagaccacagcacagatggggcagccacaggcccccatgggatcttaccagaggcattactgaagctaaatctttcaactctccccagtcccctcatcccctggcctcctcccacttacttgttctaaatagagctgtttggaggatgttctctgcgctcccaggccggcatcgagtgtcatcaatttctaccacctgctctctcttctgcccaaggctgtgttgcttattccttacaaagtttatactgcatttggggctgtatctttttttgttttttgttttgtagaaaataaatatctccgggggcagtacaggtgtctgggcttgtatttgatggggtttctccggtccctgtttctactggatttggagccaggcccagctagccaagtttggaatggcatttgtcatgtcagtagccaccacctttgttcattgtgaacctaccaaggctttccagcttcatacacattgaccagagctcaagctcctgcctgcaactcctgcctagagttgaagaaaagcaaactggccttggcaggcacagtgtcatcataccctcaccccatatgtttggggtctgcttgaggattcataaatcagccactctggattgttgaggaatggccatggcagccacagaaaaaagaatttttctctctgagccaaggttgttttttgtttttttctcttttcttttttgttttcatttcattggaagatctccaatggactgaacagctccagtcagcagcagttaccacaaactgtgaatctgggccccaccactcttccctgttaaccagttctgtcagcatccccctctccagcagcacttccatgaagttggttctgagactctggccgtgaacacccgtttcttcagtgatttgttttgggcttttggctcaaaaccccaggctcttgtttttgtctagactcttattctgtttcctgagcagcaggaggtagggaccactttgatgtcagacttctggtagctggacatgttctcgagatgggtggctgttcgcgacttttgtaccagagtgaaattgttagaaggagggtttctggctgtggttctaaatggagccccaggaagctgccctctccccagggtttgtgctcagtagagccctgtggatcacagtcttgaggtcctctagcaggggtgagggagagcagcgacttcagctgagtccctgccagtggttaagcaaacaatggtttcaaaattcaaggtccccaaatggcagcattttatgttctgacctgtttgtgttatatagtggttttttttttcctctttggaactcttgtgttgttaataaaatgaaatgattactttttaattaaaatgaaaaaagtaaaa

SEQ ID NO: 4958 - DNA, 3033 bp, Homo Sapiens
  NM_020980
aacacaactggcacatctcttttctcatctcttgaaaaaaaccaacagagaaaaaagtaccttgagaataaaggtaatgattaatctgtcaggcacaaaagggattgttttggggatttcgggttctaagtcgcagattcaaacaaatagcagcgaacagggaatgacagttccaccagaagacgattaagccacagcctctaattggaacggcatttgtacagtcagagactcttaccagacatctccaggaatctgtgagccattgtcaaaacgtccattttcatctggctgtgaaagtgaggaccacaacaggtaggtattggtagaaacaggagtcctcagagaagccccaagatgcagcctgagggagcagaaaagggaaaaagcttcaagcagagactggtcttgaagagcagcttagcgaaagaaaccctctctgagttcttgggcacgttcatcttgattgtccttggatgtggctgtgttgcccaagctattctcagtcgaggacgttttggaggggtcatcactatcaatgttggattttcaatggcagttgcaatggccatttatgtggctggcggtgtctctggtggtcacatcaacccagctgtgtctttagcaatgtgtctctttggacggatgaaatggttcaaattgccattttatgtgggagcccagttcttgggagcctttgtgggggctgcaaccgtctttggcatttactatgatggacttatgtcctttgctggtggaaaactgctgatcgtgggagaaaatgcaacagcacacatttttgcaacatacccagctccgtatctatctctggcgaacgcatttgcagatcaagtggtggccaccatgatactcctcataatcgtctttgccatctttgactccagaaacttgggagcccccagaggcctagagcccattgccatcggcctcctgattattgtcattgcttcctccctgggactgaacagtggctgtgccatgaacccagctcgagacctgagtcccagacttttcactgccttggcaggctgggggtttgaagtcttcagagctggaaacaacttctggtggattcctgtagtgggccctttggttggtgctgtcattggaggcctcatctatgttcttgtcattgaaatccaccatccagagcctgactcagtctttaagacagaacaatctgaggacaaaccagagaaatatgaactcagtgtcatcatgtagtggcatgctcagctctggatttgcagtcagtttgggattctcttcagaaagatggcatctaagtgtctgtgttcttgtaagcctgaggtggaatccacccagttttgtctgctagccatatgggacatctaattggaaaagcatctgcataaaagtttggaaacaatgaccacttctctaccattgtcccccacccccaccccccagaataacgctgactgtcccctgaaacagccttctctcctgccctgtttatttcatcctcgatgggaattcttgctaggtaagcactaataactcggcatcttgacgatagtcccatttgggtggtttcagctgcactatctgtatgaaatggtgtcaccaaaacccttttcttcagtatcgacaaagattacattctgagtaccaaccaaaccctaaattgaaagacaaaactatggtttcagtcaacatattcatgaattagggagctaatgggttaagcttccagttcccgctatgctactggatttgtataaatactgatattctccaaacctagtggtgtagggagcaagagaatgcagctggaaggcacaaggggaggacattgtggcattcagaaactgcaggagacaagatgaatttgagaagccaaatggaatttttaatggaaaccatttatcagattaatctcttgctctcctgcattttagaggacaccaattaatttcctggtctttagtatataataacctaaaataccattgtaacctcagtcatgaaaaatacatcactctgtctttttagctcaaatgtattttcctaattgcccacttgagaacagacatttgacaagttatatcaacgactgtgcttgtccattattttacacatgccctagaagccaaaactgaaagccactggatcctggtctagctgaatcttcagagtgggaggtctccaaaaagatattaccttattgggcttaacaattcacaaggcactttcacacccattatctaatttaatcctcataatgactatgtgaggcaaatgccacattgcccatttttcagataaagaaacaaaatcttagggaagataagttgagttgtccaagagcacactgaaagttgaatgttatctaatgcattcctctacctttcagaagatcagtagctggctgagaatctttgccaaatcttccttgctagccagaagtggaattggcagcttctagaatatgtacacctctggacaaaatgttcctcaatcttaagatacaaagaccctcattgtctgggtctattcccacacttactgagtacagatgaaggaaagtggtagcaatttaatcataactttcatttgctgaaaaacattatgagaaggcctcccttcctaagccacctctggtcttgctaagtcttgatcttgcttcctgccagcaccaaacattacattcaggggatttcctctggctcagtcttttccccttgaagttctctaatagatgttacttttgacaaaagatcgcctatgagttacaagcaccaggggatgctctacatcaagggatgcaccttcagtcaaactgtcaaaaagcccagaattcccaaaggcattaggtttcccaactgctttgtgctgatatcagaacagcagaaattaaatgtgaaatgtttctgatgacttatgttctacaatctatggacatacgggatttttttttcttgctttgaagctacctggatatttcctatttgaaataaaattgttcggtcattgttgaaaaaaaaaaaa

SEQ ID NO: 4959 - DNA, 2139 bp, Homo Sapiens
  NM_020982
cagattccagagagtcccaggcgggcgggagtgtgcgatactcggggagctggggcatgtttgcatcacgaaactcggctgggggagagcagaggcagctggggaggggctgcggaaggaggaggctcaggaaggcaagccgacgccccctgtgtgtgtttctgtcctgagcctgttacttttttgacccccgatccgtctcttcttcctcagcttgtcctccatcttcccctcctttacccttggttcccacatgcacagatgctacggacgcttttcctcccctgtccccactcagccgcagcatcccccgctggcccccaggcccctcatccatccgctgcccacgaacccccagccccgcaccctccccgtggctcaggtctcccctatcccggcctccctgcacttcactctgctcctcccctgcctgggccttaaaaccccgcctgcagccgagagcccgcagagtccccaggtggcactgtcagagtcgctcagtgggaacctgcgccagccggcaggagacgtggctgtcctcagcctggcagtgcgtctggagggcctgtgcgagctcagcccaggtgtgacagcggggtggtaagagcagcagcaccctcagggcatccgatgggcggaggcccctcgaggtgacacccaccactcagccgagcgggactacgagtctgctttgtgctccgcgaggaccagaaacacctgcaagaggcacggagaggaggcgcctttcaagaggcgcctttcatggaactgaggactggcctggcttggggacaccaacaagccttccccctcctgctggacacagagacacccacccagcacaccagacacaccctctgagtcacctaggccgcctggggctgagaagacctaaccgaggggccagatggcttcgaccggcttagaactgctgggcatgaccctggctgtgctgggctggctggggaccctggtgtcctgcgccctgcccctgtggaaggtgaccgccttcatcggcaacagcatcgtggtggcccaggtggtgtgggagggcctgtggatgtcctgcgtggtgcagagcacgggccagatgcagtgcaaggtgtacgactcactgctggctctgccgcaggacctgcaggccgcacgtgccctctgtgtcattgccctcctgctggccctgcttggcctcctggtggccatcacaggtgcccagtgtaccacgtgtgtggaggacgaaggtgccaaggcccgtatcgtgctcaccgcgggggtcatcctcctcctcgccggcatcctggtgctcatccctgtgtgctggacggcgcacgccatcatccaggacttctacaaccccctggtggctgaggccctcaagcgggagctgggggcctccctctacctgggctgggcggcggctgcactgcttatgctgggcggggggctcctctgctgcacgtgccccccgccccaggtcgagcggccccgcggacctcggctgggctactccatcccctcccgctcgggtgcatctggactggacaagagggactacgtgtgaggcggaggtttcccctgggagcccactgctccccactgccccgccctttcgaccttggcctgatgaccagatgccctgctccatcacaacctccttccccaggaaaacccactttccaaaagcccaagctacacctggctgcagggctgggtcagctggcctggctgagctcttctcagtggggtcccctttgatgttctcccccaagttgggcagcctagaggtgttgggaaccctggcctgcccccacctccccagtaattgtttccttccgttgcccaggacactggctggccttccttctcttctgagccctcccctgccccaggaaccctggcctcaccaaaacagcagcagctcgttggctccaaaaccagggagcagaccatgccctcccaaccctggagttgtcagggagggcctgcccatcacctccctctccccaacatccccaccctcgagttggaaataaagagcatttgtaactggaaaaaaaaaaaaaaaaaaaaaaaaaaaaaaaaaaaaaaaaaaaaaaaaaaaaaaaaaaaaaaaaaaaaaaaaaaaaaaaaaaaaaaaaa

SEQ ID NO: 4960 - DNA, 1289 bp, Homo Sapiens
  NM_021004
gaagagtggaacccatacttgctggtctgatccatgcacaaggcggggctgctaggcctctgtgcccgggcttggaattcggtgcggatggccagctccgggatgacccgccgggacccgctcgcaaataaggtggccctggtaacggcctccaccgacgggatcggcttcgccatcgcccggcgtttggcccaggacggggcccatgtggtcgtcagcagccggaagcagcagaatgtggaccaggcggtggccacgctgcagggggaggggctgagcgtgacgggcaccgtgtgccatgtggggaaggcggaggaccgggagcggctggtggccacggctgtgaagcttcatggaggtatcgatatcctagtctccaatgctgctgtcaaccctttctttggaagcataatggatgtcactgaggaggtgtgggacaagactctggacattaatgtgaaggccccagccctgatgacaaaggcagtggtgccagaaatggagaaacgaggaggcggctcagtggtgatcgtgtcttccatagcagccttcagtccatctcctggcttcagtccttacaatgtcagtaaaacagccttgctgggcctgaccaagaccctggccatagagctggccccaaggaacattagggtgaactgcctagcacctggacttatcaagactagcttcagcaggatgctctggatggacaaggaaaaagaggaaagcatgaaagaaaccctgcggataagaaggttaggcgagccagaggattgtgctggcatcgtgtctttcctgtgctctgaagatgccagctacatcactggggaaacagtggtggtgggtggaggaaccccgtcccgcctctgaggaccgggagacagcccacaggccagagttgggctctagctcctggtgctgttcccgcattcacccactggcctttcccacctctgctcaccttactgttcacctcatcaaatcagttctgccctgtgaaaagatccagccttccctgccgtcaaggtggcgtcttactcgggatttctgctgttgttgtggccttgggtaaaggcctcccctgagaacacaggacaggcctgctgacaaggctgagtctaccttggcaaagaccaagatattttttcccgggccactggggaatctgaggggtgatgggagagaaggaacctggagtggaaggagcagagttgcaaattaacaacttgcaaatgaggtgcaaataaaatgcagatgattgcgcggctttgaatccaaaaaaaaaaaaa

SEQ ID NO: 4961 - DNA, 2737 bp, Homo Sapiens
  NM_021008
tgacgaaggggcccgaccgcgccgcgtttcgggagcggacgtccgagccacggccgaggcccgattagtccgtccggcaccgctcgggcactttcggaagggaagaggtggagaaccgacgttcgggagcattcggcctcggggacattcggctcgtctcggctcggcctcgggctgactcggcttccgccggcggcgggaacgggcgaaacccgcggcactaagctctctctgagaggcagaattgcgccggccgccggcgagaatctgcctagagccgtccagccctgtcggccggggacgacagccgcctcagcctgtcaggacagtgaggagagcaggggccgagtctctcggaagccctcgtgaggactcggacctattcggactgattcggcttcccacttcggggaacttcgaccctcctcggttcaggactcggtctcggctcggcggcttcgtgcaggttcggctcctactcgggcagcctctgttcgcctcggctccgctccgcgggcggactcggctcggctctgctcggcggctggctgccttttcggtccctattcgggcggcggcttcgggcggcctcggcccagctcgggcgtcctcttcgggccccgcttcgggctccgcgaccggcgcttcgggcggtcccggacggcgccttcgggaaggctcggcggagtccggatggaggactcggactcggcggcaaagcagctgggcctggctgaggcggcggcggtggcggccgcggccgctgtggcggcggcggccgcggccgcggcaggaggcgaggcggaggagccggtgctgagcagggacgaggactcggaggaggacgcagactcggaggcggagcgggagacgccgcgggtcacggcagtggcggtgatggcggcggagcccgggcacatggacatgggcgccgaggccctgcccggccccgacgaggccgccgctgccgcagccttcgcagaggtgaccacagtgacagtggccaacgtgggggctgctgcagacaatgtcttcaccacgtctgtggcgaacgcggcatccatctcaggacatgttctgtctggtaggacggcccttcagatcggggacagcctgaacaccgaaaaagcgacactgattgtcgtccacacagatgggagcatcgtggagaccaccgggctgaaaggcccggcagctcccctcaccccaggtcctcagtctcctccaacccctctggctcccggccaagaaaaaggtggaactaaatacaactgggacccttctgtgtacgacagtgagctgcccgtacggtgccggaacatcagcggcactctgtacaagaacaggctcggctcaggcggccggggacggtgcatcaagcagggggagaactggtacagtcccaccgagtttgaggccatggcaggaagagccagcagtaaggactggaaaagaagcattcgctacgcgggccgacccttgcagtgcctcatccaggatgggatcttaaaccctcacgctgcctcttgcacctgtgctgcctgctgcgacgacatgaccttaagtggcccagtcaggctttttgtgccttacaaaaggcgcaagaaggagaatgaactgcccacaactcccgtgaagaaggactcccccaagaacatcacattgcttccagccaccgcggctaccaccttcaccgtgaccccctcgggacagatcacgacctcgggggcactgacctttgaccgagcgtccacggtagaggccactgctgtcatatcagagagtccggcccagggcgacgtcttcgcaggggccacagtccaagaggccagcgtgcagcccccatgcagggccagccaccctgagcctcactaccccggctatcaggacagctgccagatcgcaccgtttccagaagctgcgttgccaacgtcacatcccaaaatagtgttgacatccctgcctgcgctggcggtcccacccccgactcccaccaaagcggcacctcccgcgttggtcaatgggctggagctgtcagagccgcggagctggctgtacctagaagagatggtcaactccttgctcaacacagcgcagcagctgaagacgctgtttgagcaagccaagcatgccagcacctaccgagaagctgccacaaaccaggccaagatccacgctgacgcagagcggaaggagcagtcctgcgttaactgcggccgggaggctatgagcgagtgcaccggctgccacaaggtcaactactgctccaccttctgccaacgcaaggactggaaggatcaccagcacatatgcggccagtcagcagctgtcaccgtccaggcagacgaagtccacgtggctgaaagcgtgatggagaaggtgaccgtgtgaggctccatcggccgccctgggagctggggcccctcgcactcctgtgaggcttttgcaggtcgaaggcccccctgaggactctggggggacgttgagaagaggggtgtgggaaggtaaagaaacttgctggacaagtcattaacacactttaagcgaatggtgccctgggaagcgcactccccctgcccgggccccctgcccgctcgcggacagattttttatccctgggatcatgagcgtccggtcttgcccacagggcctgtgctgcgacgcacatacatacgtgttgtgtctgtcaataaagtgtaaataaggtctccctgccaaaaaaaaaaaaaaaaaaaaa

SEQ ID NO: 4962 - DNA, 2594 bp, Homo Sapiens
  NM_021009
aggggccgcggagccgcggctaaggaacgcgggccgcccacccgctcccggtgcagcggcctccgcgccgggttttggcgcctcccgcgggcgcccccctcctcacggcgagcgctgccacgtcagacgaagggcgcagcgagcgtcctgatccttccgcccggacgctcaggacagcggcccgctgctcataagactcggccttagaaccccagtatcagcagaaggacattttaggacgggacttgggtgactctagggcactggttttctttccagagagcggaacaggcgaggaaaagtagtcccttctcggcgattctgcggagggatctccgtggggcggtgaacgccgatgattatataaggacgcgccgggtgtggcacagctagttccgtcgcagccgggatttgggtcgcagttcttgtttgtggatcgctgtgatcgtcacttgacaatgcagatcttcgtgaagactctgactggtaagaccatcaccctcgaggttgagcccagtgacaccatcgagaatgtcaaggcaaagatccaagataaggaaggcatccctcctgaccagcagaggctgatctttgctggaaaacagctggaagatgggcgcaccctgtctgactacaacatccagaaagagtccaccctgcacctggtgctccgtctcagaggtgggatgcaaatcttcgtgaagacactcactggcaagaccatcacccttgaggtcgagcccagtgacaccatcgagaacgtcaaagcaaagatccaggacaaggaaggcattcctcctgaccagcagaggttgatctttgccggaaagcagctggaagatgggcgcaccctgtctgactacaacatccagaaagagtctaccctgcacctggtgctccgtctcagaggtgggatgcagatcttcgtgaagaccctgactggtaagaccatcaccctcgaggtggagcccagtgacaccatcgagaatgtcaaggcaaagatccaagataaggaaggcattccttctgatcagcagaggttgatctttgccggaaaacagctggaagatggtcgtaccctgtctgactacaacatccagaaagagtccaccttgcacctggtactccgtctcagaggtgggatgcaaatcttcgtgaagacactcactggcaagaccatcacccttgaggtcgagcccagtgacactatcgagaacgtcaaagcaaagatccaagacaaggaaggcattcctcctgaccagcagaggttgatctttgccggaaagcagctggaagatgggcgcaccctgtctgactacaacatccagaaagagtctaccctgcacctggtgctccgtctcagaggtgggatgcagatcttcgtgaagaccctgactggtaagaccatcactctcgaagtggagccgagtgacaccattgagaatgtcaaggcaaagatccaagacaaggaaggcatccctcctgaccagcagaggttgatctttgccggaaaacagctggaagatggtcgtaccctgtctgactacaacatccagaaagagtccaccttgcacctggtgctccgtctcagaggtgggatgcagatcttcgtgaagaccctgactggtaagaccatcactctcgaggtggagccgagtgacaccattgagaatgtcaaggcaaagatccaagacaaggaaggcatccctcctgaccagcagaggttgatctttgctgggaaacagctggaagatggacgcaccctgtctgactacaacatccagaaagagtccaccctgcacctggtgctccgtcttagaggtgggatgcagatcttcgtgaagaccctgactggtaagaccatcactctcgaagtggagccgagtgacaccattgagaatgtcaaggcaaagatccaagacaaggaaggcatccctcctgaccagcagaggttgatctttgctgggaaacagctggaagatggacgcaccctgtctgactacaacatccagaaagagtccaccctgcacctggtgctccgtcttagaggtgggatgcagatcttcgtgaagaccctgactggtaagaccatcactctcgaagtggagccgagtgacaccattgagaatgtcaaggcaaagatccaagacaaggaaggcatccctcctgaccagcagaggttgatctttgctgggaaacagctggaagatggacgcaccctgtctgactacaacatccagaaagagtccaccctgcacctggtgctccgtctcagaggtgggatgcaaatcttcgtgaagaccctgactggtaagaccatcaccctcgaggtggagcccagtgacaccatcgagaatgtcaaggcaaagatccaagataaggaaggcatccctcctgatcagcagaggttgatctttgctgggaaacagctggaagatggacgcaccctgtctgactacaacatccagaaagagtccactctgcacttggtcctgcgcttgagggggggtgtctaagtttccccttttaaggtttcaacaaatttcattgcactttcctttcaataaagttgttgcattcccaaaaaaaaaaaa

SEQ ID NO: 4963 - DNA, 1922 bp, Homo Sapiens
  NM_021016
gagaagtgctcctgccccgggaagaggctcagcgcagaaggaggaaggacagcacagctgagagccatgctcaggaagtttctggatcctaggctcagctccacagaggagaacacgcaggcagcagagaccatggggcccctctcagcccctccctgcacacagcgcatcacctggaaggggctcctgctcacagcattacttttaaacttctggaacttgcctaccactgcccaagtcacgattgaagccgagccaaccaaagtttccaaggggaaggacgttcttctacttgtccacaatttgccccagaatcttgctggctacatctggtacaaagggcaaatgaaggacctctaccattacattacatcatacgtagtagatggtcaaataattatatatgggcctgcatacagtggacgagaaacagtatattccaatgcatccctgctgatccagaatgtcacccgggaggacgcaggatcctacaccttacacatcgtaaagcgaggtgatgggactagaggagaaactggacatttcaccttcaccttatacctggagactcccaagccctccatctccagcagcaacttataccccagggaggacatggaggctgtgagcttaacctgtgatcctgagactccggacgcaagctacctgtggtggatgaatggtcagagcctccctatgactcacagcttgcagttgtccaaaaacaaaaggaccctctttctatttggtgtcacaaagtacactgcaggaccctatgaatgtgaaatacggaacccagtgagtgccagccgcagtgacccagtcaccctgaatctcctcccgaagctgcccaagccctacatcaccatcaacaacttaaaccccagggagaataaggatgtcttagccttcacctgtgaacctaagagtgagaactacacctacatttggtggctaaatggtcagagcctcccggtcagtcccagggtaaagcgacccattgaaaacaggatcctcattctacccagtgtcacgagaaatgaaacaggaccctatcaatgtgaaatacaggaccgatatggtggcatccgcagttacccagtcaccctgaatgtcctctatggtccagacctccccagaatttacccttcattcacctattaccattcaggagaaaacctctacttgtcctgcttcgcggactctaacccaccagcagaatattcttggacaattaatgggaagtttcagctatcaggacaaaagctctttatcccccagattactacaaagcatagcgggctctatgcttgctctgttcgtaactcagccactggcatggaaagctccaaatccatgacagtcaaagtctctgctccttcaggaacaggacatcttcctggccttaatccattatagcagccgtgatgtcatttctgtatttcaggaagactggcagacagttgctttcattcttcctcaaagtatttaccatcagctacagtccaaaattgctttttgttcaaggagatttatgaaaagactctgacaaggactcttgaatacaagttcctgataacttcaagatcataccactggactaagaactttcaaaattttaatgaacaggctgatacttcatgaaattcaagacaaagaaaaaaacccaattttattggactaaatagtcaaaacaatgttttcataattttctatttgaaaatgtgctgattctttgaatgttttattctccagatttatgcactttttttcttcagcaattggtaaagtatacttttgtaaacaaaaattgaaacatttgcttttgctccctaagtgccccagaattgggaaactattcaggagtattcatatgtttatggtaataaagttatctgcacaagttcaaaaaaaaaaaaaaa

SEQ ID NO: 4964 - DNA, 827 bp, Homo Sapiens
  NM_021019
tcgtctgcataaacccaggccacggttcctattggctgagtcctctgagggtgacgtcatcgggacgtactaagactagggttgggccgagagtcggagccattactgcaggaaaaggtcccggagagctgagcagtcaagatgtgtgacttcaccgaagaccagaccgcagagttcaaggaggccttccagctgtttgaccgaacaggtgatggcaagatcctgtacagccagtgtggggatgtgatgagggccctgggccagaaccctaccaacgccgaggtgctcaaggtcctggggaaccccaagagtgatgagatgaatgtgaaggtgctggactttgagcactttctgcccatgctgcagacagtggccaagaacaaggaccagggcacctatgaggattatgtcgaaggacttcgggtgtttgacaaggaaggaaatggcaccgtcatgggtgctgaaatccggcatgttcttgtcacactgggtgagaagatgacagaggaagaagtagagatgctggtggcagggcatgaggacagcaatggttgtatcaactatgaagcgtttgtgaggcatatcctgtcggggtgacgggcccatggggcggagctcgtccgcatggtgctgaatggctgaggaccttcccagtctccccagagtccgtgcctttccctgtgtgaattttgtatctagcctaaagtttccctaggctttcttgtctcagcaactttcccatcttgtctctcttggatgatgtttgccgtcagcattcaccaaataaacttgctctctgggccctcggtaaaaaaaaaaaaaaaaaa

SEQ ID NO: 4965 - DNA, 678 bp, Homo Sapiens
  NM_021034
aggaaaaggaaactgttgagaaaccgaaactactggggaaagggagggctcactgagaaccatcccagtaacccgaccgccgctggtcttcgctggacaccatgaatcacactgtccaaaccttcttctctcctgtcaacagtggccagccccccaactatgagatgctcaaggaggagcacgaggtggctgtgctgggggcgccccacaaccctgctcccccgacgtccaccgtgatccacatccgcagcgagacctccgtgcccgaccatgtcgtctggtccctgttcaacaccctcttcatgaacccctgctgcctgggcttcatagcattcgcctactccgtgaagtctagggacaggaagatggttggcgacgtgaccggggcccaggcctatgcctccaccgccaagtgcctgaacatctgggccctgattctgggcatcctcatgaccattctgctcatcgtcatcccagtgctgatcttccaggcctatggatagatcaggaggcatcactgaggccaggagctctgcccatgacctgtatcccacgtactccaacttccattcctcgccctgcccccggagccgagtcctgtatcagccctttatcctcacacgcttttctacaatggcattcaataaagtgcacgtgtttctggtgctaaaaaaaaaa

SEQ ID NO: 4966 - DNA, 1793 bp, Homo Sapiens
  NM_021036
gcaaagccagctgggctcctgagtccggtgggtacttggagaacttactacgtctagctggaggattgtaaatgcaccaatcagcatgctgtgtctagctcaagattttctccatccccttattttgggccagtggctgtcattacatatgagatgagtctcttgaagactacagatgaactcaagctccatgaggagatgtttcattgtcgagagcagtcatgatggcctgcactccacacaatgcaacagagtgaaagagcaggttctgcttctttggtgtagtcctgaagcttcctaagaaacttcacatcaggtgatggataggagcaaccctgtaaaaccagccttagactatttttcaaacaggctggtgaattaccagatctccgtcaagtgcagtaaccagttcaagttggaagtgtgtcttttgaatgcagagaacaaagtcgtggacaaccaggctgggacccagggccagctgaaggtgctgggtgccaacctctggtggccgtacctgatgcacgaacaccccgcctacctgtactcctgggaggatggtgattgctcacaccaaagccttggacccctcccagcctgtgacctttgggaccaactccacctacgcagcagacaagggggctctgtatgtggatgtgatccgtgtgaacagctactactcttggtatcgcaactacgggcacctggagttgattcggctgcagctggccgcccagtttgagaattggtgtgagacatcacaatcccattattcagagcgcgtatggagtggaaacgcttgtagggtttcaccagggctggtgaattaccagatctccgtcaagtgcagtaaccagttcaagttggaagtatgtcttttgaatgcagaaaacaaagtcgtggacaaccaggctgggacccagggccagctgaaggtgctggtgccaacctctggtggccgtacctgatgcacgaacaccccgcctacctgtactcgtgggaggatggtgattgctcacaccaaagccttggacccctcccagcctgtgacctttgggaccaactccacctacgcagcagacaagggggctctgtatgtggatgtgatccgtgtgaacagctactactcttggtatcgcaactacgggcacctggagttgattcggctgcaggccctgcagctggccgcccagtttgtgaattggtgtaagacatcacaatcccattattcagagcgcgtatggagtggaaacgcttgtagggtttcaccagtctttcccagggaactccgatgaagtgttccaacaaaatgagcgagtgaaccaagaagaggatgacattagatccaggagatacaacagaggagataatctccaggatgcctgtgaagaaagatccctggatcccaggatgattataggacaagttgttcataatccagcaggccagaagacttccagggaaactcatttcaagatgaaaatggaccagccgcagtggctcacgcctgtaataccagcactttgggaggctgaggcgggcggatcacttgaggtcaagagtttgaaactagcctggccaacgtggcaaaactccatctctattaaagatacaaaaattagccaggcatagtggtgcatgcctgtagtcccagctacttgggatgctgaggcaggaagaattgcttgaacctgggaggcagagtctgcggtgaccgagatcatgccactgcactccagcctgggtgacagagccagactccgtctctactaaaaaaaaaaaaaaaaaaaaaa

SEQ ID NO: 4967 - DNA, 4883 bp, Homo Sapiens
  NM_021045
caattatccacgggagactcggttttcctctctgtaaattacggatattaggaatacttgccgcctggggttgttttgagcactttcattgtttaggtgctgtatttattgggtgtgcgttccctgggagagcccgagggagacggctcctgcaccggccccaagggcctctctgcccgtggagtgcaggagcgaaggggctggcctagctgaccaccagggcccctgctggctctgaccgccctcctatcccaagtaattatttacacgtttcgcgttcgcttatgtattatgtgtaatcatggcacagtatcctgaagccgtcggagtctgtgtgctggtgcaaggtctgggacaaatttaagaagagagagaacctaaattggtaataaatcaataagaaatatttacattcactcagtgaaaagtgtcatgtctgagctcagcatatatcggagccacacatggacacctctccttcctccactaagagcggaaaatgaacaaatcccaggaacaagtgtcattcaaggatgtatgtgtggacttcactcaggaagagtggtatctgctggaccctgctcagaagattctatacagagatgtgatcctggaaaattatagcaatcttgtctcagtagggtattgcattactaaaccagaagtgatctttaagatcgagcaaggagaagagccctggatattagaaaaaggattcccaagccagtgccacccagaaaggaaatggaaagttgatgacgtgttagagagcagccaggaaaatgaagatgaccatttttgggagcttctattccacaacaacaaaacagtaagtgtagaaaatggagatagaggaagcaaaactttcaatttgggcacagaccctgtttctttaagaaattatccctataaaatatgtgactcatgtgaaatgaatttgaaaaatatttcgggcttaattattagtaaaaagaactgttccagaaagaagcctgatgagtttaatgtatgtgagaaattgctccttgatattaggcatgagaaaatccctattggagagaagtcttataaatatgatcaaaaaaggaatgccattaattatcaccaggatctcagtcagccaagttttggccaatcttttgagtatagtaaaaatggacaaggcttccatgatgaggcagcattttttacaaataagagatctcagataggagagacagtctgtaaatataacgaatgtggaagaaccttcattgaaagtttaaagctgaatatatctcaaagacctcatttggaaatggagccgtatggatgcagtatttgcgggaagtccttctgcatgaatttaaggtttggacatcagagagctcttacaaaggacaatccttatgaatataatgaatatggggaaatcttctgtgacaattcagctttcattatccatcagggagcttacacaagaaagattctccgtgaatataaagtgagtgacaaaacctgggaaaagtcagctctcttaaaacatcaaatagtacacatggggggaaagtcttatgattacaatgaaaatgggagtaatttcagcaagaagtcacatcttacccagcttcggagagctcacacaggagaaaaaacctttgaatgtggtgaatgtgggaaaaccttctgggagaagtcaaacctcactcaacatcagagaacacacacaggagagaagccctatgaatgtactgaatgtgggaaagccttttgccagaaaccacacctgaccaaccatcagcgaacacatacaggagaaaaaccctatgaatgtaagcaatgtggaaaaacattctgtgtgaagtcaaacctcactgaacatcagagaacacacacaggggagaagccctatgaatgtaatgcatgtgggaaatccttctgccacagatcagccctcactgtgcatcagagaacacacacaggggagaaaccgtttatatgtaatgaatgtggaaaatccttctgtgtgaagtcaaacctcattgtacatcaaagaactcacactggggagaaaccatataagtgtaatgaatgtgggaaaaccttctgtgaaaaatcagctctcactaaacatcagaggactcacacaggggagaagccgtatgagtgtaatgcatgtgggaagacctttagtcagaggtcagtgctcaccaaacatcagagaattcacacaagggtgaaagctctttcaacatcctgaatgttagaagccttcatacacttgtgaaattggttatacagtttcaaaaaaggagatcagagaaagccaaagaatgtcagaaatttgtagaaaatgacttcttgtttgaatatgtaaaagctttcaagaaaaattaaaacttttcattagaaaatttgtactgaggggaattctattcatctaagtaatatggtgaaaatatttatctggaatttatgttgtttagtgttatattccagacgtgataccaaaattttgttgcaaatataatggacaatatttatttatacccatattcacagtggaatctgaagcttataaaagttgaatgacagcagcattaaacatatatgtgaagagtccccgatgtttgtagaccttatgtgagtatgcaaatatataaatttgagtatgcttgatttgtatattggaactcaacatgatcataaggagaagatacgtacccttaattgagtaactactatggtatttgttaatattttctacactaaataccattggtgtctttataggttgacataattatatatgtgtatgtacatatgtttgtgtgtatatgtaaatatatttctacacacatacttaaatatagtgatgtgctagtataacctcatactgacttaaaagttctgattgttaaattttaaggaattttgtgagccagttattaaaagcagtcattatttaaaatatgtaaacttacagttaaaaacaaaggtaataaatactcagcactcatcacttcctaattattttgctacatttcactattacctttgctgttttacttatttaatctgtatgatgaaaatactgtataatagtgtgcactgcacatctgtctcttcccagctccacattcagtgctgtcttggtagcttggacttagtgggagtgtttacaccatggaaattgacaaactataaatcagggttttaattttctcagagaacctgctgtcaaatatttacagcacatcactgtgtatatatgaaaacgtatttggcaatacaaaccacataccccttctatttcctgacataaataaatggctatggccatttacagctgaaccacgtcttcaagaaagaagccaaaaatatttccgtgaggtttttaactacctctgaatctgtcctactctaaatactaccggagtctctttgtaggttggccagtatatgtttttagtgaaatattatttcacaaagaactatatcacgtacctttcctctgactgtttcctggcatatatgcatgaatatggccattattgaactatcacttcagtaaagaagttaaacagtacttttctgaggtttttcagctacctctgggtcattctgtaatgtaaatgttgttaataagaatggtttttacataaattatgcaaaggttaacaagcagtaacactgcactcctcaaaaagtggcggtatgtaatgaaaggcccttttgatatccttgatttttcattgtgtatctgtttgggcacggtctatgtaacactagttctgcgtattagtattttagagtatctctgcctcccttgtcctgttgtttcttttgcccccttggaacacattggtcagcagttctaagagacactgcccacatgatggccattccctacttcatccttgctgagctaaattttatatttttgtgcatccttctcccagatgacttaggtggtaagtccagattagtcaaagctaatcatggaagttccattttaatgattctgttggggtgaacttgggagcaatgagatgtttgggaagtattgtgtagtacttctgggaaagatctccttgatacaacattgtcatgacatgagaagagactctgctgggctttttcatgtctgtaacatggtattggcttatcgtttttatctctgaagggcagtagcctgaagataacagtgcacaaggtgggaaaagccagctcagaggtgacgttgccgagctactctgctctctatacctgttctctactgggactttttataaccctcaataactgttttttatttggtcttagggctgtctgatacttagagctgaaggcattccagctgacacagaggaatatttttctaagtgttaatgttctatatggtaattagggggaagaattatttcttttcacaagttaatatagggatggctgtttgtatcagccatggttctttctggtggaaaacagaattctccaactaaaaatattttaatggcagactgattacagtggtgtgggccagaaacaagggacagtgaaacacccagagacttgtatcagcaggaagccattgccattctgagccttgaagggcaaggagggaaacagtgttaccagagcccagtaagaactgctgtcatgaaggaggggccaccttgtaagagacatcattactaccagaactgtggtgccaaattgctggtgtctctctttggagaaaccaaccagatacatctgctggagagcccaggtgggcacagagaagggtggagagagaatctgggaagagaaatggagaataagcagcacagtgttattcatttctgtaaattcctatgtagaaggctcagtgttagaaataaagttattctactagttgc

SEQ ID NO: 4968 - DNA, 564 bp, Homo Sapiens
  NM_021052
cattctttttctttattcagtggattgttagttcttctgctgttaggaagccactatgtctggacgtggaaagcaaggcggcaaagctcgggcaaaagctaaaacgcgttcttccagggccggtcttcagtttccagttggccgtgtgcaccgcctcctccgcaaaggcaactactccgaacgagtcggggccggcgctccagtgtacctggcagcggtgctggaatatctgacggccgagatcttagagctagctggcaacgcggctcgcgacaataagaagacccgcatcatcccgcgccacctgcagctagccatccgcaacgacgaggagctaaataagcttctaggtcgcgtgaccatcgcgcagggcggtgtcctgcccaacatccaggccgtattgctgcctaagaagacggagagccaccataaggccaagggcaagtgaaatgattactagtcaaatccgtcagtgatcccgagtcccagaaaccaaaggctcttttcagagccacccaccttttctgtaaagtgctggaatacacatacgatgcctgaaatctc

SEQ ID NO: 4969 - DNA, 507 bp, Homo Sapiens
  NM_021059
cgccgctgcgctggtaagcctgtgttttggttcgctatggcccgtactaagcagactgctcgcaagtcgaccggcggcaaggccccgaggaagcagctggccaccaaggcggcccgcaagagcgcgccggccacgggcggggtgaagaagccgcaccgctaccggcccggcaccgtagccctgcgggagatccggcgctaccagaagtccacggagctgctgatccgcaagctgcccttccagcggctggtacgcgagatcgcgcaggactttaagacggacctgcgcttccagagctcggccgtgatggcgctgcaggaggccagcgaggcctacctggtggggctgttcgaagacacgaacctgtgcgccatccacgccaagcgcgtgaccattatgcccaaggacatccagctggcccgccgcatccgtggagagcgggcttaagaagtggcggttcggccggaggttccatcgtatccaaaaggctcttttcagagccaccca

SEQ ID NO: 4970 - DNA, 6382 bp, Homo Sapiens
  NM_021061
agccctttgtctgaaggtgctgcgggatgccgttccttcgcgcgtgaggctgcggctctgacgccccataggctccttcaatttccgtgatcctcggagtccccaggagaccaggtgatggcagcagccagactcctgccagtgccggcaggaccccagcccctgtcgttccaggccaagctgaccttcgaggatgtggctgtgctcctctcccaggatgaatgggaccgcctgtgccctgctcagaggggtctctacagaaatgtgatgatggaaacctatgggaatgtagtctcattgggacttccaggatccaagcctgacataatctcccagctggagcgaggggaagatccctgggtcctggacaggaagggggctaagaagagccagggcctgtggagtgactactcagacaacctcaaatatgaccacactacagcctgtacacaacaagacagtttatcttgtccatgggaatgtgaaaccaagggagagagtcaaaatacagacttgagtccgaagccattaatttcagagcaaacagtgattctggggaaaacacccttggggaggattgatcaagaaaataatgaaacaaagcaaagcttctgtctgagtccaaactctgttgaccaccgtgaagttcaggtcttaagccaaagcatgccactcactccgcaccaggcagtgcctagtggagagaggccctacatgtgtgttgagtgtgggaagtgctttggccggagttcccacctccttcagcatcagcgtatccacactggagagaagccctatgtgtgcagtgtatgtgggaaggccttcagccagagctcagtccttagtaaacacaggagaattcacacaggtgagaagccctatgagtgtaatgagtgtggaaaagcctttagagtgagctcagatcttgctcagcatcacaagatacatacaggagagaagcctcacgaatgtcttgagtgtcggaaagccttcactcaactctcacatctcattcagcaccagcggatccacacgggagaaaggccatatgtgtgtccgttgtgtgggaaagccttcaaccatagcactgttctgcggagccaccagagggtacacactggggagaagcctcacaggtgcaatgagtgtgggaaaaccttcagtgtgaagaggacactgctgcagcaccagaggatccacaccggggagaagccctacacgtgcagcgagtgtgggaaggccttcagcgaccgctcagtcctcattcagcaccacaacgtgcacaccggggagaagccctatgagtgcagtgagtgtgggaagaccttcagccaccgctccacactgatgaatcacgagcggatccacaccgaggaaaagccctatgcatgctacgaatgtgggaaggccttcgttcagcactcacacctgatccagcaccagagagtccacactggggagaagccctatgtgtgtggtgaatgtgggcacgccttcagtgcacgccggtctctgatccagcatgagagaatccacacaggtgaaaagcccttccagtgcacagaatgtggcaaagccttcagcctgaaagcaactctgattgtgcacctgaggacccacacgggcgagaagccatatgagtgcaatagctgcgggaaggccttcagccagtactcagtgctcatccagcaccagcggatccacacaggcgagaagccctatgagtgcggggagtgtgggcgtgccttcaaccagcatggccacctaatccagcaccagaaagtgcacagaaagttgtgacccatggctgacacaagaatccattctcacagaaactgcatgtggaaccacaagcagccttcagcccaagagaagtctctgttaactctataggaagcttttctttggcgattcagtgtcacaaaataactccagaaagaagcacttagcgtgctgttcctgtggaaaaacttcagagactacctgttttattttcctcaacatcttgaagttatgttggagagtaatcatacaattgtagagaattttggtaaaaaacagccataattctttaacattagtttatttgaactaagggaatttaaggcataagaaccattatcccaataaaatcttacattccaaataaagttctttttctaagaacattacatgcccttcctaaatatcaattaaccatactaattattgcacttaaaatttgaaagtcggactattttcagtattctcttaaaagactaaagtattgtatggataaagtgatataaaaagatattttcatcaagcatcatgtaaaatggttggaaatcctaagtgtgtggatttccatcctaagtgtgtggagtcctgttttgtatgaaacaaggaaaaagcttatatattagtgagaaattacataaatttaaaaaactttttgtatgtgtgtgtggagatagtcttgctctgttgcccaagctgcagtgcagtggcatgatcttggctcactgcagtctccgcccccaccccaggttcaagcttttcttgtgcctcagtctcccaagtaactaggattatagatatgcgccaccacacctggctaatttttgtatttttagtagagacggagtttcaccgtgttggccaggctggtctcgaactcctggcctcaagtgatcctcccacctttgcttccgaaagtgttgggattacaggcgtgaggcaccatgcctggcctagaaaaccctttatctggagcttttaactttattcaagatcagaaaggttatgctaactttttagtaaaaattcaactcaaaaatgggtattttcctcaaaacttgcccttatgacctgcagatcctgtgccccagaaaccgtgagatgtctcaattcccatgcaggcaaaggaggggagcttcacactcagcagacctcatagctgttacaccaagtgggtacctctttacatcttatggtatttcccccaaaacaatgctgaaaatactgttctttggtagatatatttaaaacatacatttctcaaattcagatagctcttttttactatctctagtatttctattcctatatttgaaggggttttttttttcatttttttactcctggttcaagagtccagtatccattgccatattactatgatgaagatgaatctagtttattcataattaaaaatttgtattcagaattatttgttctgttttaagcatacttttttttttttttttgagacaaagtcttgctcttgttccccaggctgaagtgcaatggcacaatctcagctcactgcaatctccacctcccaggttcaagcaattctcctgcctctgcctcccaagtagctggaattacaggcacctgctaccacgcccgactaattttcgtatttttagtagagatgaggtttcaccatgttggccaggctggtctcaaactcctgacctcaggtgatccgcccgcctcggcctcccaaagtgctgggattacaggcgtgtgccaccgcacccggccaaggatacagttcttgaaaccgaatcagaaccatttctagtagcagccagctgcaaacgaaacaaatgtatgaggttcaagccacttgaaattctcaacatgttaagtgcctgagatagagaagggctgtcttcaccccaggcccccgcccccaacatctgtcagtttggtggggaggaaatagtcaccaggatattgatcctttttgtttgttttaaagacggtcttgctctgtcaccaggttggagtgcagtggtgccatcatggctcaccgctgcctcaaactcctgggctgaagcagtcctcccacctcaccttcccaaaaggttaggattacaggcatgagctgctgtgcccatccaggcattgatccttaagtccacagcaaaacaccacgatgtagacaaaagcttgttcccccttctatgtacagacactgacaacagtgaattattaactccagagaggaactggtaactgattggttaacttgagaaaggagctgacatcactggtgttttacttcagagcaactgaaaccactgaagtgaaattccagaggaactaatattactgaggtgttacttcagagggactgagatcactgaagtgaaacctcagatagctcagataaccaaggtgttaaccttagaggtgttgccattctgtgaggtgttgtttcagatagataaaataactaaggtgttagttcagagaagacaagagcttaactgtttctttggagaagagctgagatcactgaggcgtcacttcagaaagaaagtgagacaatttttgttacttcagaggatctgagtacactgaggtgtttcatcagagaggaggtgagatcactgggtgttacttctgaaaggaattgacatcactagtgggtactgcagagtagctctgaccactgaggtttacttcagaggagctgaaataacggaaatgggatcactaaggtattactttagagattagatcattgaggtaattcttcagagaagctgagatcacagaggtgtttcttcagagaagttgaaatcactaatgtgaaactctagaagaatggaggtcactgagtgctatttcataaaggaagtgaaatcactatattgtaccatcggaaagatgagaatgctgagatgttacttaggagctgagatcactgaggttctgcttcagagaaaagctgataccaatgagatgttacttaagggaggagctgaggttactgaggtattattcaggaccaagatggtgtccctcaggtgttagaagctgagatcacagagatgttacttaagagaggctgagactgctgatgtgattcttcagaaaggaaatgagatcactaagctgttaactttagaaaggagatgaaataactgagttgttcactggagttgagatcacacaggtgttaacttcagaggtggctgaaatcactaaggtgattcttcagagaaaggttgagatcactaggggtgatgctttagaaagaggttactttagggaaaagctatgatcactgagaagttacttcagaatggagctgagatcactgaggtaacagtccaaagaggaactgagattactgaggtgttacttcagagccaagagatcacccaggtacctagatgagatcactgagatgaaagtccagaaacctgaggtcacctcaatattaattgagagaaaatgagaacactgtggtgctatcttaaatcttctatgaaaggaagctgccaacctgtgttagctgagtccacagctggcatgtgactcagtggcagctgctcagtgcccactactattcaggccccaatttctaatcattaaagacaaagtcatattccaattaagatgagaataattaaattcaatatacaggaacatttgtttagaaagactgtgtatcacaggacaacgtaagttacacagtacaagttattctggattccaataacctagggttttcagggaaatccttccaaaaagtatagtttttttcctgcattcttaaaatgagcttaatatcattctgcctgttcttgctatgtcaggctgccattgatccactggtgagaatgcaggctcaggtgtccacggagccaggaagtgggcttcaatgcccttctttctgaggaggattcccaggctacattttcttgccactcacctcctcctctccaaggagaaagaggtggcacatgacctactggaacatgtgggctatctacctttttgggatataacatcaaaggccagggccctgaattttcatgctgataacagtcttctcaaccattatcttctgcctgatttgtcagcagcattccacctttattttggatttgttttattcagaagtctgtatattttaggtatttaaatacttctctttggctgggtgcaatggctcacacctgtaatcccagcactttgggaggctgaagtgggtggatcgcttgagcccaggactttgagaccagcatggcgaaaacccgtctctacaaaaaaaaaattagctgggtgttgtggcttgcgcctgtagtcccagatacgtgggaggctaaggtgggaggattgattgggagttcaagactagtgtgctgtgatcatactatctagcctggacaacagagagagaccttgtcacaaaaaatacgtatatatttcttttaaaattgtttcttctaacagctattaagaatttgaaacttggttctcttcaaattttctattattttggaaaacattttagtctgcctggaatttctgtgtataatctgacgctttccaataaaaaagtaatgactggaacaagaaaaaaaaaaaaaaaaaa

SEQ ID NO: 4971 - DNA, 4580 bp, Homo Sapiens
  NM_021070
cttgctccggcctcctcgctcctgcctgagttcggggcctggtctgggcttcgtcctggggctgggaagtttctgcgctccccgctgtccagtctgcatctccgcgcctcccgccgggcccccgcggtcccctcccgcccgcttcccccgctgccctccctcgctgccccctaccctctcccggggctcccggccctctactcccttcgggcgcgggcccctcgccccgcccgggcgcgccccccctcccccgggtcctgcggccccggatgcccgggccccgaggggctgctggcggcctggcccctgagatgcgcggggcgggggcggcggggctgctggcgctgctgctgctgctgctgctgctgctgctgggcctgggcggcagggtcgagggggggccggccggcgagcggggcgcaggcgggggcggggcgctggcccgcgagcgcttcaaggtggtctttgcgccggtgatctgcaagcggacctgtctcaagggccagtgtcgggacagttgtcagcagggctccaacatgacgctcatcggagagaacggccacagcacagacacgctcacgggctccggcttccgcgtggtggtgtgccctctcccctgcatgaatggcggccagtgctcctcgcgaaaccagtgcctgtgtcccccggacttcactgggcgcttctgccaggtgcccgcaggaggagccggtgggggtaccggcggctcaggccccggcctgagcaggacaggggccctgtccacaggggcgctgccgcccctggctccggagggcgactctgtggccagcaagcacgccatctacgccgtccaggtgatcgctgaccctcctgggcccggggaggggcctcctgcccagcacgcagccttcctggtgcccctaggcccgggacagatctcagcagaagtgcaggccccgccccccgtggtgaatgtgcgcgtccatcacccgcccgaggcctcagtccaggtgcaccgcattgagagctcgaacgccgagagcgcagccccctcccagcacctgctgccgcaccccaagccctcgcacccccggccgcccacccagaagcccctgggccgctgctttcaggacactctgcccaagcagccgtgtggcagcaaccccctccccggcctcaccaagcaggaagactgctgcggtagcatcggcactgcctggggccagagcaagtgccacaagtgtccccagctgcagtacacaggagtgcagaagccagggcctgtacgtggggaagtgggcgctgactgtccccagggctacaagaggcttaacagcacccactgccaggacatcaacgagtgcgcaatgccgggcgtgtgtcgccatggtgactgcctcaacaaccctggctcctatcgctgtgtctgcccacctggccatagtttaggcccctcccgtacacagtgcattgcagacaaaccggaggagaagagcctgtgtttccgcctggtgagccctgagcaccagtgccagcacccactgaccacccgcctgacccgccagctctgctgctgcagtgtcggcaaggcctggggcgcgcggtgtcagcgctgcccaacagatggcaccgctgcgttcaaggagatctgcccagctgggaagggataccacattctcacctcccaccagacgctcaccattcagggcgagagtgacttttcccttttcctgcaccctgacgggccacccaagccccagcagcttccggagagccctagccaggctccaccacctgaggacacagaggaagagagaggggtgaccacggactcaccggtgagtgaggagaggtcagtgcagcagagccacccaactgccaccacgactcctgcccggccctaccccgagctgatctcccgtccctcgcccccgaccatgcgctggttcctgccggacttgcctccttcccgcagcgccgtagagatcgctcccactcaggtcacagagactgatgagtgccgactgaaccagaacatctgtggccacggagagtgcgtgccgggcccccctgactactcctgccactgcaaccccggctaccggtcacatccccagcaccgctactgcgtggatgtgaacgagtgcgaggcagagccctgtggcccggggaggggcatctgcatgaacaccggcggctcctacaattgccactgcaaccgcggctaccgcctgcacgtgggcgccggggggcgctcgtgcgtggacctgaacgaatgcgccaagccccacctgtgcggcgacggcggcttctgcatcaactttcccggtcactacaagtgcaactgctaccccggctaccggctcaaagcctcccggcctcctgtgtgcgaagacatcgacgagtgccgggacccaagctcttgcccggatggcaaatgcgagaacaagcccgggagcttcaagtgcatcgcctgtcagcctggctaccgcagccaggggggcggggcctgtcgcgacgtgaacgagtgcgccgagggcagcccctgctcgcctggctggtgcgagaacctcccgggctccttccgctgcacctgtgcccagggctacgcgcccgcgcccgacggccgcagttgcttggatgtggacgagtgtgaggctggggacgtgtgtgacaatggcatctgcagcaacacgccaggatctttccagtgtcagtgcctctctggctaccatctgtccagggaccggagccactgcgaggacattgatgagtgtgacttccctgcagcctgcattgggggtgactgcatcaataccaatggctcctacagatgtctttgcccccaggggcatcggctggtgggtggcaggaaatgccaagacatagatgagtgcagccaggacccgagcctgtgccttccccatggggcctgcaagaaccttcagggctcctatgtgtgtgtctgcgatgagggcttcactcccacccaggaccagcacggttgtgaggaggtggagcagccccaccacaagaaggagtgctacctgaacttcgatgacacagtgttctgcgacagcgtattggccaccaacgtgacccagcaggagtgctgctgctctctgggggccggctggggcgaccactgcgaaatctacccctgcccagtctacagctcagccgagttccacagcctctgcccagacggaaagggctacacccaggacaacaacatcgtcaactacggcatcccagcccaccgtgacatcgacgagtgcatgttgttcgggtcggagatttgcaaggagggcaagtgcgtgaacacgcagcctggctacgagtgctactgcaagcagggcttctactacgacgggaacctgctggaatgcgtggacgtggacgagtgcctggacgagtccaactgccggaacggagtgtgtgagaacacgcgcggcggctaccgctgtgcctgcacgccccctgccgagtacagtcccgcgcagcgccagtgcctgagcccggaagagatggagcgtgccccggagcggcgcgacgtgtgctggagccagcgcggagaggacggcatgtgcgctggccccctggccgggcctgccctcaccttcgacgactgctgctgccgccagggccgcggctggggcgcccaatgccgaccgtgcccgccgcgcggcgcggggtcccattgcccgacatcgcagagcgagagcaattccttctgggacacaagccccctgctgttggggaagcccccaagagatgaggacagttcagaggaggattcagacgagtgtcgctgcgtgagtggccgctgcgtgccgcggccgggcggcgccgtgtgcgagtgtcccggcggcttccagctcgacgcctcccgcgcccgctgcgtggatatcgacgagtgccgagagctgaaccagcgcgggctgctgtgcaagagcgagcgctgcgtgaacaccagcggctccttccgctgcgtctgcaaagccggcttcgcgcgcagccgcccgcacggggcctgcgttccccagcgccgccgctgacgccgccgacgccgccctcggcccagacctcggtgatcactgagggatttccgcgagctcggcctcacttctgccccgacttgtggctcggacccagggaccttcagggcccgcagaccctcccggcgccttgagacccgaggcgcccctaccggcccccctccccggttagcgggcggttgtaaggtctccggcgggcgctgcctgccttcctcccagagggtgtttcctagaaactgataaatcagatcgtgcctctttacccttggctttcgaagcaaattgatgttcacgtctgacgtgggcgcgggctgcgcagggcggcgccagaccccagccgcctcccaggggctagactgagcccggcacaaggggtgtgaaatagaatttattgtggctctgattatgtacacgtgagatggcctggctgggccggccgggctcacatggtttgtacaataaatacatctgtggggcgggctctccgcagccgggaagggccaccgccacggttcagtccaaaaaaaaaaaaaaaaaaaa

SEQ ID NO: 4972 - DNA, 937 bp, Homo Sapiens
  NM_021074
gcgtgccgtccgggtcgcctaggcctggggtcgggagcgcgcacgctgtgcgccctgggcgcgctcgggattctcgcctggcgcggctggggaaggtgaacagtgtggcccgccatgttcttctccgcggcgctccgggcccgggcggctggcctcaccgcccactggggaagacatgtaaggaatttgcataagacagttatgcaaaatggagctggaggagctttatttgtgcacagagatactcctgagaataaccctgatactccatttgatttcacaccagaaaactataagaggatagaggcaattgtaaaaaactatccagaaggccataaagcagcagctgttcttccagtcctggatttagcccaaaggcagaatgggtggttgcccatctctgctatgaacaaggttgcagaagttttacaagtacctccaatgagagtatatgaagtagcaactttttatacaatgtataatcgaaagccagttggaaagtatcacattcaggtctgcactactacaccctgcatgcttcgaaactctgacagcatactggaggccattcagaaaaagcttggaataaaggttggggagactacacctgacaaacttttcactcttatagaagtggaatgtttaggggcctgtgtgaacgcaccaatggttcaaataaatgacaattactatgaggatttgacagctaaggatattgaagaaattattgatgagctcaaggctggcaaaatcccaaaaccagggccaaggagtggacgcttctcttgtgagccagctggaggtcttacctctttgactgaaccacccaagggacctggatttggtgtacaagcaggcctttaatttatattgaactgtaaatatgtcactagagaaataaaatatggacttccaatctacgtaaacttaaaaaaaa

SEQ ID NO: 4973 - DNA, 2151 bp, Homo Sapiens
  NM_021075
ggctgttcaggcgcgggtgcgcgcgcagctgctgtggccctgcttggtgcgcccgctgtcaccgccatggctgccccgtgtttgctgcggcaaggacgagccggggcgctgaagactatgctccaggaagcccaggtgtttcgaggacttgcttctacggtttctttgtctgcggaatcagggaagagtgaaaagggtcagccacagaattccaagaagcaaagtccaccaaaaaatgtagtggaaccaaaggagaggggcaagctcctagccacccagacagcagctgaattgtctaaaaacttatcttcacccagttcttacccgccagctgtgaataagggcaggaaggtagctagtcccagtcccagtggcagcgtgctattcacagatgaaggggttccgaaatttttgtcaagaaagactttggtagagtttccacagaaagttctgtctccattcagaaaacagggctctgattcagaagctcgtcaggtgggtcggaaagtgacgtcgccttcgtcttcatcctcttccagctcctctgattctgaatctgatgatgaggctgacgtttcagaggtcactcctcgagtggtgagcaaaggcagaggggggcttcgaaaaccagaggcctctcattcctttgaaaacagagccccccgagttacagtatcagcaaaagagaaaaccttgctgcagaagccgcatgtggacattactgatccagagaagccccaccagccaaagaagaaagggtcccctgctaagccatcagaaggcagggaaaatgcgagaccaaaaaccacaatgcccagatctcaagtagatgaagagtttttgaagcaaagtttaaaggaaaaacaattgcagaaaacatttagattaaatgaaatagataaagaaagccaaaagccatttgaagttaaaggacccttacctgtccacacaaaatcagggttgtctgcgccaccgaagggcagcccagcgcctgctgtgttggcagaagaggccagagcagaggggcagctgcaagccagtcctcctggggcggcagaggggcatctggaaaaacccgtgccagagccccagcgcaaggcggcccctcccctgcccagaaaggaaacctcagggacgcagggaatagaaggccacctgaagggtggacaggcaatcgtggaagatcagataccaccaagcaatttggagacagttcctgttgagaataaccacggtttccatgaaaagacagcagcgctgaagcttgaggccgagggcgaggccatggaagatgcagccgcgccaggggacgaccgaggcggcacacaggagccagccccagtgcctgctgagccgtttgacaacactacctacaagaacctgcagcatcatgactacagcacgtacaccttcttagacctcaacctcgaactctcaaaattcaggatgcctcagccctcctcaggccgggagtcacctcgacactgagggccctcggtgtgaagatgaaccttccaccgtcttcactgcatcctggagtgcaaaaataaaatccactcaagagtcacaaggcccgctgtgcataatcggtttcacttttacctttttttttttttttttttttttgagacagggtctcactctgtcacccaggctggagtgcagtggcacattctcggctcactgcaacttccgcctcctgggttcaagtgattctcccacctcagcctcccaagtaggtgggattacaggtactcaccaccaggtccagctaacttttgtatttttagtagagacagggtttcaccatgttggccaggctggtctcgaactcctgacctcagatggtctgcccacctccgcctcccaaagtgctgggattacaggcgtgagccactgcgcccggccactttcacactttttacagtgagtggtgaattagcaacagtaacactgattatccaacatatattttggaatatctactatgtgcaaggaatttttcttaaactctaaggttatgaatcactgggcaaatccatataattagagaattttaagtgctttagagcggtgtgattctactgtgctcagcctagtcaatttcgcattaaactgattatcagctgaaaaaaaaaaaaaaaaaaaaaa

SEQ ID NO: 4974 - DNA, 1046 bp, Homo Sapiens
  NM_021077
accctcatgaagagaggctcagagggctgaagtgcctatttggccgaaagccgtggcagagtggcaaggcagggccaggggaagcggctccgccgccggggccgggcccctgtttggccggtgcccggtccttagcctgaaggtggcgggcttccgccagaagcccctggcggaagcggtgcccgcgtgcgggccagagtgtgggtgtgcaggtctctgggcggcccaaagggggtgcccctgcctggtaacctagcgggagggtggggacggcggggagggcggcgggcgcggggcacggctccgctgctcagggcaggctccgcccccaggggcgcggatttaaaaggatcgaaggcagccccggagcccagcggccgggaagcgcgcccgaacgaagccgcggcccgggcacagccatggcccggcgggcggggggcgctcggatgttcggcagcctcctgctcttcgccctgctcgctgccggcgtcgccccgctcagctgggatctcccggagccccgcagccgagccagcaagatccgagtgcactcgcgaggcaacctctgggccaccggtcacttcatgggcaagaagagtctggagccttccagcccatccccattggggacagctccccacacctccctgagggaccagcgactgcagctgagtcatgatctgctcggaatcctcctgctaaagaaggctctgggcgtgagcctcagccgccccgcaccccaaatccagtacaggaggctgctggtacaaatactgcagaaatgacaccaataatggggcagacacaacagcgtggcttagattgtgcccacccagggaaggtgctgaatgggaccctgttgatggccccatctggatgtaaatcctgagctcaaatctctgttactccattactgtgatttctggctgggtcaccagaaatatcgctgatgcagacacagattatgttcctgctgtatttcctgcttccctgttgaattggtgaataaaaccttgctctttacatacaaaaaaaaaaaaaaaaaa

SEQ ID NO: 4975 - DNA, 3127 bp, Homo Sapiens
  NM_021078
ggttgcccatgcggccctagggctgggagcgcggcgccgctctccgctgcgggggaggccatggcggaaccttcccaggccccgaccccggccccggctgcgcagccccggccccttcagtccccagcccctgccccaactccgactcctgcacccagcccggcttcagccccgattccgactcccaccccggcaccagcccctgccccagctgcagccccagccggcagcacagggactggggggcccggggtaggaagtgggggggccgggagcgggggggatccggctcgacctggcctgagccagcagcagcgcgccagtcagaggaaggcgcaagtccgggggctgccgcgcgccaagaagcttgagaagctaggggtcttctcggcttgcaaggccaatgaaacctgtaagtgtaatggctggaaaaaccccaagccccccactgcaccccgcatggatctgcagcagccagctgccaacctgagtgagctgtgccgcagttgtgagcaccccttggctgaccacgtatcccacttggagaatgtgtcagaggatgagataaaccgactgctggggatggtggtggatgtggagaatctcttcatgtctgttcacaaggaagaggacacagacaccaagcaggtctatttctacctcttcaagctactgcggaaatgcatcctgcagatgacccggcctgtggtggaggggtccctgggcagccctccatttgagaaacctaatattgagcagggtgtgctgaactttgtgcagtacaagtttagtcacctggctccccgggagcggcagacgatgttcgagctctcaaagatgttcttgctctgccttaactactggaagcttgagacacctgcccagtttcggcagaggtctcaggctgaggacgtggctacctacaaggtcaattacaccagatggctctgttactgccacgtgccccagagctgtgatagcctcccccgctacgaaaccactcatgtctttgggcgaagccttctccggtccattttcaccgttacccgccggcagctgctggaaaagttccgagtggagaaggacaaattggtgcccgagaagaggaccctcatcctcactcacttccccaaattcctgtccatgctggaggaggagatctatggggcaaactctccaatctgggagtcaggcttcaccatgccaccctcagaggggacacagctggttccccggccagcttcagtcagtgcagcggttgttcccagcacccccatcttcagccccagcatgggtgggggcagcaacagctccctgagtctggattctgcaggggccgagcctatgccaggcgagaagaggacgctcccagagaacctgaccctggaggatgccaagcggctccgtgtgatgggtgacatccccatggagctggtcaatgaggtcatgctgaccatcactgaccctgctgccatgctggggcctgagacgagcctgctttcggccaatgcggcccgggatgagacagcccgcctggaggagcgccgcggcatcatcgagttccatgtcatcggcaactcactgacgcccaaggccaaccggcgggtgttgctgtggctcgtggggctgcagaatgtcttttcccaccagctgccgcgcatgcctaaggagtatatcgcccgcctcgtctttgacccgaagcacaagactctggccttgatcaaggatgggcgggtcatcggtggcatctgcttccgcatgtttcccacccagggcttcacggagattgtcttctgtgctgtcacctcgaatgagcaggtcaagggttatgggacccacctgatgaaccacctgaaggagtatcacatcaagcacaacattctctacttcctcacctacgccgacgagtacgccatcggctacttcaaaaagcagggtttctccaaggacatcaaggtgcccaagagccgctacctgggctacatcaaggactacgagggagcgacgctgatggagtgtgagctgaatccccgcatcccctacacggagctgtcccacatcatcaagaagcagaaagagatcatcaagaagctgattgagcgcaaacaggcccagatccgcaaggtctacccggggctcagctgcttcaaggagggcgtgaggcagatccctgtggagagcgttcctggcattcgagagacaggctggaagccattggggaaggagaaggggaaggagctgaaggaccccgaccagctctacacaaccctcaaaaacctgctggcccaaatcaagtctcaccccagtgcctggcccttcatggagcctgtgaagaagtcggaggcccctgactactacgaggtcatccgcttccccattgacctgaagaccatgactgagcggctgcgaagccgctactacgtgacccggaagctctttgtggccgacctgcagcgggtcatcgccaactgtcgcgagtacaaccccccggacagcgagtactgccgctgtgccagcgccctggagaagttcttctacttcaagctcaaggagggaggcctcattgacaagtaggcccatctttgggccgcagccctgacctggaatgtctccacctcggattctgatctgatccttagggggtgccctggccccacggacccgactcagcttgagacactccagccaagggtcctccggacccgatcctgcagctctttctggaccttcaggcacccccaagcgtgcagctctgtcccagccttcactgtgtgtgagaggtctcctgggttggggcccagcccctctagagtagctggtggccagggatgaaccttgcccagccgtggtggcccccaggcctggtccccaagagctttggaggcttggattcctgggcctggcccaggtggctgtttccctgaggaccagaactgctcattttagcttgagtgatggcttcaggggttggaagttcagcccaaactgaagggggccatgccttgtccagcactgttctgtcagtctcccccaggggtggggggtatggggaccattcattccctggcattaatcccttagagggaataataaagctttttatttctctgtgaaaaaaaaaaaaaaa

SEQ ID NO: 4976 - DNA, 5089 bp, Homo Sapiens
  NM_021083
ctcgggcaacggccgccgccgccacagccacacagccgccgccactgcgtccgtccccggtgagcgccgctgacgcgcggagatgaaattcccggcctcggtgctggcgtccgtgttcctgttcgtggccgagacaacggcggcgctcagcctgagcagcacctaccgctcgggcggggaccgcatgtggcaggcgctgacgttgcttttctcgctactgccttgcgcgctcgtgcagctcacgcttctcttcgtacaccgcgacctcagccgcgaccgcccgctcgtactgctgctgcacctgctgcaacttgggccccttttcaggtgttttgaagtcttctgcatctactttcagtcaggcaacaatgaagagccttatgtcagtatcaccaagaagaggcaaatgccaaaaaatggcctctcagaggagattgagaaggaggtgggccaggcagaaggcaaactaatcacccaccgatcagcgttcagccgggcgtcggtgatccaggctttcttgggctcagccccccagctgaccctacagctgtacataagtgtcatgcagcaggacgtcactgttggaagaagtctcctcatgaccatatccctgttgtccattgtgtatggagccttgcgctgcaacatcctagccatcaaaatcaagtacgatgagtatgaagtcaaagtgaagcctctggcctatgtctgtatcttcctgtggaggagctttgagattgccactcgagttgtagtcctggtcctctttacctccgtcctgaagacctgggtggtggttataatactcatcaacttcttcagtttcttcttgtacccctggatcctcttctggtgcagtggttccccattccctgagaacatagagaaggccctcagtagagtgggcaccaccattgtactatgctttctaactttactctatactggtatcaacatgttctgctggtctgctgtacagctgaaaattgacagccctgacctcatcagcaagtcccataattggtaccagctactggtgtattacatgataagattcatcgagaatgccatcctcctcctcctgtggtatcttttcaagactgacatctatatgtatgtgtgcgcacctctgttggtcctgcagctgctcattgggtactgcacagccattctcttcatgcttgtattctatcagttcttccacccttgcaaaaagctcttttcttccagtgtttctgaaggctttcagaggtggctcaggtgtttttgctgggcctgcaggcagcaaaaaccctgtgagccgataggaaaggaagatctacagtcatccagagatagagatgagacaccttctagcagtaaaacaagtcctgagcctggtcagttcttgaatgctgaagatctctgctctgcttaatgggacccaaggtctcagagcacaggcatattattttctgggtttgatactcgttattcatacaaataatgagccctacacagggaacaaggcaggaagttagctgttaactccttgtgagctgcttctctttatagagctcttgggtatgtagaactgtatgggaagaagccaggaaaacctctgagtgttgaaggggcaacccaaggcatcacagttcacaggtaaccatgttgtgttcttctaggcattactggccttttcactgacaagttacccctgaaatctgagttgtactggttagattcattaggttgaatgaggagaggggcttacctgttctctagttttccagactgctggtttgggtaacctgaagttttatgatccctgaacatagttttcacccaagagctgtcctggtgaccaaaaaagattactagggttttgccatcagcaacatcattcctgtcagagctttcagggagggctgttcaagtttggtttttgaatagacagaggtttcattttcatctcattagggcttttttgtacatagccaactgtagccaccctggcatgctgtctctaattgattcaagggcctagatttggagactttgttccttagcatccatggatgcagaaatgagtgataaatttggccatgaaagccctggaattttaggaaagttgtgattctttgatatgttgatgaaattctggatcaggaggggtgttaaaacatcaaaatgatggcgacttgtataagtagaattcttaccatcttactcctgcctccccattccttgcctgtcaggaccattttagaagagttaccttggttaacttaagggttttttagaaaaccccacagaaatctctcacccagttcaggtgtatagggaattttcattttcattatttcaaggaatagagttttcctcactaccacttgtaattagagattgacttcagaaactttttctaaattataaagacggaatgaccagaaaatttttgtctttcatggaatgcaatttgacttggcataattgtgagttaatttgataaagatctccagttgtatcctctgacaccctttaatgttctatataatttttcctttaatcggagaccctatttgtttcattaaagaggattgggtagcatatcctcaattatcttggaaaaatgcgtagatctagtgccattatttctaccattaaaatcttgaaagcgaaatacttgaaaagaggtgaccataaagatcacaccaatttagaatgaatattaaagtctgagaaatttacaaaagggactctatggactcgattttaccatatggaatagggatccacttctctgttaacctacaaaacgtatttatctggccattgcacttcggataattttcatttttaattcctcttggtgtcaaatttttaagtaatttcatgcacacaggagaaaatgcaatttgataatcagtttccactacattcggaggtcaagaaagcagtatatattctttcacaaggcatccatactgtttaatatttatagagttcatagaaatacatcaataagctcctaaattatagagcctcaattttggtttttctcatttgaaatgtttttgatttatcaatatttgtggtttaactttgtgggggtgtccaggcagtagatcattttttgtctatttttaaccaaataagaataacactcaagactatgttctccatcccaacacatcacttaccacttgcactattcttaataggcctaaaatagtgagcatatataatcaaaataatacttcatacaacatatacttccatgcactcttcatgtaatcacatatgtgcatagatacacaatcgtattacataaaacacccttgaaaatatatgactttgaataaaataaagctaccatgttaatacatcattttttgtttcttcctaattaacaaaagggctctataatgattaggagagctgtaaggccattctttagtcattccaagtgtatatttgtatcacaccagttacttgtgttcattgacaccaaatattttcaagctttttgtgagaaagagattcttgccttgaggctctgcagtggcaaatggtaggggcaatagcgctcccttttcacctgaaatgccttcagctcaggccttgggagtgaggtgtgggagtagccaccagcctcccactgactaggcatgttaggaattagacaaggatggagagactggttttttccagccttggtttggaagcttgtctcaaaaaccattacaaaatcttaaccttcaaatacattctaaatcactttaatttagaagataggtgagcaacttgagtgatcccaaaccaaactaacagtgctggtttgtccgacacccaaagcccacttcacacatttataaggacagagatttggtaactcatttgggtattttgtcagttttaacccttaatatacaggtatcccagctttgggcacatgtatgtccattcactttcaggaaggggtgtcagtactttctttctgtgtggtgaaaacataagccatggtgaactgataatttttgtttttaaattatttatattactgaattggcaaaattacagttcacactgcagagctaggttgtcctattggcataaaacaaaccagcaacttttctcatgtgtttggagttaaaatgtgtttttcagttataatttcaatttttaaatttcttggtgctttgtctaattaattacatcccataacttgtcaggatagttgctccaactgaattgctatcatttggctggatgggggtgaagtatgtcttcaaaatatattgaagtaagttcatcaaacatgtttagacttcctctcattgctggagacagcccagtgtagagattggcacttccctgtccagcactacaacttaattgctctatgcctcagtttccccataatacccttttccaacctacctcacaaggttatcagaaagatcaaattaaataatagatgtgaaaatgctttgaaaatgtttttaagtgctatgcatatttatagagttattatagttattcaaatccataagcaggttatttttatttttttactgtttgaaaagaaataagtagtgtcattcatatgagttcctgagtggatatgcgaatctttggtcttctcgacaggtgccctttctcttaccactagttgcttacaaaaatagcacccaaacacatggcacttggaagaaaaagacccactgaatctgagaaagtactttctggtggcaaatgaatttatcattttagtatagttttcgataaaggatatagcaacatcttttgataattgtgctttacaacttgaatgctgattcaaggcattatttggatgtgagtttaatcttttcagccttgtaaatgggaaaatatatattaaaattgattgtcaaatacagcatttctttggaaaccaccttaaaacattagtgctatggttatgagtgtatgtgccagtacttaccagtcaatgcattgtggatatgagctttcgttgactgcttctctgcagtcgttgatgctaataaatattgtcctgtttcttcatataataaattaatttttcaatttctccttgtaaaaa

SEQ ID NO: 4977 - DNA, 3951 bp, Homo Sapiens
  NM_021088
aacgccagctgactcgatttcgtctcggtcttccccagagctggacacgaggcaccatgatcagagagacacattccctgcggacggcgctcccatcggatactggagggacgcgacactagaggcaggcagtacttcagggtgaccataagtctcccaaacagccacaacggctcgctctcccagctaaggcgacagcgctgccattttggatcctgttcagccacgggaagccggcgtttgcacacattttcggacgtcatattaaagcgcaccggacgccgagacttctgggagatgaagtccttgcgaaggccccgcattgattgggagcgcagtcgccaggaccctgtgcgcaggcgcgttggtttcccgacctgaagaggcgccgtcttcccgggtcccgagcactctgtgccggaggactctgcccttgtccacaaggagagcacacaggagagaatggctgctgtgtctccgaccaccagatgccaggaatcagtgacattcgaagacgttgccgtggttttcacagatgaagagtggagtcgtctggtccccatacagagggacctctacaaggaggtgatgctggagaactataacagcattgtgtcattgggccttccagttcctcaacctgatgtgattttccaattgaagagaggggacaagccgtggatggtagatcttcatgggtctgaggagagagaatggccagagagtgtctctctagactgggaaactaagcctgagattcacgatgcttcagacaaaaaatcagaaggatcattgagggaatgccttggaaggcaaagtcctctgtgtcctaaatttgaagttcatacacccaatggcaggatgggaacagaaaagcaaagcccttcaggggagactcgtaagaaatccctctcccgggacaaaggcttgcggcgacggtcagccctgtccagggaaattctcactaaagagagacaccaggaatgcagtgactgtgggaagaccttttttgaccactcatccctcacccgccatcagaggactcacactggggagaagccctacgactgccgcgagtgtgggaaagccttcagccacaggagcagcctcagcagacatctgatgtcacacactggggagagcccctacgagtgcagtgtgtgctcaaaagccttctttgaccgttcgtccctaactgtccatcagcgaattcacactggagagaaaccctttcagtgcaacgagtgtggaaaagccttttttgaccgttcatcccttactcgacaccagagaattcacactggagaaagtccttatgaatgtcatcagtgtgggaaagcctttagccagaaaagtattcttactcgccatcagctaatccacactggcaggaagccttatgagtgtaacgagtgcgggaaagctttctatggtgtctcgtctctgaatagacatcagaaagctcatgctggggaccctcgctatcagtgtaacgagtgtggcaaagctttctttgaccgctcatcccttacacagcatcagaagatccacactggagacaagccatatgaatgcagcgaatgcgggaaagcctttagccagcggtgccggctcacgcggcatcagcgtgtccacacgggagagaagccctttgaatgcactgtgtgtgggaaagttttcagttcaaaatcttctgttattcaacatcaacggcgttacgccaaacagggaatagactgagttgggcaaaagcttgggtaggacaagaacttccatacaaatttgagatagatctcgcctgtcttaaagctgccatttgctcattctacccactctggctgccgttgtcctgtcctgcttctgcgccagagtgtttaataagcactcccttcctgctgtgttatagaactgtaggggaggccatggaaatgactctaaagatacaaaattttgaagaggtttgtcagacaataggatagatgttaggaggagacacacctcttgtctgagaacctaggccccaggtatcactgcactttaagaaactggaggctgcaacaggagggaaaggcagaatgatatcacagcagtactatttttttttttcagaacatttgttttgatggctgttagtccccctctcttggagcattttggggcactaatcttgttctcttgtgtcccagcttttagacctcttacttccactgctagtagctagcacttactgagcacctgcgatgaggtaaagactcagctaagggttttacaggaagtagattaattgatcctgtcaccaaccatatgaagtaggcactgttaccatctgcatctccagatgagcaccctgaggtttagagagattaaatcacttgcccaaggtgaaccagctggtaaaaggtgatgccaggtcttgaagacaggtccaccttcaaaatctattctctttaccattatgctcgatggtttgtttgttttataatttatgtatatgtattatcctctcaactagattgtaagcacttggaggtgtgacttacaggtctttgtatctcacacagtgccttgctaataggtgctcaataaatatttatatgagtgaatgacttttctacttaccaaattctctccattcagaacacctcttggatttgcatactttctctgaattcacagcccagcctatacttttatcatccccagctcccactcctggcagcagtagctttctaattccagttcttcctgctttattgaagagggatgtgctaagctgtggtacagtaacaagcccgcagagagctatgtctcccttaaaacctgacgggaaccattctgtcttattctatcctcattatttggaacatctggcttccaaagtcaccacaagggcggaagagaaagctagaggaatttgtaggatattttcttagacccaggcttacatcacttctgtccacatctaataagccagaacccagcacctagaagctaggaaagtaaacaagcacctcgaaagttggttaataccaagaacctctctcacagttatattttgcatactactgttaagccagtctttgcaaatgaccccttcctgcccatcactgccttcctcaagacctaaaatagctccctatttagtgaaaaattatctgaatatttaaggtctgccttaacgtgatccccattgctgaattttacctcctgactccaaaaactcttctcttccctgggcccagtcctatttttttttttttttttttttttgtgagacagagtctcactctgtcacccaggttggaatgcaatggcacaatctccgctcactgcaagctccgcctcccgggttcacgccattctcctgcctcagcctcccgaatagctgggactacaggtgcccgccaacacgcccggctaattttttgtatttttagtagagacggggtttcaccgtgttagccaggatggtctcaatctcctgacctcgtgatccgcccgcctcggcctcccaaagtgctgggattacagacgtaagtcaccgtgcccggcctatatttttattttattaaaggttaggcactagatgaccttgactctaggcatctgcattctcttgatctttgcttagggtgaagctcagaaaaggacttggttctgaaaggctgtctggaattagattgtcctacgtgattcccagtgaattgagatgaatttcctctggaagttcaagtcggattcgagaagctgaattaccaaacagaccctccccaacctactaacgaccctattactctgttcaccctagagcagacgaacggcagggaagacttgatctgtggacttttgaaagcaacttgaggaaaaacacataacagaatctataggtgtggacaatatgtgatattgctaaataatgtcaagtaggaaataaaagagactattgacaaa

SEQ ID NO: 4978 - DNA, 9008 bp, Homo Sapiens
  NM_021090
agcgcgctctgtgtggccgctgccgccatgttgttgtggttgtgagaaggcggcggcggcggcggagtagcagccggacgagacgtcccagcggctcaggcgctgcccagcgccggccctggcagggagcctggtggggtggcggagggggagactgtgccgtggagggcctcgccatgtcctgctgcccgacttccttgtgaaacctcctagtagaaaaagttcttgggacaaacttcatttgacttcaccataagggaaagaagagagccttgttggacactgaagaagggacggggatttctcctcctaatctgggcctcttgtcatggatgaagagactcggcacagccttgagtgcatccaggccaatcagatctttcccaggaagcagctgatccgggaggatgagaatcttcaggttcctttccttgaacttcatggagagagcacagagtttgtgggccgtgccgaggatgccatcattgccctttccaattacagacttcacatcaagttcaaggagtctcttgttaatgttccattacagcttatagaaagtgttgaatgccgagatatatttcagcttcatttgacttgcaaagactgcaaagttatcaggtgtcagttttcaacctttgagcagtgtcaagagtggctgaagagactgaacaacgcaatccgaccacctgctaaaatagaagatctcttctcatttgcataccatgcttggtgcatggaggtctatgccagtgaaaaagagcaacatggagacctgtgcagaccaggggagcatgtaacttcaaggtttaaaaacgaggtggagaggatgggttttgatatgaacaacgcctggaggatttccaacatcaatgagaagtacaaattatgtggtagctatcctcaagagctcatagtgcctgcctggatcactgacaaagaactggaaagtgtatcaagtttcaggtcctggaagcgcatccctgccgtcatctacaggcaccagagcaatggagctgtcattgcccgctgtggacagccagaggttagctggtggggctggcgaaatgcagatgatgagcatctggtacagtcagtagccaaagcttgtgcctctgactcccgatcgagtggcagcaagctgtcaactaggaacacttctcgagactttcccaatgggggagacctttctgacgtggagttcgattcttctctgtcaaatgcttcaggagcagagagtttagccatccaaccgcagaagcttttgatcttggatgcacgctcctatgcagctgctgtggcaaaccgagccaaaggaggaggctgcgaatgcccagagtattacccaaactgtgaagttgtgtttatggggatggcaaacattcattctattcggaggagttttcagtctctgcggttgctgtgcactcagatgccagatccgggaaattggctatcagctcttgaaagcacaaaatggctccatcacttgtctgtgcttctgaaatcagcgcttctggtagtgcatgctgtggatcaggatcagcggccggtgctagtacactgctcagatggctgggaccgcaccccccagattgtggcattggctaagctcttgctggacccttattaccgaaccatagagggtttccaggtcctcgtggaaatggagtggctggattttggccataaatttgctgaccggtgtggtcatggggagaactcggatgatctgaatgaacgttgcccagtgtttctgcagtggcttgactgtgttcatcagcttcagaggcaatttccttgctcttttgagttcaatgaagcattccttgtgaaactggtgcagcatacctattcctgcctgtttggaacattcctgtgcaacaacgccaaggagagaggggaaaagcatactcaggaacggacatgttccgtgtggtcacttcttcgggcaggcaacaaggctttcaaaaacctactgtattcctctcagtcagaagccgtgctgtaccctgtgtgccatgtgcgtaacctgatgctgtggagtgcagtgtacctgccctgcccatccccaaccacccctgtggacgacagctgtgcaccatacccagccccaggcaccagccctgatgatccccccctgagccggctaccaaagactagatcatacgacaatctgaccacagcctgtgacaacacagtgcctctggccagccggcgctgcagcgaccccagcctgaacgagaagtggcaggagcaccggcgctcactagagctgagcagcctggctggccctggagaggatcccctttctgccgacagcctagggaagcccaccagagtgccggggggtgccgagctttctgttgcagccggagtagctgaggggcagatggagaacatcttgcaggaggccaccaaagaggagagtggagtagaggaacctgcccacagggcaggcattgagatacaggagggtaaagaggaccctctcttagaaaaggagagcaggaggaagacacctgaggcctcagccattggacttcaccaagacccagaactgggtgatgctgctctgaggagccatctggatatgagctggcctctgttctcacagggcatttctgaacagcagagtgggctcagtgttctcctcagttctctccaggtcccccccaggggagaggattccctggaggtccctgtggagcagtttcgaatagaagagattgcagagggtagggaggaagcagttcttccaatcccagtagatgcaaaagttggctatggtacctcacagtcatgttctctgctaccttcccaagtcccttttgagaccagaggaccaaacgtggacagttctacagacatgttagtggaagataaggtgaagtcagtaagtgggccccaaggtcatcatagatcttgccttgtaaatagtggcaaggacaggcttcctcagaccatggaacccagcccttcagagacaagcctggtcgagaggccccaagtggggtctgtggtgcataggacttcccttggcagcactctcagcctgacacgttccccttgtgccttgcctttagccgaatgtaaagaggggcttgtgtgcaatggtgccccagagactgaaaacagggcctcagagcagcccccaggtcttagcaccctccagatgtaccccacacccaatgggcattgcgccaatggggaggctggtaggagcaaggactcactgagccgtcagctgtctgctatgagctgcagctctgcccacttacactcaaggaacttgcaccacaagtggctgcatagccactcaggaaggccatctgcaaccagcagccccgaccagccttcccgcagccacctggacgatgatggcatgtcagtgtacacagacacgatccaacagcgcctgcgtcagattgagtcaggccaccagcaggaagtagaaactttgaagaaacaagtccaggagctgaagagtcgcctggagagccagtacctgaccagctccctacactttaatggagactttggggatgaggtgacttcaatccccgactcggaaagcaatctggatcagaactgtttgtctcgctgcagcacagagattttctctgaagccagctgggagcaggtggataaacaggacacagagatgacccgttggcttcctgaccacctggccgcccactgctatgcgtgcgacagtgccttctggcttgccagcaggaagcaccactgcaggaattgtgggaacgtattctgctccagttgttgtaaccagaaggttccagttcccagccagcagctctttgaacccagtcgagtatgcaagtcttgctatagcagcctacatcccacaagctccagcattgaccttgaactggataagcccattgctgccacttccaactgaagctcagtgacctgggtgggcagtggccaagctgctgttcctatgacaggcccactcaacctgggcagaccgagaggcccgtgcactttggaatgggagcgtggaaccacctgtacagagtgacagatttgggatgcaccactggattgtagattgatttttctttcctgtccccctactccctccctaccttttccatcctcctcctctgccttcaaaaaaggaaactttcccttggttgtcttaattttttttttttttgatggaagaccaagggttgccaggcccactgtaactgccgagctgcctgctgtcacgtgacactgagggatggcttgtttcttccgggtgggaggatggtggtcagagccaggagtatggagatctgagaccgtgagcagggaagaaagccagtgctaacatgcaaccattcctcacgccaccgccacatcagagctggttgggaaccctttgctgctggggaggctggaagcatattccccaagagcactgccctgggcatcatctccctcctgcgaggagctgagccagtcccctcacagatggataaatgaggctgatgtttggagggagaggcacacggtaaatggcatccccttaggcgcctctttgggaaaggaaagtggatgctcctttgaggcaggcgaggggctgggagtgggtagccgtcatgttgtcccccgtgggatcccatttttaacttgacccagattgtcttgggctccttttactttcagggggctgctttcctgggccaggctgtgtagcacttcccaccctcaggcatgagtacagactggtcaaaatgtttatgcagtcaaggccaaagcctgccctgagcccagacacacctgggtccccattctggggcctggtcccctaaacaatctcttcctcagccagcacagggaaatccagactcagggttccagaaatcccccgttcccaaaccaaaccaatcatggatcttccctttaaggggtagaatcagcctttagagttacaagcccctggaaaagggagcaggtcccatacaatcagcctttctcctcttctcttcttgggacaggaataactgctgagcagtccccctttgccactcctggctgtctgagtgggcacttgtctggctgctggccagcagtgaagggccacttggtgacttcgtagggttccttagagaagtgacatggccttgaggagattcagggcacctttcctcagtgagctttgatatggtccaaaaacagccttaaatcaagaatatttgtggaggtaggtgtggggaaggttggagaagagttaggtttgtgctttgtaatcttggcatccatgttttgtgcctgccctccctcttggggaggccatgcttgactctgctgaaagctgctaactggtgacagggtggatcatggtgaggactaggggtaaggtcagggaatgcttaagctctggccctgccctgtattcctcttccccttggtagcagttccctgaccaagggcaaggtgtgtctcaggaaggtggttctgtgcatgcctgggtgtggttaaggcgtggcccagaaggcttccctggtgctctcagtccaggcaaagcccagagcatctgagcacgtctctgacttccagtggcaacacagtttgaacgtggtgaaacagggtgtagttcttttccacattctgtgtcatctagtcgtgcaggtagggaaaaagttggtctaattgaagattgtgcatttcctagtgacaggtgccaagaggttatgatacgggtttcttgggtctgatgtacagtgtgaataaatgcttgcagctcttagctcttttttgatcgatgaagcacttttttattaatattttcctttgttaaaggaggaaccgtaactctccatagctgtacatataacccttttctcctaaagaggagtcagtcagtgctcctatatttttcattttttgtcaaagcaagaagtaaatactttagaattgttaaatatataaataaagcaaataaagttgagtgttccacatggtagcatttgctaacacttcctaattctttgccctgtggtttatcccctcttcgtcccttttccctctcacacagaagtgtttgagggcctgctgggaaactgacctttggcaaaggaaagctacagatagccttccgactctagaccttggcaaggagcctcaccatgatgttcaagcactgaacgcatttcctcagtgattttgctcctaaaatctcccaggctaaaagagggcaaagcagtcagggatctgacctggcagctattcctccttctctgaagagttcccatcagtagtcattacaactacctctcgcctcaaggctccatttttagctgctgctctgatttcagggcagccagtactctggccccttcagtcggggagtggaaggagatgtggggtgggggtgagaaaatgcttctgcctgttgttcttgaaggatagactatgggtgggcagagagaactgggggcagaaatggaattagatgtgattgggttatgcagtcaactagaggtctccttcccgccctctctccacacagagaggaacctctgctccttagctcttacagcaggactgtggcatctagtcacttcaatactagttcttgctcttcacagaggtagatttttctttaccctacagcactgttgggcatccctcccatcacatgggtctgtgggtgagatatgttatgctgttcctccctcgggaaggttggtattgaggggtgccttgctccagaggcgccagcccagcatctgtggtgagttggctaagatccagagtgacctgctcagagctccccagaggccttcactctttggggcagtctctctagggtcactttctgaatgtaccttctacctaaagtatacaaacacaaagagccagctgagctggttctagtgtgaaagccgtaagtgccacccagcaggcgtttgaaaacaagaaatcattcttctgtggaaggagaatgtgccatctcagctaccctcagtccgccaggcagcccagtctgtgtattcatatgaagttgtgaaaaccatgagtgtgtgccatggccatcgtgtctacacacagccactattgttcctgtgggctagtctccagcaaattaaaacactggcatggcctaggaagggcgttgcgagctcctaaatggaaagcttctctgggggtagggagatgaagagccaagatgctggtgaagcaggtgcagtgaggatccaaggcaaggaattgccctgagggaggtggctgcatatggagaaaggcagttctctgtgggcaaggccagcttgcttcaggctgtagagggaatttggtctgaagcaacagggcatgaactgtgactttgagctgccaggttgtcttcatctcagaactttcctatcctggcactctcgttacctttcttctataccttggcctctgtaactgcagtccaaaacaagttacagctgccttaatccactgagattctctatgaggatgtacagaaaagttttcctgtaataattttgcttatatgctaactcttttcatgttagcaaagaatattctatgaattagaatgttactgtggtagatctaaaggagaatgaacagaaggtgctggaggacctgttaaacaatctctggctattaaaaaacatcaagatgagaattaaaggcatatcctgatatacttgcctgcttgcacatgaggctgggagatcccatgcctgttgaagttaactctagccctgacctctattgatcttttgggaatgagggctgatttgaaggtgctgttgcaggatttcatttagctgctgccagttcaagtgacctgtccccagggctgcagctgtatccacctgattgcagtaggtgagggctaacagcagaatttaaagtggaccctgggctgtggagcaaagtgactatccatttggacttttggataatgtggcaggagtcccagctgtttaatttctagtcacattttccagaaagttgttctaagttgagattactgacaagatttctcaagggcaggaccagatatgtgagagacttctagttcagagctgacccctctaagcctctgacacttaaacacgagtcctgctgtccccagcacacaactgcactgaagccttgttcctctcggctggtgtagagctcatctgcatgttgtgtgcagataccagtagcctccctgcttgaacaggcctctcctaggctaggcaggtgttcagaggcatgaaggtctgggcaggggaagggcgtcttctgaaatgggagttaccaggtttttaaatgctgctattgttttatttaccatttaaggtcttttctattatatctgagtaactagtcagtttttcttacagtgctcatagcagttgtatttgaattgtattttcagtgaaatttgttttacattgccatttaaaattggcctttaacagcttcccaactagcttataagatttttttttttaatgaaaacataacccatgaggctcagatgctgttgaagaaataaatggtatgttgctgctgacagtagtgcttgcctattgtaacagcattggttctgctgtagcctcggtgaccatttaagttgaataaatctgtcattttcacccacaaacagttgttgagcccctggatttgggttgtcactgtggttctcctgccagtgctataatccagtgtcgtaggtgcagggtatgaatcagctcagcctcttaggagagaggggctctcagcgaggagggggcggggggggggtcactatttatcttccagaggcagggttcatggattcctgatgtttagaggcggaagggaccttaggtcacctacttccacggttttcatactgttctctggggcctcgtggagagggagcctccaggcccattcaaagctttattagatttaaaagtaagatctggtatgaagaaaggttttgtttgtttcttaaaataaaaagtctgaaaatcactaaaaaaaaaaaaaaaaaa

SEQ ID NO: 4979 - DNA, 3272 bp, Homo Sapiens
  NM_021095
gcgtcaggccctcttccccgggcgtggcctaagcggcccggtccagtcgccctggggctgcttgggggcttttcctgctcgtggagctctgcgctggtcttcatgcgccctagccctctttcggggatactggccgaccccctcttccttttcccctttagtgaaggcctcccccgtcgccgcgcggcttcccggagccgactgcagactccctcagcccggtgttccccgcgtccggacgccgaggtcgcggcttcgcagaaactcgggcccctccatccgccctcagaaaagggagcgatgttgatctcaggaagcacaaagggaccttcctagctctgactgaaccacggagctcaccctggacagtatcactccgtggaggaagactgtgagactgtggctggaagccagattgtagccacacatccgcccctgccctaccccagagccctggagcagcaactggctgcagatcacagacacagtgaggatatgagtgtaggggtgagcacctcagcccctctttccccaacctcgggcacaagcgtgggcatgtctaccttctccatcatggactatgtggtgttcgtcctgctgctggttctctctcttgccattgggctctaccatgcttgtcgtggctggggccggcatactgttggtgagctgctgatggcggaccgcaaaatgggctgccttccggtggcactgtccctgctggccaccttccagtcagccgtggccatcctgggtgtgccgtcagagatctaccgatttgggacccaatattggttcctgggctgctgctactttctggggctgctgatacctgcacacatcttcatccccgttttctaccgcctgcatctcaccagtgcctatgagtacctggagcttcgattcaataaaactgtgcgagtgtgtggaactgtgaccttcatctttcagatggtgatctacatgggagttgtgctctatgctccgtcattggctctcaatgcagtgactggctttgatctgtggctgtccgtgctggccctgggcattgtctgtaccgtctatacagctctgggtgggctgaaggccgtcatctggacagatgtgttccagacactggtcatgttcctcgggcagctggcagttatcatcgtggggtcagccaaggtgggcggcttggggcgtgtgtgggccgtggcttcccagcacggccgcatctctgggtttgagctggatccagacccctttgtgcggcacaccttctggaccttggccttcgggggtgtcttcatgatgctctccttatacggggtgaaccaggctcaggtgcagcggtacctcagttcccgcacggagaaggctgctgtgctctcctgttatgcagtgttccccttccagcaggtgtccctctgcgtgggctgcctcattggcctggtcatgttcgcgtattaccaggagtatcccatgagcattcagcaggctcaggcagccccagaccagttcgtcctgtactttgtgatggatctcctgaagggcctgccaggcctgccagggctcttcattgcctgcctcttcagcggctctctcagcactatatcctctgcttttaattcattggcaactgttacgatggaagacctgattcgaccttggttccctgagttctctgaagcccgggccatcatgctttccagaggccttgcctttggctatgggctgctttgtctaggaatggcctatatttcctcccagatgggacctgtgctgcaggcagcaatcagcatctttggcatggttgggggaccgctgctgggactcttctgccttggaatgttctttccatgtgctaaccctcctggtgctgttgtgggcctgttggctgggctcgtcatggccttctggattggcatcgggagcatcgtgaccagcatgggctccagcatgccaccctctccctctaatgggtccagcttctccctgcccaccaatctaaccgttgccactgtgaccacactgatgcccttgactaccttctccaagcccacagggctgcagcggttctattccttgtcttacttatggtacagtgctcacaactccaccacagtgattgtggtgggcctgattgtcagtctactcactgggagaatgcgaggccggtccctgaaccctgcaaccatttacccagtgttgccaaagctcctgtccctccttccgttgtcctgtcagaagcggctccactgcaggagctacggccaggaccacctcgacactggcctgtttcctgagaagccgaggaatggtgtgctgggggacagcagagacaaggaggccatggccctggatggcacagcctatcaggggagcagctccacctgcatcctccaggagacctccctgtgatgttgactcaggaccccgcctctgtcctcactgtgccaggccatagccagaggccaccctgtagtacagggatgagtcttggtgtgttctgcagggacaggcctggatgatctagctcataccaaaggaccttgttctgagaggttcttgcctgcaggagaagctgtcacatctcaagcatgtgaggcaccgtttttctcgtcgcttgccaatctgttttttaaaggatcaggctcgtagggagcaggatcatgccagaaatagggatggaagtgcatcctctgggaaaaagataatggcttctgattcaacatagccatagtcctttgaagtaagtggctagaaacagcactctggttataattgccccagggcctgattcaggactgactctccaccataaaactggaagctgcttcccctgtagtccccatttcagtaccagttctgccagccacagtgagcccctattattactttcagattgtctgtgacactcaagcccctctcatttttatctgtctacctccattctgaagagggaggttttggtgtccctggtcctctgggaatagaagatccatttgtctttgtgtagagcaagcacgttttccacctcactgtctccatcctccacctctgagatggacacttaagagacggggcaaatgtggatccaagaaaccagggccatgaccgggtccactgtggagcagccatctatctacctgactcctgagccaggctgccgtggtgtcatttctgtcatccgtgctctgtttccttttggagtttcttctccacattatctttgttcctggggaataaaaactaccattggacctagaaaaaaaaaaaaaaaaaaaaaa

SEQ ID NO: 4980 - DNA, 6053 bp, Homo Sapiens
  NM_021097
taggttgtgacagttggaagtgtcatgtacaacatgcggcgattaagtctttcacccaccttttcaatgggatttcatctgttagttactgtgagtctcttattttcccatgtggaccatgtaattgctgagacagaaatggaaggagaaggaaatgaaactggtgaatgtactggatcatattactgtaagaaaggggtgattttgcccatttgggaaccccaagacccttcttttggggacaaaattgctagagctactgtgtattttgtggccatggtctacatgtttcttggagtctctatcatagctgatcggttcatgtcctctatagaagtcatcacatctcaagaaaaagaaataaccataaagaaacccaatggagagaccaccaagacaactgtgaggatctggaatgaaacagtttctaacctgaccttgatggccctgggatcttctgctcctgagattctcctttcagtaattgaagtgtgtggccataacttcactgcaggagacctcggtcctagcaccatcgtgggaagtgctgcattcaatatgttcatcattattgcactctgtgtttatgtggtgcctgacggagagacaaggaagattaagcatttgcgtgtcttctttgtgacagcagcctggagcatctttgcctacacctggctttacattattttgtctgtcatatctcctggtgttgtggaggtctgggaaggtttgcttactttcttcttctttcccatctgtgttgtgttcgcttgggtagcggataggagacttctgttttacaagtatgtctacaagaggtatcgagctggcaagcagagggggatgattattgaacatgaaggagacaggccatcttctaagactgaaattgaaatggacgggaaagtggtcaattctcatgttgaaaatttcttagatggtgctctggttctggaggtggatgagagggaccaagatgatgaagaagctaggcgagaaatggctaggattctgaaggaacttaagcagaagcatccagataaagaaatagagcaattaatagaattagctaactaccaagtcctaagtcagcagcaaaaaagtagagcattttatcgcattcaagctactcgcctcatgactggagctggcaacattttaaagaggcatgcagctgaccaagcaaggaaggctgtcagcatgcacgaggtcaacactgaagtgactgaaaatgaccctgttagtaagatcttctttgaacaagggacatatcagtgtctggagaactgtggtactgtggcccttaccattatccgcagaggtggtgatttgactaacactgtgtttgttgacttcagaacagaggatggcacagcaaatgctgggtctgattatgaatttactgaaggaactgtggtgtttaagcctggtgatacccagaaggaaatcagagtgggtatcatagatgatgatatctttgaggaggatgaaaatttccttgtgcatctcagcaatgtcaaagtatcttctgaagcttcagaagatggcatactggaagccaatcatgtttctacacttgcttgcctcggatctccctccactgccactgtaactatttttgatgatgaccacgcaggcatttttacttttgaggaacctgtgactcatgtgagtgagagcattggcatcatggaggtgaaagtattgagaacatctggagctcgaggaaatgttatcgttccatataaaaccatcgaagggactgccagaggtggaggggaggattttgaggacacttgtggagagctcgaattccagaatgatgaaattgtcaaaacaatatcagtcaaggtaattgatgatgaggagtatgagaaaaacaagaccttcttccttgagattggagagccccgcctggtggagatgagtgagaagaaagccctgttattgaatgagcttggtggcttcacaataacaggaaaatacctgtttggccaacctgtcttcaggaaggttcatgctagagaacatccgattctctctactgtaatcaccattgcagacgaatatgatgacaagcagccactgaccagcaaagaggaagaggagaggcgcattgcagaaatggggcgccccatcctgggagagcacaccaagttggaagtgatcattgaagaatcctatgaattcaagagtactgtggacaaactcattaagaagacaaacctggcccttgtggttgggactaacagctggagagaacagttcattgaagctatcactgtcagtgctggggaagatgatgacgacgatgaatgtggggaagagaagctgccctcctgtttcgattacgtgatgcactttctgactgtgttctggaaggtcctgtttgccttcgtcccccctactgaatactggaatggctgggcgtgtttcattgtctccatcctcatgattggcctactgacagctttcattggagacctggcttcccactttggctgcaccattggcctgaaagattctgtgactgcagtcgtgttcgtcgcacttggaacatcagtgccagacacatttgccagcaaagtggcagccacccaggaccagtatgcagacgcctccataggtaacgtcacgggcagcaacgcggtgaatgtcttcctgggaatcggtgtggcctggtccatcgctgccatctaccacgcagccaatggggaacagttcaaagtgtcccctggcacactagctttctctgtcactctcttcaccatttttgctttcatcaatgtgggggtgctgctgtatcggcggaggccagaaatcggaggtgagctgggtgggccccggactgccaagctcctcacatcctgcctctttgtgctcctatggctcttgtacattttcttctcctccctggaggcctactgccacataaaaggcttctaaaggaactatcagatatagtaaatttatatatatacatatatatacataaaaattatgtataatggacagaggaaactgacatttgtcatgttcacttacctgctgatggaatccagcttcaagagcatactctgtactagggccgaagtaaaaaaccatcacctcccattcccaggggcatcatcatgttcaacaaggcatggaggcagggccatctttgcagctcagtctagaagggctgcactctctccaggttgataaatccttaaggctttgatttgttttgtttttggttttgttttcagtggagctggggaggtagttaatgtttggctttatttttgttattttgttttgttttgtttttttgggagagtcagggttgttgcttttctttgtggaaagtgaaaccatccaaatgtaaatgggttttggtaaaaatttaaatcattagtattccccctcacctcccccaatcactttaaaacttattttggattaagaaaaaatctgggcatggaagaagaaagaagcatgtcttcatcgtattaccaaagttcatgcttatctccggaatgtgagtggaggtgaagctgcctccaagaagaagcataaaagtggaatggagccaggaaatccgatggttctagaaatagtctgatatttaaacatgtgatacctggcagtctcgtttaacaggtacaaggaaaacgtgcctagattcccaggaacgtgcaaaatcctttctttcttatctctttagctctggactgtgattggcaaggtccttcttccagcattcagcccagctaagcccccaggtgccccatcccaaccctgttcctcctgtccacctgccatcccctatgcaaacagtaagaataaccccattcaaaaagcacatcatcgttttccatttgcattaacatgtgtctcagtcccatgttgccgttgcttgggattgtctgtcagttttattttcaaaggcatccatggcttgcacaatcctgttccagtcatgactgaacatttgctccttcttcatgtgccgttcggaaatgttgttgtgatacctgttacacagtgcatggtgaaaaacaaataaaacaaaacaaagagtatctgtatatagtagagtatagtacatactgttctcccatttggcaatgttgattggacattgaagacataagtgagttttcttttcacctgagttgttacttttgtgctgttattgagtttgattaattactagggataaaaggagaaaatggattattgttcacggttctgcacattcatttctaagaagcaataactgtcatgtggggagaagttaaagctattgagaggatagcaggcaaactacaaagatcttcatggaaaattagccatgtggaacacatcagaggcctctaaaaatcacccattaattcaggaaggccaaggagaaaggccttatagagacgttgatatgttggatgtgcctaggctttcagagccaccctttccacaacacccctccctgcaaagtatttatttcacatctgcactgtctggcacagatggtagatagtgctggtttgttcattttatttttttacttaaaaggctattttgagccctgtttctttcactgtccagtctagtcctctttgattatatcagtagttgctgagtaagaaagaagccagggtgaccaacgggcctttaaaagtgttgtctcctctacttatgctgaaagagaaggcaattaaataagactagtacctcccaggaggattggactgggatatttttaaccctttaaaaagaatagctgtttctatgttaaaataccaaagaacatggataaacccaacattccaaagtagtgagtccactaatgagaaaaataatagaatgactttggtcacctctcggagacttctgtgtctataaggaatcccaggctggagacattcctagccctctgtattgattcaaaaatacttaataaattaaagctgttgagacttattttttcttctgtcactcagtaaccatgatccttcctcatttaataaacatttggtgactgaatgagtaattaaatgctggttacccacttaatgtgccaggtagtatgatactttctggggactaagccatgaacaaaacagtctagatccctgccctcagaagggttacagtttatgtgattactattttcatgagtaaaagtgaagaaagccatatggaaagatttttatcttgcaagaaaaaacaattatgaaactcttttaacataaacacactgaaactgtatcaaagcaattgtccaaattgtatttatacccaagaatttctttaactaagagagcataaggcatatgtttggaaaaccaccctctttatctttgaccgacttgcagataaatatatctctccattttaaaccaagaagggcaatcatgttggtgatccagatcactgagaaagcccagtgtatcccatcttttatctttgttggcaatggaacttttctatggcccacactttacaattctttgtcattctaacccatccttcccatccttattttttttttttttgagaattgctaaatggaaagctagcctagaagcaccaagtaaatatattcaaggaatataagttgtttaaacattagaaaaatttttgcactcattttttagctgtattaggaatgtcaataatcctgtagcaaattttcacagagaactttaagaaattcttgcattggtcgatttcaatttgaaagctttttggtttgtttgctttttaaattttcatgttctaggaaactatgattctggttgttcaggattgttattattatagttgtgtaaaattattttattttgtgtgtattgtgcacagcttggggggggggcgggaaatgcactaattgtgctcttccttataaatggtacatattactgacacagacaaataaagtttctaattgtttctgatttaatcactagtgatacagcatattctgtatgaaatgttttctcctttctcattgtcatctacttcattttttgttttcatgttttgaagaaataaaaaccaaaatggta

SEQ ID NO: 4981 - DNA, 8097 bp, Homo Sapiens
  NM_021098
cgaggccgccgccgtcgcctccgccgggcgagccggagccggagtcgagccgcggccgggagccgggcgggctggggacgcgggccgggggcggaggcgctgggggccggggccggggccgggggcggaggcgctgggggccggggccggggccgggcgccgagcggggtccgcggtgaccgcgccgcccgggcgatgcccgcggggacgccgccggccagcagagcgaggtgctgccggccgccaccatgaccgagggcgcacgggccgccgacgaggtccgggtgcccctgggcgcgccgccccctggccctgcggcgttggtgggggcgtccccggagagccccggggcgccgggacgcgaggcggagcgggggtccgagctcggcgtgtcaccctccgagagcccggcggccgagcgcggcgcggagctgggtgccgacgaggagcagcgcgtcccgtacccggccttggcggccacggtcttcttctgcctcggtcagaccacgcggccgcgcagctggtgcctccggctggtctgcaacccatggttcgagcacgtgagcatgctggtaatcatgctcaactgcgtgaccctgggcatgttccggccctgtgaggacgttgagtgcggctccgagcgctgcaacatcctggaggcctttgacgccttcattttcgccttttttgcggtggagatggtcatcaagatggtggccttggggctgttcgggcagaagtgttacctgggtgacacgtggaacaggctggatttcttcatcgtcgtggcgggcatgatggagtactcgttggacggacacaacgtgagcctctcggctatcaggaccgtgcgggtgctgcggcccctccgcgccatcaaccgcgtgcctagcatgcggatcctggtcactctgctgctggatacgctgcccatgctcgggaacgtccttctgctgtgcttcttcgtcttcttcattttcggcatcgttggcgtccagctctgggctggcctcctgcggaaccgctgcttcctggacagtgcctttgtcaggaacaacaacctgaccttcctgcggccgtactaccagacggaggagggcgaggagaacccgttcatctgctcctcacgccgagacaacggcatgcagaagtgctcgcacatccccggccgccgcgagctgcgcatgccctgcaccctgggctgggaggcctacacgcagccgcaggccgagggggtgggcgctgcacgcaacgcctgcatcaactggaaccagtactacaacgtgtgccgctcgggtgactccaacccccacaacggtgccatcaacttcgacaacatcggctacgcctggattgccatcttccaggtgatcacgctggaaggctgggtggacatcatgtactacgtcatggacgcccactcattctacaacttcatctatttcatcctgctcatcatcgtgggctccttcttcatgatcaacctgtgcctggtggtgattgccacgcagttctcggagacgaagcagcgggagagtcagctgatgcgggagcagcgggcacgccacctgtccaacgacagcacgctggccagcttctccgagcctggcagctgctacgaagagctgctgaagtacgtgggccacatattccgcaaggtcaagcggcgcagcttgcgcctctacgcccgctggcagagccgctggcgcaagaaggtggaccccagtgctgtgcaaggccagggtcccgggcaccgccagcgccgggcaggcaggcacacagcctcggtgcaccacctggtctaccaccaccatcaccaccaccaccaccactaccatttcagccatggcagcccccgcaggcccggccccgagccaggcgcctgcgacaccaggctggtccgagctggcgcgcccccctcgccaccttccccaggccgcggaccccccgacgcagagtctgtgcacagcatctaccatgccgactgccacatagaggggccgcaggagagggcccgggtggcacatgccgcagccactgccgctgccagcctcagactggccacagggctgggcaccatgaactaccccacgatcctgccctcaggggtgggcagcggcaaaggcagcaccagccccggacccaaggggaagtgggccggtggaccgccaggcaccggggggcacggcccgttgagcttgaacagccctgatccctacgagaagatcccgcatgtggtcggggagcatggactgggccaggcccctggccatctgtcgggcctcagtgtgccctgccccctgcccagccccccagcgggcacactgacctgtgagctgaagagctgcccgtactgcacccgtgccctggaggacccggagggtgagctcagcggctcggaaagtggagactcagatggccgtggcgtctatgaattcacgcaggacgtccggcacggtgaccgctgggaccccacgcgaccaccccgtgcgacggacacaccaggcccaggcccaggcagcccccagcggcgggcacagcagagggcagccccgggcgagccaggctggatgggccgcctctgggttaccttcagcggcaagctgcgccgcatcgtggacagcaagtacttcagccgtggcatcatgatggccatccttgtcaacacgctgagcatgggcgtggagtaccatgagcagcccgaggagctgactaatgctctggagatcagcaacatcgtgttcaccagcatgtttgccctggagatgctgctgaagctgctggcctgcggccctctgggctacatccggaacccgtacaacatcttcgacggcatcatcgtggtcatcagcgtctgggagatcgtggggcaggcggacggtggcttgtctgtgctgcgcaccttccggctgctgcgtgtgctgaagctggtgcgctttctgccagccctgcggcgccagctcgtggtgctggtgaagaccatggacaacgtggctaccttctgcacgctgctcatgctcttcattttcatcttcagcatcctgggcatgcaccttttcggctgcaagttcagcctgaagacagacaccggagacaccgtgcctgacaggaagaacttcgactccctgctgtgggccatcgtcaccgtgttccagatcctgacccaggaggactggaacgtggtcctgtacaacggcatggcctccacctcctcctgggccgccctctacttcgtggccctcatgaccttcggcaactatgtgctcttcaacctgctggtggccatcctcgtggagggcttccaggcggagggcgatgccaacagatccgacacggacgaggacaagacgtcggtccacttcgaggaggacttccacaagctcagagaactccagaccacagagctgaagatgtgttccctggccgtgacccccaacgggcacctggagggacgaggcagcctgtcccctcccctcatcatgtgcacagctgccacgcccatgcctacccccaagagctcaccattcctggatgcagcccccagcctcccagactctcggcgtggcagcagcagctccggggacccgccactgggagaccagaagcctccggccagcctccgaagttctccctgtgccccctggggccccagtggcgcctggagcagccggcgctccagctggagcagcctgggccgtgcccccagcctcaagcgccgcggccagtgtggggaacgtgagtccctgctgtctggcgagggcaagggcagcaccgacgacgaagctgaggacggcagggccgcgcccgggccccgtgccaccccactgcggcgggccgagtccctggacccacggcccctgcggccggccgccctcccgcctaccaagtgccgcgatcgcgacgggcaggtggtggccctgcccagcgacttcttcctgcgcatcgacagccaccgtgaggatgcagccgagcttgacgacgactcggaggacagctgctgcctccgcctgcataaagtgctggagccctacaagccccagtggtgccggagccgcgaggcctgggccctctacctcttctccccacagaaccggttccgcgtctcctgccagaaggtcatcacacacaagatgtttgatcacgtggtcctcgtcttcatcttcctcaactgcgtcaccatcgccctggagaggcctgacattgatcccggcagcaccgagcgggtcttcctcagcgtctccaattacatcttcacggccatcttcgtggcggagatgatggtgaaggtggtggccctggggctgctgtccggcgagcacgcctacctgcagagcagctggaacctgctggatgggctgctggtgctggtgtccctggtggacattgtcgtggccatggcctcggctggtggcgccaagatcctgggtgttctgcgcgtgctgcgtctgctgcggaccctgcggcctctgagggtcatcagccgggccccgggcctcaagctggtggtggagacgctgatatcatcactcaggcccattgggaacatcgtcctcatctgctgcgccttcttcatcatttttggcattttgggtgtgcagctcttcaaagggaagttctactactgcgagggccccgacaccaggaacatctccaccaaggcacagtgccgggccgcccactaccgctgggtgcgacgcaagtacaacttcgacaacctgggccaggccctgatgtcgctgttcgtgctgtcatccaaggatggatgggtgaacatcatgtacgacgggctggatgccgtgggtgtcgaccagcagcctgtgcagaaccacaacccctggatgctgctgtacttcatctccttcctgctcatcgtcagcttcttcgtgctcaacatgttcgtgggcgtcgtggtcgagaacttccacaagtgccggcagcaccaggaggcggaggaggcgcggcggcgagaggagaagcggctgcggcgcctagagaggaggcgcaggagcactttccccagcccagaggcccagcgccggccctactatgccgactactcgcccacgcgccgctccattcactcgctgtgcaccagccactatctcgacctcttcatcaccttcatcatctgtgtcaacgtcatcaccatgtccatggagcactataaccaacccaagtcgctggacgaggccctcaagtactgcaactacgtcttcaccatcgtgtttgtcttcgaggctgcactgaagctggtagcatttgggttccgtcggttcttcaaggacaggtggaaccagctggacctggccatcgtgctgctgtcactcatgggcatcacgctggaggagatagagatgagcgccgcgctgcccatcaaccccaccatcatccgcatcatgcgcgtgcttcgcattgcccgtgtgctgaagctgctgaagatggctacgggcatgcgcgccctgctggacactgtggtgcaagctctcccccaggtggggaacctgggccttcttttcatgctcctgttttttatctatgctgcgctgggagtggagctgttcgggaggctggagtgcagtgaagacaacccctgcgagggcctgagcaggcacgccaccttcagcaacttcggcatggccttcctcacgctgttccgcgtgtccacgggggacaactggaacgggatcatgaaggacacgctgcgcgagtgctcccgtgaggacaagcactgcctgagctacctgccggccctgtcgcccgtctacttcgtgaccttcgtgctggtggcccagttcgtgctggtgaacgtggtggtggccgtgctcatgaagcacctggaggagagcaacaaggaggcacgggaggatgcggagctggacgccgagatcgagctggagatggcgcagggccccgggagtgcacgccgggtggacgcggacaggcctcccttgccccaggagagtccgggcgccagggacgccccaaacctggttgcacgcaaggtgtccgtgtccaggatgctctcgctgcccaacgacagctacatgttcaggcccgtggtgcctgcctcggcgccccacccccgcccgctgcaggaggtggagatggagacctatggggccggcacccccttgggctccgttgcctctgtgcactctccgcccgcagagtcctgtgcctccctccagatcccattggctgtgtcgtccccagccaggagcggcgagcccctccacgccctgtcccctcggggcacagcccgctcccccagtctcagccggctgctctgcagacaggaggctgtgcacaccgattccttggaagggaagattgacagccctagggacaccctggatcctgcagagcctggtgagaaaaccccggtgaggccggtgacccaggggggctccctgcagtccccaccacgctccccacggcccgccagcgtccgcactcgtaagcataccttcggacagcgctgcgtctccagccggccggcggccccaggcggagaggaggccgaggcctcggacccagccgacgaggaggtcagccacatcaccagctccgcctgcccctggcagcccacagccgagccccatggccccgaagcctctccggtggccggcggcgagcgggacctgcgcaggctctacagcgtggatgctcagggcttcctggacaagccgggccgggcagacgagcagtggcggccctcggcggagctgggcagcggggagcctggggaggcgaaggcctggggccctgaggccgagcccgctctgggtgcgcgcagaaagaagaagatgagccccccctgcatctcggtggaaccccctgcggaggacgagggctctgcgcggccctccgcggcagagggcggcagcaccacactgaggcgcaggaccccgtcctgtgaggccacgcctcacagggactccctggagcccacagagggctcaggcgccgggggggaccctgcagccaagggggagcgctggggccaggcctcctgccgggctgagcacctgaccgtccccagctttgcctttgagccgctggacctcggggtccccagtggagaccctttcttggacggtagccacagtgtgaccccagaatccagagcttcctcttcaggggccatagtgcccctggaacccccagaatcagagcctcccatgcccgtcggtgaccccccagagaagaggcgggggctgtacctcacagtcccccagtgtcctctggagaaaccagggtccccctcagccacccctgccccagggggtggtgcagatgaccccgtgtagctcggggcttggtgccgcccacggctttggccctggggtctgggggccccgctggggtggaggcccaggcagaaccctgcatggaccctgacttgggtcccgtcgtgagcagaaaggcccggggaggatgacggcccaggccctggttctctgcccagcgaagcaggagtagctgccgggccccacgagcctccgtccgttctggttcgggtttctccgagttttgctaccagccgaggctgtgcgggcaactgggtcagcctcccgtcaggagagaagccgcgtctgtgggacgaagaccgggcacccgccagagaggggaaggtaccaggttgcgtcctttcaggccccgcgttgttacaggacactcgctgggggccctgtgcccttgccggcggcaggttgcagccaccgcggcccaatgtcaccttcactcacagtctgagttcttgtccgcctgtcacgccctcaccaccctccccttccagccaccaccctttccgttccgctcgggccttcccagaagcgtcctgtgactctgggagaggtgacacctcactaaggggccgaccccatggagtaacgcgcccggccccgatgcgaatcaggcctcccctacatctgggggcgttggccgcgagattcccattgacacctttgtttcgtgtgcttttaaattcaggttaaatgttgcaataatctgatgcagaagactcagcttctcaagggagagggagggggcggagcggaataaatagtaacttatttaagaaatgcaaaaaaaaaa

SEQ ID NO: 4982 - DNA, 2385 bp, Homo Sapiens
  NM_021100
agcgccgggcagcacttccgggagcctggggcccaggactgcagcggcttcggaaggtgggctctgccagcgggaccatgctgctccgagccgcttggaggcgggcggcagtggcggtgacagcggctccagggccgaagcccgcggcgcccactcgggggctgcgcctgcgcgttggagaccgtgctcctcagtctgcggttcccgcagatacagccgctgccccggaggtggggccagtgctgcgacctctctatatggatgtgcaagctacaactcctctggacccccgggtgcttgatgccatgctcccttacctaatcaactactatgggaacccacactcccggacacatgcttatggctgggagagtgaggcagccatggaacgtgctcgtcagcaagtagcatctctgattggagctgatcctcgtgagatcatttttactagtggtgctactgaatccaacaacatagcaattaagggggtggcccgattctacaggtcacggaaaaagcacttgatcaccacccagacagaacacaaatgtgtcttggactcctgccgttcactggaagctgagggctttcaggtcacctacctcccagtgcagaagagtgggatcattgacctaaaggaactagaggctgctatccagccagatactagcctggtgtcagtcatgactgtgaacaatgagattggagtgaagcagcctattgcagaaatagggcggatttgcagttccagaaaggtatatttccatactgatgcagcccaggctgttggaaaaatcccacttgatgtcaatgacatgaaaattgatctcatgagcattagtggtcacaaaatctacggtcccaaaggggttggtgccatctacatccgtcgccggccccgtgtgcgtgtggaggccctgcagagtggaggggggcaggagcggggtatgcggtctgggacagtgcccacacccttagtggtggggctgggggctgcgtgtgaggtggcacagcaagagatggagtatgaccacaagcgaatctcaaagttgtcagagcggctgatacagaatataatgaagagccttccagatgtggtgatgaatggggaccctaagcaccattatcccggctgtatcaacctctcctttgcatatgtggaaggggaaagtctgctgatggcactgaaggacgttgccttatcctcagggagtgcctgcacctctgcatccctggagccctcttatgtgcttagagcaattggcactgatgaggatttagcgcactcttctatcaggtttggaattggccgcttcactacagaggaggaagtggactacacagtggagaaatgcattcagcatgtgaagcgtcttcgagaaatgagccctctctgggagatggttcaggatggcattgacctcaagagcatcaagtggacccaacactagaagaatagggccctgactttgtgctggtctggcccctcctgcctcaccaacccgtgcacaaccagacaccttgttacacctagtggatgctctagattggtatagaccagttgacttcagcatcagtccacctctatgacagaaacacaagaaaactgtctttccctagcttcagttccttgggtgtggagcactccccatttcttctcgggtcttaaagtgtgtggacattttcatcccgaagccatagagacatttgctgtcatattgctgctgggcacatctgtgctcttggtgaggagagcaagaggaaccagaagaagtctctttggtcagggaccatgatgctctacatggacatttgagtcttcgtcttctgctgctgctcggctggaccagcttctttaacagcaagcataatccacttcaatgtaatattttctgtagctccaaaggctatctcttcatattgactgcagacagactgaatggacagtttcttagagggcttgtctcctttctacccttgtcctctttcctttcctttgacctaatggagctagaaatatgtctgtgactccaccagttattctaataatttgttttcttgaaaattgttaatttcaagactggagaaataaactcaccttctatttactctgtgactttatgagaggttgagggaaaagtggaagctgtacttgggaattgtggagaagaccgccactccatctgatttgcataaatgactcagtgggcttttgtatctcttcatttaagaattatttgaatgcctgccaggagccagatttgttctgggtattaggaatacactggttaacaggaccaaaaaagaccctgccctcactgagttttaaattttagtggagagatggaaaataattaaacaaataaacaatgttatagattgtga

SEQ ID NO: 4983 - DNA, 2228 bp, Homo Sapiens
  NM_021105
caccggacaaacgtctctggagtctctccaatgagcaagaaagcaagtcgggggtaggggaggggcctcacaccagggggtgggcgcagtccctcctccagctccttcaccctccagtagtctcgtgggtccccgagcgccagcgcgggaaccgggaaaaggaaaccgtgttgtgtacgtaagattcaggaaacgaaaccaggagccgcgggtgttggcgcaaaggttactcccagacccttttccggctgacttctgagaaggttgcgcagcagctgtgcccggcagtctagaggcgcagaagaggaagccatcgcctggccccggctctctggaccttgtctcgctcgggagcggaaacagcggcagccagagaactgttttaatcatggacaaacaaaactcacagatgaatgcttctcacccggaaacaaacttgccagttgggtatcctcctcagtatccaccgacagcattccaaggacctccaggatatagtggctaccctgggccccaggtcagctacccacccccaccagccggccattcaggtcctggcccagctggctttcctgtcccaaatcagccagtgtataatcagccagtatataatcagccagttggagctgcaggggtaccatggatgccagcgccacagcctccattaaactgtccacctggattagaatatttaagtcagatagatcagatactgattcatcagcaaattgaacttctggaagttttaacaggttttgaaactaataacaaatatgaaattaagaacagctttggacagagggtttactttgcagcggaagatactgattgctgtacccgaaattgctgtgggccatctagaccttttaccttgaggattattgataatatgggtcaagaagtcataactctggagagaccactaagatgtagcagctgttgttgtccctgctgccttcaggagatagaaatccaagctcctcctggtgtaccaataggttatgttattcagacttggcacccatgtctaccaaagtttacaattcaaaatgagaaaagagaggatgtactaaaaataagtggtccatgtgttgtgtgcagctgttgtggagatgttgattttgagattaaatctcttgatgaacagtgtgtggttggcaaaatttccaagcactggactggaattttgagagaggcatttacagacgctgataactttggaatccagttccctttagaccttgatgttaaaatgaaagctgtaatgattggtgcctgtttcctcattgacttcatgttttttgaaagcactggcagccaggaacaaaaatcaggagtgtggtagtggattagtgaaagtctcctcaggaaatctgaagtctgtatattgattgagactatctaaactcatacctgtatgaattaagctgtaaggcctgtagctctggttgtatacttttgcttttcaaattatagtttatcttctgtataactgatttataaaggtttttgtacattttttaatactcattgtcaatttgagaaaaaggacatatgagtttttgcatttattaatgaaacttcctttgaaaaactgctttgaattatgatctctgattcattgtccattttactaccaaatattaactaaggccttattaatttttatataaattatatcttgtcctattaaatctagttacaatttatttcatgcataagagctaatgttattttgcaaatgccatatattcaaaaaagctcaaagataattttctttactattatgttcaaataatattcaatatgcatattatctttaaaaagttaaatgtttttttaatcttcaagaaatcatgctacacttaacttctcctagaagctaatctataccataatattttcatattcacaagatattaaattaccaattttcaaattattgttagtaaagaacaaaatgattctctcccaaagaaagacacattttaaatactccttcactctaaaactctggtattataacttttgaaagttaatatttctacatgaaatgtttagctcttacactctatccttcctagaaaatggtaattgagattactcagatattaattaaatacaatatcatatatatattcacagagtataaacctaaataatgatctattagattcaaatatttgaaataaaaacttgatttttttgtaaaaaaaaaaaaaaaaaaa

SEQ ID NO: 4984 - DNA, 1094 bp, Homo Sapiens
  NM_021107
agctggattcagcgtgtccgcgacctcacctttaggtcctgtgaggtcggtggaatcctggggtcctccaaatctaccaggccatctccccagtttcccagttcttcctgcgtgcgggcgagagtggttgggccctcgggaacccactcagagcgaggctaaatttacggagggactttctgttagcagcatgagggcctgtggttagacctatagaggtatttcctttgatttaagccagaaagtcctgagagcggatcggggagcatttgcggatcggtcactttttcctcctttctgagtctcttatcccctaccacagggacggcccaggtggcaggatgtcctggtctggccttctccatggcctcaacacgtccctaacttgtggcccagctctggttccccggctctgggctacctgctccatggctaccctgaaccagatgcaccgcctggggccccccaagcggccgcctcggaagctgggccccacggaaggccggccgcagctgaagggtgtggtcctgtgcacgtttacccgcaagccgaagaagcccaactcagccaatcgcaagtgctgtcgagtgcggctcagcactggccgcgaggccgtctgcttcatccctggggagggccacaccctgcaggagcaccagattgtccttgtggagggcggccgcacccaggacctgccaggcgtcaagctcaccgttgtgcgtggcaagtacgactgtggccacgtgcagaagaagtgacggctgggggcacagtgggctgggcgcccctgcagaacatgaaccttccgctcctggctgccacagggtcctccgatgctggcctttgcgcctctagaggcagccactcatggattcaagtcctggctccgcctcttccatcaggaccactattaagccataggagtcctgggggtgcaaagggtgcccctctgtcaacacccttggctcctgtgtttagaggggtggcctgaaggaccttttctgctgggacaagacactgtactgccctctgctgggaaggggttttaataaacagaccctggcgcttgtgatgtaaaaaaaaaaaaaaaaaaa

SEQ ID NO: 4985 - DNA, 4427 bp, Homo Sapiens
  NM_021111
gcgcgagcggcggcggtagcggcggcagcggctgcggccaagctgggtccgagcatcccgcggctctggagccgcccggcccggacatggcgaccgtccgggcctctctgcgaggtgcgctgctccttctgctggccgtggcgggggtcgcggaggtggcagggggcctggctccgggcagtgcgggtgcattgtgttgtaatcattcaaaggataaccaaatgtgccgtgatgtatgtgaacagattttctcctcaaaaagtgaatcccgactaaaacatctgttgcagcgagccccagattattgcccagagacaatggttgaaatttggaattgtatgaattcatctttgccaggtgtgtttaagaagtctgatggctgggttggcttaggctgctgtgaactggctattgccttggagtgtcgacaggcatgcaagcaggcatcttcaaagaatgatatttccaaagtttgcagaaaagaatatgagaatgctcttttcagttgcattagcagaaatgaaatgggctcggtttgttgcagttatgcaggtcatcacacaaactgccgagaatactgtcaagccatttttcgaacagactcttctcctggtccatctcagataaaagcagtggaaaattattgcgcctctattagtccacaattaatacattgtgtgaacaattatactcaatcttatccaatgaggaacccaacggatagtttatattgctgtgacagagctgaagaccatgcttgccaaaatgcctgcaagagaatcctgatgtccaagaaaacggaaatggagattgttgatggtctcatcgagggttgtaagacccagcccttgcctcaagatcctctttggcaatgttttcttgaaagctcacaatctgttcaccctggagtcactgtacaccctcctccctctacaggcctcgatggggctaaattgcattgttgttctaaagcaaacacttcaacatgtagggaactctgcactaaactttacagcatgagctggggcaatacacagagttggcaagagtttgatcgcttttgtgaatataatccagtggaagtgtccatgttgacctgtttagcggatgtccgggaaccttgccagttgggctgtagaaaccttacttactgtactaattttaacaacaggccaacagaacttttcaggagttgtaatgcacagtcagatcaaggagccatgaatgacatgaagttgtgggagaaaggaagcataaagatgccatttatcaatatacctgttcttgatattaaaaagtgccagccagagatgtggaaagcaatagcttgttcactgcagattaaaccttgtcatagtaaatctcggggaagtattatttgcaaatcagattgtgtggagattcttaaaaaatgtggagaccagaacaaattccctgaagaccacacagctgaaagtatttgtgagcttctgtcacctacagatgatctgaagaattgtatacctttggatacatacctcaggccaagtactttaggtaacattgtagaagaagtgactcatccctgtaacccaaatccttgccctgccaatgagctctgtgaagtaaaccgaaaaggatgtccatctggagatccctgtcttccatacttttgtgttcaaggttgcaaactgggagaagcttctgatttcattgtccgtcaagggacactaatccaggtgccatcatctgcaggggaagttggttgttataaaatctgttcatgtggacaaagtggactcttagaaaactgtatggaaatgcactgtatagacctccagaagtcttgtattgttggaggaaaaagaaaaagtcatggaacatcctttagtattgactgcaatgtctgttcttgttttgctggcaatttggtgtgctctacccgcctttgcctcagtgagcacagttcagaagatgaccgtcgtaccttcacaggtctgccctgtaactgtgcagatcagtttgtccctgtatgtgggcagaatgggcgcacttaccccagtgcctgcattgctcgctgtgtgggcctccaagaccatcagtttgagtttggatcatgcatgtcaaaggatccatgtaatcctaatccctgccaaaaaaaccaaaggtgcatacccaaaccacaggtctgcctgacgacttttgataaatttggatgtagccagtatgagtgtgtaccaagacagctcgcgtgtgaccaggtccaagatcctgtttgtgacacagaccacatggagcacaacaatctctgcactttataccaaagaggaaaaagcctctcttacaaaggtccctgccagcccttttgcagagcaaccgagcccgtatgtgggcacaatggtgagacctacagcagtgtgtgtgctgcctactcggatcgcgtggcagtcgattactatggggactgccaggccgtcggagtcctctcagagcacagctccgtcgccgagtgtgcttctgtcaagtgtccttcgctcttggcagctggatgcaaacccatcatcccaccgggtgcttgttgcccattatgtgctgggatgttaagagttttatttgacaaagaaaaactggatactattgctaaggtaacaaataaaaagccaataacagttctggaaatacttcagaaaatccgcatgcacgtgtctgtcccacagtgtgatgtgtttggatacttcagcattgaatcagaaattgtgatcctgatcattcccgtcgatcactatccaaaagctctgcagattgaagcctgcaataaagaagcagagaagattgagtcccttatcaactctgacagcccgactttggcgtcccatgtccctctctctgccctcatcatttcccaggtacaggtctccagcagtgtgccatcggccggtgtcagggccaggccttcttgccactccctcctccttcccctcagcttgggccttgccttgcacttgctctggacatataactgactgcccacggaaagtgcagaatgctcctccacctcactctcctgccttgaaaaagacattcaggactgctggtttgtagttgaatattggccaaggaaaggcacatgtcacctctattcgccacacagtatttttttttttaatccgccaatattagtaggatttttgttttgtttttacaaatgttaaaatgtgttgttccaaatactaatgaaaacagaatgtctcttcctggtagaccactgccatatgatttacatttcctcaccataagggtcccccactctaaagcaaatttatcgctgggaaatgagatgaccactttttagaaagataattcactgtactatcaggttcacaaacttcatttcagagttctttttgaagtatttaaggttcccgttgcatttgttttgtttacagataattacctactctggctagaagctaggggtcccagtgaagagccactgccattaaagaatatgaaacatagataaaacatctttgaaattatgtaaattatgtaaattatcaggcaaatttgcattaaattacagaaatttaattcagaaccccaactactgtgttatgcaaaagcaagctgattaaatgacactcatataattatatgttgtaagcaacaggctcactggtcacggatttgtgtctgtgacttttgtgaaagggagaagtgacattgcatcaaagcatcttgcattatgcaatttttatattaaccagatatatattcatcggtattcatccaagttaaatgtagagtttttaaacatcaatctttaaaccaattgctgctacttatataattgccaaaaagtgaaataatgtgtagttcatgtaaataatacattatatttctattttattatgaagaaggtgaatagccatatttgtaaaatgacaatcatgtgtgttaacccagtgctttccattcgtgaaaacacatttgctttttgtgatatgcacaatgtagataagtgttctgtctgactttcttttttgatatagaagtataaagaattgtggtttatatatttaaaagtgtcaagctgagtattaaaatgtatgcatgttgtctaagaaattgaatactttgaatgtgtttcacagtttgaaataagctatttgatgtaatacttcttgtgtgtatgcacatgaacttagattttacatgaagtattttttcagtattatatgtaccctctgaaatacatagggatatgcgtattataccaaaatgttgctgaaaaatgggcacttaaagctttcagaatatgtcagtgctgatgtagcatgcttgttgcaattgccttttttctgtataaatgtctttaatgcaatatactggaaagcttttctattttaataaaaataatttttatatgatcaaaaaaaaaaaaaaaa

SEQ ID NO: 4986 - DNA, 4204 bp, Homo Sapiens
  NM_021117
gtcataggtcactgggcgggctatgggcggggtccacgtcgcctaccggggcggagcgggggtggctggagcagtctggacagtcatggcggcgactgtggcgacggcggcagctgtggccccggcgccagcgcccggcacggacagcgcctcttcggtgcactggttccgcaaagggctgcgactccacgacaacccggcgttgctggcggccgtgcgcggggcgcgctgcgtgcgctgcgtttacattctcgacccgtggttcgcggcctcctcctcagtcgggatcaaccgatggaggttcctacttcagtctctggaagatttggacacaagtttaaggaaactgaactcccgcctgtttgtagtccggggacagccagccgacgtgttcccaaggctgttcaaggaatggggagtgacccgcttgacctttgaatatgactctgaaccctttgggaaagaacgggatgcagccatcatgaagatggccaaggaggctggtgtggaagtagtgacggagaattctcataccctctatgacctggacaggatcattgagctgaatgggcagaagccaccccttacatacaagcgctttcaggccatcatcagccgcatggagctgcccaagaagccagtgggcttggtgaccagccagcagatggagagctgcagggccgagatccaggagaaccacgacgagacctacggcgtgccctccctggaggagctggggttccccactgaaggacttggtccagctgtctggcagggaggagagacagaagctctggcccgcctggataagcacttggaacggaaggcctgggttgccaactatgagagaccccgaatgaacgccaactccctcctggccagccccacaggcctcagcccctacctgcgctttggttgtctctcctgccgcctcttctactaccgcctgtgggacctgtataaaaaggtgaagcggaacagcacacctcccctctccctatttgggcaactcctatggcgagagttcttctacacggcagctaccaacaaccccaggtttgaccgcatggaggggaaccccatctgcatccagatcccctgggaccgcaatcctgaggccctggccaagtgggctgagggcaagacaggcttcccttggattgatgccatcatgacccaactgaggcaggagggctggatccaccacctggcccggcatgccgtggcctgcttcctgacccgcggggacctctgggtcagctgggagagcggggtccgggtatttgatgagctgctcctggatgcagatttcagcgtgaacgcaggcagctggatgtggctgtcctgcagtgctttcttccagcagttcttccactgctactgccctgtgggctttggccgtcgcacggaccccagtggggactacatcaggcgatacctgcccaaattgaaagcgttcccctctcgatacatctatgagccctggaatgccccagagtcaattcagaaggcagccaagtgcatcattggtgtggactacccacggcccatcgtcaaccatgccgagaccagccggcttaacattgaacgaatgaagcagatttaccagcagctttcgcgctaccggggactctgtctactggcatctgtcccttcctgtgtggaagacctcagtcaccctgtggcagagcccagctcgagccaggctggcagcatgagcagtgcaggcccaagaccactacccagtggcccagcatcccccaaacgcaagctggaagcagccgaggaaccacctggtgaagaactcagcaaacgggcccgggtggcagagttgccaaccccagagctgccgagcaaggatgcctgagactgcagagcccttgctccgtgagcaaagcctgggtgcccaagcagccaccgcagcagcagagtacaacctgcagagaagctgatcaccgggcagagatagagcgagcatgtgtgtgtgtgtgcgcgtgtgcagaggagggagtggtgtgcctgtttgtgtgtgcatgcatctgttgacactcatgattctgaatgttgcctgggctgggggagtacctgtagcacgccagtgctgtttcccggcctccagacacaaggctcgaggttatggcagtgactttcagctgagacctgttcctgcaagccagctgccttgtctgaacagaacgtagtggtaggaccctagctgggattctggcatctgcctccctagacctccttccctccctcctcacgtcaggctgtggagcaggagcacagcagttctggctgttgtccaaagcatgggattctggaggcagccagagccctgctgagttcctgctttctgacctggaggctgagcaggccggagtggatggatgctgtccagacgtagccacctggcctctgtttcttattttaaaattctctgctactgggctcagtcccaggcccttccttgggcttctgggactgagcatgaggccatagacagatctaaaaagtttccaccaccctacagaagtacacacagatacctgactggtgtggggtatgcctggtactgtaataggagcctaagacagcacacctaccttttcaggatttagaacctaaaattagaaagagaatcccagctgtcattgttccttccccagaagctaagagccagcctcagagcctacccaggagctgtgaaggggcaagggtcaaactgactcactctaccaggaggagaccaggttgcagtggcgtaaggccccctggtttctctggccacactccaaggcaccacagtgctgccagtgaggacagctgacacccagccagggaaaccattctagtctttattctgttggcttccagggcctgtcctggacttgtcagcatccagactgccatgtcagctatcccagtagctgagctccaaggactcaggcagagggactcagggatggggactgccaggggcagttggcaaaagtccaagtagagattacacccagaacaccattccttccaggagcagtaggtgggaggtttgacccagagaagccaatccttgcattccaggagtggcctgtgcctcccacctcttccttcccactgccaaaggcctgtgttgagaaagatgtcatgcaaaaggacgacggtggccaactaaagcaagtcttccttccaccctgtggcctgcacttgagccacaaagtgtgtgtgtgtgtgtgcgtgtgtggtacgtgtgtgtgtgtgtggctatgaggctgattcctgtttggatttttgtcctcacgtgtatcattaagctggcctttgggccttttcctttctacctcccctgtgacctttcctagcctcagatctgttaattcttttggccccagccctgtccctcactgtcctctgtccttggaccagaaccctggggtcagacccatctcctgtagctgtccatcacactgacaggcttcttcctgagatatcctcaggttttctcagccagagagctgcctttagagtccaactgttgtacgtatgtcaccttcactagaaatgtcccatcatcgtgggaggggagcagggcacaggggatggtgtgcattcagagcattgggttgggggcttccctgttccctcagccccagtcgagaggaaagagaatcgggccactgccagaaagagagtcaagcaaacctggaagggcaaatctgagagtgggaaggccaaaggccgaggcccagatttagtattcactagcagcgccttcgggtagcaggatgattccttttcctgcctgtctgctgctggctctcttccctaaggtacaggttggcaggaccacctccgcctacttctccaccatccctagcatgtcagcccgttcccagatcaacctgccagtggagtcaggcagtgcactcctggagccaagagggaagggcagggtagagagggtatgtccagtagcctggagctccatggtggcttcatgcctcccttctcccagctcaggtggccctgagggctccctcggaacagtgcctcaaatcctgacccaagggccagcatggggaagagatggttgcaggcaaaatgcactttatagagattttctattgctgggaaggtgtgtttctcccacaatttgtttgtgaatattcacttgttttataaatgtctgacctgtcttgagtaa

SEQ ID NO: 4987 - DNA, 1450 bp, Homo Sapiens
  NM_021126
gggcggagcgggcgtacccccacggcccggccagtggaaggcgcgggcagcagcggctccgagtggccgcggcggtgggctgtgccggagtctcctccctttggtccgctgcaggttggtggcgggaggaggggacagctgcgggcgcggggagggggcgccgcgccgcgggggccatggcggagccaggaagccgggagtccgagacccgggcccgcagcccgagtgtcgccgccatggcttcgccgcagctctgccgcgcgctggtgtcggcgcaatgggtggcggaggcgctgcgggccccgcgcgctgggcagcctctgcagctgctggacgcctcctggtacctgccgaagctggggcgcgacgcgcgacgcgagttcgaggagcgccacatcccgggcgccgctttcttcgacatcgaccagtgcagcgaccgcacctcgccctacgaccacatgctgcccggggccgagcatttcgcggagtacgcaggccgcctgggcgtgggcgcggccacccacgtcgtgatctacgacgccagcgaccagggcctctactccgccccgcgcgtctggtggatgttccgcgccttcggccaccacgccgtgtcactgcttgatggcggcctccgccactggctgcgccagaacctcccgctcagctccggcaagagccaacctgctcccgccgagttccgcgctcagctcgaccccgccttcatcaagacctacgaggacatcaaggagaacctggaatcccggcgcttccaggtggtggactcccgagccactggcaggttccgcggcaccgagcccgagccccgagacggcattgaacctggccacatcccaggtaccgtgaacatccccttcacagacttcctgagccaggaggggctggagaagagccctgaggagatccgccatctgttccaggagaagaaagtggacctgtctaagccactggtggccacgtgtggctctggcgtcacagcctgccacgtggcactaggggcctacctctgcggcaagccagacgtgcccatctacgatggctcctgggtggagtggtacatgcgcgcccggcccgaggatgtcatctcagagggccgggggaagacccactgaagctgggcaggacacaggcgagctcaggtgatgccggccaccagcaatgcctggcctggtagctccgcttctgctttcaccaagagagtgtttcttcactcaactcaggtggcatttggggtgacatctcaaaggccaggaattccgttgacttgttggctgccagtaggggcgggaggaaaggcggaggcgagccctggaggagggaggccacaactccgagctgcccacctggtgctgagctggggccccgcctcctttctgttttatttttgaggaaataaaataaccaagtgctaaatcttgtaaaaaaaaaaaaa

SEQ ID NO: 4988 - DNA, 2276 bp, Homo Sapiens
  NM_021130
gaacgtggtataaaaggggcgggaggccaggctcgtgccgttttgcagacgccaccgccgaggaaaaccgtgtactattagccatggtcaaccccaccgtgttcttcgacattgccgtcgacggcgagcccttgggccgcgtctcctttgagctgtttgcagacaaggtcccaaagacagcagaaaattttcgtgctctgagcactggagagaaaggatttggttataagggttcctgctttcacagaattattccagggtttatgtgtcagggtggtgacttcacacgccataatggcactggtggcaagtccatctatggggagaaatttgaagatgagaacttcatcctaaagcatacgggtcctggcatcttgtccatggcaaatgctggacccaacacaaatggttcccagtttttcatctgcactgccaagactgagtggttggatggcaagcatgtggtgtttggcaaagtgaaagaaggcatgaatattgtggaggccatggagcgctttgggtccaggaatggcaagaccagcaagaagatcaccattgctgactgtggacaactcgaataagtttgacttgtgttttatcttaaccaccagatcattccttctgtagctcaggagagcacccctccaccccatttgctcgcagtatcctagaatctttgtgctctcgctgcagttccctttgggttccatgttttccttgttccctcccatgcctagctggattgcagagttaagtttatgattatgaaataaaaactaaataacaattgtcctcgtttgagttaagagtgttgatgtaggctttattttaagcagtaatgggttacttctgaaacatcacttgtttgcttaattctacacagtacttagattttttttactttccagtcccaggaagtgtcaatgtttgttgagtggaatattgaaaatgtaggcagcaactgggcatggtggctcactgtctgtaatgtattacctgaggcagaagaccacctgagggtaggagtcaagatcagcctgggcaacatagtgagacgctgtctctacaaaaaataattagcctggcctggtggtgcatgcctagtcctagctgatctggaggctgacgtgggaggattgcttgagcctagagtgagctattatcatgccactgtacagcctgggtgttcacagatcttgtgtctcaaaggtaggcagaggcaggaaaagcaaggagccagaattaagaggttgggtcagtctgcagtgagttcatgcatttagaggtgttcttcaagatgactaatgtcaaaaattgagacatctgttgcggttttttttttttttttttcccctggaatgcagtggcgtgatctcagctcactgcagcctccgcctcctgggttcaagtgattctagtgcctcagcctcctgagtagctgggataatgggcgtgtgccaccatgcccagctaatttttgtatttttagtatagatggggtttcatcattttgaccaggctggtctcaaactcttgacctcagctgatgcgcctgccttggcctcccaaactgctgagattacagatgtgagccaccgcaccctacctcattttctgtaacaaagctaagcttgaacactgttgatgttcttgagggaagcatattgggctttaggctgtaggtcaagtttatacatcttaattatggtggaattcctatgtagagtctaaaaagccaggtacttggtgctacagtcagtctccctgcagagggttaaggcgcagactacctgcagtgaggaggtactgcttgtagcatatagagcctctccctagctttggttatggaggctttgaggttttgcaaacctgaccaatttaagccataagatctggtcaaagggatacccttcccactaaggacttggtttctcaggaaattatatgtacagtgcttgctggcagttagatgtcaggacaatctaagctgagaaaaccccttctctgcccaccttaacagacctctagggttcttaacccagcaatcaagtttgcctatcctagaggtggcggatttgatcatttggtgtgttgggcaatttttgttttactgtctggttccttctgcgtgaattaccaccaccaccacttgtgcatctcagtcttgtgtgttgtctggttacgtattccctgggtgataccattcaatgtcttaatgtacttgtggctcagacctgagtgcaaggtggaaataaacatcaaacatcttttcatta

SEQ ID NO: 4989 - DNA, 2690 bp, Homo Sapiens
  NM_021131
cattgagacctgtggaggaggaaggaggaggtcaccgtccagctgtctctcccctgtccccacatgtcttctaagctgttggagccggccggcgctcacttgtcttcaggaagctcggagcctttggtggagccggggagaggaagggtgggtgcaagagtgaaaggcgagaggggactgcaagcatccgggtcggctcctggccggagcaagatggctgagggcgagcggcagccgccgccagattcttcagaggaggcccctccagccactcagaacttcatcattccaaaaaaggagatccacacagttccagacatgggcaaatggaagcgttctcaggcatacgctgactacatcggattcatccttaccctcaacgaaggtgtgaaggggaagaagctgaccttcgagtacagagtctccgaggccattgagaaactagtcgctcttctcaacacgctggacaggtggattgatgagactcctccagtggaccagccctctcggtttgggaataaggcatacaggacctggtatgccaaacttgatgaggaagcagaaaacttggtggccacagtggtccctacccatctggcagctgctgtgcctgaggtggctgtttacctaaaggagtcagtggggaactccacgcgcattgactacggcacagggcatgaggcagccttcgctgctttcctctgctgtctctgcaagattggggtgctccgggtggatgaccaaatagctattgtcttcaaggtgttcaatcggtaccttgaggttatgcggaaactccagaaaacatacaggatggagccagccggcagccagggagtgtggggtctggatgacttccagtttctgcccttcatctggggcagttcgcagctgatagaccacccatacctggagcccagacactttgtggatgagaaggccgtgaatgagaaccacaaggactacatgttcctggagtgtatcctgtttattaccgagatgaagactggcccatttgcagagcactccaaccagctgtggaacatcagcgccgtcccttcctggtccaaagtgaaccagggtctcatccgcatgtataaggccgagtgcctggagaagttccctgtgatccagcacttcaagttcgggagcctgctgcccatccatcctgtcacgtcgggctaggaggggccaagccgaagagccacccaggccacagttcctgtgcctgccttccccaccccagcagtggcccctccccatcccctccctctgttcgtcccgtttgatgagaggctgtttactggggtggggtggcgagatgggcttgagggggctcagagcataaggcttcagggcccaagttgggagaagtgaccaaagtgtagccagttttctgagttcccgtgtgctagactggccagaagagagggtctggggcctggtcactcggccactctctcctgtttctggcctcttctcccttcactcccgtccagtctggttttgagagcaggggctgttctgcagcaccgcagggaagggaggagagatacctgctgcttccattgcttttcccttcctggagtcgatgcctttctaagggttggagctgctccttgcaggggcgggtcagtttcccaggccatgccggggtggccatctatggtagggctggaagctgaggctggccgccagctgtgggctggggtggggtgggtggggtcgggtggtggagaggccttagctgtcctggctggtgcccctcccaggctccttttcaccctgccccctgggcctgaggccccctgtgtccaagcctccccctggctcttcagttctctagcccttggctctgctgggtttcctgactgtagccacatctctcccgctccctaagggtaacctagccaatggaagctgccctttgggtaggtgctgggctcctgggagggcccagatgatggggtgaggcatgtctttccagaactttccctggcagggaggggatggcagaaactcagggaggggcttggggcccattgtatctggagagcctggattcctcttggcagtcttaggcccggccacttctgctacctttgcgctgctgtgagcctcaccctgggcccctgggccctgcttctctgctcccctgggtgatgggtgggcccagaaggtggcagtcccacaccttgtcctcccacctccctgaactgtccattgcttttatagggtgaggtaagagacagcctcccaagcccaggctttggcactcagaatgggcccagtgggggctgggcaggcccattgagggccaccgccgaggtttctcctagggctgttcctgggcctggctcttacaggctcgtcccccaggcctgcccttctccactgccccctcctgtgtctgggtccacacacccttcaggaagggggagcactgagaagcacagcacaggggctcagcctgggatccggtgatggtctgggcagaggctgggtcaggagtcccaaaggtcagtgacagtttctcagaagaggcccagcgtccacctctctcccagggccagacagcccttcctggctcccccatccccctatgggctcccagccccttgcaccctcattgctgttcagattaaagcctctgttttgcacctgtcaaaaaaaaaaaaaaaaaaaaaaaa

SEQ ID NO: 4990 - DNA, 3164 bp, Homo Sapiens
  NM_021132
atgccggtcttagcccctctgtagggaaagagggtccgccatgttccccggcggcgccgccgcttggctctggtagccgccgcccccgcccccaaccccgcccggcccagagcctagccgagccccgggcccagcatggccgccccggagccggcccgggctgcaccgcccccacccccgcccccgccgccccctcccggggctgaccgcgtcgtcaaagctgtccctttccccccaacacatcgcttgacatctgaagaagtatttgatttggatgggatacccagggttgatgttctgaagaaccacttggtgaaagaaggtcgagtagatgaagaaattgcgcttagaattatcaatgagggtgctgccatccttcggagagagaaaaccatgatagaagtagaagctccaatcacagtgtgtggtgacatccatggccaattttttgatctgatgaaactttttgaagtaggaggatcacctgctaatacacgatacctttttcttggcgattatgtggacagaggttattttagtatagagtgtgtcttatatttatgggttctgaagattctatacccaagcacattatttcttctgagaggcaaccatgaatgcagacaccttactgaatattttacctttaagcaggaatgtaaaattaagtattcggaaagagtctatgaagcttgtatggaagcttttgatagtttgcctcttgctgcacttttaaaccaacagtttctttgtgttcatggtggactttcaccagaaatacacacactggatgatattaggagattagatagattcaaagagccacctgcatttggaccaatgtgtgacttgttatggtccgatccttctgaagattttggaaatgaaaaatcacaggaacattttagtcacaatacagttcgaggatgttcttatttttataactatccagcagtgtgtgaatttttgcaaaacaataatttgttatcgattattagagctcatgaagctcaagatgcaggctatagaatgtacagaaaaagtcaaactacagggttcccttcattaataacaattttttcggcacctaattacttagatgtctacaataataaagctgctgtattaaagtatgaaaataatgtgatgaatattcgacagtttaactgttctccacatccttactggttgcctaattttatggatgtcttcacgtggtctttaccgtttgttggagaaaaagtgacagaaatgttggtaaatgttctgagtatttgctctgatgatgaactaatgactgaaggtgaagaccagtttgatggttcagctgcagcccggaaagaaatcataagaaacaaaattcgagcaattggcaagatggcaagagtcttctctgttctcagggaggagagtgaaagtgtgctgacactcaagggcctgactcccacagggatgttgcctagtggagtgttagctggaggacggcagaccctgcaaagtgccacagttgaggctattgaggctgaaaaagcaatacgaggattctctccaccacatagaatctgcagttttgaagaggcaaagggtttggataggatcaatgagagaatgccacctcggaaagatgctgtacagcaagatggtttcaattctctgaacaccgcacatgccactgagaaccacgggacgggcaaccatactgcccagtgacccactacttcccagggactctcacatctcgggccccaaatggacagatcacccgaggagctggaggggtcggccaagctgactgtaaatttcacagtctctctgaagaaaccattgtgcttctgagaccctagcccccttcctggatggaggcttgagggccctgggacatgtgctatctgataagattgggtcatcgctgccaaggtggagagcagtgagcaaggggcttggggcaatttccagtggagggcatccacacctccattttatgcttgtggttcacacatttaagtttacaaatcagatttcttttccccttcagtagaattagattttgtttttcaatcatgatttcaaatgcaatcctaagagctaatgtggacttttctttttccatgaaatgtctttaaaggatgaattagcatggtcttaaaatacatttctgaggttactagctgtattttgaattgtgagcaaaatgccgagaaacccagttggcatttatacaaaatgttgacctcaggtctatagttcttaaatgtggctaattctgtaacatagtcttggtattttttaattatgaatgcatatcctatttccaggcaggctctcttacttgaacacaaatccaaaaactaatttagagtcttttttgcccagatcttttaagacttacaccccagagatttaagaagaaaacctctaaatttcaaaattatgaagaattacagaattactcatttaaggtactttaaaagaagtttgtacattgtcaaagtaaattttaattcaaatcatgtctgtaaaacttgacgtattttgtgtatgcatgttttcattttgcaaatatttaatatatagacctatgatgtacaggtacgacatgtataggttacctagatgttatgagaaattttagtttattgtgagtactcaagttgcttagagagccaccagggtgatttgctgctggctttctatcatttttatgttttaatgcaaaggaaattttaaaatgttctggaagtgtttttgattaagcaatgcagcctagaagcaatggttctgttcaatcattcagatgttagtggaagcataaaagtcaagactgcatgttgaaacctttcttttgatagttactgaactgcttggttaaactaaatggaaccatgtgctaatttttcacaattattgacctgtattgattgccactgtagtttggtatttccctttactttggtggcctgcttccctcatgccctggaatacaactcagagctccaggcagcggaaccatctattgttttgtttgccagaaagtgcaccctgtatggtctcctgtctaagttggaaatattatgcatgtgcaggactattcgagtattttataaacagtagcacacaataaattccatgcatgggccgctgctcctaaaaaaaaaaaaaaaaaa

SEQ ID NO: 4991 - DNA, 4258 bp, Homo Sapiens
  NM_021133
agtgacgcagcaggaggaaactgctcgggctgcaagcagtcttccaggctttgcggctgccaaaggaataattgagacgtctgagttgagcaggtggaatgtcagaagactgagaacattgttccttcttcatactgctgctctgttgccagagaatcccaatttacactcaaagcttctttgattaagtgctaggagataaatttgcattttctcaaggaaaaggctaaaagtggtagcaggtggcatttaccgtcatggagagcagggatcataacaacccccaggagggacccacgtcctccagcggtagaagggctgcagtggaagacaatcacttgctgattaaagctgttcaaaacgaagatgttgacctggtccagcaattgctggaaggtggagccaatgttaatttccaggaagaggaagggggctggacacctctgcataacgcagtacaaatgagcagggaggacattgtggaacttctgcttcgtcatggtgctgaccctgttctgaggaagaagaatggggccacgccttttatcctcgcagcgattgcggggagcgtgaagctgctgaaacttttcctttctaaaggagcagatgtcaatgagtgtgatttttatggcttcacagccttcatggaagccgctgtgtatggtaaggtcaaagccctaaaattcctttataagagaggagcaaatgtgaatttgaggcgaaagacaaaggaggatcaagagcggctgaggaaaggaggggccacagctctcatggacgctgctgaaaaaggacacgtagaggtcttgaagattctccttgatgagatgggggcagatgtaaacgcctgtgacaatatgggcagaaatgccttgatccatgctctcctgagctctgacgatagtgatgtggaggctattacgcatctgctgctggaccatggggctgatgtcaatgtgaggggagaaagagggaagactcccctgatcctggcagtggagaagaagcacttgggtttggtgcagaggcttctggagcaagagcacatagagattaatgacacagacagtgatggcaaaacagcactgctgcttgctgttgaactcaaactgaagaaaatcgccgagttgctgtgcaaacgtggagccagtacagattgtggggatcttgttatgacagcgaggcggaattatgaccattcccttgtgaaggttcttctctctcatggagccaaagaagattttcaccctcctgctgaagactggaagcctcagagctcacactggggggcagccctgaaggatctccacagaatataccgccctatgattggcaaactcaagttctttattgatgaaaaatacaaaattgctgatacttcagaaggaggcatctacctggggttctatgagaagcaagaagtagctgtgaagacgttctgtgagggcagcccacgtgcacagcgggaagtctcttgtctgcaaagcagccgagagaacagtcacttggtgacattctatgggagtgagagccacaggggccacttgtttgtgtgtgtcaccctctgtgagcagactctggaagcgtgtttggatgtgcacagaggggaagatgtggaaaatgaggaagatgaatttgcccgaaatgtcctgtcatctatatttaaggctgttcaagaactacacttgtcctgtggatacacccaccaggatctgcaaccacaaaacatcttaatagattctaagaaagctgctcacctggcagattttgataagagcatcaagtgggctggagatccacaggaagtcaagagagatctagaggaccttggacggctggtcctctatgtggtaaagaagggaagcatctcatttgaggatctgaaagctcaaagtaatgaagaggtggttcaactttctccagatgaggaaactaaggacctcattcatcgtctcttccatcctggggaacatgtgagggactgtctgagtgacctgctgggtcatcccttcttttggacttgggagagccgctataggacgcttcggaatgtgggaaatgaatccgacatcaaaacacgaaaatctgaaagtgagatcctcagactactgcaacctgggccttctgaacattccaaaagttttgacaagtggacgactaagattaatgaatgtgttatgaaaaaaatgaataagttttatgaaaaaagaggcaatttctaccagaacactgtgggtgatctgctaaagttcatccggaatttgggagaacacattgatgaagaaaagcataaaaagatgaaattaaaaattggagacccttccctgtattttcagaagacatttccagatctggtgatctatgtctacacaaaactacagaacacagaatatagaaagcatttcccccaaacccacagtccaaacaagcctcagtgtgatggagctggtggggccagtgggttggccagccctgggtgctgatggactgatttgctggagttcagggaactacttattagctgtagagtccttggcaaatcacaacattctgggccttttaactcaccaggttgcttgtgagggatgagttgcatagctgatatgtcagtccctggcatcgtgtattccatatgtctataacaaaagcaatatatacccagactacactagtccataagctttacccactaactgggaggacattctgctaagattccttttgtcaattgcaccaaaagaatgagtgccttgacccctaatgctgcatatgttacaattctctcacttaattttcccaatgatcttgcaaaacagggattatcatccccatttaagaactgaggaacctgagactcagagagtgtgagctactggcccaagattattcaatttatacctagcactttataaatttatgtggtgttattggtacctctcatttgggcaccttaaaacttaactatccttccagggctcttccagatgaggcccaaaacatatataggggttccaggaatctcattcattcattcagtatttattgagcatctagtataagtctgggcactggatgcatgaattccactccttccagaaccaactgcattggttttccatgaccttaaggcagtagttctcaactggggggcaattttgcactgaagagagcatttggcagagtctgaagaagtttttggtgtcacagctttgtggggagcatgctatggcatttagtgggtaaagaccagggatgctgccaaacctgccttgcacaggacagcccctgcaacaaagaattatccagacaaaaatatcaatggtgctgaggttgagaaaacctgacttaaggggctgggatgcttttgaactagcttaaggcccaggactgtggagtgtgtggaccaccccacagaggagggactcagatttatttactcttgctggatctgtagtgatggagttccttctggtgtcagccccacaggaggctcccaggcctccctcacttcccatacccagtctaggagctccttctggctcccaagcacccagagctttcctccgccttttagttttggttcctccactggaatgtaggctcctcacgggcgatggctgtcttttcttgactttgtatcttcactgccaagcaaaaagtctgccaagtgggaatgtttaataaatattcattgaataatgaatgaaccatcttcgtacatgaataataatactgtcttacgtttttctggtgctttataatgtatacattacatctgagtattttattttatttaattttcaaaacaatcctttaaggtcaacattgttatccttattttgctgatgaggaaactaaggttagaaacattttgatttcctctaggacgtatagctaggaagtgttactatcttgatttgaacaaattttctggtgctaagtctgatgttctttccatgaatcattgtggtggttgagatggagctttgtaatgggaataaaacagtaccttaggttctttctgaaaaggaggtatctagcaatggataaatagataccactgaatgaaattaaatgttgattaggaacaaatttaaggcttaaaaaatactttatgagcagcaagattgctttaacttttaaaatgaagctttggttctctgatttgtaatgagcacctggatatgtcaattaaaatgcccatttgtgaagcttactcaataaaactttaaattgtcttaaaaaaaaaaaaaaaaaa

SEQ ID NO: 4992 - DNA, 3327 bp, Homo Sapiens
  NM_021136
ggaagaggaggggggagaaggaggagctgaagcgggaagagcggcaggcagcggctcggcggagttgcagcagaggcggcggcgacgctgagacaccgcagcttccctgagcgccgagtccctccggggacagcagcagggagcgcccgcgcagccaccgagcctctgcccagccaagccgccgtcgccgcgccgggggaccgccagccatggccgcgccgggggatccgcaggacgagctgctgccgctggccggccccgggtcccagtggctcaggcaccggggggagggggagaacgaagcggtgacgccgaaaggggccacgccggcgccgcaggctggggagcccagcccggggttgggcgccagggcccgggaagcggcgtcgcgggaagccggctcgggccccgcccggcagtcgcccgttgccatggaaactgcatccacaggtgtggcaggtgtttccagtgccatggaccacaccttctcaacaacatcaaaagatggggaaggatcgtgttacacatctctcatttctgacatctgctatccacctcaggaggattctacatattttactggaattcttcagaaggaaaatggccacgtcaccatttcagagagccctgaggagctgggtacacccggcccctccttaccagatgtgcctgggatagagtctcgtggcttatttagttctgattctggaatagagatgactcctgcagagtccacggaagtgaacaagatcttagcagaccctctggaccagatgaaagcagaggcctataaatacattgacataaccagacccgaggaggtgaagcaccaagaacaacatcaccccgagctggaagataaagacttggactttaagaataaagacactgacatctcaattaaacctgaaggagtccgtgaacctgacaaaccagctcctgtggagggaaaaatcatcaaggaccatttattggaagaatccacatttgctccatacatagatgatctctctgaagaacagcgcagggctcctcagatcaccacccctgtcaaaatcacactgacggaaatagaaccttctgttgaaaccactacccaagagaagacccctgagaagcaagatatatgtctaaagccaagtcctgacacagtccccactgtcactgtctcggagcctgaagacgacagcccaggatctatcacccctccatcttctggaacagaaccatctgctgcagaatcccaggggaaaggcagcatctccgaggatgagctgatcaccgccatcaaagaagcaaagggattatcgtatgaaaccgccgagaacccacggccggtgggccagctggccgacaggcccgaggtcaaggccaggtccggaccgccaaccatccccagccccctggaccacgaggccagcagcgcggagtcgggggactcagagatcgagctggtgtccgaggaccccatggccgcggaggacgcgctgccctcaggctatgtgagctttggccacgtgggcggcccgccgccctcgcccgcctcgccatccatccagtacagcatcctgagggaggagcgcgaggccgagctggacagcgagctcatcatcgagtcgtgcgacgcctcctcggcctcggaggagagccccaagcgggagcaggactcacccccgatgaagcccagcgccctggatgccatccgggaggagactggcgtccgggccgaggagcgtgcgccaagccggcggggcctggccgagccgggttccttcctcgactacccctcaactgagccccagcctggccccgagctgccccctggagacggagccctggagcctgagacgcccatgttgccacggaagcctgaagaagactcgagttccaaccaaagtcctgcggccacaaagggccctgggcctctaggtcctggcgccccgcccccactgctgtttctcaataagcaaaaagctattgacctgttgtattggcgggacatcaagcagacgggcatcgtgtttgggagtttcctgctgctgctcttctccctgacccagttcagcgtggtgagcgtcgtggcctacctggccctggccgcactctcagccaccatcagtttccgcatctacaagtctgttttacaagcagtgcagaaaaccgacgaaggccaccctttcaaggcctacttggagcttgagatcaccctttctcaggagcagattcagaagtacacggactgcctgcagttctacgtgaacagcacacttaaggaactgaggaggctcttccttgtccaggacctggtggattccttaaaatttgcagtcctgatgtggctcctgacctacgttggcgctctcttcaatggcctgaccctgctgctcatggctgtggtttcaatgtttactctacctgtagtgtatgttaagcaccaggcacagattgaccaatatctgggacttgtgaggactcacataaatgctgttgtggcaaagattcaggctaaaatcccaggcgctaagaggcacgctgagtaaactgatttcccaccggggactggacacaaacaggaatgtctggagtggtaacagctctcttcttactcattactgcaaattgattgtctttcccccctccctccagtaccataatcttagagacaaaccttaaaacagctgtttttaggctgttccttgtactcttaggatatttgagtcacttgtgtcaaccactaaagtatagagaaaagtgtattagatgtggtttttaattttgtgttgctaaaaaaagtgcatgatggtgagagcccaagttatctttccctcttcggtgttcttcttctcttctctgcaatgcttctgtagcttctaatgttccccgtggctaggcctttcctgccgagtgctctgatgcaatagtggaaatcgcttatatgtccttgggttgctggttggattaatctttaataacaatatatagaattgtagactgatgttttagcatttttccaacacacacaacgtaaaaataaaagcagtcgaccgcacttatggtaatcagttttgtataacttaaaataattaaataaatgaataaatccaaaacaaacatgcagtacttttgttgtatgggattggtgggctgatttacatgtatggttactaaaaagtaccagcatgttaactttattacaatttgtattactttctctgtagttcctaatggattcaattacggactctggatatttgcacttatgtacttgatactgaatgcataaataaatgttactaaatgtagaatgttaaaaaaaaaaaaaaaaaa

SEQ ID NO: 4993 - DNA, 2298 bp, Homo Sapiens
  NM_021138
cttagttccgggcgcgctgcgaccgttggggctttgttcgcgggggtcacagctctcatggctgcagctagcgtgaccccccctggctccctggagttgctacagcccggcttctccaagaccctcctggggaccaagctggaagccaagtacctgtgctccgcctgcagaaacgtcctccgcaggcccttccaggcgcagtgtggccaccggtactgctccttctgcctggccagcatcctcagctctgggcctcagaactgtgctgcctgtgttcacgagggcatatatgaagaaggcatttctattttagaaagcagttcggccttcccagataatgctgcccgcagggaggtggagagcctgccggccgtctgtcccagtgatggatgcacctggaaggggaccctgaaagaatacgagagctgccacgaaggccgctgcccgctcatgctgaccgaatgtcccgcgtgcaaaggcctggtccgccttggtgaaaaggagcgccacctggagcacgagtgcccggagagaagcctgagctgccggcattgccgggcaccctgctgcggagcagacgtgaaggcgcaccacgaggtctgccccaagttccccttaacttgtgacggctgcggcaagaagaagatcccccgggagaagtttcaggaccacgtcaagacttgtggcaagtgtcgagtcccttgcagattccacgccatcggctgcctcgagacggtagagggtgagaaacagcaggagcacgaggtgcagtggctgcgggagcacctggccatgctactgagctcggtgctggaggcaaagcccctcttgggagaccagagccacgcggggtcagagctcctgcagaggtgcgagagcctggagaagaagacggccacttttgagaacattgtctgcgtcctgaaccgggaggtggagagggtggccatgactgccgaggcctgcagccggcagcaccggctggaccaagacaagattgaagccctgagtagcaaggtgcagcagctggagaggagcattggcctcaaggacctggcgatggctgacttggagcagaaggtcttggagatggaggcatccacctacgatggggtcttcatctggaagatctcagacttcgccaggaagcgccaggaagctgtggctggccgcatacccgccatcttctccccagccttctacaccagcaggtacggctacaagatgtgtctgcgtatctacctgaacggcgacggcaccgggcgaggaacacacctgtccctcttctttgtggtgatgaagggcccgaatgacgccctgctgcggtggcccttcaaccagaaggtgaccttaatgctgctcgaccagaataaccgggagcacgtgattgacgccttcaggcccgacgtgacttcatcctcttttcagaggccagtcaacgacatgaacatcgcaagcggctgccccctcttctgccccgtctccaagatggaggcaaagaattcctacgtgcgggacgatgccatcttcatcaaggccattgtggacctgacagggctctaactgccccctactggtgtctgggggttgggggcagccaggcacagccggctcacggaggggccaccacgctgggccagggtctcactgtacaagtgggcaggggccgcgcttgggcgcttgggagggtgtcggcctgcagccaagttcactgtcacgggggaaggagccaccagccagtcctcagatttcagagactgcggaggggcttggcagacggtcttagccaagggctgtggtggcattggccgagggtcttcgggtgcttcccagcacaagctgcccttgctgtcctgtgcagtgaagggagaggccctgggtgggggacactcagagtgggagcacatcccagcagtgcccatgtagcaggagcacagtggatggccttgtgtccctcgggcatgacaggcagaaacgagggctgctccaggagaagggcctcctgctggccagagcaaggaaggctgagcagcttggttctcccctctggcccctggagagaagggagcattcctagacccctgggtgcttgtctgcacagagctctggtctgtgccaccttggccaggctggctgtgggagagggtctggtcccacgccgcctctgctcagaccactgtgtgggaggtgcacagcacagcctgcgggtaaagtgtgagagcttgccatccagctcacgaagacagagttattaaaccattcaaatctctgtggtcaaaaaaaaaaaaaaaaaaaaaa

SEQ ID NO: 4994 - DNA, 3448 bp, Homo Sapiens
  NM_021141
acggtttccccgcccctttcaggcctagcaggaaacgaagcggctctttccgctatctgccgcttgtccaccggaagcgagttgcgacacggcaggttcccgcccggaagaagcgaccaaagcgcctgaggaccggcaacatggtgcggtcggggaataaggcagctgttgtgctgtgtatggacgtgggctttaccatgagtaactccattcctggtatagaatccccatttgaacaagcaaagaaggtgataaccatgtttgtacagcgacaggtgtttgctgagaacaaggatgagattgctttagtcctgtttggtacagatggcactgacaatcccctttctggtggggatcagtatcagaacatcacagtgcacagacatctgatgctaccagattttgatttgctggaggacattgaaagcaaaatccaaccaggttctcaacaggctgacttcctggatgcactaatcgtgagcatggatgtgattcaacatgaaacaataggaaagaagtttgagaagaggcatattgaaatattcactgacctcagcagccgattcagcaaaagtcagctggatattataattcatagcttgaagaaatgtgacatctccctgcaattcttcttgcctttctcacttggcaaggaagatggaagtggggacagaggagatggcccctttcgcttaggtggccatgggccttcctttccactaaaaggaattaccgaacagcaaaaagaaggtcttgagatagtgaaaatggtgatgatatctttagaaggtgaagatgggttggatgaaatttattcattcagtgagagtctgagaaaactgtgcgtcttcaagaaaattgagaggcattccattcactggccctgccgactgaccattggctccaatttgtctataaggattgcagcctataaatcgattctacaggagagagttaaaaagacttggacagttgtggatgcaaaaaccctaaaaaaagaagatatacaaaaagaaacagtttattgcttaaatgatgatgatgaaactgaagttttaaaagaggatattattcaagggttccgctatggaagtgatatagttcctttctctaaagtggatgaggaacaaatgaaatataaatcggaggggaagtgcttctctgttttgggattttgtaaatcttctcaggttcagagaagattcttcatgggaaatcaagttctaaaggtctttgcagcaagagatgatgaggcagctgcagttgcactttcctccctgattcatgctttggatgacttagacatggtggccatagttcgatatgcttatgacaaaagagctaatcctcaagtcggcgtggcttttcctcatatcaagcataactatgagtgtttagtgtatgtgcagctgcctttcatggaagacttgcggcaatacatgttttcatccttgaaaaacagtaagaaatatgctcccaccgaggcacagttgaatgctgttgatgctttgattgactccatgagcttggcaaagaaagatgagaagacagacacccttgaagacttgtttccaaccaccaaaatcccaaatcctcgatttcagagattatttcagtgtctgctgcacagagctttacatccccgggagcctctacccccaattcagcagcatatttggaatatgctgaatcctcccgctgaggtgacaacaaaaagtcagattcctctctctaaaataaagaccctttttcctctgattgaagccaagaaaaaggatcaagtgactgctcaggaaattttccaagacaaccatgaagatggacctacagctaaaaaattaaagactgagcaagggggagcccacttcagcgtctccagtctggctgaaggcagtgtcacctctgttggaagtgtgaatcctgctgaaaacttccgtgttctagtgaaacagaagaaggccagctttgaggaagcgagtaaccagctcataaatcacatcgaacagtttttggatactaatgaaacaccgtattttatgaagagcatagactgcatccgagccttccgggaagaagccattaagttttcagaagagcagcgctttaacaacttcctgaaagcccttcaagagaaagtggaaattaaacaattaaatcatttctgggaaattgttgtccaggatggaattactctgatcaccaaagaggaagcctctggaagttctgtcacagctgaggaagccaaaaagtttctggcccccaaagacaaaccaagtggagacacagcagctgtatttgaagaaggtggtgatgtggacgatttattggacatgatataggtcgtggatgtatggggaatctaagagagctgccatcgctgtgatgctgggagttctaacaaaacaagttggatgcggccattcaaggggagccaaaatctcaagaaattcccagcaggttacctggaggcggatcatctaattctctgtggaatgaatacacacatatatattacaagggataatttagaccccatacaagtttataaagagtcattgttattttctggttggtgtattattttttctgtggtcttactgatctttgtatattacatacatgctttgaagtttctggaaagtagatcttttcttgacctagtatatcagtgacagttgcagcccttgtgatgtgattagtgtctcatgtggaaccatggcatggttattgatgagtttcttaaccctttccagagtcctcctttgcctgatcctccaacagctgtcacaacttgtgttgagcaagcagtagcatttgcttcctcccaacaagcagctgggttaggaaaaccatgggtaaggacggactcacttctctttttagttgaggccttctagttaccacattactctgcctctgtatataggtggttttctttaagtggggtgggaaggggagcacaatttcccttcatactccttttaagcagtgagttatggtggtggtctcatgaagaaaagaccttttggcccaatctctgccatatcagtgaacctttagaaactcaaaaactgagaaatttactacagtagttagaattatatcacttcactgttctctacttgcaagcctcaaagagagaaagtttcgttatattaaaacacttaggtaacttttcggtctttcccatttctacctaagtcagctttcatctttgtggatggtgtctcctttactaaataagaaaataacaaagcccttattctctttttttcttgtcctcattcttgccttgagttccagttcctctttggtgtacagacttcttggtacccagtcacctctgtcttcagcaccctcataagtcgtcactaatacacagttttgtacatgtaacattaaaggcataaatgactcatctctctgtgaaaaaaaaaaaaaaaaaaaa

SEQ ID NO: 4995 - DNA, 1850 bp, Homo Sapiens
  NM_021149
cgcgctcgcagctcgcaggcgccgcgtagccgtcgccaccgccgccagcccgtgcgccctcggcgcgtacccgccgcgctcccatccccgccgccggccaggggcgcgctcggccgccccggacagtgtcccgctgcggctccgcggcgatggccaccaagatcgacaaagaggcttgccgggcggcgtacaacctggtgcgcgacgacggctcggccgtcatctgggtgacttttaaatatgacggctccaccatcgtccccggcgagcagggagcggagtaccagcacttcatccagcagtgcacagatgacgtccggttgtttgccttcgtgcgcttcaccaccggggatgccatgagcaagaggtccaagtttgccctcatcacgtggatcggtgagaacgtcagcgggctgcagcgcgccaaaaccgggacggacaagaccctggtgaaggaggtcgtacagaatttcgctaaggagtttgtgatcagtgatcggaaggagctggaggaagatttcatcaagagcgagctgaagaaggcggggggagccaattacgacgcccagacggagtaaccccagcccccgccacaccaccccttgccaaagtcatctgcctgctccccgggggagaggaccgccggcctcagctactagcccaccagcccaccagggagaaaagaagccatgagaggcagcgcccgccaccctgtgtccacagcccccaccttcccgcttcccttagaaccctgccgtgtcctatctcatgacgctcatggaacctctttctttgatcttctttttcttttctccccctcttttttgttctaaagaaaagtcattttgatgcaaggtcctgcctgccatcagatccgaggtgcctcctgcagtgaccccttttcctggcatttctcttccacgcgacgaggtctgcctagtgagatctgcatgacctcacgttgctttccagagcccgggcctattttgccatctcagttttcctggaccctgcttcctgtgtaccactgaggggcagctgggccaggagctgtgcccggtgcctgcagccttcataagcacacacgtccattccctactaaggcccagacctcctggtatctgccccgggctccctcatcccacctccatccggagttgcctaagatgcatgtccagcataggcaggattgctcggtggtgagaaggttaggtccggctcagactgaataagaagagataaaatttgccttaaaacttacctggcagtggctttgctgcacggtctgaaaccacctgttcccaccctcttgaccgaaatttccttgtgacacagagaagggcaaaggtctgagcccagagttgacggagggagtatttcagggttcacttcaggggctcccaaagcgacaagatcgttagggagagaggcccagggtggggactgggaatttaaggagagctgggaacggatcccttaggttcaggaagcttctgtgtaagctgcgaggatggcttgggccgaagggttgctctgcccgccgcgctagctgtgagctgagcaaagccctgggctcacagcaccccaaaagcctgtggcttcagtcctgcgtctgcaccacacattcaaaaggatcgttttgttttgtttttaaagaaaggtgagattggcttggttcttcatgagcacatttgatatagctctttttctgtttttccttgctcatttcgttttggggaagaaatctgtactgtattgggattgtaaagaacatctctgcactcagacagtttacagaaataaatgttttttttgtttttcagaaaaaaaaaaaaaaaaaaaaaaaaaaa

SEQ ID NO: 4996 - DNA, 3258 bp, Homo Sapiens
  NM_021151
gaatgcggggcgggaccctagcggccttcagtccaattcccgcacctttgaggcccaagggggagcgagccggtgctgctgcaggctgaggctgcggcagaggcggcgaggcgcgggcggtgaggacggacagtcaccgacttagtccagttccctgtgatctcaaaacaattgttgcagcaggctcctggcagtctcaagcagttcatcttcttggtgtactggtttcctattgtgattttatcatggaaaatcaattggctaaatcaactgaagaacgaacatttcagtaccaggattctcttccatcactgcctgttccttcacttgaagaatcattaaaaaaataccttgaatcagtgaaaccatttgcaaatcaagaagaatataagaaaactgaagaaatagttcaaaaatttcaaagtgggattggagaaaaattgcaccagaaattgcttgaaagagcaaaaggaaaaagaaattggctggaagagtggtggctgaatgttgcctatctggatgttcgtataccatcacaattgaatgtcaactttgcgggtcctgcagctcattttgaacactactggcctccaaaggaagggactcaattagaaagaggaagtataactctttggcataacttgaactactggcagctattaagaaaagaaaaagtgcctgttcataaagttggaaatactcctctagatatgaatcaattccgaatgctattttctacctgcaaggttccaggaattactagagactccattatgaattattttaggactgagagtgaagggcgttccccaaaccacattgtagtgctgtgtcgaggccgagcttttgtctttgatgtaatacatgaaggatgtttggtcaccccgccagagcttctcagacaactgacatatatccacaagaagtgccatagtgaacctgatggacctgggattgcagcattaactagtgaggagcgaactcgatgggctaaggcacgagaatatctgattggtcttgatccagagaacttggctttgttagaaaaaattcagagtagtttactggtatattccatggaggatagcagtccacatgtaacaccagaggattattctgagattattgcagccatccttattggagatccaacagtacgctggggtgacaaatcctataacttgatttccttttctaatggagtatttggctgtaattgtgatcatgctccttttgatgcaatgattatggtgaacatcagttattatgtggatgagaaaatttttcagaatgaaggaagatggaagggttcagagaaggtacgagatataccacttccagaagagctcattttcattgtggatgagaaagttttaaatgacatcaaccaagctaaagcccagtatctcagggaggcatctgatctacagattgcggcttatgcctttacatcttttggcaaaaagctaaccaagaacaagatgcttcacccggatacgtttattcagcttgcacttcagctggcctattacagacttcatggacaccctggttgttgctatgaaacagctatgacaagacatttttatcatggccgtacagagactatgcgatcatgcacagttgaagcagtgaggtggtgccagtccatgcaggatccttctgtcaatcttcgtgagcggcagcaaaagatgttacaagcttttgcaaagcataataaaatgatgaaagattgttcagctggaaaaggatttgatcgtcaccttttaggtctcttactcatagcaaaagaggaaggtcttcctgttccagaactctttacggacccacttttttccaaaagcggaggaggtggaaattttgttctctcaacaagtctggttggctatttacgagtccagggagtggtagttcccatggtacacaatggttatggatttttctaccatatcagagatgacaggtttgttgtggcctgttcagcctggaaatcctgtcccgagactgatgcggaaaagctagttcagctgactttttgtgcttttcatgatatgatacagctgatgaactctactcatctttagagatgaatcatctattaagcacttaccaaaacatatcattaaactgagtgctgggagtgagttggtaatatgagatgggaaggaatgttgacttgctaacattcctttaacaagttaagaaaacttgttaaatgtagaaattagtagaatcatgctctctaaatttattctgccatagaaggtagaaatatttttaagctcctctgatgcagcagcaatgcaaattatgacatagtgaatatagaactatgcagtatttaagcctcaacaatccaaatctacaaactttaacaatgcaagtcttactctaatttttaagtatttttgttggtacttacatgggttataaatcctctctctggacatcaatgtagagtccatctttcaagcactttaatttttttagctgccaaagggtatgaattacattattgtatgctaatttccctgaaatcaatgccttctatgttcaccacagggatacaagcctgttatgtttgatgggaaagaccactacaatctaatggtgatctaaaataacttttttgggctgggtgcagtggctcatgcctataatcttagcactttgggaggccaaggtaggaggattgcttgaagctaggagtttgagaccagcctgggcaacagggtaaggtcctgtctctacaagatcaaaaacttagccgggtatggtggtgcatgtgtgcctgtagtccaagctacttgaaggctgagacaggaggatcggttgagcccaggaggttgtggctgcagtgagctgtgatgtgcccttatgctatagcctgggcaagagcgtgagaccctgtctcaaagaagaaaaaaagagaaaaataactcttttgaacaaacagacaaattagctagtagtatggagatgtataccctctattacacacataaaaccgtaacaaaattcattgtggtgtattataattagttttgtgaatagaaaaataaagcacttatgtttaaatttgttacagtgacttttaaaggattaatgttgaatcacattgtcagaattttttcctcctcgctgttcaattttgtagtttttactctcaaaaaatgaaattctcaaaattatatagctttttgttttgtttgaataaatgattcattcctgtttgcaaaaaaaaaaaaaaaaaaaaaa

SEQ ID NO: 4997 - DNA, 2083 bp, Homo Sapiens
  NM_021154
ggccaggaacgccagccgttcacgcgttcggtcctccttggctgactcaccgccctggccgccgcaccatggacgcccccaggcaggtggtcaactttgggcctggtcccgccaagctgccgcactcagtgttgttagagatacaaaaggaattattagactacaaaggagttggcattagtgttcttgaaatgagtcacaggtcatcagattttgccaagattattaacaatacagagaatcttgtgcgggaattgctagctgttccagacaactataaggtgatttttctgcaaggaggtgggtgcggccagttcagtgctgtccccttaaacctcattggcttgaaagcaggaaggtgtgctgactatgtggtgacaggagcttggtcagctaaggccgcagaagaagccaagaagtttgggactataaatatcgttcaccctaaacttgggagttatacaaaaattccagatccaagcacctggaacctcaacccagatgcctcctacgtgtattattgcgcaaatgagacggtgcatggtgtggagtttgactttatacccgatgtcaagggagcagtactggtttgtgacatgtcctcaaacttcctgtccaagccagtggatgtttccaagtttggtgtgatttttgctggtgcccagaagaatgttggctctgctggggtcaccgtggtgattgtccgtgatgacctgctggggtttgccctccgagagtgcccctcggtcctggaatacaaggtgcaggctggaaacagctccttgtacaacacgcctccatgtttcagcatctacgtcatgggcttggttctggagtggattaaaaacaatggaggtgccgcggccatggagaagcttagctccatcaaatctcaaacaatttatgagattattgataattctcaaggattctacgtgtctgtgggaggcatccgggcctctctgtataatgctgtcacaattgaagacgttcagaagctggccgccttcatgaaaaaatttttggagatgcatcagctatgaacacatcctaaccaggatatactctgttcttgaacaacatacaaagtttaaagtaacttggggatggctacaaaaagttaacacagtatttttctcaaatgaacatgtttattgcagattcttcttttttgaaagaacaacagcaaaacatccacaactctgtaaagctggtgggacctaatgtcaccttaattctgacttgaactggaagcattttaagaaatcttgttgcttttctaacaaattcccgcgtattttgcctttgctgctactttttctagttagatttcaaacttgcctgtggacttaataatgcaagttgcgattaattatttctggagtcatgggaacacacagcacagagggtaggggggccctctaggtgctgaatctacacatctgtggggtctcctgggttcagcggctgttgattcaaggtcaacattgaccattggaggagtggtttaagagtgccaggcgaagggcaaactgtagatcgatctttatgctgttattacaggagaagtgacatactttatatatgtttatattagcaaggtctgtttttaataccatatactttatatttctatacatttatatttctaataatacagttatcactgatatatgtagacacttttagaatttattaaatccttgaccttgtgcattatagcattccattagcaagagttgtaccccctccccagtcttcgccttcctctttttaagctgttttatgaaaaagacctagaagttcttgattcatttttaccattctttccataggtagaagagaaagttgattggttggttgtttttcaattatgccattaaactaaacatttctgttaaattaccctatcctttgttctctactgttttctttgtaatgtatgactacgagagtgatactttgctgaaaagtctttcccctattgtttatctattgtcagtattttatgttgaatatgtaaagaacattaaagtcctaaaacatctaaaaaaaaaaaaaaaaaaaaaaaaaaaaaaaaaaa

SEQ ID NO: 4998 - DNA, 3767 bp, Homo Sapiens
  NM_021159
cccccgccgctcgtccccgccgcggccgcgccgcctgcagcagcaccagctgctcctccccggcggccgccccccgcgggtccctccctggctgcgggagagacggaggtagagggaggacacagagccgcgccgcccgcaccacagaccttcgcctcgccccgccggttcctcaccctcggggagcaacatggcagataatctcagtgataccttgaagaagctgaagataacagctgttgacaagactgaggatagtttagaaggatgcttggattgtctgcttcaagccctggctcaaaataatacggaaacaagtgaaaaaatccaagcaagtggaatacttcagctgtttgcaagtctgttgactccacagtcttcctgcaaagccaaagtagctaacatcatagcagaagtagccaaaaatgagtttatgcgaattccatgtgtggatgctggattgatttcaccactggtgcagctgctaaatagcaaagaccaggaagtgctgcttcaaacgggcagggctctaggaaacatatgttacgatagccatgagggcagaagtgcagttgaccaagcaggtggtgcacagattgtaattgaccatttaaggtcactgtgcagtataacagatcccgccaatgagaagctcttgactgtcttttgtggcatgctgatgaactatagcaatgagaatgattcgcttcaagctcagcttatcaatatgggtgttattcctaccttagtgaaattactgggcatccactgccaaaatgcagctcttacagaaatgtgtcttgttgcatttggtaatttagcagaacttgagtcaagtaaagaacagtttgccagtacaaacattgctgaagagctagtaaaactcttcaagaaacaaatagaacatgataagagagaaatgatttttgaagttcttgctccattggcagaaaatgatgctattaaactacagctggttgaagcaggcctagtagagtgtctactagagattgttcagcaaaaagtggatagtgacaaagaagatgatattactgagctcaaaactggttcagatctcatggttttattacttcttggagatgaatccatgcagaagttatttgaaggaggaaaaggtagtgtatttcaaagggtactctcttggatcccatcaaataaccaccagctacagcttgctggagcattggcaattgcaaattttgccagaaatgatgcaaattgtattcatatggtagacaatgggattgtagaaaaacttatggatttactggacagacatgtagaagatggaaatgtaacagtacagcatgcagcactaagtgccctcagaaacctggccattccagttataaataaagcaaagatgttatcagctggggtcacagaggcagttttgaaatttcttaaatctgaaatgcctcctgttcagttcaaacttctgggaacattaagaatgttaatagatgcacaagaagctgctgaacaattgggaaagaatgttaagttagtggagcgtttggtggaatggtgtgaagccaaagatcatgctggtgtgatgggggagtcaaacagactgctgtctgcccttatacgacacagtaaatcaaaagatgtaattaaaaccattgtgcagagtggtggcatcaagcatctagttaccatggcaactagtgaacatgtaataatgcagaatgaagctcttgttgctttggcattaatagcagctttagaattgggcactgctgagaaagatctagaaagtgctaaacttgtacagattttacatagactgctagcagatgagagaagtgctcctgaaatcaaatataattccatggtcctgatatgtgctcttatgggatctgaatgtctacacaaggaagtacaggatttggcttttctagatgtcgtatccaaacttcgcagtcatgagaacaaaagtgttgcccagcaggcctctctcacagagcagagacttactgtggaaagctgagaactgcccgatacacggcatcatcccatctctaatttcccctctgtcctccatccagcggcttcttccgcttcattctctaccataccacttgtgcatgcatgtgatgttctaataccaattgaagaaccgctgtaggtacctccctaataagatttctaaacctatagttagtgtgatcatgactttgtcaaaggcaagtctccacccataaccgttctcttgtattcctgttgcttgagctacattaagtagaatgtgcatgttgtagtcctatgatgatgtaaacttggtactacataatgacttgctccacacatgcagtaaactacataatgatgtactggtaaactagaaacaaagaatgcagcaggatctgtctagcttattaaagatgaaactgaattggaaaaatagctccattttttggtgcttgggaagcacagtgaccaaaaaagttgtatggctgcttattcattagtctttcctactgatgtcaaatccatggtacctagagttaaataaaattccaatgctcttactctttaacttctggtttctcctttttcctttttagactattgaaactgccacaaacttggcaagactttctgaggtttctgattccatatttaattgactattatcaatagcctgatattgaaaaacatttgtagttttcagtgtgaaactaaggggttgaagaatcactattacaatccctattacagagcatttcgggttttgcttgtattttagattctgatacatacgctgtttcactcaggaactacttctaccagttaatcagcattatccagcacttgtctttaaaattcatttggcgcttgtttgttttcaactgaggaaattgagtatagttcattgaagaatggaatttttttttttttttttttttttgctgtttttcatcattcagctagaaagtgagaagttttatcttccatagtccttttaaatcttatgttagaactagcaggacgtaggtggaaagatgaagaaataagcttgtctagactaaagaaaggaaagcaggttataaaagccatagtagccagtccagttcattctgcagatggccccataccaatcgctgttagagtttgccacctccactttcccactgagaactgcagcaattttaaaggatatgagaaagccaagactcaagagatgagaagacccccttggcgaaatatagtgtactcttcactgccactgccaccaccaaatgggtttttagagctttgaaacacaatctttgtaaattaatcaaaacctccctgtgacccacctgccttctccccatacccaaatttgaccactactggcctaaaaggcaagatgggcttcgatatagaaggactgcaagacagtagaaagggctgccacggaggtgacagtagctccttcctctccaacatgtgatgctacacatctctgtggataatctaagttggacttttgactctaaaacagctataatccaagaaagttaaattctaatggaggtaaagaatcttgactgattgttccctttgatgtccaaataagggaactattgtgagtacgtatgctacacttactataagaatgatactgtttgttgtctttctcctgggctggatagtggactatattttattacaggctttgaaagacatctgtaatgttgcatatctgttcatattaataacttaataaatagtatatgaagctataaaaaaaaaaa

SEQ ID NO: 4999 - DNA, 2019 bp, Homo Sapiens
  NM_021160
acacaacacctcagaggcagggagggcggggccggcagggggacctgctgctggaagagcagcggcccgagccggggccatggcgaagctgctgagctgcgtcctaggcccccggctctacaaaatctaccgggagagggactctgaaagggccccggccagcgtccctgagacgccaacggcagtcactgccccccattccagctcctgggatacgtactatcagccccgtgccctggagaaacatgctgacagcatcctggcactggcttcagtattctggtccatctcttattactcctctcccttcgccttcttctacttgtacaggaaaggttacttgagtttgtccaaagtggtgccgttttctcactatgctgggacattgctgctacttctggcaggtgtggcctgcctccgaggcattggccgctggaccaacccccagtaccggcagttcatcaccatcttggaagcaacacatcggaaccagtcttcagaaaacaagaggcagcttgccaactacaactttgacttccggagctggccagtcgacttccactgggaagaacccagcagccggaaggagtctcgagggggcccttcccgccggggtgtggccctgcttcgcccagagcccctgcaccgggggacagcagacaccctcctcaaccgggttaagaagctgccttgtcagatcaccagctacctggtggcgcacaccctagggcgccggatgctgtatccaggctctgtgtacctgctgcagaaggccctcatgcctgtgctgctgcagggccaggcccgactggtggaagagtgtaatgggcgccgggcaaagctgctggcctgtgatggcaatgagattgacaccatgtttgtggaccggcgggggacagctgagccccagggacagaagctggtgatctgctgtgaggggaatgctgggttttatgaggtgggctgcgtctccacgcccctggaagctggatattcagtcctgggctggaatcatccaggctttgctggaagcacgggggtgccattcccgcagaatgaggctaatgccatggatgtggtggtccagtttgccatccaccgcctaggcttccagccccaggacatcatcatctacgcctggtccatcggcggcttcactgccacgtgggcagccatgtcctacccagatgttagtgccatgatcctggatgcctcctttgatgacctggtgcccttggccttgaaggtcatgccagacagctggaggggcctggtgaccaggaccgtgaggcagcatctcaatctaaacaacgcggagcagctgtgcagataccagggtcctgtactgctgatccggagaaccaaggatgagatcatcaccaccacggttcctgaggacatcatgtccaaccgaggcaatgacctcctgctgaagctcctgcagcatcggtatccccgggtgatggcagaggagggtcttcgagtggtgaggcagtggttggaggcctcctcacagctggaggaagcctcaatttatagccgatgggaggtggaagaggactggtgtctgtctgtcctccgctcctaccaggcagaacacgggcccgacttcccctggagcgtgggggaggacatgagtgcagatggacggcggcagctggctttgtttctggctcggaagcatctgcacaactttgaggccactcactgcaccccactcccagcccagaacttccagatgccctggcacctctagggaccaactgggactcattatggaagaatggggtgagaggagacatgaggaaagaccctcttatttgtgattctctgtgttcatgttgctgtttatagtttgtggaaagtgggggaccatcccccttctcaccactgttcctcttgcacgtttcccctcattcatgtggctgtacttaaccttctccaacatacatcctgcattacatgaatggattattcctaataattaataaaaaggtattttttctactatcaggctaa

SEQ ID NO: 5000 - DNA, 3955 bp, Homo Sapiens
  NM_021167
tctccgcgtcccccccaccccggccagatccctttcccagtcctgcttcccagtgcctcgggccagggaatcctggcctccgcctgcggagccggcggaacccgcttcccgcctccacggggcagcgccagcggcctggtcctttcaccggcagctccgtgccgacgctctcaccgctcttcctatcgccgggagtggcgggccgaccagggggcggccgggctaccgtccgccattcccgtgtctctgcgcccgcgggggccgcccgagccggccaccatgccgctgggcctgaagcccacctgcagcgtatgcaagaccacgtcgtcctccatgtggaagaagggagcgcagggggagatcctctgccatcattgcactggccggggcggcgcgggcagcgggggcgcaggctcgggggcggctggagggactgggggcagcggcggcggcggcttcggcgcggcgaccttcgccagcacctccgccacccctccgcagagcaacgggggcgggggcggcaagcagagtaagcaggaaattcacaggaggtctgctcggctcagaaacactaaatacaaatctgctccggctgctgaaaagaaagtctccaccaaaggaaaagggagaagacatatatttaaattgaaaaatcccatcaaagctcctgagtcagtttccactataatcactgcagaatcaatcttctacaagggagtatattaccaaattggtgatgttgtttctgtgattgatgaacaagatggaaagccctactatgctcaaatcagaggttttatccaggaccagtattgcgagaagagtgcagcactgacgtggctcattcctaccctctctagccccagagaccaatttgatcccgcctcctatatcatagggccagaggaagatcttccaaggaagatggaatacttggaatttgtttgtcatgcaccttctgagtatttcaagtcacggtcatcaccatttcccacagttcccaccagaccagagaagggctacatatggactcatgttgggcctactcctgcaataacaattaaggaatcagttgccaaccatttgtagttcacaaattaaaactgggtttccaggcctggtgtggtggctcacgcctgtagccccagctattgcaccactgctctccaagctgggcaatggagtcagattctctttcttaaaaaaccacaaaaaaactggatttccagttctctaatattcttagtaccacaagatatgtcataggtatctttaaatgaaattcttagctggaaaagtgactaaaaagtttttctcctgctacctagtaataaacaaatcattgtttattactggtcacttagaaaattaaaagggatagggccaggcacagtggcttatgcctgtaattgcagcacttttagaggccgaggcaggcggatcacctgaggtcgggaagtggatcgcctgaggtcaggagttcgagaccagcctggccaacatggcgaaaccccgtcgctactaaaaatacaaaaattagccaggtgtggtggcatgtgcctgtaatcccagctatttgggaggctgaggcaggagaatcgcctaaacccaggaggtggaggttgtagtgagccaagattgcaccgctgtgctccagcctgggcaacagagtgagactcttgtctcggaaaaaaaaaaaaaaaaaaaaggctgggcacagtggctcacgcctttaatcccagcactttgggaggctgaggcagatggatcgcctgaggttgggagttcgagaccagcctggccagcatggtgaaaccctgtctctactaaaaatacaaaaattagccaggtgtggtggcgcacacctgtagtcccagctactcgggaggctgaggcaggagaattggttgaacccaggaggcggaggttgcagtgagcagagatcgtgccactgcactccagcctgggtggacagagcaagactccgtctcaaagaaacaaacaaaaaattaaaagggatagaatataatgaaatatattttgaacttaaattatattctatatgtgtatcttcctaggcaaaagctgtaatttccagagagaccattaggaacaggtagtatctatttttctccattatttatttctagaaactcataaaatggattgtatttttctataagaacaaaatattaattaaggtatagatgactgaccaagggcttaatcaaataaaatgactaacagcatctatcataaagccacacaagccttatgttctcatctcaaaaatgctgtgacagctttttggctgctttaaccataagaaaaatgattggtggatgattttattagcccaggcttttaaaaactttcatctaggccacgtgcggtggctcatgcctgtaatcccggcactttgggaggcctgagtggatggatcacttgaggtcaggagttcaggaccagcctggccaacatgatgaaaccctgtctctactaaatatacaaaaattagttgggtgttatggtgcatgcctgtaatcccagctactcgggaggctgaggcaggagaattgcttgaactcgggaggtggagattgcagtaagccgagatcgtgccactgcactccagcctgggtgatagagcaagactgtctcaaaaaagaaaaaaaagaaaaaattttaatttaatccttctgtagaaacaggcattcagaaccattccattgatcttaataaagctgctctttactgtttctagtcaaaaatgagacttcgatcaaaccataagattttatactgcagatagtcagcttcaccaaagccgcagaggaaacatgtcgagatcaggcttcctgcttgatagtctcttgactaccattaaaacgaatattgggaggtcatgaaagtcattggtaggccattagcattgatatctttaaaacatctaccctaaaccatctgctatggacccataataagaggcctgttgtatatgaaattgtctagaattcaggtgcaggtctttgccggttaagtaagggagcaacacgtaaaatgggagaggagtggggtgtactcacttgcctcctcttttgtcctgatttaaccagcatttttcaaccctgggaaaatttgcagaatctaagttgattgtaatgattttgagctgcagcagctttaactcttaccctttttccacatagttatggtgtttgagttggaaagaaacaactataggtagctacacgtacataattatctctttattcacaaagggtatagtaaaattgattgtaaataactttctaagtgccaatattcaaaacttttggattaaaatgtatttttcaccgtgcatttactttggatgtatttatttcatttaaacaatttaaatggggctctttaaccaaaaatggtatttaaaaccaaaacagtatcgtacttagaatttggagtagaggccgggcacagtggctcacgcctgtaatcccagcactttggaaggctgaggcaggcggatcacctgaggtcaggagttcgagaccagcctggtcaacatgaaaccccgtctctactaaaaatacaaaaattagctgggcgtggtggcgtgcgcctataatcccagctagtctactcgggaggctgaggcaggagaatcgctggaactcaggaggcagagactgcagtgagccgagatcgcgccactgcactccagtctgggtgacggcatgactccatctccaaaaaaaaaaaaaaaagattttggagtagattcatcattaataagtaacagattttaggaaaatcaaaaaatggctaataaaatgaacacaatgtaaaacatttattaaaatgtagacttttaaaaatctataaattgatcatctgtttataaattggcagatggttgtgtaccatcttttaaaataaagattgaatttcaccc

SEQ ID NO: 5001 - DNA, 962 bp, Homo Sapiens
  NM_021170
gggaaagaatgcggagccgggttcacacaccccgcggcggcgaggccttaaatagggaaacggcctgaggcgcgcgcgggcctggagccgggatccgccctaggggctcggatcgccgcgcgctcgccgctcgcccgccagcccgcccgtggtccgtggcggcgcgctccacccggcacggggaggcgcggggcgcaccatggccgcagacacgccggggaaaccgagcgcctcgccgatggcaggagcgccggccagcgccagccggaccccagacaagccccggagcgcggccgagcaccgcaagtcctccaagccggtcatggagaagcggcgccgagcgcgtattaacgagagcctcgctcagctcaaaaccctcatcctggacgccctcagaaaagagagctcccgccactcgaagctggagaaggcggacatcctggagatgaccgtgagacacctgcggagcctgcgtcgcgtgcaggtgacggccgcgctcagcgccgaccccgccgttctgggcaagtaccgcgccggcttccacgagtgtctggcggaggtgaaccgcttcctggccggctgcgagggcgtcccggccgacgtgcgctcccgcctgctgggccacctggcagcctgcctgcgccagctgggaccctcccgccgcccggcctcgctgtccccggctgcccccgcagaggccccagcgcccgaggtctacgcgggccgcccgctgctgccatcgctcggcggccccttccctctgctcgcgccgccgctgctgccgggtctgacccgggcgctgcccgccgcccccagggcggggccgcagggcccgggtgggccctggaggccgtggctgcgctgaggctgtggccctgagactgcatcggaggcggcgccccgttctagggccgtggcctttgccgagactgtagcagagaaaacgtatttattattccaga

SEQ ID NO: 5002 - DNA, 4012 bp, Homo Sapiens
  NM_021174
agaaaccgcgcgcctcagtcctcccttggtggcctcgccgcggctctgctgggagacccggcgctggcggctgctgaggccggagcggagggcccgggagcgtgggagcaggagggtggcgcgcagccggtttcgcgtttggtcggccagggagctgccttcccaccagccggtcgaggaaacaacgggtcgggcttccggggagagggcccacacagtctcctcgccggcaccggcctcctccatttttccgggccttgcgtggagggttttggcggatgtttttgaacgaaggaatgtcatcggggctctctcgagcccctcaccccgccagctactctgggggtggcgtggcatagtgagaggagcgctaagttgttgggaggcctgggtccttttccccacgactctgaaagaggacagcgttcccaatgtcccagtttaagcgccagcggatcaacccgcttccagggggacgcaacttctcaggcacagcttcaacatctcttctgggccctcctcctggtttgctcactcctcctgtggccacagaactgtcccagaatgccaggcaccttcagggtggggagaaacagcgggtcttcactggtattgttaccagcttgcatgactactttggggttgtggatgaagaggtcttttttcagctaagtgtggtgaagggccgtctgccccagctgggtgagaaggtgctggtgaaggctgcatacaacccaggccaggcagtgccctggaatgctgtcaaggtgcaaacgctctccaaccagcccctactgaagtccccagcacctcctcttctgcatgtagcagccctgggccagaagcaagggatcctgggagctcagcctcagttgatcttccagcctcaccggattcccccactctttcctcagaagcctctgagtctcttccaaacatcccacacacttcacctgagccacctgaacagatttcctgcccggggccctcatggacggttggatcagggccgaagtgatgactatgactccaagaaacgcaaacagcgggctggtggagagccctggggtgctaagaagccaaggcatgacctgcctccttaccgggtccacctcactccttacactgtggacagccccatctgtgacttcctagaactccagcgccgttaccgcagcctcctggtcccctcagattttctgtccgtgcatctgagttggctatcagccttccccctgagccagcccttttccctccatcatccaagccggatccaggtctcttctgaaaaggaggcagctccagacgctggtgctgagcccatcactgcagacagtgaccccgcttatagttcgaaggtactgctgctctcttccccggggttggaggaattgtatcgttgttgcatgctctttgtggatgacatggctgagccaagggagacgccagagcatcctctgaagcagattaagtttttgctgggcaggaaagaagaggaggcagtgctggttgggggtgaatggtctccttccctggatggcctcgacccccaggctgacccgcaggtgctggtgcgtaccgccatccgctgtgcgcaggcccagactggcattgatttgagcggctgtaccaagtggtggcgctttgccgagtttcagtacctgcagccgggacccccccggcggcttcagacagtggtggtgtacctgccggatgtctggaccatcatgcctactttggaggagtgggaggccctgtgccagcagaaagctgcagaggcagctcccccaacccaggaggcacaaggggaaacggagcctactgaacaggcacctgatgccttggagcaagcagcagacacttctagacggaacgcagaaactccagaggccaccacacagcaggaaacggacactgatctcccagaggcccctccaccccccctagaacctgctgtcatcgcacgccctggctgtgtaaacctgtccctccatgggattgtggaggatcggaggccaaaggaaaggatctcttttgaggtgatggtgctggccgagctgtttctggagatgctccagagggattttggctatagagtttataagatgctactgagccttcctgaaaaggtcgtgtccccacctgaacctgagaaggaggaggcggccaaggaagaagccaccaaggaggaagaagccatcaaagaggaggtggtcaaggagcccaaggatgaggcacagaatgagggcccggctacagagtcagaggccccgctgaaggaggatgggcttttgcccaaaccactctcttctgggggagaggaagaagaaaaaccccggggcgaggcttctgaggacctgtgtgagatggccctggacccagaactgttgcttctgagggatgatggagaggaggagtttgcaggagcaaagctggaggattcggaggtccggtccgttgcctcaaaccagtcagagatggagttctcttcacttcaggacatgcccaaggagctggatccctctgctgtgctccccttagactgtctgcttgcttttgtgttctttgatgccaactggtgtggctacttgcaccggcgagacttagagaggatcctccttacccttgggatccggctcagtgcagagcaggccaagcagctggtcagcagggtggtgacccagaacatctgccagtaccggagccttcagtacagccgccaggagggcctggatggtggccttcccgaggaggtgctcttcggaaacctggacctgctgccccctcctgggaaaagcacgaagccaggtgctgcccccacagaacacaaagccttggtgtcccacaatggcagcctgattaacgtggggagcctgctgcagcgcgcggagcagcaggacagcggccggctctacctagagaacaagatccacacactggagctgaagctggaggagagccataaccgtttctcagccactgaagtaaccaataagacgctggcggcagagatgcaggagctgcgagtccggctggcggaggccgaggagaccgcccggacggcggagcgacagaagagccagctccagcggctgctgcaggagctccgcaggcgtctgacccccctgcagctggagatccagcgggtggtggaaaaggctgacagctgggtggagaaggaggagccggcacctagcaactgacggcctcgcacggaactgccatcctgtgagggcagcggtggcgcccggcaaagttggagcccttgcggtaccagaaagcagcgagagcgagacctgggagccagggcaggggtggctgaccccatgctcagcctctaggggacggcaggccatcaggctgggggctgtgctatgtgggatggatgtgtgaggaaccccggttccacttaacaactaaatacaacatcttttgcacccctagaatgtcattttgccctcaaccttggtatttctcctggggcccttttagtcttgtgctgactttctcctgtcctcttccagtttagaataagacaggggagaaaaaggcttttcgagtgtgggacaaggtctgatgtcagtgaacggaactgaagagcaagacatggagcctggctggggctaagcagccccctcctccggatggcacaggctctgctaggttccggacacaggcttctgggggaagggtctcccttggccatcacgggaatggagtccatgctagaaagagctcagtgttgggctgggtttgccagtagaacactgcgttccagtcaccccggtcttgccagaagaaaccagcacctctttcccgtggctcctgtgttcagaatgtggtattggctctggcccagccttctcccctgttacccataattcttgcctctttccataatccgtggtttcagtttgactttgtatataaagttggggttttttttttttttttttggcttgttttttaaataaaccaaagtcaaaaacaaaaaaaaaaaaaaaaaaaaaaa

SEQ ID NO: 5003 - DNA, 430 bp, Homo Sapiens
  NM_021175
gactgtcactcggtcccagacaccagagcaagctcaagacccagcagtgggacagccagacagacggcacgatggcactgagctcccagatctgggccgcttgcctcctgctcctcctcctcctcgccagcctgaccagtggctctgttttcccacaacagacgggacaacttgcagagctgcaaccccaggacagagctggagccagggccagctggatgcccatgttccagaggcgaaggaggcgagacacccacttccccatctgcattttctgctgcggctgctgtcatcgatcaaagtgtgggatgtgctgcaagacgtagaacctacctgccctgcccccgtcccctcccttccttatttattcctgctgccccagaacataggtcttggaataaaatggctggttcttttgttttccaaaaaa

SEQ ID NO: 5004 - DNA, 907 bp, Homo Sapiens
  NM_021177
ctcctctctactctacccagcttgcgctccccagccgcaagtcggccgcgctttgcccgtcagcgcttggagctttctgcgtcgcttcccgctgcgcctgcgcggtcccgcctcgccccacgcgcgggctcgcgcttcggtttccccagacctgctcgcagcaccctgctgtcttcccggtccggcccgctgcccgcggcgccagcaccatgctcttctattcttttttcaagtcccttgtgggcaaggatgtggtcgtggaactaaagaatgacctgagcatctgtggaaccctccattctgtggatcagtatctcaacatcaaactaactgacatcagtgtcacagaccctgagaaataccctcacatgttatcagtgaagaactgcttcattcggggctcagtggtccgatacgtgcagctgccagcagatgaggtcgacacacagttgctacaggatgcggcaaggaaggaagccctgcagcagaaacagtgatggctcctcctcctcttcccctccctctttcattggtgacccataaccccaagtcccagcccagaacccctaacccccaatacttgaaggggttttgtttttttactaatgatggttttgtgggttttttttaagggatgagtggatgagaggagtaatagggaacagctatcctctcttgagaaggggaggataagtaggctgggaaacttcaaagccttcccagtccccagcacctgcctttctcactacttctctggagatggtaggagagtttcctaggtctttccagggcagcatgtgattcatttggggatggaaggaatctgtcccgcatcgggaataaaatttatgatgcaaaaaaaaaaaaaaaaaaaaaaaaaaaaaaaaaaaaaaaaaaaaaaaaaaaa

SEQ ID NO: 5005 - DNA, 3933 bp, Homo Sapiens
  NM_021183
gggaaacccttccgggtgtgtgcttggtgggggtgggggtgggggtgggggtgggggtggggggtgggtgagaaaaaaaagaggtgggttcgcctggagtccctgcggccgccgcggaaggcccccgcttctttccccgcggcgagcagcagcgctggggcagcggagagacagaggagccagcgggtggccatggccttggcgtgacagagcctccccggcggccgggcgggtgcggacggcggggccggacgacccccgcgggagccggggcccagaaacccgcccgggcagcggtaactggaacggagccctcaggcctgagccggctgggctgcgcgagcaggaagcggggtccctgggcccctttgtgtgaagggcgggggaggagtgccgggcagccccgggctgcgggctcctccgacgtccgcctcgccgcagggtcccctcgccgcagcccccaccctttccctcccgggggcacgcgcctcctcgccaccctcgccgggcttttcccaggctcgccctcctccccacgccccctgctcgggctgcagttcctataggaagggcattaccatcccttccccaccctccccgactctacgctctttcccctccccctcctgtaacttcctcttcttccccggttgggccctctgctcctctgcactctcctccccagttcgcagatttccgcccaccttccgcctcgtctagccgcgccacagctagcggggtgatctttccccccctctggtaggagttggtgaaggtgagactcatgagggaatacaaggtagtggtgttagggagtggaggggttggcaaatctgcccttactgtgcagtttgtcactgggactttcattgagaaatatgaccccaccattgaagatttctaccgcaaagagatcgaagtggactcttccccctccgtgctggaaattctggacaccgcaggaactgagcagtttgcctccatgagagatctctacatcaaaaacggccaaggtttcatcctggtttatagcctggttaatcaacagtcttttcaggatatcaagccaatgagagatcaaattgtcagagtgaagagatatgaaaaagtcccactaatcctagtaggaaataaagtggatctggaaccagaaagagaggttatgtcttcagaaggcagagctctggctcaagaatggggctgtcctttcatggagacatcggcaaaaagtaaatcaatggtggatgaactttttgctgagatcgtcaggcaaatgaactattcatccctgccggagaagcaagatcagtgttgtacaacttgtgtcgtccagtaaagaagataacctcaatcatggccataccgagcagataaaactcagaggaaatttgcacagatgctgctttggagaactttacaacctgggttgcagaactgagccttggtaaacctgtctctattacagcatgttgccatacatctatttaagtgcataaggtctttggccttcaagatccatcgaccttaaacaggaatgcttagcacgtttaccatacgtttaaaatccattctttatcaatcagtccttttatagctttctaagttcttattgatggctaatatacaagggttaatttttaatattttaattgatttctttaatcagtttctcgacttgtatttattaaatactcaaactcagtattacctactcaatgccttttaaaagaaagttataatggagaaaaaattgagccttaaacaaatggttacttctgtatattacctcgtaccagtgcttcatcctatttgtaaaatctttctcctttaaaattattggttaatactttgagactttgtttacgtgtggcagtgttgtaaaaagaaactaaagatcacattttacctgtatggatggaatatcccttttcttcaagtgcagtttgtgatgtgttttgtttttttttttttttttttgtaattaacatgttctgaaggttacaattgatatttgaaattgactgtagagcatttagttgaagagttaagcattcagttccattaggttttcacatgtgttaatctcatttacagcattgaattgcggcagtaacattttcctttctgtgaagttctaaatttagttatgacctatttagcaatgcctttgaaaagggatattgtatccatggtaaattaattgtatacctaaacagagatagctcatctttgcctatcaggcttgtaattgacatctagtagacttctgcacatgtaaaattgaattcaaataaaatcatacacactttctagttcttaatatttgtctttctgaataatagtttaaagcaatatttgttaaagttttcttgcactatcacaattgctttttagttatttctcaagaagcatgttcgtattagagacaaaatctgtgtaacaggagggagaatagcgccaagtctctgggctattttttatttttgcaaatgtgctttctaatagccattgccttccatgttgtttacctaatcagcatatttttgtctgaatacttgaacattttaacagtaacgcaggtgtagaatcagaaaggaaacttatgcagagtaatattttggttcagttttaacatcgtgacaatgagggctttttctagcaatgatttttaaattgtgtaagtttgacagtattttattgttgggtttttatttgattttagttgtgtgcttttcatttgcagaagttagtaactgcagctcacctactgcaccaaagttctcgattttaggagcccagctttagtcatttgaacatgcttctaaataaaataaaacaaaaccaaaactatacttttgatctataataagagctcaataactttgtcaaggaaagctctaatatatgcagtgatggtttatgaaagggtgtggcaattttaaatttatattgtgtgtgatgttcaaataaagtggtatctacattcatgtgatttatgggtcagcatgaccattaattactgagtagaaattgactaaactttgatttcctttttttaaatcgtgttgcatttgattcctgagcaaattccctcaaagtgaactcttgttcttaaattttgaattttatggtgagattgtaaagatagaggcaattgaaacattgttccttatttatgaactgcttgaagtgaatacttaatttaagtttgcactttaataccaaacttaaaaccaaacactcatttaaaagtaggttaagtgatcatggatcattgttattagctttgtggctttgtgaaattctaaaggaatcaaataattcatcatgatttaaattttctagagattttgatttttttataatgtttctttcctgtagattgtgttcttgtttctctctctctctctctctctctctctctctctctctctctctctctctctctctcaaaattacagtgttcattgtcattgacctcagcagcaaatttgacttgaattcacttaggatcgcaggaatcaggggaaagtgattttaaaggtggtttctccagcacattttaagaaaagggaccaaaagttattttagcttcctcaatagattgcatgttgcttattaggataataaattaatattaaatgcaatatatgtcttgtctttattatggcatctatttaggagttgttcaaatcactgcagtagggctctgcaaataaaataatgtaacctattatcatggatctaatgtactgtaactttatcagtgaaaggtaaaatctcaaataacaagtacaaacattgaacaattacctataaagatttgtaaaagtaaaatttttccaatagatttcattcttgtcattttgtaagacgaccctgcagtccacctgtttgtaacttttttaataaaatagacatctgtattactga

SEQ ID NO: 5006 - DNA, 2207 bp, Homo Sapiens
  NM_021188
actgacggccggccggcttcccggaactggaaggttacattgattacccacctagtacaacatcttacgggaagagcatagtatttcctagaggaatatgaacataacaggaaggtatcattggctctgaattaaatttgaacttgtcccctgaatagctacaggttttggaagctgaatcaatgttatcagatgagttagaatccaaaccagagctcctggtacagtttgttcagaatacgtccatcccattgggacaggggcttgtagaatcagaagctaaagatattacttgcttgtccctccttcccgtgactgaagcctcagaatgcagtcggctaatgttaccagatgatactacaaatcattctaactcctccaaggaggtcccttcctcagctgttttgagaagccttcgggtgaatgtgggtccagacggagaggagacgagagctcagactgtacagaaatccccggagtttttgtccacttcagagtcttctagcttgttgcaagatctacagccaagtgatagcacttcttttattcttcttaacctaacaagagcaggtctgggctcttcagctgagcacttagtgtttgtacaggatgaggcagaagattcagggaatgatttcctctccagtgagagcacagacagtagcattccatggttcctccgggttcaggagttggcccatgacagtttgattgctgctactcgtgcacaactggcaaagaatgcaaaaaccagcagcaatggagaaaatgtccaccttggttctggtgatgggcagtcaaaagattctgggccccttcctcaagtggaaaagaagctcaagtgtacagttgaaggttgtgaccggacatttgtatggccagctcactttaaataccacctcaagactcatcgaaatgaccgctccttcatctgtcctgcagaaggttgtgggaaaagcttctatgtgctgcagaggctgaaggtgcacatgaggacccacaatggagagaagccctttatgtgccatgagtctggctgtggtaagcagtttactacagctggaaacctgaagaaccaccggcgcatccacacaggagagaaacctttcctttgtgaagcccaaggatgtggccgttcctttgctgagtattctagcctccgaaaacatctggtggttcactcaggagagaagcctcatcagtgccaagtctgtgggaagaccttctctcagagtggaagcaggaatgtgcatatgagaaagcatcacctgcagctgggagcagctgggagtcaagagcaggagcaaactgctgagccactaatgggcagtagtttgcttgaagaggcttcagtacccagtaaaaacctggtgtctatgaattcccagcccagccttggtggagagtccttgaacctaccaaataccaattctatcctgggagttgatgatgaggtgcttgctgaaggatccccacgttccctgtcttcagtgcctgatgtgacacatcacctggtgaccatgcagtcagggaggcaatcatatgaagtttctgtcttaactgcagtaaatccacaagagttactaaaccaaggagatttaactgaaagacggacatgagcgtgggtgctgactcctggaagagcaactctatctgatctcaaaatgcgtatactgggaacaggatgccttagcccacaacagaaccagaatgaatctttgaaggcacaagactctgcttttgccactcttcctctttcctggtatagaagatggatgtaggagagcttcttttctaactaccatctgatcagacaaggaatgaagcaatgactgtgggctgggaaactgtacctacctctcttcccactgcaaatttctgggatagaccaaaagtgaatttgattatgtgttggctgaagttcttcattctgactgttgaggggaggttttcctttgaagagttttcatcccagactcagctgtcttttcacatggatgaaataattcctgctaccaacaacagagcttcaccaggaagttgagttttcaagatgccttgttgctttgaagaagggagtgatgtcaattctcttgttacattctccctttagcaacctgagtaagagactctctgccactgggctgcaaaaaaataaattacttgaatctccccttgaaaaaaaaaaaaaaaaaaaaaaaaaaaaa

SEQ ID NO: 5007 - DNA, 3498 bp, Homo Sapiens
  NM_021190
aggcgcggaggaggcgtcggctgcggcgcccactccccctagtcccagcgccctgccgctcgcctcccgctgccgggcgccggcgcgctcggctctttccgccgccgccgctgccgcgcggtggcccgtgcgcctcggcaccttcggcaatttccgtcgggccccagccgccattttctcgccgcttgtgtggctcgctggctgcgtggctcggttcttgtgagcgaagctttgtccggttcggcaatggacggaatcgtcactgaggttgcagttggcgtgaagagaggatctgacgaactactctcaggcagtgttctcagtagtccgaactctaatatgagcagcatggtagttacagccaatggtaatgatagtaaaaaatttaaaggagaagataaaatggatggtgctccttctcgtgtacttcatattcgaaaattacctggggaagtaacagaaactgaagttattgctttaggcttaccttttggtaaggtgaccaacatccttatgctgaaaggaaaaaatcaggcatttttggaactagcaaccgaggaagcagctattactatggttaattactattctgctgtgacacctcatcttcgtaaccaaccaatatatatccagtactcgaatcacaaagaactaaagacagataatacattaaaccaacgtgctcaggcagttcttcaagctgtgacagctgtccagacagcaaatactcctcttagtggcaccacagttagcgagagtgcagtgactccagcccagagtccagtacttagaataattattgacaacatgtactaccctgtaacacttgatgttcttcaccaaatattttctaagtttggtgctgtattgaagataatcacatttacaaaaaataaccagtttcaagctttgctccagtatggtgatccagtaaatgctcaacaagcaaaactagccctagatggtcagaatatttataatgcctgctgtaccctaaggattgatttttccaaacttgtgaatttgaatgtaaaatacaacaatgataaaagtagggattatactcgacctgatcttccatctggggatggacaacctgcattggacccagctattgctgcagcatttgccaaggagacatccctcttagctgttccaggagctctgagtcctttggccattccaaatgctgctgcagcagctgctgcagctgctgctggccgagtgggtatgcctggagtctcagctggtggcaatacagtcctgttggttagcaatttaaatgaagagatggttacgccccaaagtctgtttaccctcttcggtgtttatggagatgtgcagcgtgtgaagattttatacaataagaaagacagcgctctaatacagatggctgatggaaaccaatcacaacttgccatgaatcatcttaatggacagaaaatgtatggaaaaattattcgtgttactctgtctaaacatcagactgtacagctacctcgagagggacttgatgatcaagggctaacaaaagattttggtaattccccattgcatcgttttaagaaacctggatccaaaaattttcaaaacatttttcctccttctgccacccttcacctatctaatatccctccatcagtagcagaagaggatctacgaacactgttcgctaacactgggggcactgtgaaagcatttaagttttttcaagatcacaaaatggctcttcttcagatggcaacagtggaagaagctattcaggccttgattgatcttcataattataaccttggagaaaaccatcatctgagagtgtctttctccaagtcaacaatttaaaaatgggaagatgaagattgggggtgaatcacattgttcaatgtcatcacctatttgactgttcagaaaagtggggaccagagtttgattttttttgtttttgtttttttggggtttcttttttttttccatgctgttatcattccttggttataaaatgaaatggcatatgtaaaggcagagttgttaactgctatatttcatctgttctatagggaagccattttgtctgtttaaaatttcagtttaattttgctttttttttttttttttttttcctttcaacttagttgacatacgtgccttaaaaaggaaaactagtgttgctattgtgcatttactagaaaaaaggaattggttgtttagggcacactgttatatgggaattaaaatatgtttaggcaggggtgtgtaaaaaggttaagtttttgtttctcctgcttggaacttattttgaattactggcttgtcacctttttttctatttaatcaaataagatacatgatattgaaagaataaagcagcatttttagtttttactaccttaggctttattgctttgaaaacaacattggccttttgtatctcacaattctggtctagattcagttatgaatgtaggcattagttaaaattaacaagatgcagagtattaatttcttaagacaacaaagtgatttctgtaagtttgagccctatgtggaaagcattgtggaatcttaaccttttcgtacacactcttgtgggacgtatcatataaatgtcagcactaagtaatgtcttgtttgtggctgaatatttttcgtagatgtttttgaagttgacatgacttacgtgcatttaaatatatattgccatccttagtttgtaattaagatttggaatatggttgtggatttctgagcatgtgcagactggtctagctagttcaggaactggtgcatgtatttttcaaagataaagaaagtgtactgcgaaaatatgcaggaagattaattttgtggcagttttctaaaactgacaaccaggtgggaccaaagtttatgtgcctttagtcttaatttaccttgcattgtaatattcagttttaataaatcttcaaaatattttgtatttaggaatagatctgactttaataaaaacatggctcagaatctacaggtcaaattaatttgaacagttcttgtcaatccgaattgttgattctgtttaaatgaccaatactttttgaaattgatgtacttagtttcaagattcatagattctgttatctatgtagacagaatggtcatgtatattttctattagttgagtttttacatctttagaaatgtaaaattcagtatagtttgaaagcggcacaattaaaaattaattttctaacaaagttgggaggtttgatggttgtttaatttcattttgtgtgtactctgcttacccctgtagcatgctcaataaacacttctgtagctctatattcaccttttctgtctttctctgctgccttttctctctcctcttctttgttttcactccactgtgcttctgaattcatgtttattctctgccagggtgggaaaggagtaataatattacaattctatggctttataccataaataaatctagatgctgtgaaaataaaaaaaaaaaaa

SEQ ID NO: 5008 - DNA, 2034 bp, Homo Sapiens
  NM_021194
gcggccgcgggggcccctcagcggtttcccgaacggcccgactcgggcgctcctccgtgtcgcggtcgccgaccctccgcgtcccgccaacgccgccgctgcaccagtctccgggccgggctcggcgggccccgcagccgcagccatggggtgttggggtcggaaccggggccggctgctgtgcatgctggcgctgaccttcatgttcatggtgctggaggtggtggtgagccgggtgacctcgtcgctggcgatgctctccgactccttccacatgctgtcggacgtgctggcgctggtggtggcgctggtggccgagcgcttcgcccggcggacccacgccacccagaagaacacgttcggctggatccgagccgaggtaatgggggctctggtgaacgccatcttcctgactggcctctgtttcgccatcctgctggaggccatcgagcgcttcatcgagccgcacgagatgcagcagccgctggtggtccttggggtcggcgtggccgggctgctggtcaacgtgctggggctctgcctcttccaccatcacagcggcttcagccaggactccggccacggccactcgcacgggggtcacggccacggccacggcctccccaaggggcctcgcgttaagagcacccgccccgggagcagcgacatcaacgtggccccgggcgagcagggtcccgaccaggaggagaccaacaccctggtggccaataccagcaactccaacgggctgaaattggaccccgcagacccagaaaaccccagaagtggtgatacagtggaagtacaagtgaatggaaatcttgtcagagaacctgaccatatggaactggaagaagatagggctggacaacttaacatgcgtggagtttttctgcatgtccttggagatgccttgggttcagtgattgtagtagtaaatgccttagtcttttacttttcttggaaaggttgttctgaaggggatttttgtgtgaatccatgtttccctgacccctgcaaagcatttgtagaaataattaatagtactcatgcatcagtttatgaggctggtccttgctgggtgctatatttagatccaactctttgtgttgtaatggtttgtatacttctttacacaacctatccattacttaaggaatctgctcttattcttctacaaactgttcctaaacaaattgatatcagaaatttgataaaagaacttcgaaatgttgaaggagttgaggaagttcatgaattacatgtttggcaacttgctggaagcagaatcattgccactgctcacataaaatgtgaagatccaacatcatacatggaggtggctaaaaccattaaagacgtttttcataatcacggaattcacgctactaccattcagcctgaatttgctagtgtaggctctaaatcaagtgtagttccgtgtgaacttgcctgcagaacccagtgtgctttgaagcaatgttgtgggacactaccacaagccccttctggaaaggatgcagaaaagaccccagcagttagcatttcttgtttagaacttagtaacaatctagagaagaagcccaggaggactaaagctgaaaacatccctgctgttgtgatagagattaaaaacatgccaaacaaacaacctgaatcatctttgtgagtcttgaaaaagatgtgatatttgacttttgctttaaactgcaagaggaaaaagactccactgaaattctaagtttgccaagtagtgtaattgaagtccttgtctggtcacacagtttaattctatttttgtaagaacataatgggactgcataacagagttctatattacaattttgtgattattagtacagagtacagctatgctgtgactgttttggaaagccagttttaacactatgttacatttttgtttaaagtaagttaaaccttatataacataatgacatttgatttctggatttttcccatgataaaaattagggggataaataaaattgttactggaaaaaaaaaaaaaaaaaa

SEQ ID NO: 5009 - DNA, 1396 bp, Homo Sapiens
  NM_021197
agccaccatcgaggaaggggcatgtgctggacgcggacacatgatccgagggaccctgctgggtggaactaagaaagtccagcagactgtgcatgctcctgtccccactcacaggcccacgcagcgaggggggcccctcttctgtgtgcgtctggaaggtcgctgcccagggaggaaatgcctttaaccggcgtggggccgggcagctgcaggaggcagatcatccgggctctgtgcctcttgctacttctcctccacgccggctctgccaagaatatctggaaacgggcattgcctgcgaggctggccgagaaatcccgtgccgaggaggcgggcgcgcccggcggcccccggcagccccgagcagaccgctgcccgccgcctccgcggacgctgccccccggcgcctgccaggccgcgcgctgtcaggcggactccgagtgcccgcggcaccggcgctgctgctacaacggatgcgcctacgcctgcctagaagctgtgccgcccccgccagtcttagactggctggtgcagccgaaacctcgatggcttggtggcaatggctggctcctggatggccctgaggaggtgttacaagcagaggcgtgcagcaccacggaggatggggccgaacccctgctctgtccctcgggctatgagtgccacatcctgagcccaggtgacgtggccgaaggtatccccaaccgtgggcagtgcgtcaagcagcgccggcaagcagatgggcgaatcctacgacacaaactttacaaagaatatccagaaggtgactcaaagaatgtggcagaacctggaaggggacaacagaagcactttcagtaaagcaacggcaagcagctaggttgcaagaacattcctctactttctgctaagccttggaaacagttgggaaaagtagtttgaccctcacagttcacattcagctcagcagagcaagaccccagagatgcttagagacaggacacctggccctcaaacccagtttggcccagcctggttgggtgactttgtgggagccacttaacagctctgggtccctgttttaccatcctgggagcaaggccctgcagctccacgagacctttaccccgggaagaagccgccgcccatgaaagcatttctgaagcccctttctaagacaaggctcagcatcttgatatttttgacagattcctcccaagtctggctctgggaggtatgtacccatctcaaatgttcccaagataaattcatccttcaggaaatggaaatgaacttgcttactaatgtgtgattcctagttgtagccaccggatgtgctgaggcctaaatgttagcaggtgggaggaggccacagaacaataaaaacaaccaaataagaaaaaaaaaaaaaaaaaaa

SEQ ID NO: 5010 - DNA, 1682 bp, Homo Sapiens
  NM_021199
gaaggtttttgctgcgccaacgcagtgaccgaaggctccgctcacgcccggcctgatcctgcctgaagatggtgccactggtggctgtggtatcagggccccgtgcccagctctttgcctgcctgctcaggctgggcactcagcaggtcggcccccttcagctgcacaccggggccagccatgcggccaggaaccattatgaggtgctggtgctgggtgggggcagtggcggaatcaccatggctgcccgcatgaagaggaaagtgggtgcagagaatgtggccattgttgagcccagtgagagacatttctaccagccaatctggacactggtgggtgctggtgccaaacaattgtcctcatctggtcgtcccacggcaagtgtgattccatctggtgtagaatggatcaaagctagagtgactgagttgaacccagacaagaactgcattcacacagatgacgacgagaagatctcctaccgatatcttattattgctctcggaatccagctggactatgagaagattaaaggcctacctgaaggtttcgctcatcccaaaatagggtcgaattattcagttaagactgtagagaagacatggaaagctctgcaggacttcaaagagggcaatgccatcttcaccttcccaaatactccagtgaagtgtgctggagcccctcagaagatcatgtacttatcagaagcctacttcaggaagacagggaagcgatccaaggccaatatcattttcaacacttctcttggagccattttcggggttaagaagtatgcagatgccctgcaggagatcatccaggagcggaacctcactgttaactacaagaaaaacctcattgaagtccgagccgataaacaagaggctgtatttgagaacctggacaaaccaggagagacccaagtgatttcatatgaaatgcttcatgtcacacctccaatgagcccaccagatgtcctcaagaccagtcctgtggctgatgctgctggttgggtggatgtggataaagaaactctgcaacacaggaggtacccaaatgtgtttgggattggggactgcaccaaccttcctacgtcaaagaccgctgctgcagtagctgcccagtcaggaatacttgataggacaatttctgtaattatgaagaatcaaacaccaacaaagaagtatgatggctacacatcatgtccactggtgaccggctacaaccgtgtgattcttgctgagtttgactacaaagcagagccgctagaaaccttcccctttgatcaaagcaaagagcgcctttccatgtatctcatgaaagctgacctgatgcctttcctgtattggaatatgatgctaaggggttactggggaggaccagcgtttctgcgcaagttgtttcatctaggtatgagttaaggatggctcagcacttgctcatcttggatggcttctgggccaaaactgcagtcactgaatgaccaagagcagcacgaaggacttggaacctatccttgtaaagagttccttgatgggtaatggtgaccaaatgcctcccttttcagtacctttgaacagcaaccatgtgggctactcatgatgggcttgattctttgggaataataaaatgaaataatacttttattttctgaataaaagtttgtcactgaaaaaaaaaaa

SEQ ID NO: 5011 - DNA, 2391 bp, Homo Sapiens
  NM_021200
aagagaggaaggcttaaagagccagactgcgcagccaggactggggtgatgggcgctgtcctgccaggccaaagaatgaagatgtagccccgcccccaacctagggaggaggaccagcccggttcctgtcctgcccccgcaacctcgccccgattccactccgggaacctcggcgatgctgagccaagaccacttctgaatcagggatgacttgtctagtgaacctagggtcagagccatcagttggaaaggctgggaggagcctggagaaagagggcgaccttccttgggatctgtgcgctccctccttgcctccccctccagcctcccacttggtagcaccttcctgatccccttatctctaaggcgctcagggaaatgccccgctgcgggagccttctgggaaatgctgccctggccacccaggaaccatgagccctgcagccccggtcccgcctgactccgctctggaaagtccttttgaagaaatggccctggtgaggggcggctggctgtggagacagagctccatcctccgccgctggaagcggaactggtttgccctgtggctggacgggaccctgggatactaccacgatgagacagcgcaggacgaggaggaccgtgtgctcatccacttcaatgtccgtgacataaagatcggcccagagtgccatgatgtgcagcccccagagggccggagccgagatggcctgctgactgtgaacctacgggaaggcggccgcctgcacctctgtgcggagaccaaggatgatgccctagcatggaagacagcactgctggaggcaaactccaccccggccccagctggagccaccgtccctcccaggagccgccgggtttgctccaaggtcaggtgtgtgacccgctcgtggagcccctgtaaggttgagaggcggatctgggtgcgcgtctacagcccgtaccaagactactacgaggtggtgccccccaatgcacacgaggccacgtatgtccgcagctactacggaccgccctacgcaggccctggcgtgacgcacgtgatagtgcgggaggatccctgctacagcgccggcgcccctctggccatgggcatgcttgcgggagccgccactggggcggcgctgggctcgctcatgtggtcgccctgctggttctgagccctgggactcggagcactgacccctgcgcttggattgctagactcctcttcctcctggaccccatcctctaccatccaagccctgtcccactttggccctatcctctccattagctccttccgggtttggaccattccccccactccctacccttaatccccacatgggaagaagctatcatcacaggtacaaacatcgcttgaagtcttcacatctaccactagacacccccaaaatctgttatagacatttatggatacatttcctctaaacacaacagggcacagcaaatacgacttcatttggcttcgagttccccaggcgctgtagacacaacatgaatcgggctctctgctctctccttagggagctcgagtcctggtggggagaacaggagtaaacaaggacttgacaaagctgaagagttatcagtcctttgacaaggacaggtggggcagggagcaagacaggtaggctggaagaacagttattggcaagtatgcagagccgtgaacgtcatggcatgtccaaggaattaaatgggagttcatttgggctggggtggaggctgggatcagaccgtggtgggccttcaagctaaggagcttcctaggtgaaaggggagatgtgagccttctctggagggaagtttcatgattgcatctataatgaatatattgcctgttttgtgaatactgacacatgtccatacctaaaacactcctgagttaagtcccatccttcccacaaacagcttcctggctggtacccatgataacaattgagctgaacctggggacccctggttggggaacaggtgagttctatttgagacttccagccctagaaagctgcctccgtccagaaatgcctctcacaccaggagctcggccctctctttgtagctgtgactgtcaccctctcaggctttgtctcatccttcattctgaataagatggcagtgttctcctctggggcctgatccacctctacaccagcccaggaagccccatctgtgcctgccctcaggtggtccaccagtctccccctttggttcccttccagtctcttccccctttctatcccaatcaccaatagaaatgctaacatccctgcctggtagccagactagcccactaaagctcccctgtaaatgggggctccattagttctgctgccgagactaataaagatttggttggctctagcagtaaaaaaaaaaaaa

SEQ ID NO: 5012 - DNA, 2880 bp, Homo Sapiens
  NM_021203
gtaggccatggagccgagcagatccgggtcttcgggtggccgcaatgtcccaagtggacgacacccacctagtcccgaggacaaccgacaaagtccttaatgggcccagaaggaggacggagtcccagagaactacaactcccatcaagcacttgggggatcgccgcggctgagggagagactatggcttaggaaccaccattcgcgtgaggctctgctccccgcgcctgcgcagagtgcagggccacgtcgcttttgctgtaccggggaccacgcgtctcatccatggcttccgcggactcgcgccgggtggcagatggcggcggtgccgggggcaccttccagccctacctagacaccttgcggcaggagctgcagcagacggacccaacgctgttgtcagtagtggtggcggttcttgcggtgctgctgacgctagtcttctggaagttaatccggagcagaaggagcagtcagagagctgttcttcttgttggcctttgtgattccgggaaaacgttgctctttgtcaggttgttaacaggcctttatagagacactcagacgtccattactgacagctgtgctgtatacagagtcaacaataacaggggcaatagtctgaccttgattgaccttcccggccatgagagtttgaggcttcagttcttagagcggtttaagtcttcagccagggctattgtgtttgttgtggatagtgcagcattccagcgagaggtgaaagatgtggctgagtttctgtatcaagtcctcattgacagtatgggtctgaagaatacaccatcattcttaatagcctgcaataagcaagatattgcaatggcaaaatcagcaaagttaattcaacagcagctggagaaagaactcaacaccttacgagttacccgttctgctgcccccagcacactggacagttccagcactgcccctgctcagctggggaagaaaggcaaagagtttgaattctcacagttgcccctcaaagtggagttcctggagtgcagtgccaagggtggaagaggggacgtgggctctgctgacatccaggacttggagaaatggctggctaaaattgcctgagaggcagctctaaagcacaagacctggatgtgtgacacacagttttggaaaaaggtctgtggtagtctggagttgatgaggaaggggtacaagatgtggttagaaacatttctttgttctggaaacaaagtactgttgaaaccagcttggaattttttttttttttttttttaagttcagttctcccttatggctgcctttcaaacaagtaccttttatctgatgcctgtatcttccctttgttaaggtgtaacttgatgtagggtcaaggtttttgtgacaacaggcagactccacacagagaggatatgatgagaatatggccatcacctgaaaagttttcttatcttctgtgcttttggtccctggaaacaaatccgcctatgtatgaagctagttgatttccagttgcactatttccagttgcctctgaagttcacaggcaatacattgtctagtcctttgcgaatttctctgatttgtgggcacagttatgaagtttccccacatgtgaagacaggtacaaaatagcagagccaagcagacagtgggtctattcttcattagctcagtgacttgtccacactcgtcttagcacttacgtttcaaaagcttgtcacaaacccttggagtcattcccagataatagaactggaaatgataaatcccctaatgccaagggtctagtgtgttcttagtggttatactgggaagtgtgtggagatttaggtgctgctctgctgctctggatggctgaaggctcctgggccatcttcatgtgctgcttgaagagctcctattttgtactcctggctagaatgctgtggaacaaatacaaagtgaaaaaagttctctgtagatttctgaagtgcatattcattgatgccaagaaaaaaaaaaagttgcctttttgaagtgatgttttttgctgtcttcttaaacacaaggcttttttgaatgattagtatatttcatggtaaagaaaacagcctgtctggctcaaagcaattaaatagaatgtaatggtgagtacaaatgagtgcacatgtcaggactcaggtctaactccttgtctcctgagcctaaagattgcaacatacacaagaacacactcctattcctaccccacacactcagggacaagcccaactaaagcttacaaggagaccagggtggctctgtccaggggagaagccagttatggaacagtgcattgagagccatggtaggagaggcccacagttctctggagcatgcagcaggggcaccccacctggccttgaggatcagggggagtcaaaggataaagcatggggctgatgacgtctgagggagtgtgatcctccatgtatggcctctgcctgctgtctcacatgtcccttctggtggtcacttgggctctaggagtatacgtcacctcagaccatctggcagaaatactccaggctcctaccccaaagcacatgtcagccttgctgctggagcacgaagacaatgtaaatgaaacatgaaatggaggagttgtgagaccctgaccctgagtccttacttgaaagctgctgctggtgttctgagtgtcttttggactcttatttcttgcccttttccttattaggcaagcagtaacttaggaagtaggtaagagcaataaatgtgacatgttatgtcatcatagtaggagctcatgggaataaaagtcagtggcttgatgcttctgttagaggcaaaaaaaaaaaaaaaaaaaaaaaaaaaaaaaaaaaaaaaaaaaaaaaaaaaaaa

SEQ ID NO: 5013 - DNA, 2032 bp, Homo Sapiens
  NM_021204
cttttcctgcccacgtggtctcgggctcctgccccgtcctgctcacgagttcagggctcctgggcggccgccttttccagttccaggtgtgcagaagtgtcctctccccacgcgcggcgggctgcacttggtcgctggctccgagatcgcgcggggccgccggaagcccaagacggtaccgggggccgcagccgcagccggcgccgccctccgccctccccaacagcaggccgagtcccgtagcatccggtagggaaatggtcgtgctttcggtccccgccgaagtcaccgtgatcctgttagatatcgaaggtaccacaaccccgattgctttcgtgaaggacattttatttccttacatcgaagaaaatgttaaagagtatctgcagacacattgggaagaagaggagtgccagcaggatgtcagtcttttgaggaaacaggctgaagaggacgcccacctggatggggctgttcctatccctgcagcatctgggaatggagtggatgatctgcaacagatgatccaggccgtggtagataatgtgtgctggcagatgtccctggatcgaaagaccactgcactcaaacagctgcagggccacatgtggagggcggcattcacagctgggcgcatgaaagcagagttctttgcagatgtagttccagcagtcaggaagtggagagaggccggaatgaaggtgtacatctattcctcagggagtgtggaggcacagaaactgttattcgggcattctacggagggagatattcttgagcttgttgatggtcactttgataccaagattggacacaaagtagagagtgaaagttaccgaaagattgcagacagcattgggtgctcaaccaacaacattttgtttctgacagatgttactcgagaggccagtgctgctgaggaagcagatgtgcacgtagctgtggtggtgagaccaggcaacgcaggattaacagatgatgagaagacttactacagcctcatcacatccttcagtgaactatacctgccttcctcaacctagagaagggttgttaaggcagaccgccctgttccccagagttgtccctgtagtgtctaggtttattctaatggtaaaagtaacttacttaaaaaacatatgtacacatatgtatgcaagtatgtatatatgtgtatgctcagattaacttccataggtacataagtgaaagaagtctcagttcagtgaacacaaaacttatttaaagatgctttatatgtagaaattgtttcaaatcatactctaacccttagtgagggcaaagtgtagttggtagaagaaattgctaaatacctatctaatgtgctatgtttatcaaatcgtgtactaaaatggaaagctagttttgagaaattattcagaagccttgttattttaaaaatgaaatatttcaaagactgaatattttcaaagaaaatgaataattcattgcccttgtgatttagaagattataacagctgtatttcatatttgcctccttatatatatcaaagaccaaggtatttccttctgcttcaaaagaacaaaattgggaaagaaaactcacttgagtcttgatcaaacaagtgtcttttacttaagaagaaacttggtaatcattgtggcacccacagcaagcagttgccttaccagtgaaaaaggtgcactgaggtaacatctaaaacagagatgtggttcttaatgtttaacagaacagttctaatcctgccacgtgttatcattatagattttatagttgcctttctaactacttagcacagtttgagaatacgttaattgctatttactatttaaaaagttttactgaaatcagtccataacattaagatgagccctaatatgtaagattttcctctggaatggatgtgagaaatgtaaattttataacagcagtatttatcctggtttaattctaatacgatgtcatgttaatttcatgttgtgattaataaaagcattttttcttcactcaaaaaaaaaaaaaaaaaaa

SEQ ID NO: 5014 - DNA, 3385 bp, Homo Sapiens
  NM_021209
aagcccctggctgtttatactccggagggtgtccccgtgcgtcatcggtggagtggaccaaaactggtgatctgtttgccctgtgtgaccttgcccagaaccctgctgactgagagaacacatctgctggaagtcctctgggattcaaggtacagggaatgaagagtagttttacagaaaaaagaggacaatattgggatcacctttgacctttccatttggaaataatattttctattgtgttatagaaaggtgggaagctttcatccagaacaatgaatttcataaaggacaatagccgagcccttattcaaagaatgggaatgactgttataaagcaaatcacagatgacctatttgtatggaatgttctgaatcgcgaagaagtaaacatcatttgctgcgagaaggtggagcaggatgctgctagagggatcattcacatgattttgaaaaagggttcagagtcctgtaacctctttcttaaatcccttaaggagtggaactatcctctatttcaggacttgaatggacaaagtctttttcatcagacatcagaaggagacttggacgatttggctcaggatttaaaggacttgtaccataccccatcttttctgaacttttatccccttggtgaagatattgacattatttttaacttgaaaagcaccttcacagaacctgtcctgtggaggaaggaccaacaccatcaccgcgtggagcagctgaccctgaatggcctcctgcaggctcttcagagcccctgcatcattgaaggggaatctggcaaaggcaagtccactctgctgcagcgaattgccatgctctggggctccggaaagtgcaaggctctgaccaagttcaaattcgtcttcttcctccgtctcagcagggcccagggtggactttttgaaaccctctgtgatcaactcctggatatacctggcacaatcaggaagcagacattcatggccatgctgctgaagctgcggcagagggttcttttccttcttgatggctacaatgaattcaagccccagaactgcccagaaatcgaagccctgataaaggaaaaccaccgcttcaagaacatggtcatcgtcaccactaccactgagtgcctgaggcacatacggcagtttggtgccctgactgctgaggtgggggatatgacagaagacagcgcccaggctctcatccgagaagtgctgatcaaggagcttgctgaaggcttgttgctccaaattcagaaatccaggtgcttgaggaatctcatgaagacccctctctttgtggtcatcacttgtgcaatccagatgggtgaaagtgagttccactctcacacacaaacaacgctgttccataccttctatgatctgttgatacagaaaaacaaacacaaacataaaggtgtggctgcaagtgacttcattcggagcctggaccactgtggagacctagctctggagggtgtgttctcccacaagtttgatttcgaactgcaggatgtgtccagcgtgaatgaggatgtcctgctgacaactgggctcctctgtaaatatacagctcaaaggttcaagccaaagtataaattctttcacaagtcattccaggagtacacagcaggacgaagactcagcagtttattgacgtctcatgagccagaggaggtgaccaaggggaatggttacttgcagaaaatggtttccatttcggacattacatccacttatagcagcctgctccggtacacctgtgggtcatctgtggaagccaccagggctgttatgaagcacctcgcagcagtgtatcaacacggctgccttctcggactttccatcgccaagaggcctctctggagacaggaatctttgcaaagtgtgaaaaacaccactgagcaagaaattctgaaagccataaacatcaattcctttgtagagtgtggcatccatttatatcaagagagtacatccaaatcagccctgagccaagaatttgaagctttctttcaaggtaaaagcttatatatcaactcagggaacatccccgattacttatttgacttctttgaacatttgcccaattgtgcaagtgccctggacttcattaaactggacttttatgggggagctatggcttcatgggaaaaggctgcagaagacacaggtggaatccacatggaagaggccccagaaacctacattcccagcagggctgtatctttgttcttcaactggaagcaggaattcaggactctggaggtcacactccgggatttcagcaagttgaataagcaagatatcagatatctggggaaaatattcagctctgccacaagcctcaggctgcaaataaagagatgtgctggtgtggctggaagcctcagtttggtcctcagcacctgtaagaacatttattctctcatggtggaagccagtcccctcaccatagaagatgagaggcacatcacatctgtaacaaacctgaaaaccttgagtattcatgacctacagaatcaacggctgccgggtggtctgactgacagcttgggtaacttgaagaaccttacaaagctcataatggataacataaagatgaatgaagaagatgctataaaactagctgaaggcctgaaaaacctgaagaagatgtgtttatttcatttgacccacttgtctgacattggagagggaatggattacatagtcaagtctctgtcaagtgaaccctgtgaccttgaagaaattcaattagtctcctgctgcttgtctgcaaatgcagtgaaaatcctagctcagaatcttcacaatttggtcaaactgagcattcttgatttatcagaaaattacctggaaaaagatggaaatgaagctcttcatgaactgatcgacaggatgaacgtgctagaacagctcaccgcactgatgctgccctggggctgtgacgtgcaaggcagcctgagcagcctgttgaaacatttggaggaggtcccacaactcgtcaagcttgggttgaaaaactggagactcacagatacagagattagaattttaggtgcattttttggaaagaaccctctgaaaaacttccagcagttgaatttggcgggaaatcgtgtgagcagtgatggatggcttgccttcatgggtgtatttgagaatcttaagcaattagtgttttttgactttagtactaaagaatttctacctgatccagcattagtcagaaaacttagccaagtgttatccaagttaacttttctgcaagaagctaggcttgttgggtggcaatttgatgatgatgatctcagtgttattacaggtgcttttaaactagtaactgcttaaataaagtgtactcgaagccagtaaaaaaaaaaaaa

SEQ ID NO: 5015 - DNA, 837 bp, Homo Sapiens
  NM_021210
agcagttccggtgagtccgtgggtggggtccccacctggttggaaggctgtgggtccgggaacccgagcccaaggagtgggggcggccccggagcgaggctcacactccctgccctgcagatgactgtccacaacctgtacctgtttgaccggaatggagtgtgtctgcactacagcgaatggcaccgcaagaagcaagcagggattcccaaggaggaggagtataagctgatgtacgggatgctcttctctatccgctcgtttgtcagcaagatgtccccgctagacatgaaggatggcttcctggccttccaaactagccgttacaaactccattactacgagacgcccactgggatcaaagttgtcatgaatactgacttgggcgtgggacccatccgagatgtgctgcaccacatctacagtgcgctgtatgtggagctggtggtgaagaatcccctgtgcccgctgggccaaactgtgcaaagtgagctctttcgctcccgactggactcctatgttcgctctctgcccttcttctccgcccgggctggctgaagcaacctacctcaagtctcaggagaattcatgtctgcctggggcccttccgaacctgtgccaactaagggcccccactgtaagcccccgcacccccaccccctgcccagagcaacagcctaaaggcctgccctgatgctctcctcctaccagagtgaagcccacagagtccctccacctccacaccaggccctctctccagttttatcccctgcctaatgctgcgagaagcacagaataaactttttgtcactctctgcgaaaaaaaaaaaaaaaaaa

SEQ ID NO: 5016 - DNA, 2408 bp, Homo Sapiens
  NM_021214
ggctgcagccgccctccgcgctcgcctgccagctccctcgccgcgcgtccgtcctccgtcctcccgggccagccagccagccagccagccgggccggcggcgggcaccaggccgtcccgatgcccgagccaggccccaggatgaacggcttctcgctgggtgagctgtgctggctcttctgctgcccgccctgcccgagccgcatcgccgccaagctggccttcctgccgcccgagcccacctacacggtgctggcgccggagcagcgcggcgccggcgcgtccgccccggccccggcccaggctaccgccgccgccgccgcggcccagccggcaccgcagcagcccgaggagggcgcgggcgcggggcccggtgcgtgcagcctgcacctcagcgagcgcgccgactggcagtactcgcagcgcgagctggacgccgtcgaggtcttcttctcgcgcacggcccgggacaaccggctcggctgcatgttcgtgcgctgcgcgccctccagccgctacacgctgctcttctcgcacggcaacgccgtggacctgggccagatgtgcagcttctacattggcctcggctcccgcatcaactgcaacatcttctcctacgactactcgggatacggcgtcagctcgggcaagccctccgagaagaacctctacgccgacatcgacgccgcgtggcaggcgctgcgcacccggtatggcgtgagtcccgagaacattatcctctatggtcagagcattgggactgtccccacggtagacttggcctcgaggtatgaatgcgcagcggtaattctccattcccctctgatgtctggtttgcgtgtggcttttccggataccaggaaaacatactgctttgatgctttccccagcattgacaagatatctaaagtcacctctcctgtgttggtcattcatggtacagaggatgaggtcatcgatttctcccatggcctagcgatgtacgagcgctgtccccgagccgtggagcccctttgggttgaaggggctgggcataatgacatagagctttatgcacaatacctagaaagactaaaacagttcatatctcacgaacttcctaattcctgaagacaacaacttgatcttacctcatttactgtgaacagaagagtcctctgttttgcacatgctttaactgggtagctgtaaaggcttgataaccatgaagaagtgcccaacctttagggtgttctaatcaaagagctgatgaaatctcagtcttttgtatctagaggtggttctgctaattcacacaacacgttaaactgaacagtcgtgattcccagcttcattaccttgcaggaatgggaatgagagctgaatgtagggacaattttctagtgctgtataaagtagcctcgcatctgtttctcaaccttatccatcatttctgacattcatgcaggacttgccctgttgccaccaatgttctcggtatttcacatgcagctctctttctgccactggatacatgggttcaatccatttgtgaagctgtgatagtgtaactggaaagctagtgtggtgaaaattcctttattattttttgttaacatgctgatctttcccggacaaatgaactgaagggtaatttactggaactctcgtgtacagcttcatcaactgtaaccatataaatataactggaatattcttaaacaaaaagaaactaggggtttttttaagtgtaaatttattactagccaacagagttttactattttgattgtctggttggtttaacaaagagcctagctgactttccttctgtaaagtcctccttgtaggcttttttaaagtactgtacatatttgcaatcacattgtgcatagattcttaatggtagatatgatttcttttgtcaggctacaacaatgaactgcagattccttgtttgtaatgtaaatgattgaatacattttgttaatatgtttttattcctatgttttgctattaaaaattttataacatttccaagacaaaaattccaagtttatgctttgaagaatttatgtaattaaaatttcactaaactaatctttttagtttaggaattatttgggttttgacactggaagttgcgccaaataagcatcagaaataggagatgcttaacattgctatactacttgtgttggttaggggtttggatttgggggttctttggttttaatttttttttccacatttaaaagccttaaatgtactgtaagcctcagatcgttgtacaactggactgcggttgattgccagtttgtgtactgttgcttggatgcggcacagtggttggtaatggaataaaggatgcatggatcagaaaaaaaaaaaaaaaaaaaaaaaaaaaaaaaaaaaaaaaaaaaaaaaaaa

SEQ ID NO: 5017 - DNA, 2057 bp, Homo Sapiens
  NM_021217
aagccgagttcccctctgccttgcgcgcttccccgcctaccccgagcggctcaggtgtcctgtcgtgctcacctgcgccggtcgctggaccgcggggcgctaaccctggagagcccaggagcgggcgggacatggactgcgtgatctttgaggaagtggctgtgaacttcaccccagaagagtgggcattgctggatcatgctcagaggagcctctacagagatgtgatgctggagacctgcaggaaccttgcctccttggattgttacatttatgttagaaccagtggatcaagttctcagagggacgtttttgggaatggaatatccaatgatgaagaaattgtaaagttcacaggaagtgattcctggtctatttttggagaaaattggagatttgataacactggagatcagcaccaaatcccacagaggcatctgagaagtcagctggggagactctgtgaaagtaatgaaggtcatcaatgcggagagaccttgagccagactgcgaaccttcttgtgcacaagagttaccctaccgaagctaaaccctctgagtgcactaagtgtggcaaagccttcgagaatcggcagagatctcacactggacagagaccgtgtaaggaatgtgggcaagcctgcagctgcctctcctgccaaagccctcctatgaaaacgcagactgtagagaaaccctgtaattgccaggactcaaggacagcatctgtgacatacgtgaaaagtctcagcagtaaaaagtcttatgaatgtcagaaatgtggaaaagctttcatttgtccctcatctttcaggggacatgtgaatagtcatcatgggcagaaaacccatgcatgtaaagtatgtgggaagacctttatgtattactcctaccttacacggcacgtaagaactcacacaggagagaaaccctatgagtgtaaggagtgtgggaaagccttcagctgtccctcgtactttcgagaacatgtcagaacacacactggagagaaaccgtatgaatgtaagcattgtggaaaatcattcagctgttactcctcctttagagatcacgtgaggacgcacactggagagaaaccctgtcagtgtaaacattgcggaaaagcgttcacttgttactcgtctcttcgagaacatgggagaacgcacagtggagagaaaccctatgaatgtaaggaatgcggcaaagccttcaggtacccctcctctctgcgagcacacatgagaatgcacaccggagagaagccctatgtgtgcaagcagtgtgggaaggccttcggatgtcccacttactttagaagacatgtgaaaacacacagcggggtgaagccctatcaatgtaaagagtgtgggaaagcctacagtttttcctcctcccttcgaatccacgtgaggacgcatactggagagaagccctttgagtgtaagcattgtgggaaagccttcagctgtcactcctcccttcgagagcatgtgcgaacccacagcggagagaaaccgtacgaatgtaatcaatgtgggaaagccttcagccacgctcagtactttcaaaagcatgtgagatcacacagtggggtcaaaccctacgaatgtactgaatgtgggaaagcctacagttgttcctcgtcccttcgtgtgcacgtgagaacgcacactggagagagaccgtatgaatgcaagcagtgtgggaaaaccttcaggtatctcgcatcgcttcaagcacatgtgagaacacatgctggagcgtgaatctacgaatacagtggacctgggagagtgttcaaccgtaaaaccttgttgtaaatgtgagaaacgttatttatgtagagcatgtaggaaaacctggtatagcacttattttgtacctaaaaattcagagtaggagagaaatctcttaattatgattaatatggtattgcctttacatgcctcagccttaatagtgattccttttgtattaatttctagtgtatgtttgtgatataaacatttaataaatatcctgttttgtacgctttcaaaaaaaaaaaaaaaaaa

SEQ ID NO: 5018 - DNA, 1532 bp, Homo Sapiens
  NM_021218
agcgcagcgggggcgggaaggttgtagtgccgcgagttgagctcctcttgcctaagtggtcgcgccccctttaagagcagcgattgtaaggagaggcggtcccggtgtcctcgggtcccaggtgattgtgaagtgctgaccaattgccactggacatacttgaaacaaaataggaaaatggcagcaaactcttcaggacaaggttttcaaaacaaaaatagagttgcaatcttggcagaactggacaaagagaaaagaaaactacttatgcagaaccagtcttcaacaaatcatcctggagctagcattgcactctcgagaccctctcttaataaggacttccgggatcacgctgagcagcagcatattgcagcccaacagaaggcagctttgcagcatgctcatgcacattcatctggatacttcatcactcaagactctgcatttgggaaccttattcttcctgttttacctcgccttgacccagaatgaagaaaacatttgcgatggaaaagtgactttgtaatatcaaatgccaaagctactatcattcagtgctacatgaactgtgactttaagaattttggtgaactttgatattttttgtttgtctgaaagaaaggaatgtgtaagtgaaagctgaaagaagaataaccaggatgatgagagctgtggaagctgtatcgtccaaggaattgattatgtaccgtgactgtaacttttttgtaatgctgtttaactctcaatcagactgtgaactggatggtcacgaagtcattccccaactcctagcaagtttgactgaatatatcatgtccacagtagattttcaagaatcatttatagtacttaactttaaagaaacaaggctgcttttaaaaaatgaactaataggcttaaatcaattgcatccatatttgctgtttataggattgctatcagtataccttttgcgtttatagtcaacatgtatcatcctgaaatattctttctggacttataactacttccccctttttcactttaaaacaaacctcaagaataaattactaaccagtcttaaccatcttttataaacatatgctcttataaatgttgtgactagatgcaattaaaaataatagggaatgtggtaggtttttaatttgtacatcctcttatttagtgttaccacataaatgatgagtttgtgtggttctgttttccatttttgttctaactgaaaactttttggctgggcacggtgcctcatgcctgtaatcccagcactttgggaggccaaggcgggcagatcacttgagatcaggagtttgagaccagcctggccaacatggtgaaaccctgtctctactaaaagtataaaaaattagccatgtgtggtggcacacgcctgtaatcccagctactcaggaggctgaggcaggagaatcgcttgaacctgggaggcaggggttgcagtgagctgagacggtgtcactgcactccagcctgggtgacagtgagtctttgtctcaaagaaaaaaaaaaaaaaa

SEQ ID NO: 5019 - DNA, 2775 bp, Homo Sapiens
  NM_021226
ggactgccccgccctggtccagtgattgatcagcagtgattactgaggctttaatggtccgcttggatgggaattaattctgggatggataaataatgcatcgaggtttatgtagtccaaggcgagccgtccgtccggagccaggagaggtagccgagggagcctgacgggtgacgccagcggccacggggccccgaacgagcaggacatgaggggcgactaggcgcgaggacgagcaaaagcaagtggatgacagcatgaacggccctgcggggctggccggacggctgcaagaacatgctgagcccaaagatcaggcaggccaggagggcccgctccaaaagcctagtgatgggggagcagagccggagccctgggcggatgccgtgccctcacaggctgggccccgtgctgaaggcgggctggctgaagaagcagaggagcatcatgaagaactggcagcagcgctggtttgtgctgcgtggggatcagcttttctactacaaggacaaagatgagatcaagccccagggatttatttctctacaagggacacaggtgactgaacttcctcctggccccgaggacccagggaagcacctctttgagatcagcccaggtggtgccggggagcgggagaaggtgccggccaaccccgaggcgctcctgctcatggccagctcccagcgtgacatggaggactgggtgcaggccatccgccgagtcatctgggccccgctgggcggagggatctttgggcagcgcctagaggaaacagtccaccacgagcggaagtatggcccccgcctggcgcccctgctggtggagcagtgtgtggacttcatccgggagcgcgggctcactgaggaggggctgttccgcatgccaggccaggccaacctggtgagggacctgcaggattccttcgactgtggggagaagccactgtttgacagcacaacagacgtgcacacggtggcctccctgctgaagctgtacctgcgggagctccccgagcccgtggtccccttcgccaggtacgaggacttcctcagctgcgcccagctgctcaccaaggacgagggggagggcactctggagttggctaaacaagtgagcaaccttcctcaggcaaattacaacctgctcagatacatctgcaagtttctggatgaagttcaggcatactcaaatgtcaacaagatgagtgtccagaatctggcaaccgtttttggacctaacattctgcggccacaggtagaggacccagtaaccatcatggaaggcacttccctcgtccagcacctgatgaccgtcctcatccgcaaacacagccagctcttcacggcaccggtcccggaagggcccacctccccgcgcgggggcctgcaatgcgcagtggggtggggctccgaggaggtcaccagggacagccaaggagagcccggcggccccggcctgcccgcgcacaggacctcttccctggacggggcggccgtggcggtgctctccagaacagcccccacggggccggggagccggtgcagccctgggaagaaggtgcagaccctgcccagttggaagtcctccttccggcagccgaggtccctatcgggaagcccgaaggggggcggctcatccctggaggtgcccatcatctcctccggcgggaactggcttatgaacgggctgtcctccctgcgcggacaccgccgggcctcgtcgggagaccggctcaaggactcgggctccgtgcagagactctccacctacgacaatgtgcccgcgccgggcctggtccccggcatacccagcgtggccagtatggcgtggtccggggcctcgtccagcgagtcgtcggtggggggctcactcagcagctgcacggcctgccgcgccagcgactcgtctgcccgcagttccctgcacaccgactgggccctggagccctccccgctccccagcagcagcgaggaccccaagtccctggacctggaccacagcatggacgaggcgggcgcgggtgccagcaacagcgagcccagcgagccggacagccccacccgggaacacgcgcgccgctccgaggccttacaggggctggtcactgagctcagggccgagctgtgccgccagcggactgagtacgagaggagtgtgaaaagaatcgaagaagggagtgctgacctgagaaaacgaatgtcccggttagaagaagaactggaccaggaaaagaaaaaatacatcatgctggaaataaagctgcggaactctgaacgggcgcgggaggatgcggagaggaggaaccagctgttgcagagggaaatggaggagtttttttcgaccctaggaagcttgactgttggggcaaaaggtgccagggccccaaagtaaaaggaatggcagagctcacttctgtaccacgtctgctggtctccagccttgtatggagttagaagcgtctgtatctctggagcagccaggcgctctggagccagctggagagagagagatcctgatacctctgtggggactgtggggacttttgggaccccacacactccaggtgggatcagatgctgctccaaccatgcagttcctggtgagggtcagaaggggacggtaccaagagtagcgcttagcccttacccaggaaatatccttcatggccacagaaatggagggcgcccaggatccaggcagccaccgggaacagtcagctttctttattaaatgtgctcacaaagcaaaaaaaaaaaaaaaaaaaaaaaaaaa

SEQ ID NO: 5020 - DNA, 832 bp, Homo Sapiens
  NM_021237
cgcccgtcgggggcgcgtctctttcagcagccaatgggctctgcccaccttcgtcctcgtcagcattttgtctaatcgcggcctgtgacgctcgaagggcggggagcagagggagatacagaaaccgacaggggccaggcgcccggtggctccgaagcggggaagtgggacaagatggtttacatctcgaacggacaagtgttggacagccggagtcagtctccatggagattatctttgataacagatttcttctggggaatagctgagtttgtggttttgtttttcaaaactctgcttcagcaagatgtgaaaaaaagaagaagctatggaaactcatctgattccagatatgatgatggaagagggccaccaggaaaccctccccgaagaatgggtagaatcaatcatctgcgtggccctagtccccctccaatggctggtggatgaggaaggtaaatgtctgctctaagaagcagacaaccggacatgcgcattcatagcagaaggaaaccatcaagaagtggaaggctgaccatgatgagcagtagatgaatgtgtatgtctaaacaaggactgctctgtgtcctcacagatgaatgaggtcatgctgggaattccctctgcagggaactggcctgactgacatgcagttccataaatgcagatgtttgtctcattacctttttgtatagtttattaaagtattaatatagttttaataagtaaatatttttaggttgcagaatggactcctcatctttatattcacgaaaaagcaatctgaagaaaacaaataaaagcctgtgtatttagcaaaaaaaaaaaaaaa

SEQ ID NO: 5021 - DNA, 4303 bp, Homo Sapiens
  NM_021239
agtgcacgccgggcaagaggaagacctccatcagctcgccgcgcagcgcggctgtatttgcggcctgtgcgagtaggcgcttgggcactcagtctccctggcgagcgacgggcagaaatctcgaaccagtggagcgcactcgtaacctggatcccagaaggtcgcgaaggcagtaccgtttcctcagcggcggactgctgcagtaagaatgtcttttccacctcatttgaatcgccctcccatgggaatcccagcactcccaccagggatcccacccccgcagtttccaggatttcctccacctgtacctccagggaccccaatgattcctgtaccaatgagcattatggctcctgctccaactgtcttagtacccactgtgtctatggttggaaagcatttgggcgcaagaaaggatcatccaggcttaaaggctaaagaaaatgatgaaaattgtggtcctactaccactgtttttgttggcaacatttccgagaaagcttcagacatgcttataagacaactcttagctaaatgtggtttggttttgagctggaagagagtacaaggtgcttccggaaagcttcaagccttcggattctgtgagtacaaggagccagaatctaccctccgtgcactcagattattacatgacctgcaaattggagagaaaaagctactcgttaaagttgatgcaaagacaaaggcacagctggatgaatggaaagcaaagaagaaagcttctaatgggaatgcaaggccagaaactgtcactaatgacgatgaagaagccttggatgaagaaacaaagaggagagatcagatgattaaaggggctattgaagttttaattcgtgaatactccagtgagctaaatgccccctcacaggaatctgattctcaccccaggaagaagaagaaggaaaagaaggaggacattttccgcagatttccagtggccccactgatcccttatccactcatcactaaggaggatataaatgctatagaaatggaagaagacaaaagagacctgatatctcgagagatcagcaaattcagagacacacataagaaactggaagaagagaaaggcaaaaaggaaaaagaaagacaggaaattgagaaagaacggagagaaagagagagggagcgtgaaagggaacgagaaaggcgagaacgggaacgagaaagggaaagagaacgtgaacgagaaaaggagaaagaacgggagcgggaacgagaacgggatagggaccgtgaccggacaaaagagagagaccgagatcgggatcgagagagagatcgtgaccgggatagagaaaggagctcagatcgtaataaggatcgcagtcgatcaagagaaaaaagcagagatcgtgaaagggaacgagagcgggaaagagagagagagagagaacgagagcgagaacgagaacgggagcgagagagagagcgagagagggaacgggagcgagaaagagaaaaagacaaaaaacgggaccgagaagaagatgaagaagatgcatacgaacgaagaaaacttgaaagaaaactccgagagaaagaagctgcttatcaagagcgccttaagaattgggaaatcagagaacgaaagaaaacccgggaatatgagaaagaagctgaaagagaagaagaaagaagaagagaaatggccaaagaagctaaacgactaaaagaattcttagaagactatgatgatgatagagatgaccccaaatattacagaggaagtgctcttcagaaaaggttgcgtgatagagaaaaggaaatggaagcagatgaacgagataggaagagagagaaggaggagcttgaggaaatcaggcagcgccttctggcagaagggcatccagatccagatgcagagctccagaggatggaacaagaggctgagaggcgcaggcagccacaaataaagcaagagccagaatcagaagaggaggaagaagaaaagcaagaaaaagaagaaaaacgagaagaacccatggaagaggaagaggagccagagcaaaagccttgtctgaaacctactctgaggcccatcagctctgctccatctgtttcctctgccagtggcaatgcaacacctaacactcctggggatgagtctccctgtggtattattattcctcatgaaaactcaccagatcaacagcaacctgaggagcataggccaaaaataggactaagtcttaaactgggtgcttccaatagtcctggtcagcctaattctgtgaagagaaagaaactacctgtagatagtgtctttaacaaatttgaggatgaagacagtgatgacgtaccccgaaaaaggaaactggttcccttggattatggtgaagatgataaaaatgcaaccaaaggcactgtaaacactgaagaaaagcgtaaacacattaagagtctcattgagaaaatccctacagccaaacctgagctcttcgcttatcccctggattggtctattgtggattctatactgatggaacgtcgaattagaccatggattaataagaaaatcatagaatatataggtgaagaagaagctacattagttgattttgtttgttctaaggttatggctcatagttcaccccagagcattttagatgatgttgccatggtacttgatgaagaagcagaagtttttatagtcaaaatgtggagattattgatatatgaaacagaagccaagaaaattggtcttgtgaagtaaaactttttatatttagagttccatttcagatttcttctttgccacccttttaaggactttgaatttttctttgtctttgaagacattgtgagatctgtaattttttttttttgtagaaaatgtgaattttttggtcctctaatttgttgttgccctgtgtactcccttggttgtaaagtcatctgaatccttggttctctttatactcaccaggtacaaattactggtatgttttataagccgcagctactgtacacagcctatctgatataatcttgttctgctgatttgtttcttgtaaatattaaaacgactccccaattattttgcagaattgcacttaatattgaaatgtactgtataggaaccaacatgaacaattttaattgaaaacaccagtcataaactattaccacccccactctcttttgatcagaaatggcaagcccttgtgaaggcatggagtttaaaattggaatgcaaaaattagcagacaatccattcctactgtatttctgtatgaatgtgtttgtgaatgtatgtgtaaaagtctttcttttccctaatttgctttggtggggtccttaaaacatttcccaactaaagaatagaattgtaaaggaaaagtggtactgttccaacctgaaatgtctgttataattaggttattagtttcccagagcatggtgttctcgtgtcgtgagcaatgtggtttgctaactggatggggttttcttattaataagatggctgcttcagcttctcttttaaaggaatgtggatcatagtgatttttccttttaattttattgctcagaaatgaggcatatcctaaaaatcctggagagctgtatttaatgcatttttgcactaattggtccttagtttaattctattgtatctgtttatttaacaaaaaattcatcataccaaaaagtgtaagtgaaaaccccctttaaaacaaaacaaaaaaatgaaataaaattaggcaaattgacagacagtgagagttttacaaacatgataggtattctgctcggcaatttgtaagtttacatgttatttaaggataaaggtaaatcattcaaggcagttaccaaccactaactatttgttttcatttttgtcttgtagaaggtttatatcttgttttaccttggctcattagtgtttaaaaatgtactgatgatgtgcttagagaaattcctggggctttcttcgttgtagatcagaatttcaccagggagtaaaattacctgaaaacgtaagaagttttaaacagcttttcacacaaattagatgcaactgttcccatgtctgagtacttatttaaaagaaaggtaaagattggcctgttagaaaaagcataatgtgagctttggattactggattttttttttttttaaacacacctggagaggacatttgaaaacactgttcttaccctcgaaccctgatgtggttccattatgtaaatatttcaaatattaaaaatgtatatatttgatcctggggactcatattctttcagaatcatgtaaataaatggcatcatgttgtaa

SEQ ID NO: 5022 - DNA, 2454 bp, Homo Sapiens
  NM_021242
ggctcactctgcaaccaaggcacgtgcattctggtcatcccacgcggggagcgcgcgcaaggcccgcccagcccccacatgccagccccaccctccagtcggtccggacgccgacgcctttttgaccctcgctgtgcccggccctcctcatctggcctgcccagggcttggtgctggcggggtccagctgctccaatccctcctcctctgctctgccctgccctgccctggcctgccccggcgccctccctcagcccgggtatcaggcgagaggcggagctggcccggcgcgccccgcccccgctgtagaaagggccgggcgagtgttactcgcggtcatcccggcctgggccttttatctcggtgctgccgggggaggcgggaggaggagacaccaggggtggccctgagcgccggcgacacctttcctggactataaattgagcacctgggatgggtagggggccaacgcagtcaccgccgtccgcagtcacagtccagccactgaccgcagcagcgcccttgcgtagcagccgcttgcagcgagaacactgaattgccaacgagcaggagagtctcaaggcgcaagaggaggccagggctcgacccacagagcaccctcagccatcgcgagtttccgggcgccaaagccaggagaagccgcccatcccgcagggccggtctgccagcgagacgagagttggcgagggcggaggagtgccgggaatcccgccacaccggctatagccaggcccccagcgcgggccttggagagcgcgtgaaggcgggcatccccttgacccggccgaccatccccgtgcccctgcgtccctgcgctccaacgtccgcgcggccaccatgatgcaaatctgcgacacctacaaccagaagcactcgctctttaacgccatgaatcgcttcattggcgccgtgaacaacatggaccagacggtgatggtgcccagcttgctgcgcgacgtgcccctggctgaccccgggttagacaacgatgttggcgtggaggtaggcggcagtggcggctgcctggaggagcgcacgcccccagtccccgactcgggaagcgccaatggcagctttttcgcgccctctcgggacatgtacagccactacgtgcttctcaagtccatccgcaacgacatcgagtggggggtcctgcaccagccgcctccaccggctgggagcgaggagggcagtgcctggaagtccaaggacatcctggtggacctgggccacttggagggtgcggacgccggcgaagaagacctggaacagcagttccactaccacctgcgcgggctgcacactgtgctctcgaaactcacgcgcaaagccaacatcctcactaacagatacaagcaggagatcggcttcggcaattggggccactgaggcgtggcgcccgtggctgcccagcaccttcttcgacccatctcaccctctctcattcctcaaagctttttttttttttcctggctggggggcgggaagggcagactgcaaactggggggctgcgtacgtgcaggaggcgcggtggggctgcgtggaggagggggccacgtgtgagagagaagaaaatggtggccggagatgggagggcccaaggaacctcctgggagggggcctgcattctatgttggtgggaatgggactgggctgacgccctgcattcagcctgtgcctttcctggggtttcttttctgttcttttcggaggagagggcccgagaaggggccataccagggcgcggcgctgggttgccacacttgggaaagcagcccggagctgggtgctggggaaggcggggcgcgtagcctcccgccgccctgcggttgggccggtggaggcccaggcgttgctaggattgcatcagttttcctgtttgcactatttctttttgtaacattggccctgtgtgaagtatttcgaatctcctccttgctctgaaacttcagcgattccattgtgataagcgcacaaacagcactgtctgtcggtaatcggtactactttattaatgattttctgttacactgtatagtagtcctatggcacccccaccccatccctttcgtgccactcccgtccccacccccaccccagtgtgtataagctggcatttcgccagcttgtacgtagcttgccactcagtgaaaataataacattattatgagaaagtggacttaaccgaaatggaaccaactgacattctatcgtgttgtacatagaatgatgaagggttccactgttgttgtatgtcttaaatttatttaaaactttttttaatccagatgtagactatattctaaaaaataaaaaagcaaatgtgtcaactaaattggacaagcgtctggtcctcattaatctgccaatgaatggtttcgtcattaaataaaaatcaatttaattgatttactagcaaaaaaaaaaaaaa

SEQ ID NO: 5023 - DNA, 4926 bp, Homo Sapiens
  NM_021244
cgcagtctctctctctctccctcctccgggaggaactgccgcgctccggctgactcctccgccggcgggcggggcgggggagggggcttcgggcgcgctgggaaccgcgggacccggacctgggcgccgcccgccgggggacgcgcggcccccgcttccgccgggccccgctgagctctagacaaacctccgcttcagaaataggctgcgggcggccggctaggaggcttggcccccaccccgggacccccgccgtccccgggccggccggccggtgggcacgatgagccaggtgctggggaagccgcagccgcaggacgaggacgacgcggaggaggaggaggaggaggatgagctggtggggctagcggactacggagacgggcccgactcctccgacgccgatccggacagcggcacagaggagggagttctggacttcagtgaccccttcagcactgaagtgaagccgagaatcctgctcatgggcctgaggagaagcggcaagtcgtctattcagaaagttgtctttcacaaaatgtctcccaacgaaactctgttcttggagagcactaataagatatgccgggaagatgtttccaacagctcctttgtcaattttcagatttgggacttcccaggacagattgacttttttgaccctacatttgactatgagatgatcttccggggaacaggagcactgatatttgtcattgactcacaggatgattacatggaagccctggccaggctccacctcacggtgaccagggcctacaaagtgaatactgacatcaacttcgaggtgtttattcataaagtggatggtctgtcagatgaccacaaaattgaaacccaaagagatattcaccagagggcaaacgatgaccttgcagatgctggattagaaaaaattcacctcagcttttatctgacaagcatatatgatcattcaatatttgaagcttttagcaaagttgttcagaaactgattccacaactcccaactctggagaatttgctgaacatctttatctcaaattctggaattgaaaaggcatttctatttgatgtggtcagtaaaatttatattgcaactgatagtactccggtggatatgcaaacctatgagctctgctgtgatatgatagatgtggttattgacatctcttgtatttatggtctcaaagaagatggagcaggaaccccctatgacaaggaatccacagccatcataaagcttaataatacaaccgtgctttatttaaaagaggtgacaaagttcctggctctcgtttgctttgtcagagaggaaagctttgaaagaaaagggctaattgactataattttcattgcttccggaaggccattcatgaagtttttgaggtgagaatgaaagtagtaaaatctcgaaaggttcagaatcggctgcagaagaaaaagagagccacccctaatgggacccctagagtgctgctgtaggtgaggtttcaggaatgtcttttgaaatcagaccttatccatgaggctgctgcgccatgttgcactaaaggaagaggaagaaggagattgggacacataccattgatttgttgttaaaaaaaaaaaattcctgcaaccctcttgatcttctcttttataaataaagtaagcactttgaagcaaaaacttgtatattaacagtgatgtgaaatccattgtcatttcattacacaaatgtaaacttttatggtctgtagtcaaaaaaatcccgtgtgagaactgccaggaattgtacatattttgcactttttcatgtttctcattgaactgaactttgataaaacgacttttctaagctttttttctgtacttggtgtcaaggacatgcatactgtagtccatatctatatggcaatcagaaattaatcaaaaagtgatgcattggtaatgactttttgtaaatttggaaatctttgctaccaattgttgagaaaaatcatttttcagtggagctggaacagattggagctacaagctccaggagcaataagaactgtcccctatttataatgggtgtaaacagttttgtagaataatgctagcaccagacttacctaaaaatttctatagcagtggctgtgcttccctgctcaacggtttttatgaagctgtttacctcaacacacatctctataatcactttatacagagaggttatttctttttgttgcattagtattcttttgaaactttgggaccagatttccaaaatggtgccgaacactggagagaagtaagaatgtcactgaattgtagggtttctggaggcttttctgtacctaccacccagggctaaagtaacatcagaggcctaaagttgttccaaaagtatgtgattggcaactgcagactaaaaaacatagatacaattctggacttttggccctgtgcgatggtctggtgtgctgcatttaaaatgcttattcaggaccagttctttattgctccatgaccatagtgaatagaacaaatcgcagaaccccaccatggagctcaatcctgttagtcacttttgtcacctccacatctccttctcactggtgataacatgcctcatgtactccacttgttcccaccttatgattaagccaagctcagcctgccaccagcatgctctgcaaggctgaagagtcatcctgaagacccctaaaggtcagtgggaaaaggatggctggagagacattacaattagctgtgtaattgtttctgtgaaattatttcacttatgtttactttagactaacaggaaattaagagtcctaaatctacccctatgccaaatcattccaagtagataattttacgtgcatctcaagggttagcaccctaaggcatgcttgtggggcattagaaaatgagatttttttttttttaaagcagagcctcctaagaacatcaaagttggtcctagcaaaatatataaagtccctaaagcaacttatacttgaaactttttttttttttttttttagaggggggcctcattctgttgcttgtgctggaatacattggtacaatcatagctcactgttacctcttgggctcaagggatccttccacctcagcctccctagtagctagaactacaggtgtgcacaaccacgcccggctaattcttaaattttgtttttgtagagacaggatctcactgtgttgcccaagatggtctcaaactcctggccccaagcaatcctcctgccttggcctcctcaaatgctgagattacaggcctgagctactgtgcccagcctaaactttcccacttctctctgtggcttctttccaacctctctccttcctctccccaagtcctgtttctttgaagctggtaactgaatttaagatgatatctggttggtgtttaaggtttgagcctcccaaggttctgtgcattttgaaaggagatttctaaaaataattaaggtgccctaactcctttcctcatgattcctactccgaaacctggatggttaggagcccagggctccctgatttccagagctatatcctgttggacctttgccaacagacctgacacttaggggttattgttataaatctaattctctaatattttttacatgttgtttcactttgaataagcaaatgaagaatcagttttctaatatgactttatcctcaagctagagacactagcctatttggtaaatcacacattacttaggtatatttattactataaccaggttggagcttccatgtttaagctgggtatatgatgggtttttgttaaaatgtgccttaaaaagcctattacttcaagagcaaatgattctttgggggaaaggcaaaaataattctatgacatagggcccaagttcatggtagtaagtgtactctttgattaatcacacgctaatatagattactgcctctaactttgtaagtgtggcaatgacttcttaattaaagaaagatgcaggagttatgtctaagcgttcagtttttcaaatctgtgttattggaaatgtcttcaagtcattttgcattgtatttttgatatgagaggcagcttattgcgatgtgtatggccatgtttcattctcaaatttaattctataaatacaaatcctaaatacatggctacagcaactgcactggaacatttttgcttggttttagggattgagaacttgccttgcaggtttccttcctcaaaaggagcagggcagtcctttccctgttgagtcaattagaatttttacatagaggtgagactgtgaattattttggttattttcagtgatgtagattagtgtgaatgaccagggtggaatgtttttgaaggaatataaagcaaaaactggttgacattcacaaactgttcttttgtgaacatattttggacccttaaatatgactaaaatcacagcaatattgttacatacgggttatatgccaactctgtttgaaatatactctggaaaaacagctgaattgtcttggttattaaagtatggtatgtattcaacttgtacagactggatgtaatttgtaatcaggtatagtccatgttttactttaagcagtacatcacttaataaccattgttaagccattgctttcaagaatgttaactgccaatttaaaagcatgtgtcctaggttcatgctttggtaaagctctcatttcaagtgtattcatagctaagctttctgggagcagaattgtctctttggtgaaaaggaagtacagcctttcctgtttctgaggttgcttaccatacatgtatgtcactgtttcattggccctgttacatccatttggtaaaatttatttgtcctgattaaccagctctcattttatggaaatgatgataaatctcactacttaaatttaatttatgcttttatttttaa

SEQ ID NO: 5024 - DNA, 402 bp, Homo Sapiens
  NM_021246
atgaaaccccagtttgttgggatcttgctcagctccctgctaggggctgccttgggaaaccgaatgcggtgctacaactgtggtggaagccccagcagttcttgcaaagaggccgtgaccacctgtggcgagggcagaccccagccaggcctggaacagatcaagctacctggaaaccccccagtgaccttgattcaccaacatccagcctgcgtcgcagcccatcattgcaatcaagtggagacagagtcggtgggagacgtgacttatccagcccacagggactgctacctgggagacctgtgcaacagcgccgtggcaagccatgtggcccctgcaggcattttggctgcagcagctaccgccctgacctgtctcttgccaggactgtggagcggatag

SEQ ID NO: 5025 - DNA, 1365 bp, Homo Sapiens
  NM_021250
atgcagctcagcctgggctacacagccaggtgtcagatgtgtctctgctgatctgagtctgcctgtggcatggacctgcatcttccctgaagcatctccagggctgaaaaatcactgaccatggcaccatggtctcatccatctgcacagctgcagccagtgggaggagacgccgtgagccctgccctcatggttctgctctgcctcgggctgagtctgggccccaggacccacgtgcaggcagggaacctctccaaagccaccctctgggctgagccaggctctgtgatcagccgggggaactctgtgaccatccggtgtcaggggaccctggaggcccaggaataccgtctggttaaagagggaagcccagaaccctgggacacacagaacccactggagcccaagaacaaggccagattctccatcccatccatgacagagcaccatgcagggagataccgctgttactactacagccctgcaggctggtcagagcccagcgaccccctggagctggtggtgacaggattctacaacaaacccaccctctcagccctgcccagtcctgtggtgacctcaggagagaacgtgaccctccagtgtggctcacggctgagattcgacaggttcattctgactgaggaaggagaccacaagctctcctggaccttggactcacagctgacccccagtgggcagttccaggccctgttccctgtgggccctgtgacccccagccacaggtggatgctcagatgctatggctctcgcaggcatatcctgcaggtatggtcagaacccagtgacctcctggagattccggtctcaggagcagctgataacctcagtccgtcacaaaacaagtctgactctgggactgcctcacaccttcaggattacgcagtagagaatctcatccgcatgggcatggccggcttgatcctggtggtccttgggattctgatatttcaggattggcacagccagagaagcccccaagctgcagctggaaggtgaacagaagagagaacaatgcaccattgaatgctggagccttggaagcgaatctgatggtcctaggaggttcgggaagaccatctgaggcctatgccatctggactgtctgctggcaatttctttttttctttcttttcttttctttcttttttttttttttttttttttttttgagatggagtcttgctctgtcaccaggctggaatgcagtggcgcaatctgggctcactgcaacctccgcctctcgggttcaagtgattctcctgcctcagcctctggcaatttctagagggaggaatgggtgtttgagtgcagagacactggtctggggtgatccatggagga

SEQ ID NO: 5026 - DNA, 1427 bp, Homo Sapiens
  NM_021254
atctccttccgtcggtccgctcagaatcagctgtcctctcagactgtgtgggtggtttccccggccgcagctccgtacgggcttggattgctgggcctcggtgcaccccagcctcccccactcgggttctgagcttgagctggcggctctttaactctgcttcactgttgctcttggcaacatccacttccgggagcgagtgccgtttcccccgctcaccgcgggctagggagcgtgggattccggactgtgagcggctgttagtgcgtcgcagctgctggcgatccggcgaccctcggccggcaggacccgcgggccacgcagccggggccttctcaacgcctcagtacctcggcgggaccgccatggttctgctgcacgtgaagcggggcgacgagagccagttcctgctgcaggcgcctgggagtaccgagctggaggagctcacggtgcaggtggcccgggtctataatgggcggctcaaggtgcagcgcctctgctcagaaatggaagaattagccgaacatggcatatttctccctcctaatatgcaaggactgaccgatgatcagattgaagaattgaaattgaaggatgaatggggtgaaaaatgcgtacccagcggaggtgcagtgtttaaaaaggatgatattggacgaaggaatgggcaagctccaaatgagaagatgaagcaagtgttaaagaagactatagaagaagccaaagcaataatatctaagaaacaagtggaagccggtgtctgtgttaccatggagatggtgaaagatgccttggaccagcttcgaggcgcggtgatgattgtttaccccatggggttgccaccgtatgatcccatccgcatggagtttgaaaataaggaagacttgtcgggaacacaggcagggctcaacgtcattaaagaggcagaggcgcagctgtggtgggcagccaaggagctgagaagaacgaagaagctttcagactacgtggggaagaatgaaaaaaccaaaattatcgccaagattcagcaaaggggacagggagctccagcccgagagcctattattagcagtgaggagcagaagcagctgatgctgtactatcacagaagacaagaggagctcaagagattggaagaaaatgatgatgatgcctatttaaactcaccatgggcggataacactgctttgaaaagacattttcatggagtgaaagacataaagtggagaccaagatgaagttcaccagctgatgacacttccaaagagattagctcacctttctcctaggcaattataatttaaaaaaaaaaaaaaggccacttactgccctctgtaaaagatgttaacatttctagttttcttttagtgtgaatttttaaaatagcagttattcaaggttttagaacttaataaatacctagtcag

SEQ ID NO: 5027 - DNA, 3656 bp, Homo Sapiens
  NM_021259
ggccgggccatgggcgccgggggcagaggcggaggcggcagaggcggaggcggcagaggctgcccgggcggcggcgggggccggcggcgcgggacgcgggccgggtagcgccgggccgagcgcggagccatgggccgggctggcaccgggaccgggggcgaggcggtggccgcggtggtggcggggccgctgctgctgctgctgcttgcccggcccccgcctgcctccgccggctacagcgggaagagcgaggtggggctggtgtccgagcacttctcgcaggccccgcagaggctgtccttctacagctggtacggcagtgccaggctcttccgcttccgcgtgcccccagatgctgtgcttctacgctggctcctgcaggtctcccgggagagcggcgctgcctgcaccgacgcggagatcaccgtgcacttccgttccggcgcccctccggtcatcaacccgctgggcaccagcttcccggacgacaccgcggtacagccctccttccaggtcggggtgccgctgagcaccacaccgagaagcaatgcctccgtcaacgtttcccacccggcccccggggactggttcgtggccgcccacctgcccccctcatcccagaagatcgagttgaagggcttggctcccacctgtgcctacgtcttccagcctgaactgctggtcacgcgggtggtcgagatttccatcatggagccggacgtgccccttcctcagaccctcctctcccatcccagctacctcaaggtctttgtccccgattacacgcgggagcttctgctggagctgcgggactgcgtgtccaatgggagcctgggctgccccgtgcgtctcaccgtgggcccggtcaccctgcctagcaacttccagaaggtgctcacctgcaccggtgccccctggccctgccgcctgctgctgccctcaccgccctgggaccggtggctgcaagtgacagctgagagcctggtggggcccctcgggacagtggctttcagtgctgtagctgccctcacagcttgcaggccacggagcgtgaccatccagccccttctgcagagcagccaaaaccagagcttcaatgcctcctctggtctgctgtccccgagccccgaccaccaggacctgggcaggagtggcagggtggaccgcagccccttctgcctcacaaactacccagtcacgcgggaggacatggacgtggtgtcggtgcacttccagcccctggacagggtctcggtgagggtgtgttcggacacgccctccgtgatgcggctgcgcctgaacaccggcatggacagcgggggttccctcaccatctccctgcgggccaacaagacagagatgcggaacgagaccgtcgtagtggcctgcgtgaatgctgcctcgcccttccttggcttcaatacttcgctcaactgcaccacagccttcttccagggctaccctttgtctctgagcgcctggtctcgcagggccaacctcatcatcccctacccagagacagacaactggtacctctccctgcagctcatgtgccctgagaatgctgaggactgtgagcaggctgtggtccacgtggagaccaccttgtacctggtgccctgtttgaacgattgtggaccctatggccagtgcctcctgctccgcagacacagctacctgtatgccagctgcagctgcaaggcaggctggcgtgggtggagctgcacggacaacagcacagcccagacggtggcccagcagagggcggccacactgctgctcacgctcagcaacctcatgttcctggcccccatcgccgtctcagtgcggcgattcttcctggtggaggcctccgtctacgcctacaccatgttcttctccacgttctaccacgcctgcgaccagcccggggaggcggtgctgtgcatcctcagctacgacacgctgcagtactgcgacttcttgggctccggggcggccatctgggtcaccatcctgtgcatggcacggctcaagacagtcctgaaatacgtgctgtttcttctgggtacactggtcatcgccatgtccttgcagctggaccgcaggggcatgtggaacatgctggggccctgcctctttgccttcgtgatcatggcctccatgtgggcttaccgctgcgggcaccggcgccagtgctaccccacctcgtggcagcgctgggccttctacctcctgcccggcgtctctatggcctctgtgggcatcgccatctacacctccatgatgactagcgacaactactactacacccacagcatctggcacatcctgctggccgggagcgcagccttgctgctgccgccacctgaccagcccgccgagccctgggcctgctcgcagaaattcccctgccactatcagatctgcaagaacgatcgggaggaactgtacgcagtgacgtgacactggcctggggacagctgctgctctgatgacctcttcagccaggagctgtatcgagggggaggcgcctggtccagccctggacagattgatttccagctgaataaattggcctagataccctcttacttcctcctactgaggagagggccacccctccctcacacgcacctctcctcgccagctgcctgctcgctgctgagatccctctgcagatcccagctgctgtctgcagtggcccctggggcctgggcttggttacttggagaccacaggtgcctgtgcgagggtggggctgtgtgctctgctggcctgtgggtggctagagatggggagaaggactccctatggtcctgttccctggcgaggctgtggtgagacccatggcgcccaggagccctgagcccaccactggggccgggagctgtggactccgagacccctgctcctggcccctgtgtggccctgatgccagcctgcctggggcatggaggatccccctctgctgctgtggtcaccatagggacgggagacggaggtttcccccagagctgatgggcactggggatgcaggctcccgccccgcccctccctttttcctggctctggagccttgggtccctgagaagagcttccttggactggggtgctctgctgctctgggggtttggcccagaaggaacccctacccagccctgtccacccaccccagcgttcctgggcccccctctgggagcttcctcttggtcccaggagctgcggtggtgtctgccccctgcactgggctctgtgccctgtgggtgttcaggagactggactgtctctgctcctcatgcaaaccttgtgggggaagcaatgaccaggagcagcacctggcccctccctgaggcctgtgagtgtctcggatccgccctggagaagtgagtggctgagacccgggtggggccctcctacccttggctctgggggcttcccttctgggtcttgtccgggatatggccttcctgaaggtcttacctcccccagccgccctgcacttgaccaccaaagcaatctctaagcttataaaggagaaacatatatatatggggttttttggagtaaaggaaaattctaagatattaagacatatttttatgtagatctgatctatctgtgtttggtgaatttaatattctacattgatttttcaaactaaacgagtttttaca

SEQ ID NO: 5028 - DNA, 2064 bp, Homo Sapiens
  NM_021599
agctgcgggcggctccagctgcccccagatgtgggctgggcggctcgcggggaactttcgcgccggctgcgagtgcggggccccggctgcagtccggctgccatggatccgccggcgggagccgctcgccgcctgctctgccccgcgctgctgctgctgctgctgctgctgccgccgccgctcctgccgccgccgccgccgcccgcgaacgccaggctcgccgccgccgccgaccccccaggcgggcccctggggcacggagcggagcgcatcctggcggtgcccgtgcgcactgacgcccagggccgcttggtgtcccacgtggtgtcggcagctacgtccagagcaggggtacgagcccgcagggccgccccggtccggaccccgagcttccccggaggcaacgaggaggagcctggcagtcacctcttctacaatgtcacggtctttggccgagacctgcacctgcggctgcggcccaacgcccgcctcgtggcgcccggggccactatggagtggcagggcgagaagggcaccacccgcgtggagcccctgctcgggagctgtctctacgtcggagacgtggccggcctagccgaagcctcctctgtggcgctcagcaactgcgatgggctggctggtctgatccggatggaggaggaggagttcttcatcgaacccttggagaaggggctggcggcgcaggaggctgagcaaggccgtgtgcatgtggtgtatcgccggccacccacgtcccctcctctcggggggccacaggccctggacacaggggcctccctggacagcctggacagcctcagccgcgccctgggcgtcctagaggagcacgccaacagctcgaggcggagggcacgcaggcatgctgcggacgatgactacaacatcgaggtcctgctgggcgtggatgactctgtggtgcagttccacgggaaggagcacgtacagaagtacctgctgacactcatgaacattgtcaatgaaatctaccatgacgagtccttgggtgcccacatcaacgtggtcctggtgcggatcatcctcctgagctatggaaagtccatgagcctcatcgagatcgggaacccctctcagagcctggagaatgtctgccgctgggcctacctccagcagaagccagacacgggccacgatgaataccacgatcacgccatcttcctcacacggcaggactttgggccttccggcatgcaaggctatgctcctgtcaccggcatgtgccatccggtccgcagctgcaccctgaaccatgaggacggcttctcctcagcgtttgtggtggcccatgagactggccacgtgctgggcatggagcacgacgggcagggcaaccgctgtggcgacgaggtgcggctgggcagcatcatggcgcccctggtgcaggccgccttccaccgcttccactggtcccgctgcagccagcaggagctgagccgctacctgcactcctatgactgcctgctggatgaccccttcgcccacgactggccggcgctgccccagctcccgggactgcactactccatgaacgagcaatgccgctttgacttcggcctgggctacatgatgtgcacggcgttccggacctttgacccctgcaagcagctgtggtgcagccatcctgacaacccctacttttgcaagaccaagaaggggccccccttggacgggactatgtgtgcacctggcaagttcaggccgggcgcggtggctcatgcctgttatcccagcactttgggaggccaaggtaggtggatcgcctgaggtcagaagttcaagacaagtctggttaacatggcaaaatcccgtctctactaaaaatacaaaaattagctgggcgcggtggtgggtgcctgtaatcccagctactccggaggctgaggcatgaaaatcgtttgagcccaggaggcggaggttgcggtgagccaagatcgcgtcgctgctctccagtctggatcacacagcaagaccctgtctcaaaaaataaaaataaaagtgaagtgcaccaaaaaaaaaaaaaaaaaa

SEQ ID NO: 5029 - DNA, 1144 bp, Homo Sapiens
  NM_021601
tccactcacagcctgaagcatacccggcaggggctgtccccaggcccaacaagcaaagggcccagtagcgagggccactggagcccatctccggggggctgggcaggaagtagggtggggtttggggtagggatctggtaccctgggactgctgcaactcaaactaaccaacccactgggagaagatgcctgggggtccaggagtcctccaagctctgcctgccaccatcttcctcctcttcctgctgtctgctgtctacctgggccctgggtgccaggccctgtggatgcacaaggtcccagcatcattgatggtgagcctgggggaagacgcccacttccaatgcccgcacaatagcagcaacaacgccaacgtcacctggtggcgcgtcctccatggcaactacacgtggccccctgagttcttgggcccgggcgaggaccccaatgagccgccccccaggcccttcctggacatgggggagggcaccaagaaccgaatcatcacagccgaggggatcatcctcctgttctgcgcggtggtgcctgggacgctgctgctgttcaggaaacgatggcagaacgagaagctcgggttggatgccggggatgaatatgaagatgaaaacctttatgaaggcctgaacctggacgactgctccatgtatgaggacatctcccggggcctccagggcacctaccaggatgtgggcagcctcaacataggagatgtccagctggagaagccgtgacacccctactcctgccaggctgcccccgcctgctgtgcacccagctccagtgtctcagctcacttccctgggacattctcctttcagcccttctgggggcttccttagtcatattcccccagtggggggtgggagggtaacctcactcttctccaggccaggcctccttggactcccctgggggtgtcccactcttcttccctctaaactgccccacctcctaacctaatccccccgccccgctgcctttcccaggctcccctcaccccagcgggtaatgagcccttaatcgctgcctctaggggagctgattgtagcagcctcgttagtgtcaccccctcctccctgatctgtcagggccacttagtgataataaattcttcccaactgca

SEQ ID NO: 5030 - DNA, 988 bp, Homo Sapiens
  NM_021602
ctgcagccggtgcagttacacgttttcctccaaggagcctcggacgttgtcacgggtttggggtcggggacagagcggtgaccatggccaggctggcgttgtctcctgtgcccagccactggatggtggcgttgctgctgctgctctcagctgagccagtaccagcagccagatcggaggaccggtaccggaatcccaaaggattcagcaccttggcacagctgaagcagaggaacacgctgaaggatggtatcatcatgatccagacgctgctgatcatcctcttcatcatcgtgcctatcttcctgctgctggacaaggatgacagcaaggctggcatggaggaagatcacacctacgagggcctggacattgaccagacagccacctatgaggacatagtgacgctgcggacaggggaagtgaagtggtctgtaggtgagcacccaggccaggagtgagagccaggtcgccccatgacctgggtgcaggctccctggcctcagtgactgcttcggagctgcctggctcatggcccaacccctttcctggaccccccagctggcctctgaagctggcccaccagagctgccatttgtctccagcccctggtccccagctcttgccaaagggcctggagtagaaggacaacagggcagcaacttggagggagttctctggggatggacgggacccagccttctgggggtgctatgaggtgatccgtccccacacatgggatgggggaggcagagactggtccagagcccgcaaatggactcggagccgagggcctcccagcagagcttgggaagggccatggacccaactgggccccagaagagccacaggaacatcattcctctcccgcaaccactcccaccccagggaggccctggcctccagtgccttcccccgtggaataaacggtgtgtcctgagaaaccacaaaaaaaaaaaaaaaaaaaaaaaaaaaaaaaaaaaaaaaa

SEQ ID NO: 5031 - DNA, 3732 bp, Homo Sapiens
  NM_021622
tctggctcttgctgattgaattcctttggtgcagtttagcatgttcctctgtgttctgcatctcctgtagtgtaatgttcaagctcagaaatgccttatgtggatcgtcagaatcgcatttgtggttttctagacattgaagaaaatgaaaacagtgggaaatttcttcgaaggtacttcatactggataccagagaagatagtttcgtgtggtacatggataatccacagaacctaccttctggatcatcacgtgttggagccattaagcttacctacatttcaaaggttagcgatgctactaagctaaggccaaaggcggagttctgttttgttatgaatgcaggaatgaggaagtacttcctacaagccaatgatcagcaggacctagtggaatgggtaaatgtgttaaacaaagctataaaaattacagtaccaaagcagtcagactcacagcctaattctgataacctaagtcgccatggtgaatgtgggaaaaagcaagtgtcttacagaactgatattgttggtggcgtacccatcattactcccactcagaaagaagaagtaaatgaatgtggtgaaagtattgacagaaataatctgaaacggtcacaaagccatcttccttactttactcctaaaccacctcaagatagtgcggttatcaaagctggatattgtgtaaaacaaggagcagtgatgaaaaactggaagagaagatattttcaattggatgaaaacacaataggctacttcaaatctgaactggaaaaggaacctcttcgtgtaataccacttaaagaggttcataaagtccaggaatgtaagcaaagcgacataatgatgagggacaacctctttgaaattgtaacaacgtctcgaactttctatgtgcaggctgatagccctgaagagatgcacagttggattaaagcagtctctggcgccattgtagcacagcggggtcccggcagatctgcgtcttctgagcatccccccggtccttcagaatccaaacacgctttccgtcctaccaacgcagccaccgccacctcacattccacagcctctcgcagcaactctttggtctcaacctttaccatggagaagcgaggattttacgagtctcttgccaaggtcaagccagggaacttcaaggtccagactgtctctccaagagaaccagcttccaaagtgactgaacaagctctgttaagacctcaaagtaaaaatggccctcaggaaaaagattgtgacctagtagacttggacgatgcgagccttccggtcagtgacgtgtgaggcagaagcgcacggagcctgcctgcctctgccgtcctcagtttcctttcatgaggcttctagccaaagatgataaagggggaaatggtttttagtgcgtatattatactgcctcttaggtgtactctttataagctggtaaaccaagaatctagggagtggccaaactaaatataatttctttaaaaaagaaagaaaaaggaaaaatccaaaatatctcagtatcatctgtctgaagcattgtgtgttctcattcgggtggtaacaatgtatgtgtaatatttttttcttagtgattttgacagtttaaatgtttaacaacttaaagcattaaaaatgcttattaataactttggtcatttaaaaaatgctacaatgacttcctattaaaggttcaatatttacacattcttattggttgatattaccacatgaaatattgccagaccaagatacctaaactcatgatgtctgtggtgctgtaaaatttatactaaaatgtggactattttgaaattataaccatttttgatgccctgaatcttgaggtgacttattttgcatagaggatatggatagaccaacagtaagggttgtgggttataccggcatagagaaaagaagaaaactagaattgaaacaactgtgtcttagacatttgtttgaaaaagcttcatcaggccttggagcagtcactgctttattccgcaaaaattatttggtaggaaatttttgggagatctgattttcttatccaagttttgtaaatagttgttatttctatatttggattggtgaaagacctcaagtttatatgtaaagacataactgcccttagtcatgaaattgttgtgacctctactttttgtcactaatagcctacattcaagtgcctgtgttttttcatcttgtttaggaatgttttgagattaatgtgcttaaaagtcctacgtgactgattttaaacattgtgataaaattaattttcagtagaatagttgaatgtgttaagataggattttatgttagagataccagaatgctggtattctactacttgtgcaatatatatgttttaaaaaacaaatttgagaatacatttaatcatagggatatagatataagcacctctctaaagaatctttagtttccgacgttgaattatagaccagtttgagtaagtactgctttttttttttggagacgggctctcgctctgttgctcaggctggagtgcagtggcgtgatctcagctcactacagcctccacctcgtgggttcaaacagttgtgctgcctcagcttcccgagtagctaggattacaggtgcatgccaccacacctggctaatttttgtattttagtagagatggggtttcaccatgttggccaggctcgtctcgaactcctgacttcaggtgatccacccatctcagcctcccaaagtgctgggattacaggcgtgagccaccatgcccggcccataagtaccgtttttgaggttcagtcttaaacatttgctttaagaaaacagtcttgaatttcacatgctgctatttttatattttgccattttacagtactgttttgttttgaattcatgcatatcattgaaaatttctcgttttcattttcttagatgacttcttgtctgagacagaaaaatttcctactacagcagtgcagtccagaggttaagatgtattagaattatacaatatcagtttaaaaatctgtatgcataaagaatgcaccactcaacttttttattcataagctaatatttttttaaagttacattaagattttttctcttttgcagctacatttgaaagtgatagaataaagagattttaatgagttatcactttttcagctgatatattcattttaatggcttttttgaaagttcctttttcatgaacacacccgagaaatcttaaatagacactttgcaatatttaagaacctaatgctgtttaattttggtacagcttccacattgcatgttcactttagtatttgcaatttgatatatttcatggtggcaaaatattagctctgttttgggacattttaaaatagaactatccttgttcgatagcataggaaaatgttctggtgattgtcagggtctcctaatatttatctcaattcttttataagtctatggaaattatttaattattttaaaacgtacacacttttcttgtaaatatgtcacatctgagttcaaaaaaattactttgaataccttaatatttgctgcatttttttccgtatatataacatgtcttctttcagaatgggaatatatgtgtgcctcccaacatttactgttaaagtgtgttatctttatatgtcaaactggttgaacactgtaatgagaataaactgcacagagtttattctgacttaaaaaaaaaaa

SEQ ID NO: 5032 - DNA, 1952 bp, Homo Sapiens
  NM_021626
gtgatggggcgccgggtccagcctgttgctgatgctgccgtgcggtacttgtcatggagctggcactgcggcgctctcccgtcccgcggtggttgctgctgctgccgctgctgctgggcctgaacgcaggagctgtcattgactggcccacagaggagggcaaggaagtatgggattatgtgacggtccgcaaggatgcctacatgttctggtggctctattatgccaccaactcctgcaagaacttctcagaactgcccctggtcatgtggcttcagggcggtccaggcggttctagcactggatttggaaactttgaggaaattgggccccttgacagtgatctcaaaccacggaaaaccacctggctccaggctgccagtctcctatttgtggataatcccgtgggcactgggttcagttatgtgaatggtagtggtgcctatgccaaggacctggctatggtggcttcagacatgatggttctcctgaagaccttcttcagttgccacaaagaattccagacagttccattctacattttctcagagtcctatggaggaaaaatggcagctggcattggtctagagctttataaggccattcagcgagggaccatcaagtgcaactttgcgggggttgccttgggtgattcctggatctcccctgttgattcggtgctctcctggggaccttacctgtacagcatgtctcttctcgaagacaaaggtctggcagaggtgtctaaggttgcagagcaagtactgaatgccgtaaataaggggctctacagagaggccacagagctgtgggggaaagcagaaatgatcattgaacagaacacagatggggtgaacttctataacatcttaactaaaagcactcccacgtctacaatggagtcgagtctagaattcacacagagccacctagtttgtctttgtcagcgccacgtgagacacctacaacgagatgccttaagccagctcatgaatggccccatcagaaagaagctcaaaattattcctgaggatcaatcctggggaggccaggctaccaacgtctttgtgaacatggaggaggacttcatgaagccagtcattagcattgtggacgagttgctggaggcagggatcaacgtgacggtgtataatggacagctggatctcatcgtagataccatgggtcaggaggcctgggtgcggaaactgaagtggccagaactgcctaaattcagtcagctgaagtggaaggccctgtacagtgaccctaaatctttggaaacatctgcttttgtcaagtcctacaagaaccttgctttctactggattctgaaagctggtcatatggttccttctgaccaaggggacatggctctgaagatgatgagactggtgactcagcaagaataggatggatggggctggagatgagctggtttggccttggggcacagagctgagctgaggccgctgaagctgtaggaagcgccattcttccctgtatctaactggggctgtgatcaagaaggttctgaccagcttctgcagaggataaaatcattgtctctggaggcaatttggaaattatttctgcttcttaaaaaaacctaagattttttaaaaaattgatttgttttgatcaaaataaaggatgataatagatattattttttcttatgacagaagcaaatgatgtgatttatagaaaaactgggaaatacaggtacccaaagagtaaatcaacatctgtatacccccttcccaggggtaagcactgttaccaatttagcatatgtccttgcagaatttttttttctatatatacatatatattttttaccaaaatgaatcattactctatgttgttttactatttgtttgacatatcagtatatctgaaacaccttttcatgtcaataaatgttcttctctaacatttttaaaaaaaaa

SEQ ID NO: 5033 - DNA, 2426 bp, Homo Sapiens
  NM_021642
ctcttttctaagcttgtctcttaaaacccactggacgttggcacagtgctgggatgactatggagacccaaatgtctcagaatgtatgtcccagaaacctgtggctgcttcaaccattgacagttttgctgctgctggcttctgcagacagtcaagctgctcccccaaaggctgtgctgaaacttgagcccccgtggatcaacgtgctccaggaggactctgtgactctgacatgccagggggctcgcagccctgagagcgactccattcagtggttccacaatgggaatctcattcccacccacacgcagcccagctacaggttcaaggccaacaacaatgacagcggggagtacacgtgccagactggccagaccagcctcagcgaccctgtgcatctgactgtgctttccgaatggctggtgctccagacccctcacctggagttccaggagggagaaaccatcatgctgaggtgccacagctggaaggacaagcctctggtcaaggtcacattcttccagaatggaaaatcccagaaattctcccatttggatcccaccttctccatcccacaagcaaaccacagtcacagtggtgattaccactgcacaggaaacataggctacacgctgttctcatccaagcctgtgaccatcactgtccaagtgcccagcatgggcagctcttcaccaatggggatcattgtggctgtggtcattgcgactgctgtagcagccattgttgctgctgtagtggccttgatctactgcaggaaaaagcggatttcagccaattccactgatcctgtgaaggctgcccaatttgagccacctggacgtcaaatgattgccatcagaaagagacaacttgaagaaaccaacaatgactatgaaacagctgacggcggctacatgactctgaaccccagggcacctactgacgatgataaaaacatctacctgactcttcctcccaacgaccatgtcaacagtaataactaaagagtaacgttatgccatgtggtcatactctcagcttgctgagtggatgacaaaaagaggggaattgttaaaggaaaatttaaatggagactggaaaaatcctgagcaaacaaaaccacctggcccttagaaatagctttaactttgcttaaactacaaacacaagcaaaacttcacggggtcatactacatacaagcataagcaaaacttaacttggatcatttctggtaaatgcttatgttagaaataagacaaccccagccaatcacaagcagcctactaacatataattaggtgactagggactttctaagaagatacctacccccaaaaaacaattatgtaattgaaaaccaaccgattgcctttattttgcttccacattttcccaataaatacttgcctgtgacattttgccactggaacactaaacttcatgaattgcgcctcagatttttcctttaacatcttttttttttttgacagagtctcaatctgttacccaggctggagtgcagtggtgctatcttggctcactgcaaacccgcctcccaggtttaagcgattctcatgcctcagcctcccagtagctgggattagaggcatgtgccatcatacccagctaatttttgtattttttattttttttttttagtagagacagggtttcgcaatgttggccaggccgatctcgaacttctggcctctagcgatctgcccgcctcggcctcccaaagtgctgggatgaccagcatcagccccaatgtccagcctctttaacatcttctttcctatgccctctctgtggatccctactgctggtttctgccttctccatgctgagaacaaaatcacctattcactgcttatgcagtcggaagctccagaagaacaaagagcccaattaccagaaccacattaagtctccattgttttgccttgggatttgagaagagaattagagaggtgaggatctggtatttcctggactaaattccccttggggaagacgaagggatgctgcagttccaaaagagaaggactcttccagagtcatctacctgagtcccaaagctccctgtcctgaaagccacagacaatatggtcccaaatgactgactgcaccttctgtgcctcagccgttcttgacatcaagaatcttctgttccacatccacacagccaatacaattagtcaaaccactgttattaacagatgtagcaacatgagaaacgcttatgttacaggttacatgagagcaatcatgtaagtctatatgacttcagaaatgttaaaatagactaacctctaacaacaaattaaaagtgattgtttcaaggtgatgcaattattgatgacctattttatttttctataatgatcatatattacctttgtaataaaacattataaccaaaaca

SEQ ID NO: 5034 - DNA, 4408 bp, Homo Sapiens
  NM_021643
agtcgcgggggcggcggggggggggcggaggctccgtggaaatgtgtcggtgacattgaatggggagaccgagcgcgagcgaggcgcgcgcgcgcacacgcgcactcacggccccgctcgctccgagatccccggccacgtaagtaactattaataccgcctcgccgggggatgcgggcgtgctgagcgcggggattggcctcgggcaccgtcggccgtcccctttaatttttaaatacacggtcccctcttttctctggggggggcaagcaagaaatcaaagaaggaggagacaagccgtcaattttctccaaaacaaaccccaccgggcaatttggtctcggggtagggggagacggggtgattgcaaattattccaggacgagatccagttctccagcgggaaaggggcaaaggaacgccgcgcgttggaagggccagggacgcagctccccttgcagcgcccgcaggacccccgcaagctcgtgccggcgaaatcggagaccgccgatctgtcctcgttctctcctgcacgtctggctgcattcggaggaagacctggggcgcgagcgagcggcgacagcatgagcctgtgctgacctccgcgcggcgggccgagcccagggctttgtcgcggtacctgcgcccagcccgcgccgcaactctgtgcccagcttttgcaatcttttgttggcagcgctgaccgcaccaagttaaatgctcccttgcaatttttcttttttttgtttgtttgtttaatttttggagagctcgcgatcttggaaaagcctcagacgccatctacagttaaaacgtaggtaactgccctctcccgcaccccccccttacacgccccccaccctttccaccaaaaaaagggggtgcagcgcggattctggctgccgtgcgtcgccagccggtagacccgtgcttgtttcctttctctttttgtttggcttctaacgcgttgggactgagtcgccgccgtgagctccccgaagactgcacaaactaccgcgggctcctccgccccgtctgcgattcggaagccggcctgggggtcgcgtcgggagccctggcgctgcagctccgcaccttagcagcccgggtactcatccagatccacgccggggacacacacacagagtaactaaaagtgcggcgattctgcacatcgccgactgctttggggtaacaaaaagacccgagttgcctgccgaccgaggacccccgggagccgggctcggagcagacgaggtatccggcggcgcccatttgggggcttctaactctttctccacgcagcccctcttctgtcccctcccctctcgctcccttttaaaatcagtggcaccgaggcgcctgcagccgcactcgccagcgactcatctctccagcgggtttttttttgtttgtcgtgtgcgatcctcacactcatgaacatacacaggtctacccccatcacaatagcgagatatgggagatcgcggaacaaaacccaggatttcgaagagttgtcgtctataaggtccgcggagcccagccagagtttcagcccgaacctcggctccccgagcccgcccgagactccgaacttgtcgcattgcgtttcttgtatcgggaaatacttattgttggaacctctggagggagaccacgtttttcgtgccgtgcatctgcacagcggagaggagctggtgtgcaaggtgtttgatatcagctgctaccaggaatccctggcaccgtgcttttgcctgtctgctcatagtaacatcaaccaaatcactgaaattatcctgggtgagaccaaagcctatgtgttctttgagcgaagctatggggacatgcattccttcgtccgcacctgcaagaagctgagagaggaggaggcagccagactgttctaccagattgcctcggcagtggcccactgccatgacggggggctggtgctgcgggacctcaagctgcggaaattcatctttaaggacgaagagaggactcgggtcaagctggaaagcctggaagacgcctacattctgcggggagatgatgattccctctccgacaagcatggctgcccggcttacgtaagcccagagatcttgaacaccagtggcagctactcgggcaaagcagccgacgtgtggagcctgggggtgatgctgtacaccatgttggtggggcggtaccctttccatgacattgaacccagctccctcttcagcaagatccggcgtggccagttcaacattccagagactctgtcgcccaaggccaagtgcctcatccgaagcattctgcgtcgggagccctcagagcggctgacctcgcaggaaattctggaccatccttggttttctacagattttagcgtctcgaattcagcatatggtgctaaggaagtgtctgaccagctggtgccggacgtcaacatggaagagaacttggaccctttctttaactgagctcatgccccacggagacttagcaggttccaggagtgagcgagggcagcggaaaggagttcttccgggggacacgaattgcctggctgagtagcaagaaagacacactcttaagtttcttggttcagagcaggaaaaccttcaaggagctgactgaccacgtagcatgggggcaagaggcgtgggatggggattggggtgagatggatgggagcccgctggagcttgtcttccctaacatagcctgggagaccaccccttgccacttgggccacttccgcctaccccacttttcattttgttccaaaatagttgcagatcctgacagaatcaaaactctctgcctcaaacacacatcctggcatcgcactgttagcatttaacttcttgttaggattcagggaaggaacagttggccaagaattttttttcttttaaacaagccaaccacctagctggtaattaatgaggttcacttaaaaaaaaaattcggtgcacacagactgacatgaaacctgggtgctacagtaaaagaaaacaaaagtccagtttgtgtctcttaatcgctcacttcaactcatttcttctaaataaactatttaatatcctggtcaggaaatgacatgttaatgctttgctccctgaagggggaaaaaatctgtcctttaacaagctattctgttttgtgtcaattggttcgtggcaggaagctattagaagtcaaacgtccagatgcattactgctatcttagtttaaagggggaaagaaaagggaagaagaaaggaaaagagaaatccaactcctttttcatgttttgcttttgaacaatgagggtttgtgtgacaggcattcctctttgctgagatgatagcaatggcctgagattttagcaagctcctggagtctgatgcttttgcagtactctgatcgcaactaaacatttgtctttgttttattagaaactagtgaaacaaagcaggttgtcccacatgtataaaatacagggcagctatttagttttctttacagagaatgatccttttaaggcttgtaaggccctctggtttggacaaaaaccctcagtagagacaagcgggaaggataattagctgaaagctatgatgatataaataaaaacagctctctatcccaatacgcacctttgtattttcaagaactcttctatttattaaggaaaatgtcacattgtgatgtattaagccagtacttcaattacgggttgacttgggatgacatattacatgctgtagttaacatttataattctttttccttgtttgagtatttctgtctctgaaataaccttttacttggcttttctagatagctttatttgatttcgagtggcaaaatgttttttattacggcttttctattgctgtatgatacagaactcttttggcataaatatttgtgttcccagtacctcacttgttcggatttgactgcctgtatatgttttgtgaaatggtcctgtttttgggtaggtgacacgtggactctagtatgtaaatgttacttgaatctgtgcttcataatagtgtgtggcatgtatgtgcagactcttggatgctttatgcctgcgcagcaggagccctgtcctcacgttcccaggagggcggcttcacccttcgtaaccaggagacaaggcggccatggatttgcccttgattctattttgctaatggaagatagaaaggagagaaggttttttttttttttaacattctgaagatggtgctgtgtcaagaaggaccttttttttcccctctcccctattttttaagtaccttggaggaggagaggttggtgacatgcatggtggggatctatggcctctggtgctttgtcctgtatttggtttaatgtttttgtcctaatctcttcaatcaataaaattgtgcgtatttaactaaaa

SEQ ID NO: 5035 - DNA, 5537 bp, Homo Sapiens
  NM_021645
gcctttgctaaattgctgaataagaagatggttgagtcacctccttcgcttaaacttgtcctcattggaggttgtcgtaacaaagatgatgaacttagggtaaaccaactgagaaggctgtctgaggatttaggagttcaagaatatgtggaatttaaaataaacattccatttgatgaattaaagaattatttgtctgaagcaacaattggtctgcataccatgtggaacgagcattttgggattggagttgtggagtgtatggcagctggcacaattatccttgcacacaattcggggggcccaaagcttgacattgtggttcctcacgaaggagatataactggctttctggctgagagtgaagaagactatgctgaaactatcgctcacattctttccatgtctgcagaaaagagactccaaatcagaaaaagtgctcgtgcatctgtaagcagattctctgatcaggaatttgaagtgacattcctatcatctgtggaaaagttatttaagtaatgccatatctgtaaaattaaagatattttatataaactggttaaacaccttcatatgtaaatatttttctaaattcaatctcatttgtcaaatcattttactttagaaaacagacaaaatttccttttagaataaaaggaagtgttgaaaagaaaatggatgactagccttcggcttccattcttggtatacatgagagaggctggctgctgagatgaatgtgaaccaggttgcagagaatctggctttgagccaccaggaagaactagtggatttgccaaaaaactaccccttgagtgaaaatgaagatgagggggacagtgatggagagagaaagcatcaaaagcttctggaagcaatcatttcccttgatggaaagaataggcggaaattggctgagaggtctgaggctagtctgaaagtgtcagagttcagtgtcagttctgaaggatcaggagaaaagctgggccttgcagatctgcttgagcccgttaaaacttcatcttctttggccactgtaaaaaagcaactgaatagagtcaaatcaaagaaggtggtggagttacctcttaacaaagaaaaaattgaacagatccacagagaagtagcattcagtaaaacctcacaggtcctctccaaatgggaccctatcatcctgaagaaccagcaggcagagcagctggtttttcccctggggaaggagcagccagccattgctcccattgaacatgcgctcagtggctggaaggcaagaactcccctggagcaggaaatttttaacctcctccataagaacaagcagccagtgacagatcctttactgactcccatggaaaaggcctctctccaagccatgagcctggaagaggcaaagatgcaccgagcagagcttcagagggctcgggctctgcagtcctactatgaggccaaggctcgaaaagagaagaaaatcaaaagtaaaaagtatcacaaagtcgtgaagaaaggaaaggccaagaaagccttaaaagagtttgagcagctacagaaggttaatccaactgtggcactggaagaaatggaaaaaattgaaaatgccagaatgatggaaagaatgagccttaagcaccaaaacagtgggaaatgggccaagtcaaaggcaattatggccaaatatgacctggaggctcgccaagctatgcaggaacagttggccaagaacaaagaactgacacagaaactccaggtagcctctgagagtgaggaagaggagggaggcacagaagtggaagaactccttgtccctcatgtagcgaatgaagtgcagatgaatgtggacggaccgaatccctggatgttcaggagctgcaccagtgacaccaaagaggctgcaacacaggaggaccctgagcaagtgccagagcttgcagctcatgaggtttctgcaagtgaggcagaagaaagaccagtggcagaggaagaaattttgttgagagaatttgaggaaaggcaatcccttagaaaaagatctgagctcaaccaggatgctgagccagcaagcagtcaagaaacaaaagattctagcagccaggaggtgctgtccgaattgagggcactatctcagaaattgaaggaaaaacatcagtccaggaagcaaaaagcaagttcagaggggactgttccccaggtccagagagaggaacctgccccagaagaagcggaacccctattgctacagaggtcagagagagtacaaactctggaagagctagaagagctgggaaaagaagattgttttcaaaataaggagcttcccagacctgtgttagaaggacagcagtcagagaggaccccaaataatcggcctgatgcccctaaggagaagaaagagaaggagcaactgatcaacctacagaacttcctgaccacacagtctccttccgtgaggtctttggcagttcccacaataatagaggagctggaagatgaagaggagagagaccaaaggcagatgataaaggaagcttttgctggggatgatgtcatcagagatttcttgaaagagaagagggaagctgtggaggcgagtaagccaaaggacgtggacctgacactacctggctggggcgagtggggtggtgtgggcctaaagcccagtgccaagaaaagacgccagtttctcattaaagcccctgagggtcctccaagaaaagataagaatttgccaaatgtgattatcagtgagaagcgcaacatccacgcagcagctcatcaggtacaagtgcttccatatccatttacccaccatcggcaatttgaaaggaccatccagacccctataggatccacatggaacacccagagggctttccaaaagctgactactcccaaggtcgtcaccaagccaggccatatcattaagcccataaaagcagaggatgtgggctaccagtcttcctcaaggtcagacctgcctgtcatacagaggaatccaaaacgaatcaccacacgtcacaataaagaagaaaaactgtaggttgtgtagctggagaagtgacagtcaggggccctgattccacttcctttggtccagttttactctgctacagggtggattccaaaactggctcagcacattgcatgtagttgagccacattttttaaaaaaagaaaatggatgaccattaattgactagcattttagaattgatcagacattagaacacagaaaaattctagtacatttaaattctaaacaatacagtggatgacccttttgaatatacctaatgatttccttaaaaaagaaattttaaacagacttgtttaatcgtgttctcaaagcatacagtcaagaggtgggactgactgatgctttataggtgtgtgtagggtggtagaggccaaggtgctgccagcaatcctttccatactaggtactggtgaaaattgtttttgtttatgctgtcagcacatttgtgtgggtctctcattgtcccttaacagtgccgcatctcagcctggaagtcagctttaagtcattcaagagaacctcaggctgtttttctgacagtgatgatatgatatacagatacatccacagggtatctattaccagcataatgcattgtaagatggcaaggtggcattttgaaagagcgctgggcaagcagttagcacatctgggcctaccttcagcttcttcatttacaaacttctgaccttttgacactaaagctgctcctttatctttctgagtctcagattcttcatctgtaatctggagttgttaattccagtccttactaccttttagagttggaatgagatggaaagtagatgaaactactttgaaaattacgacagttaagggctgggtgcggtgtctcacacctgtaatcccagcactttgggaggccgagatgggtggatcatgaggtcagcagttgagaccagcctgaacaacatggtgaaaccctgtctgtactaaaaatacaaaaaaattagctgggcctggtggcaggcacctgtaatcccagctacttgggagactgaggcaggagaattgcttgaaactggaaggcagaggttgcagtgagccaagattgtgccactgcactctagcctgggcaataagcaaaactccatctcaaaaaagaaaaaaaggaaaaagaaaattatgagagttacttaaaggtaacatcacatactaaatgtcttctataatcctatatttattaatgcattacaactctgtagattgttagttactaggccagtagctaggaattggtataaatttaatgcaccttctatcctgaataactagcatggaaaagtgaatatatgtgtgagcagatatggctataaagacctatagcttttgcactttatgcatatataatcaatcctttctagttcagtgaattgaccccatccacaggctgattcatctttgtgttaaggggcaaatgaaacggtatattatttctttgcagtctcctctcagtcattcatcaatgtggccagcttatctactcccaattatgttgttgatacatctccaagccatctgtcatcagatcaaaaagcagcaaacagagggtcagtcacaggatgttctgacacaccattgtaactttttgttagagatgatcccatttagaaaaagactggtagaaattggagtgaaaggaaccctacagattagcccagttctctcttattttcagctttacagacaagaacaatttaaatctaaagaatttagtagattccttcagtgtcacaaagctgtttcatgaaagaatcaagattataacctggatattctgactcctggcccagtgctttttcttactttgtagctacactttgaagtaagattcaaactgttatccactcaattgccttattcctgaggatgtagtgaaggaagaaaaagttttctggaattccgtaaattatattttaagcttatttcttcaaaattattttcatatatcacagatatatcattggaagatataatttgcatatatgttcattatcagtgttcctaatttggtattacatgtattctatttttttctgaatgatagcatgaaaagtgtcaaagtggtttgtccgctagcgtctgtctgcagaactttcaggatgactattaattcctctcagatgtcatttttgagtggtccaagcctgctgttttgaacccacagcagtggagatttgtattcttatttacagttgtgtactataaagtgtgtgttacataggttttgtgtaataattatttgtaaatattatttagatttgtatttagacatgatttatatctaatatagatacaaagtctgtgtctaaatattatttaaagaagtgatttttcattctcttggattctttccagtgtggtgccttttatatgcctcacatagtctccttgttctcctactaatattcccaagctccatatgccaattaaagaagaaacaaaaataaaagtttgtcttgcttgtgaaacattaaaaaaaaaa

SEQ ID NO: 5036 - DNA, 3252 bp, Homo Sapiens
  NM_021646
cgcacggcctggtttgcacccctggtttagggtcttcggccccggctctggcgtccctggctgccaagcctgaggcccgcagtcctactcccgccgagacccgccgctccggtcctgccccgaactgcccacggccggcagcgcttccaggccctgaaaaaaactctcttcctgtgtctggccagaggtatagagagagacaggttcaactctaaggcctgaaaaggaacaaggcccaccggaagcaatggccactgtccctggcctccagcccctgccaaccttggagcaggacctggaacaggaagagatcctgattgtgaaggtggaggaggacttctgcttggaagaggagccctccgtggagacggaggaccccagccctgagactttccgccagctcttccggctcttctgctaccaggaggtggctgggccccgggaggccctgagccgcctctgggagctgtgctgccgctggctgcggccggagctgcgcaccaaggagcagatcctggagctgctggtgctggagcagttcctgactgtgctgccgggggagatccaggctcgggtacgcgagcagcagccggagagcggtgaggaggccgtggtcctcgtggaagggctgcagcggaagcccaggaaacacaggcagcggggctcagagctgctttctgatgacgaggtgcccctcgggatagggggacagttcttaaaacaccaggcagaggctcagccagaggatctgtccctggaggaagaggctcgattctccagccagcagcccccagcccagctgagccacaggccacagaggggcccgctgttgtggccagagagaggccctccagctccccggcatcaggagatggcgtcagcctcgcccttcctttcggcctggtcccaggtgcccgtgaacttggaggacgtggctgtatacctttctggggaggagccaagatgcatggacccagctcagcgggacgcgccgctggagaatgaaggacctgggatccagttggaggacggcggtgatggcagggaggatgccccgttgagaatggagtggtaccgagtgctctcggcacgatgccaggggcctggccacccgctcccaggtcagaggccagccccagtcaggggcttggtcaggcctgatcagccaagaggcggccccccaccaggaagacgggcttcccatggggctgacaagccgtacacctgccccgaatgtggcaaaggcttcagcaagacgtcccacttgaccaagcaccagcgcacacacacgggcgagcggccttacaagtgcctagtctgtgggaagggctttagcgaccgctccaacttcagcacgcaccagagggtgcacacaggcgagaagccctacccgtgccccgagtgtgggaagcgcttcagccagagctccagcctggtcatccaccgcaggacacacagcggggagcggccctatgcctgcacccagtgcgggaagcgcttcaacaacagctcgcacttcagcgcccaccgccggacgcacacaggtgagaagccctacacctgcccggcctgtggccggggcttccgccggggcaccgacctgcacaagcaccagcggacccacatgggggcaggctccttgccgacgctccagccggtggctcctggaggccccggtgcaaaagcctgatcaccaggcctgaaactccctttccaggactctcatccctgggcacagaattcaggaaactgctagacagcctggtccgaaagcattgccagctgcccgtttcctcccatggcccagtatgaggccagcaggggacatttgggatgcccaggccgcagaggaagctgggcactgggtgcagaacaagggcaaggacaggctctgagtgtccagtggcagccagaacaggtgacacagagcaggggcttcagccacagagacacactcaggaggccagaagccgacactcaaggtgttcgtggggctggctcctgaagggcctgggagggtccatcagctgcctccagcatccagtggctgctggcatacagcctcatccccacgtcccaacccctctcctgtgtgtctgtgaccctgtgcgctgtctctgtgtgtaccccccacctgctcccccccccttttttttttgagacggggccttgctgtgtcccccaggcgggaatacagtgccatgatcatagctcactgcagcctcgaatccctgggctcaagtgttcctcctgcctcatcctcctgagtagctggggttacaggtgtgtgccgccatgcccagtctcttttttggtagggccaccactcactgggtttagggtcccccaatacactgtgacctcatcttaactaattatatcatcaaaacccgtgtttccaaataaggtcacattctgaggtctgggtgcacatgaatttgagggacccctcgtctgctgcagggagccctgctgtaccccagccttcccaggacgtggtctccagcttcttcatcctgccagagtttccaaatggagcccggggctctgcagcattccagtcccctttgcagatccatagctgctctgcagggcggaagacacctggggcgggaaagcacccctgagttccatcttcctgacatgttgcctgggatgtgacgggcctgacatctccccagggccggggcccagggctgcgtttgctcctggccccttagtgtctggaatgtggccttccacggttgccccactttgtctttctaaggtaagaagccttcaccttccagcttttgtctggcctgtgctgcgtgggagccactggtctgtgcacatccacggtgggtgagtggccaagacaagcagtgtgatagagtccttggtgggtttagtcatctcggaagtcgtagggcagctatggaaaccactgggttctggaacgttccagccaggcagtggttgttcctcataggtaggtggccttggccttcatcccagcctgggatgctccattgcatttgtcacctagtcactgtatatacgtgcacatttgaccttttggcacagcccaggttccaggtgcgtgacctgccctttttctcattcccttaactgacattatttagtgtcagaggccgagcacagtggctcccacctataatcctagcactttgggaggccaacgcgggtggattgcttgagcccaggagttcaagagcagcctgggcaatatagaaagacctcttccctacc

SEQ ID NO: 5037 - DNA, 6204 bp, Homo Sapiens
  NM_021647
ggcgaggggtgcacggcggccacctgagtggcgcggcggtgtcaggttcttgctcaagtaccaactctatggacccaggacaggtttgtcccatgacctgctgtgaacagtgtgttgtctgatagaagattcggttggcaaaccatctctctattgccttacagagcaagcaaagaagatggatcgattgaagagccatctgactgtgtgctttctaccttctgtgccctttttaatcctagtatccactctagccaccgctaagagtgtgactaacagcactttaaatggcactaacgtggtcttgggctctgtgcccgtaatcattgccagaactgaccatatcatagtcaaggaagggaacagtgccttgattaactgtagtgtttatggcatccctgacccacagttcaagtggtataattccattggcaagctgctgaaagaagaagaggatgagaaggagagaggaggaggaaaatggcaaatgcacgacagcggcctcctgaacatcaccaaggtatccttctcagaccgaggtaaatacacgtgtgtggcttctaacatctacggcaccgtgaacaacacggtgaccttgcgcgtcatcttcacttctggagacatgggtgtctactacatggtcgtgtgcctggtggccttcaccatcgtcatggtcctcaatatcacccgcctgtgcatgatgagcagccatctaaagaagactgagaaggccatcaatgagttctttaggaccgaaggtgcagagaagctgcagaaggcatttgagatcgccaagcgcatccccatcatcacctccgccaaaactctagagcttgccaaagtcacccagttcaaaaccatggagttcgcccgctacatcgaagagcttgccaggagcgtgcctctgccgcctctcattatgaactgcaggactatcatggaggagattatggaggtggttgggctggaggagcaggggcagaattttgtgaggcatactccagagggccaggaggccgcagacagggatgaggtctacacaatccccaactctctgaagcggagcgactcccctgccgctgactcggacgcctcatcgctgcacgagcaacctcagcaaattgccatcaaggtgtcagttcacccgcagtccaaaaaagagcatgcagatgaccaagagggtggacagtttgaagtcaaagatgtagaggagacagaactgtcggcggaacattcccccgaaactgcagaaccttctaccgatgtcacgtccaccgagctaacatctgaagagccaacacctgttgaggtaccagataaggtactgccgccagcttacctggaagccacagagccagcagtgacacatgacaaaaacacctgcattatttacgaaagccatgtctaataccaaccccgaaaagctatgcatatcaagaaaatcaggggctgctccttgtaatacagatgtagtacgcacttgccgctaagccttaccaggagactctcatcccttaggtaggagtgatgccactttaaaaggagaaacacctgcctgcagtgaatgggactggaatttccccagtagagaagggtgcgagaaacatcagggtgcagaattgataccagacagaaggtgtctatgtgataatgagtttcagaggctgatctctgccaaataccttaattggtgatgccttcttggcaaagagtacaccactgtaagatattctgagttcaagaaccctgtccagtgccccctgcattgcttttccttttaaaaagtataggtctgctacaatagcaaatgcacgtacgtgggttttttgcagtttcttctcagttttaattttgcttttcctttataatggggtcattgttattaatactaattgttctttctggtttagtcctcattgccacttttgtccttatgtttccctagaacacgtacctcagagactttggtatcagtcaccagtaccagggctgatatctacaagtcacattacatttgtcatgttccaaagtagttacgaggcttgttatttttttttcattccccaggcctatttccatagatagctttttttgtttgtttccaacgaagctgctgttaaacgaaactgagaaaaactttgccccggaatagcactttaatagtcaaaaatgtgtttacctgtctgattgagtgagccttttggtgagctcagctgagatgtagagggagattgtaaaaggttaaatatacccacaccacccatgaaagtcactgtttaagttacatcatcctccaaataaagactgattctttacctggaaaatatattgcttccaaagacatcagattcagtggattcctgtaggttatagaatattggcttccaaacaggcttgcagggaccatatgctgttggatgacatataaccaggtccacttttatgaactgcatagctgacttggttgtccttaaagaggaaagcgaaaggttagggtaatagcaaagggaactgtgccatcagattttatgccaaaactgttgaataattatgcagtcctgcaagaaagtggttatatgtgaggtgcgtgatgttatggaaagaagacaaaattagtcatccaaaggcttaatacccactgtgccaataaccagctgcctggctttggacaagtctggacctcaggtcccttatctgtagaaggggcagatgacatgagctctgagcactgttgaaatggtatcactgtcacacagaaccaaaccaatattcacatccttgctccttttcacaatgactttaaagatttttgctttcatctcttggtccacctaacattttcatgcttcattacttaaataagaatgttggttttgagaaatagcattttaaacaaattgtggatcttctccttccaaaaaaaccattaggaccacatctgcaattaagatttaatattggtgagaatgagtggttttatttaattttcccttaaaagcaaaggagacagtaatcttaataaattcataggggccgtggccacatcaggtaatggggttatgatgtccaagattgcatggatcacattggtgatgagagcagacccagatgtttagtcctcactctgtcaccatctgaggaggtgaccttggacaactcccttcctctctctgggatttaatctttttcatctgtaaaatatgcaggtagtactcgagggtctacaggatcccttctagttgaaacatttatagttcacagaaagtttgcagtcttccaggataaccaacccccgttgcatgagacaagcaaaaaatgggtccatgaaattggatacttttgccatccaaactttacaacaaacattatctggctctgtaattgagagcagtgggcttggttttaaacctagccttgattagtttgtttatagataactgttgtggaaggtgatagaactagtcatggagtttgatgagacatctcttgaaaaggactgaactgttgacttctggttagaagtgctttgggcagtcacataaagaaatgagcagtgagaaatcaggagaaattatgactcctgttgggctttctggactagcattgtatgtttttgggttgcagaaaagttttaacaccacctcttagaatataaaaattttccagttgtcatggaggtccacagattcattaccatgggtttatatgcccaaagcaacaacagaggacttaagttcattttgtgatactgtatggatgttaccccatcctattcagttgtcattccacccaaacccatgtgtaggtttccacatggaaaggagaaggcatccattccacctagacattgaatagtgataataagctaaaagtgggcagattttcagtggagcaagagcagaaatatgcggccaaagaatgtttcctgattggttttgctgctttagactgcagtggggagagcttatgtagattttcaaaactttctccctctttaaggcatcataatgctctcggttttgataacaactgacataaagggaggttgacttaaaatgggaatttctccttccaaaaatgctacactcttcctatccatcctacagcttctttatgaaatgagaggccctcctgctagaatatgaaatgcagaagacctcatgactttcagctgatttttcaaagataaagtgaactgttcagcttcatagaaattcatgcgagtgtgactgaacgtgtgtgcatacacactcgtgcacattggactcatttgggcagttttaaaagcttcacactaaatccaaagcctcgtcctttgggtcgtatgtagtcgtttgtaaaatcaatttctggcttctgagtcatcctggtcatatctctagcaatgtttttcttgaaattctgaaaatgattcacatatgtgtgtacatttaattcacttagatgatctgtaaacttggatggtatttattctaaatggggaaaacaattttatatggaaaaatctatgtaatttataatggttttgttttatatattatattttcatatctctagggcacatctatcctcatctttttgtataccatacttagcaaaaagaaatactaatacttgactaaaatctctaggaaccaaacgtgatacatgtgatatatagcttctagaaatcgctctaaaaatctctgaatgtctcatccatcccaagcattattgtgctgtgtcattatgtccagaatgatttgtcttggatgcttatgagcatttgtttttcacaactaaggttgaaagacctgacatctcacacaatggggttctggaattcccctttcctcctttatctgtttttattgtttgtttcatttttaattgcaccagtctatgttgtcgaaactttgttttgaagggcaaatgtgagataacaagaaagcaatgtgatggaaagactggatgaatttacctatggctatgtaaattattttaatggactgataagatgtttcaagtctcatgcttggatctttatttattggtgatctaggatctgctcagctctttagcacatgaagaaaatcaggtacaaaggacatttgcatgtttggaacagcatgctctaagccccgtgcagccaacacaaattaacttgactgtagaaacaccaattccagctgctggaagaaatggtttagaaaggcaaaccagataccttttattctgccctaggaaatacagtgttgatcagtgctaaaactcttcagtggcagtcactgtggttcttttaactggggatttcctttcagtgtttcatttggtaccaaaacagaacatttaccttacatttcagatactctgttttctcagcattgttcagatactttcctttaccgctcttcacgtacccttttggcattgagtaattctataaatgtttctatccttggtttttaaaccaagttattcatactcttaaaatatctaccaaatctcattgtattttcacatattttgagcatcaagatactggtcattttaaaaaatccttcagtaaatagcacagtttattttcctaatgacatttttagggtttcttcattgatcaaccaggtttgggttacacaaatcaattgtgggggaaaaatcaaataaaacaattgcttattatattttccaaaggactgagcatttatcttttattcacgaagatatcatatgaggatgataatgatctttaacagattttttagagatagaatttataaagaggctgatactaagaatactacaatcaaaattgaagctagagaatgtaaaaatagaaagtaaatagttctaagaatattctggcataaattatttttatttagccaataaaatagcctccaaatgtatatctcagacaccatagagctgctaacaatgagaatcaaggaagatgcttgcacttagatttcgtttgttgtatttcagtagttctggatgtcctttgttaaaattggaaaatggaaaaatgtctcgacagaaatgtcaatctggtgattctgtgaactgtaaaatgttcacttttaaaaataaagttgtaaacaagttactcatataagttggtattacagtagcaaaaacagaaaaccatgtgatccatcctgtattttgattgatgctttaataaagggtttgcacagctgtgtggaaaaaaaaaaaaaaaaa

SEQ ID NO: 5038 - DNA, 1296 bp, Homo Sapiens
  NM_021652
gtgaaagagcaggttctgcttctttggtgtagtcctgaagcttcctaagaaacttcacatcaggtgatggataggagcaaccctgtaaaaccagccttagactatttttcaaacaggctggtgaattaccagatctccgtcaagtgcagtaaccagttcaagttggaagtgtgtcttttgaatgcagaaaacaaagtcgtggacaaccaggctgggacccagggccagctgaaggtgctgggtgccaacctctggtggccgtacctgatgcacgaacaccccgcctacctgtactcgtgggaggatggtgattgctcacaccaaagccttggacccctcccagcctgtgacctttgtgaccaactccacctacgcagcagacaagggggctctgtatgtggatgtgatccgtgtgaacagctactactcttggtatcgcaactacgggcacctggagttgattcagctgcagctggccgcccagtttgagaattggtgtaagacatcacaatcccattattcagagcgcgtatggagtggaaacgcttgtagggcttcaccaggtaagcggtgttgaactttctgcttgtgtattctctctgggcagagatgccacttgcctcccccaccatgccatctctgaagaatattacagaccattttggagcatggtgaataagaaattttcaccttaggagttcagttgaatagtcatttttatatttgtgactgcaagtcactcttaggggctgtacttccttagtactggtagcattattatccaatggacttttatagctttcattaggttttcttttgtttttgttctttaaagaacgttttacttatcttagtatttcatttttcatctatattatgaggcagtaagagtcttctgtttttccaaagttgagactgctttatatttatttcgtattgtctacagctgtagtgttcaatacattagccactagccacatgtggttatttaaataagataaaataaaaattggccgggcgtggtggctcacgccggtaatcccagcactttgggaggccgaggcgggcagatcattaggtcaggagatcgagaccatccttactaagacggtgaacccccatctctattaaaaatacaaaaaattagccgggcgtggtggcgggcgcctgcagtcccagctactcaggaggctgaggcaggagaatggcgtgaacctgggaggcagagtttgcagtgagccgagatggcgccactgcactccagcctgggggacagagcgagactccatctcaaaa

SEQ ID NO: 5039 - DNA, 2765 bp, Homo Sapiens
  NM_021706
attctgccttgtcccatagatttagaaagaggctgacacatctggtaactagtttacggtcatctgcctctaagcgacatttagggtaagcgacatttttcagaaaccaaggccctccctctcgtctcactagtgggaagggtggaaagaacaggacagaaagctcttcctcttgtgtgaggcagttgctgtggaagccccataggcaggaggcccccgggcagcacatcctgtctgcttgtgtctgctgcagagttctgtccttgcattggtgcgcctcaggccaggctgcactgctgggacctgggccatgtctccccaccccaccgccctcctgggcctagtgctctgcctggcccagaccatccacacgcaggaggaagatctgcccagaccctccatctcggctgagccaggcaccgtgatccccctggggagccatgtgactttcgtgtgccggggcccggttggggttcaaacattccgcctggagagggagagtagatccacatacaatgatactgaagatgtgtctcaagctagtccatctgagtcagaggccagattccgcattgactcagtaagtgaaggaaatgccgggccttatcgctgcatctattataagccccctaaatggtctgagcagagtgactacctggagctgctggtgaaaggacccacgcagaggccgtcggacaacagtcacaatgagcatgcacctgcttcccaaggcctgaaagctgagcatctgtatattctcatcggggtctcagtggtcttcctcttctgtctcctcctcctggtcctcttctgcctccatcgccagaatcagataaagcaggggccccccagaagcaaggacgaggagcagaagccacagcagaggcctgacctggctgttgatgttctagagaggacagcagacaaggccacagtcaatggacttcctgagaaggacagagagacggacacctcggccctggctgcagggagttcccaggaggtgacgtatgctcagctggaccactgggccctcacacagaggacagcccgggctgtgtccccacagtccacaaagcccatggccgagtccatcacgtatgcagccgttgccagacactgaccccatacccacctggcctctgcacctgagggtagaaagtcactctaggaaaagcctgaagcagccatttggaaggcttcctgttggattcctcttcatctagaaagccagccaggcagctgtcctggagacaagagctggagactggaggtttctaaccagcatccagaaggttcgttagccaggtggtcccttctacaatcgagcagctccttggacagactgtttctcagttatttccagagacccagctacagttccctggctgtttctagagacccagctttattcacctgactgtttccagagacccagctaaagtcacctgcctgttctaaaggcccagctacagccaatcagccgatttcctgagcagtgatgccacctccaagcttgtcctaggtgtctgctgtgaacctccagtgaccccagagactttgctgtaattatctgccctgctgaccctaaagaccttcctagaagtcaagagctagccttgagactgtgctatacacacacagctgagagccaagcccagttctctgggttgtgctttactccacgcatcaataaataattttgaaggcctcacatctggcagccccaggcctggtcctgggtgcataggtctctcggacccactctctgccttcacagttgttcaaagctgagtgagggaaacaggacctacgaaaacgtgtcagcgttttctttttaaaatttaattgatcaggattgtacgtattcaaggtgtaaaatgtgataatttgtcgtacacgtacattgtgcaatgacagtcacaatcaattcctcagcgcacccatcaccacgaatacgatacattagatattctgaacttgctcatcttaggacttcacattggtgtcagtgttttctgacaaatcacgtgtatcaggaatgaatgagggaggtgtggctgggtgaaggcagagagccgaccctacaggtccacatctgcacatacatgcacaggaatgcatgctctcacacacatgcatacacacacgcacacacacagacatgcacatacactcacacgccccaggaaatccaaggaatcactgagcctgctgttggttgaggcatttctgagtatccaccctacctgtagggtcagatgtactgattgacacagaaaattaccctatgtaccactaggaggcggcagaatctcatttgggttaatctgtgtttgtctttaaaaaacaaaaacaggccgggcgcggtggctcacgcctgtaatcccagcactttgggaggctgaggtgggcggatcacgaggtcaggagatcgagaccatcctggctaacacggtgaaaccccatctctactaaaaatacaaaaaaattagctgggcgtggtggcgggcacctgtagtcccagctactcgggaggctgaggcaggagaatggcgtgaacccgggaggcggagcttgcagtgagccgaggtggtgccactgcactccagcctgggcgacagagcgagactccgtcaaaaaaaaaaagaaaagaaaagaaagatttttaagaattcagcaaaaactcagccagctctttctatggggcagttgctaatttagttctaggcaaacgtggacacattaaattctcctacaaaccc

SEQ ID NO: 5040 - DNA, 595 bp, Homo Sapiens
  NM_021709
tgtgacgtcacggcgtcgttggtaaggggctggcggccggggagctgcgtagctcccggccccgcggccatgcccaagcggagctgccccttcgcggacgtggccccgctacagctcaaggtccgcgtgagccagagggagttgagccgcggcgtgtgcgccgagcgctactcgcaggaggtcttcgacccatctggggtagcgtccattgcctgttcctcatgcgtgcgagccgtggatgggaaggcggtctgcggtcagtgtgagcgagccctgtgcgggcagtgtgtgcgcacctgctggggctgcggctccgtggcctgtaccctgtgtggcctcgtggactgcagtgacatgtacgagaaagtgctgtgcaccagctgtgccatgttcgagacctgaggctggctcaagccggctgccttcaccgggagccacgccgtgcatggcagccttccctggacgagcgctcggtgttcacactgaactgtggggtcgacgggaggggtgccttttacatgttctattttgtatcctaatgacagaatgaataaacctctttatatttgcacaagaaaaaaaaaaaaaaaaaaaa

SEQ ID NO: 5041 - DNA, 3279 bp, Homo Sapiens
  NM_021729
ctcacgtgacaaagctcccggaggtgggagccctgggccaaaatggcggcctacctgcagtggcggcgcttcgttttcttcgacaaggagctggtgaaggagccgctgagcaatgatggggccgctcccggggccacacctgcttctggatccgctgcttccaagttcctttgcctccctcctggcatcactgtctgcgactcaggccgagggagcctggtctttggagatatggaaggccagatctggttcttgccacgttccctacagcttacaggcttccaagcctacaaactacgggtgacacacctgtaccaactgaagcagcacaatattctggcatctgttggagaagatgaagagggcatcaaccccttggttaagatctggaacctggagaagagagatggtggcaatccactctgcactcgaatcttccctgctattccaggaacagagccaactgttgtatcttgtttgactgtccatgaaaatctcaactttatggccattggtttcacagatggcagtgttacattgaacaaaggagacatcacccgggaccggcatagcaagacccagattttgcacaagggcaactatcctgtaactggattggcctttcgccaagcaggaaagaccactcacttgtttgttgtgacaacagagaacgtccagtcctatatagtttctggaaaagactaccctcgcgtggagttggacacccatggttgtggcctgcgctgctcagccctaagtgacccttctcaggacctgcagttcattgtggccggggatgagtgtgtctacttgtaccagcctgatgaacgtgggccctgcttcgcctttgagggccataagctcattgcccactggtttagaggctaccttatcattgtctcccgtgaccggaaggtttctcccaagtcagagtttaccagcagggattcacagagctccgacaagcagattctaaacatctatgacctgtgcaacaagttcatagcctatagcaccgtctttgaggatgtagtggatgtgcttgctgagtggggctccctgtacgtgctgacgcgggatgggcgggtccacgcactgcaggagaaggacacacagaccaaactggagatgctgtttaagaagaacctatttgagatggcgattaaccttgccaagagccagcatctggacagtgatgggctggcccagattttcatgcagtatggagaccatctctacagcaagggcaaccacgatggggctgtccagcaatatatccgaaccattggaaagttggagccatcctacgtgatccgcaagtttctggatgcccagcgcattcacaacctgactgcctacctgcagaccctgcaccgacaatccctggccaatgccgaccataccaccctgctcctcaactgctataccaagctcaaggacagctcgaagctggaggagttcatcaagaaaaagagtgagagtgaagtccactttgatgtggagacagccatcaaggtcctccggcaggctggctactactcccatgccctgtatctggcggagaaccatgcacatcatgagtggtacctgaagatccagctagaagacattaagaattatcaggaagcccttcgatacatcggcaagctgccttttgagcaggcagagagcaacatgaagcgctacggcaagatcctcatgcaccacataccagagcagacaactcagttgctgaagggactttgtactgattatcggcccagcctcgaaggccgcagcgatagggaggccccaggctgcagggccaactctgaggagttcatccccatctttgccaataacccgcgagagctgaaagccttcctagagcacatgagtgaagtgcagccagactcaccccaggggatctacgacacactccttgagctgcgactgcagaactgggcccacgagaaggatccacaggtcaaagagaagcttcacgcagaggccatttccctgctgaagagtggtcgcttctgcgacgtctttgacaaggccctggtcctgtgccagatgcacgacttccaggatggtgtcctttacctttatgagcaggggaagctgttccagcagatcatgcactaccacatgcagcacgagcagtaccggcaggtcatcagcgtgtgtgagcgccatggggagcaggacccctccttgtgggagcaggccctcagctacttcgctcgcaaggaggaggactgcaaggagtatgtggcagctgtcctcaagcatatcgagaacaagaacctcatgccacctcttctagtggtgcagaccctggcccacaactccacagccacactctccgtcatcagggactacctggtccaaaaactacagaaacagagccagcagattgcacaggatgagctgcgggtgcggcggtaccgagaggagaccacccgtatccgccaggagatccaagagctcaaggccagtcctaagattttccaaaagaccaagtgcagcatctgtaacagtgccttggagttgccctcagtccacttcctgtgtggccactccttccaccaacactgctttgagagttactcggaaagtgatgctgactgccccacctgcctccctgaaaaccggaaggtcatggatatgatccgggcccaggaacagaaacgagatctccatgatcaattccagcatcagctcaagtgctccaatgacagcttttctgtgattgctgactactttggcagaggtgttttcaacaaattgactctgctgaccgaccctcccacagccagactgacctccagcctggaggctgggctgcaacgcgacctactcatgcactccaggaggggcacttaagcagcctggaggaagatgtgggcaacagtggaggaccaagagaacagacacaatgggacctgggcgggcgttacacagaaggctggctgacatgcccagggctccactctcatctaatgtcacagccctcagaactaaagcggactttctttccctgccttcttatttagtcagcttgccatccctcctcttcactagcagtgtagatcattccagatcagtgggggagggcacctcagcaacctctgagtgtggacaatagctgctttcttctctatccaagagcaccaggctgtgcttgggtccttgctctcagagtctataaataaaagaatataatgatttgggagcttaaaaaaaaaaaaaaaaaaaaaaaaaaaaaaaaaaaaaaaaaaaaaaaaaaaaaaaaaa

SEQ ID NO: 5042 - DNA, 1659 bp, Homo Sapiens
  NM_021734
agtttcgtccgagctcagtagagttttgctgttaagactgcgcgaggagctagagagagcggagagcgctgagccgggccgcacccgccgagccgtgaaaaaagtacatctcctggaagggatgctttttagctgagctctggtggatgagaggagctagccttgaaaaacttgatactgatggacattgtgtgggccagaggcagggatggttggctatgaccccaaaccagatggcaggaataacaccaagttccaggtggcagtggctgggtctgtgtctggacttgttactcgggcgctgatcagtcccttcgacgtcatcaagatccgtttccagcttcagcatgagcgcctgtctcgcagtgaccccagcgcaaagtaccatggcatcctccaggcctctaggcagattctgcaggaggagggtccgacagctttctggaaaggacacgtcccagctcagattctctccataggctatggagctgtccaattcttgtcatttgaaatgctgacggagctggtccacagaggcagcgtgtatgacgcccgggaattctcagtgcactttgtatgtggtggcctggctgcctgtatggccaccctcactgtgcaccccgtggatgttctgcgcacccgctttgcagctcagggtgagcccaaggtctataatacgctgcgccacgccgtggggaccatgtataggagcgaaggcccccaggttttctacaaaggcttggctcccaccttgatcgccatcttcccctacgccgggctgcagttctcttgctacagctccttgaagcacctgtacaagtgggccataccagccgaaggaaagaaaaatgagaacctccaaaacctgctttgtggcagtggagctggtgtcatcagcaagaccctgacatatccgctggacctcttcaagaagcggctacaggttggagggtttgagcatgccagagctgcctttggccaggtacggagatacaagggcctcatggactgtgccaagcaggtgctgcaaaaggaaggcgccctgggcttcttcaagggcctgtcccccagcttgctgaaggctgccctctccacaggcttcatgttcttctcgtatgaattcttctgtaatgtcttccactgcatgaacaggacagccagccagcgctgagtgcaggaaggaccccaggtcttccctggaggcagcctcctgaaggaaggaagattcagtctccactgagaggtgccgtctggcccttccctgcaggccagctgccccaagcggggtagcagccttgaacccacccagctgggacaccaccagaaggtccagggctctccccatgagagaatcagagggaatgcaggacgtggtctatggtgagccaacgacacagtgagaaggagcaggaagttgctgtttctcctctgaccagcccacactccaaaggaaacagacgccatcctacacctatcagccctgcctgccaggagaacagaacacactcctggtctggatggggctgctgcttgagtgcagagggctgcggtaggccctttgcaggagtcaggtccctacacttggcctgtttttccaacctatttaatagacattaaagctaaacacacattccttatcttaaaaaaaaaaaaaaaaaa

SEQ ID NO: 5043 - DNA, 1040 bp, Homo Sapiens
  NM_021737
agtcccagagctcgagagggccacgtgaccgtcccggggccagtcacgtgaggcgcagatcctggctgggagggggttggtagaggggtccagagtggcagtaaaggaggaagatggcggggtgcagggggtctctgtgctgctgctgcaggtggtgctgctgctgcggtgagcgtgagacccgcacccccgaggagctgaccatccttggagaaacacaggaggaggaggatgagattcttccaaggaaagactatgagagtttggattatgatcgctgtatcaatgacccttacctggaagttttggagaccatggataataagaaaggtcgaagatatgaggcggtgaagtggatggtggtgtttgccattggagtctgcactggcctggtgggtctctttgtggacttttttgtgcgactcttcacccaactcaagttcggagtggtacagacatcggtggaggagtgcagccagaaaggctgcctcgctctgtctctccttgaactcctgggttttaacctcacctttgtcttcctggcaagcctccttgttctcattgagccggtggcagcaggttccgggatacccgaggtcaaatgctatctgaatggcgtaaaggtgccaggaatcgtccgtctccggaccctgctctgcaaggtccttggagtgctgttcagtgtggctggagggctcttcgtggggaaggaaggccccatgatccacagtggttcggtggtgggagctggcctccctcagtttcagagcatctccttacggaagatccagtttaacttcccctatttccgaagcgacaggagcggctgctggagttgctgcagctttcggggcgccaatcgggggtaccttgttcagtctagaggagggttcgtccttctggaaccaagggctcacgtggaaagtgctcttttgttccatgtctgccaccttcaccctcaacttcttccgttctgggattcagtttggaagctggggttccttccagctccctggattgctgaactttggcgagtttaa

SEQ ID NO: 5044 - DNA, 2108 bp, Homo Sapiens
  NM_021777
tcactggagaggaggcagggacagacccagcagcacccacctgagcgagaagagcagacaccgtgctcctggaatcacccagcatgttgcaaggtctcctgccagtcagtctcctcctctctgttgcagtaagtgctataaaagaactccctggggtgaagaagtatgaagtggtttatcctataagacttcatccactgcataaaagagaggccaaagagccagagcaacaggaacaatttgaaactgaattaaagtataaaatgacaattaatggaaaaattgcagtgctttatttgaaaaaaaacaagaacctccttgcaccaggctacacggaaacatattataattccactggaaaggagatcaccacaagcccacaaattatggatgattgttattatcaaggacatattcttaatgaaaaggtttctgacgctagcatcagcacatgtaggggtctaaggggctacttcagtcagggggatcaaagatactttattgaacctttaagccccatacatcgggatggacaggagcatgcactcttcaagtataaccctgatgaaaagaattatgacagcacctgtgggatggatggtgtgttgtgggcccacgatttgcagcagaacattgccctacctgccaccaaactagtaaaattgaaagacaggaaggttcaggaacatgagaaatacatagaatattatttggtcctggataatggtgagtttaaaaggtacaatgagaatcaagatgagatcagaaagagggtatttgagatggctaattatgtcaacatgctttataaaaagctcaatactcatgtggccttagttggtatggaaatctggactgacaaggataagataaagataaccccaaatgcaagcttcaccttggagaatttttctaaatggagggggagtgttctctcaagaagaaagcgtcatgatattgctcagttaatcacagcaacagaacttgctggaacgactgtgggtcttgcatttatgtctacaatgtgttctccttattctgttggcgttgttcaggaccacagcgataatcttcttagagttgcagggacaatggcacatgaaatgggccacaactttggaatgtttcatgacgactattcttgcaagtgtccttctacaatatgtgtgatggacaaagcactgagcttctatatacccacagacttcagttcctgcagccgtctcagctatgacaagttttttgaagataaattatcaaattgcctctttaatgctccattgcctacagatatcatatccactccaatttgtgggaaccagttggtggaaatgggagaggactgtgattgtgggacatctgaggaatgtaccaatatttgctgtgatgctaagacatgtaaaatcaaagcaacttttcaatgtgcattaggagaatgttgtgaaaaatgccaatttaaaaaggctgggatggtgtgcagaccagcaaaagatgagtgcgacctgcctgaaatgtgtaatggtaaatctggtaattgtcctgatgatagattccaagtcaatggcttcccttgccatcacgggaagggccactgcttgatggggacatgccccacactgcaggagcagtgcacagagctgtggggaccaggtaggaggacaaatcctttcccctgtgcatgtgcgaaggaaaatcatttcagatgacagtgtttaaccatggtcaaaggaccattctgtcctatccttcttagaagctttgaactcaaaatcatggaaaggttttaagatttgaggttggttttagggttgctagatttagcaagtaaaaataaggatggccccgttaaattttaacttaaaattaacaagttttttgttaattttttgttttttgtctcagcatcagtatatcccatgcaatatttgaggtgtgctcatactaaaattatttgtgtatctgaaattcaaattaaactgggtgtctttttcttttcatctggcaaccctactaagatcataaacccttggaaatctgtgtgtgtgcgggtgtgtgtgtgtgtgtgtgtgcaggggtggcagaagtactgtgggatgggacagaaataa

SEQ ID NO: 5045 - DNA, 1657 bp, Homo Sapiens
  NM_021805
gttgccgctgcgcacctggctcaggtgagctgccccgcccccgcccggcgcgagccccaggtcctggcagcagcctctgacctgtccaggtgccctgtccagctgactgcaaggacagagaggagtcctgcccagctcttggatcagtctgctggccgaggagcccggtggagccaggggtgaccctggagcccagcctgccccgaggaggccccggctcagagccatgccaggtgtctgtgatagggcccctgacttcctctccccgtctgaagaccaggtgctgaggcctgccttgggcagctcagtggctctgaactgcacggcttgggtagtctctgggccccactgctccctgccttcagtccagtggctgaaagacgggcttccattgggaattgggggccactacagcctccacgagtactcctgggtcaaggccaacctgtcagaggtgcttgtgtccagtgtcctgggggtcaacgtgaccagcactgaagtctatggggccttcacctgctccatccagaacatcagcttctcctccttcactcttcagagagctggccctacaagccacgtggctgcggtgctggcctccctcctggtcctgctggccctgctgctggccgccctgctctatgtcaagtgccgtctcaacgtgctgctctggtaccaggacgcgtatggggaggtggagataaacgacgggaagctctacgacgcctacgtctcctacagcgactgccccgaggaccgcaagttcgtgaacttcatcctaaagccgcagctggagcggcgtcggggctacaagctcttcctggacgaccgcgacctcctgccgcgcgctgagccctccgccgacctcttggtgaacctgagccgctgccgacgcctcatcgtggtgctttcggacgccttcctgagccgggcctggtgcagccacagcttccgggagggcctgtgccggctgctggagctcacccgcagacccatcttcatcaccttcgagggccagaggcgcgaccccgcgcacccggcgctccgcctgctgcgccagcaccgccacctggtgaccttgctgctctggaggcccggctccgtgactccttcctccgatttttggaaagaagtgcagctggcgctgccgcggaaggtgcagtacaggcctgtggaaggagacccccagacgcagctgcaggacgacaaggaccccatgctgattcttcgaggccgagtccctgagggccgggccctggactcagaggtggacccggaccctgagggcgacctgggtgtccgggggcctgtctttggagagccatcagctccaccgcacaccagtggggtctcgctgggagagagccggagcagcgaagtggacgtctcggatctcggctcgcgaaactacagtgcccgcacagacttctactgcctggtgtccaaggatgatatgtagctcccaccccagagtgcaggatcatagggacagcgggggccagggcagcggcgtcgctcctctgctcaacaggaccacaacccctgccagcagccctgggaccctgccagcagccctgggaaaaggctgtggcctcagggcgcctcccagtgccagaaaataaagtccttttggattctgaaaaaaaaaaaaaaaaaa

SEQ ID NO: 5046 - DNA, 3415 bp, Homo Sapiens
  NM_021809
gtgctttccagccgcgagctgtcaggccgagtgtcaggccgggcaggtacgcggcgcgcgcccccggcgccccccgctccccgccgggacgccccgcgccgagccggaggccgcgtggacccgaaagccgctgggaaaagtttacccaaggtccagcctagcccctaggcaccatgtcggacagtgatctaggtgaggacgaaggcctcctctccctggcgggcaaaaggaagcgcagggggaacctgcccaaggagtcggtgaagatcctccgggactggctgtacttgcaccgctacaacgcctacccctcagagcaggagaagctgagcctttctggacagaccaacctgtcagtgctgcaaatatgtaactggttcatcaatgcccggcggcggcttctcccagacatgcttcggaaggatggcaaagaccctaatcagtttaccatttcccgccgcgggggtaaggcctcagatgtggccctcccccgtggcagcagcccctcagtgctggctgtgtctgtcccagcccccaccaatgtgctctccctgtctgtgtgctccatgccgcttcactcaggccagggggaaaagccagcagcccctttcccacgtggggagctggagtctcccaagcccctggtgacccctggtagcacacttactctgctgaccagggctgaggctggaagccccacaggtggactcttcaacacgccaccacccacacccccagagcaggacaaagaggacttcagcagcttccagctgctggtggaggtggcgctacagagggctgctgagatggagcttcagaagcagcaggacccatcactcccattactgcacactcccatccctttagtctctgaaaatccccagtaggcatctgccaagaagggtgctgaaggctccagccagctgtcctgggtttccgttttggttccctttcatacagagggttttctatggatcactgccaaacattgggatcatctcctctgtccagaggtcttcaacaggaagatgccagctggcaccactgcactgtgatgggggccctctcctctgctgactctgccgtttctccaggcctccgctcagtgatgagaccaagagatcggagacaagcatggtgctgctgcttctgctgcttctccagaaaatccctgggacacctttgttccagcctggtttcctgggctgggctcaggaaagctgccaaattcagtcctatgttgggtccaagctgcccctgtgctgtttctgtcaagccaggtgtggacattccaagttcatatgcgtgaacaaaagaaaagaggaacccagtggatgtaacagaaccgactccagttgaatgtttagatttttgctaaactgttttctttttcccttttttgctgtggtttgcattcacggcagtagttagcccaggtgtggggaacgagagtgcactgcatgatagcgttctggtgagctgggaaggacccaccactgccactgaggattgttttggaagaaaggaatatttttatcttggggaccagctaagtctctgcagtagtgtgaaattccaaatggttgttttatcattggtttggtttaccaaaaaaaaggcagggaaaaaaaaaaaaaacaaccgtatgagcgcattggcttgtctgccgcaggcacagaagggtagaaagccacagcagggggcagtccagcagactctgactcaactttctaggcacctagcagagaaagataagatcaaaaggtgtttggtttttcttttaatttttattgtagtttttttgggtgggtgggggaagtaaactagactgaagcgatggattttttttttcttttttttctttagtgtttttccctttgttcttgaacacttttgccctgcagcctcagttttgaattcttttagcaacttggattagaggggcccatatgtcagaagctcccagcacctcctacttgggagaaaagtgagccatctgctggtcaggaagtcctccagagaggcagcttttcccacaatggtggcaggaaactttggggaaagcaggaatggtgtccactgctgcggaggaactgccttcagagaaggtggggctggaaaagggttagaagcctcctagctgggattgtctttgtttcacctttctttaaattagaattacagaagcccctgcccagtgaacagataacgattggtcttatgctcctccctttcccccattttttcttttgctgttttgttttttgttttttgtttgtttgtttgtttttttgagacagagtcatgctctgtcacccgggctggagtgcagtggtgcgatctcagctcactgtaacctccgcctcccgggttcaagcaattatttgcctcagcctcccgagtagctgggattataggcacccgccaccatgtctggcttttagtagagacggggtttcaccatcttggccaggctggtcttggaactcctgacctcgtgagccaccacgcccagcctcttttgctgtttcattgctgacagtgttcaacaatatgccccatctttatatatcctaagaaacactaatcctaggttattgctagccaaaatatttttgtcctgagtagtgtcactgggccaaaagatagatcaggacgacagcctttagttttcctgaaatcaccaggtcaggcacaaggagaaaaggttcctggatactgactaacttgggtgggtctagccaggagaaagacagtaacatgtgttctgtactttctgggaagatccctgaagccatcacagaggctccccaacttctgagtcgcccatctgttgctgtgggagtgtgaacggatcgctgaaggagagggagctttgctctctctaggtgggcaagtttcctgggctctctgtgttgcctccctctggcttcttcctcccgtgccctctccccgtgtgccccagggggatcagggatcctcaccctcctgaggcccagtggggaagaatgaacatggcttcatccaggttaactgatgctgccatttgcccagcctcttccatcccagccctgtcagtgagcccaggtctggtgcaactgctgcaggatgcctgtagtagggaactctggaagtgtattgggctgaggtgggattttccctccccacagtgcactgagcaatggagggtggtgagggagccatgctgctgaattctggttggcatttccccattatgtaaaatggggtgttgggtagggcagactctgcttgggtttggttgtaagataaacctggaggagaagcacagttgtcccattgaattatttgagcaaaaactactgtaaataacttttttgtcttttgtcaaataaaatttttttttgtttttttaagcagaaacaaaaaaaaaaaa

SEQ ID NO: 5047 - DNA, 9215 bp, Homo Sapiens
  NM_021813
aaacagcgccgagccgccgccgcctcagcagcagcagcagcagcagcagcggcagcagcggccgtgcacgcccgggctgcggtcgcacagcgctaacgtgagcggccgccgccctcgccaccccgcctgcccactcccgccgccgccccgctctcgctttccccccggcctcccctcgccccttcccctcccccttcccggcgcactcggggggctgggaacgagctgccatgtgatgcgcgtcccctccgcgagctttcggtgacccacgaactgcccacctcgccggctgccgggagggggctgcgagccgggaagacgcggggaagaggaggcggaaaaggacgcaaagttctccggcgagcgcgttcgttcacatagctcccagttttaacatttcgccacctactgaagacatcatttgggaccaagctgatgagcccttgaagcacagcagataagagtgttgctgttgatcatctttgcctgggaagttgaatgataaagccagaagaaagcatgctttctgatcatttgcagctgtctgcttcagaaagtgagggctccaggaatgaggagaatcttcaagaacttcctcgcactgtgacatgtctgatcccttgctcccatccctgcagcatgaacaaggtggacactcactgacctgtcacaaggttgccccacaaaactttggggtccatgtctgaatggattgccagagccttctcatctctcccttcgcccagttccctgcatcctaagactcgaaggcagcacaggacctggaaaaattacatggtgtgaacggcatgtctgtggatgagaagcctgactcccccatgtatgtgtatgagtccacagtccactgcaccaacatcctcctgggcctcaatgaccagcggaaaaaggatattctctgtgacgtgactttgatcgtggagaggaaggagttccgggcccaccgggctgtgctggccgcatgcagtgaatatttttggcaggcgctggttggacagacaaaaaatgatttggtggtcagcttgcctgaggaggtcacagccaggggctttgggccgctgttacagtttgcctacactgccaagctgttactcagcagagaaaacatccgcgaggtcatccgctgtgctgagttcctgcgcatgcacaacctggaggactcctgcttcagcttcctgcagacccagctcctgaacagtgaggatggcctgtttgtgtgccggaaggatgctgcgtgccagcgcccacacgaggactgcgagaactctgcaggagaggaggaggatgaagaggaggagacgatggattcagagacggccaagatggcttgccccagggaccagatgcttccagagcccatcagctttgaggccgccgccatccccgtagcagagaaggaagaagccctgctgcccgagcctgacgtgcccacagacaccaaggagagctcagaaaaggacgcgttaacgcagtaccccagatacaagaaataccagcttgcatgtaccaagaatgtctataatgcatcatcacacagtacctcaggttttgcaagcacattccgggaagataactctagcaacagcctcaagccggggcttgccagggggcagattaaaagtgagccgcccagtgaagagaatgaggaagagagcatcacgctctgcctgtctggagatgagcctgacgccaaggacagagcgggggatgtcgagatggaccggaaacagcccagccctgcccctacccccacggccccagctggggccgcctgcctggagagatccaggagcgtggcctcgccctcctgcttaaggtctctgttcagcataacgaaaagtgtggagctgtctggcctgcccagtacatctcagcagcactttgccaggagtccagcctgcccttttgacaaggggatcactcagggtgaccttaaaactgactacacccctttcacagggaattatggacagccccacgtgggccagaaggaggtgtccaacttcaccatggggtcgcccctcagggggcctgggttggaggctctctgtaaacaggagggagagctggaccggaggagcgtgatcttctcctccagcgcttgtgaccaagtgagcacctcggtgcattcttattctggggtgagcagtttggacaaagacctctctgagccggtgccaaagggtctgtgggtgggagccggccagtccctccccagctcgcaggcctactcccacggtgggctgatggccgaccacttgccaggaaggatgcggcccaacaccagctgcccggtaccaatcaaagtctgccctcgctcaccccccttggagaccaggaccaggacttccagctcctgctcttcctattcctacgcggaggacgggagcgggggctcaccctgcagcctccctctctgtgagttctcctcctcgccctgttcccagggagccagattccttgccacagaacatcaggaaccaggcctgatgggagatggaatgtacaaccaagtgcggccccaaattaaatgtgagcagtcttatggaaccaactccagtgacgaatccggatcgttctcggaagcagacagtgagtcgtgtcctgtgcaggacaggggccaggaggtaaaacttccttttcctgtagatcaaatcacagatcttccaaggaacgatttccagatgatgattaaaatgcacaagctaacctcagaacagttagagtttattcatgatgtccgacggcgcagcaagaaccgcatcgcggcccagcgctgccgcaaaaggaaactggactgtattcagaatttagaatgtgaaatccgcaaattggtgtgtgagaaagagaaactgttgtcagagaggaatcaactgaaagcatgcatgggggaactgttggacaacttctcctgcctttcccaggaagtttgccgagacatccagagccccgagcagatccaggccctgcatcggtattgccctgtcctcagacccatggacttgcccacggcctccagtattaaccctgcgcccttgggtgctgagcagaacattgcggcctcccaatgcgcagtgggggaaaacgtgccctgctgcttggagccaggcgcggctccccccggacccccctgggcacccagcaacacctccgagaattgtacctctgggaggagactagaaggcactgacccgggaaccttctcagagagaggacctcctcttgaacccaggagccaaacagtgaccgtggacttctgccaggaaatgactgataagtgtacaactgacgaacagcccaggaaagattatacctagtgactcggctctgcctcccagtccgcacacctctcccatccaggcgttcttcagtcagcctgtggcactgttcatctgctgtcccgaagaaaccgagaacacatttggtgcacactacagcggtcttagcagcaatactgttccgaagtatcctctcctcttctcgagcaggagtgatagttaccttcacaatggtgctaccccttgcccaggcaaggaaagacagcagtgatgacactgtctgtctgtggctcaatttcagtcttcacagggatagactacaacacctctaggccccaaccacggattttttttctcagtggcccatgtcacaaaccctatctcaggaatttcttctgaatgttcaatttttttcattgaagacagcttctatacacatcaaagttttatagctagactgtacatattatatataatatatatataaaatatatatatatatatatatatatccatatgcaaaagtcctgcatgcctcaactttctcatcctaaaactggaaacttatttctcatttagaaacaggttccaacattcctcttcttttgtctctgatgctagaactagtttggtaactgttaacatggtcatttttcttgcttcacagttcaattttcaattcgtacttatttatggacaaaattcagtgttggaagctttttcccaaggttttatttcagatttctttttcgtttggtttggttttggcacctccaagtggtgtcatttgagcattgtaggtttgttttttgtttgtttggggggttttgtttgtttttgtttttgtttttgttttccttgcagatactgtacagtaatggtcaactttgccacttgcactgagttttgggtcaaacctattttcttaaatgaagttgtaacttcggtataactcaagtatactgtatattctttgcttttagttaaaaaagtaaaacattttagctaattaaaaagcactcaggtgataattatgtaggaaaaacaatcttgccaaataatgaattcatcctaggatgtgtagacaataatctgcttgaatatttttatatttcacctcctccccacctttccctaagcaaagtttaaacgcagatagagagttcagagttgatgctggatgttcagattcctaagtggggagagagtttggacatctcactcaaaagtacatcagaaaaacaggaatccgtgattttataccagaactcagcaggcattggctcctagaaatcaagttagaaagttttcacccagggagtaagtcccattcatttcaacacgtcctgaggcctcggcttgctcttggaagtgttgtgcagtaggacctgctcccctgaaggacggggccaaccagccactggctttcctgcccaggcttggcctcccaggacatctggcctgaggggatttgaatcacagccccgaaggtcctgccttcaccccattgggagagagcagggcatcctggcatctgcgatccatccctgacacaggctgacacattctttctcctttccttctccaaaggcttggagttttcttctgaggtttttctgccagtgtcttgtctgaaggcagacttcattctgaggctttggacaagctatcaccgggaaccctccctgtccccttcccgaatcacacacataccctaccctcacctgatgataattttctcttcttgctgcaaaactggttggcttgcaacccagagagagcagcttcccttggctctggggccgtgttggccccagccacgtttacaggaaggtgtgccccagaggaggaggaatcagctccctcgctccagtggccttgggtccgggtctcactgagcagcccgagggccactccagcccggctggggaagagagtcctgaacggtttgatgtggggatggggtggtgggcagtggggaatagatggttgactttgtttctttatttgtgccattgtttggacaatattaaagctgcatgtaaaaggggaaattagtatatgatgtaggctaaaagtgaaatcatagtaacatatgttttagtattattaacttttttctgtacaaatattagcactaaatgtttaaatatgtatgaatgccagaaatttgtcagttcatgcagtaggataaaaaaaaaaaaaaaaaaaaaaaaaaggcttttctttttaaacagttccacttttaaaacctgcctctgggtttttgttttttcttgtttgtgtgtgtgtgtgtgtgtgtgtgtgtgtgtgtgtgtgtgtgtgtgtgtgtctgaaacagatcttgataaagctctgtgttggagctgctggtttttgttatggttgttggaatttcttggcctactaggacagttctgtgcttcaccatgaggtttgcctttgtggaaaactggtgacagtgagaatataaactcaatgtgaatcacgtgatacttcgcaggcgtgtgttacagtggagtcagctgacagtattttgctttttaactctattgttgcctttccaagtgacctctcctcttcttttaaaaaaagaacactttctgctcatatcataaccaggtccaacccagcttcttggcatgaggtttaccctggtaacaactcatgtgcaactggtagtcttgaccacattccatccatttcctcaggtttctgtggttcagtagcccagacctgtttggcagccatttctagcaggggcggggcctctttatttctctccaccctaactcagacctcaccttcctcccacccacccctgccttgcttttcttcctcttcccccaacctaacttctgccatgggaactggttaaaaacactgctctaaaaaccatcttccaatttcatagagatttctcacaagttatttcattcataatccaccatgaacagtgactagcttcgtgcagttgttcatgtgatgtgtgtgtgtcttttcctattcagaactatgtgcttgtcaaaattatttctgggttgattcaaagggaggacttgctggggaccagaatccaaacggcctcaagtggaattttaaaacctagcctgtctcttttccctgggatccctctgtcaaccccacgccttttaggaaaaagaaaagtgagtgaacagcaaggaagagtgtttgcacagtacagtaacatttggttgttcttaaggctcttttcttacaaaaataagagaccctccaaccacgggctgtttaggaggatgcctgcttgggtctccaaatggctggggtaggaatggttgttggggcagagccagtggaggtgagtgaccctgagactaatgaacatcccacctaaatccagtcctccccttggatctgcctttgtcctgcttgtgtatccaggcaacctcttttcaagttggtcaggctttggacaggtgagtgatttgctgtatgtgtttgtttctctgcgttacctgggggtgccttgattaaaatcgaactttattacatactgattctggaacaaaacagttagaaaaactttaaaaaaaaaaaaaccgacaaagttacgaggccatcctgctatttatcttctgagttcccagcaatgactcaggcatcagagatgatgctgcagtggaaaacctgactctgtgtgtctgcaactgaatgttgtgcgagtaatttattaactgtctttctaaaggtttgctgcttttaagatgcactataattcgggatgtaatccttacattgcttttccaaggaagggaacaaaagtctagtgattagtatgccaactgccactactccttcaaaaggagccaggaccagcgacaagactcatgagaggactggctaaagtgaagtgtgcacagtgtgaagtttaatgctgttgtcaagaggcctaaacccacattttctcttttaatattttatgattgccatcaaagaagaagaaaaagaaggaacagacaaaggtttgaaaatgataagcctgttaagacaccaaaaactcctgtcccgtgaagctgcttgacatcctgtggagtagcataatcctctcaaaatgaggaagagctgcctgcaaagctttctcaagtccctatttggctacctacttctctacattatgccccatttaaactaggagctgtcttagaaatgacttcaaactgcttcactattgcttacagtttaggaggagtctcagatccagaaggagcaagaatcaagtttggtcctcaaatgactgtaaatagactaaagaacaaggtgttttttgtttttgtttttgttttctaagaataaagctgttcgttgtatcatgagttagtgtttcttccccaaactgaagactgtgttggaagtgcaatttctggtgagtcagtccacaatacaatgccctgtgtggagttggtattcatacaggaaatctgtgtgcacgaggcattgtgtgttgaaagtgtatgtttatagtactgcctgagccatctcatgaccccagcgtccaaaaccgatgctgtagaacagaacatatctgtacacaaatagtgtgtgcaaatagcatttgtacatagaaaagtctcattgtggcagattgagcataaattattcaactgacggtgcaaaaacattacttgcaaagaaaagtttatagtattttcctacactccaccctgggagatgatatttctatcaaatgaatatcagtgcattttaaatgtaatatgaaaacgatgctgccattttgtgaagaatacccacttggttgcagaggccaactttcatagctttgatttaatgttgtgacacggtgtatgcattttgctgtcaagcaatggataaacagctctgactttcattctcattccagtttattgacctcagataaaacactggcccttcttagaagcagaagtgtgcaccaagaccattcatttcaggtagactcacattcagtgccaagtgctcccatgggaataatcagacgcatatgttgcgaaagagtgaagggacttggacaaagaggggttttcctacagatggatgctcagtcttctaccaaaacatgtttggaggcagaactatgacctccccttaagtcctaacaatgtattttgtgtgtgcaaatcctgggatgcccgtttcacgctctgacataaagacatggcacctctagtgagtgatcaggaagattccatatgcatttgggagcttcaggtgcttgttagacacagtgagccattcaaggcaagcaccacctttgctagtgaggccaagagagcctgtgacaatttgacaatttgttccagaaccagtctgatgcaagtgcacctctaatatatgccttacaaactccagaggccatattcaaaacagggtcttctcagtgtatgcaaggggctgcagcccctcttctcttcctccccaggttgaacaatacggacagttttcacacatatctacctgtataaccctctgtacctctcataactggtcaacgactgtaacaggttacatcaggtgtttttctacatactttttacacagattctatgcgattaatgtaatttaattcaatgcatcattttattgtactagttcttaggcttgtccttatttttttctaagtgattgtggtttttctcgtggtttttattgtaaaaaatgaaaggctgttgatgcttattctctgtaactaagaatttttaccttttgggggaaaaaagcattgctatgaactaatgaattgaaacttcatttactcattgtaaatacactattgtgcaaaaaaagttttcactcaattgaattgctagtgttaactgaattttgtctagacaccatttctgttgatgaaataaagacatatcattatgcattgtaaactga

SEQ ID NO: 5048 - DNA, 1919 bp, Homo Sapiens
  NM_021821
gcttagcggccccaggcccgcccctgacactgaacgccgcttgtcccctccggcttgccgtcctcgcagccatggcggccgccgcgctcccagcatggctgtctctgcagtcgagggcaaggactctgcgtgcattctccactgccgtctactcggccactccggtcccgacacctagcctgccggaaagaacacccggaaatgaaaggccaccaagaagaaaggcactacctcctaggacagagaaaatggctgttgaccaggactggcctagtgtttacccagttgcagcaccatttaaaccctctgcagtacctcttcctgttcgaatgggttatccagtaaaaaagggcgtgcccatggcaaaggagggaaatctagaacttttaaagattcccaattttctgcatttgactcctgtagcaattaaaaagcactgtgaagcccttaaagatttttgcactgagtggccagccgcactggacagtgacgagaaatgtgagaagcattttccaattgaaattgacagcactgattatgtttcatcaggaccatctgttcggaaccccagagcacgagtagtagtcttaagagtaaagctttccagtttgaatttagatgatcacgcaaagaagaaattaattaaacttgtaggagagcgatactgcaagaccacagatgtgcttaccatcaaaacagataggtgccctttaaggaggcagaattacgattatgcagtgtatctactaacagtgttataccatgagtcttggaatactgaagaatgggaaaaaagtaagactgaagcagacatggaagagtatatatgggaaaatagctcatcagaaagaaatatcctggaaacgcttctccagatgaaagctgctgagaaaaatatggaaataaataaagaagagctccttggtactaaagaaattgaagagtacaaaaagtctgttgttagtcttaaaaatgaggaggaaaatgaaaattccatttctcagtacaaagaatccgtgaagagactattaaatgtgacatgaattatggagtagaaaaatctgcttgatttattaattttatgatatatgtgatcagtatctaatttgatataaaattgaaaatgttaaaaaatcattttttttcctcagagttaaaattatttccctcatactaatgcttaatggcaatgattactccagagttttttaatttttacactggggcaatagactaggaggtctctgatttcttcttggtctaaagtgttttgattttatttctacataatagctttggtattcatgtatatacatgcatttaattgtgattttatcacctttcccatttctttccccacaagctggcatttcagtagttgcttttgaataatggttttggttacctgggaaggcaggcccagaacccatttccttgacttgcagttccgggctgtgttcacatgactgctgtctagctgatgcatttttcacatttgtcaactctggttagaaacaggtcctcaggagtattctctaacctgatattttctaaaaagatatgttgattcaactttgtttagcatcctactttctagattgtggggctcattttgccagggccaagctaccagaaaagtagaagtggagattacctggtatgtatctctctgggtgccccagttagagctgccacagctcaggaaaaagatgaggcataacgaccttgaatgtaattggagtaagtgacaaaataagaactaccctgggaaaccctgcattcaatgtagctgtcaattcagtatttttaagtacacctgtcagctgtttcttaccacttcgatggttgtgattaatttaaaatcaaaataaaggaattactgagtttatttgcctaaaaaaaaaaaaaaaaaaaaaaaa

SEQ ID NO: 5049 - DNA, 1848 bp, Homo Sapiens
  NM_021822
gtgctctgctggctcagcctggtgtggacccacctcccgggcgctggctgcaatgactttctctttccctttgcaattgccttgggtcctgccgcacagagcggcctgtctttatcagaggtccctctgccagggggagggccccagagaaaaccagaaagagggtgagagactgaggaagataaagcgtcccagggcctcctacaccagcgcctgagcaggaagcgggaggggccatgactacgaggccctgggaggtcactttagggagggctgtcctaaaaccagaagcttggagcagaaagtgaaaccctggtgctccagacaaagatcttagtcgggactagccggccaaggatgaagcctcacttcagaaacacagtggagcgaatgtatcgagacacattctcctacaacttttataatagacccatcctttctcgtcggaataccgtctggctgtgctacgaagtgaaaacaaagggtccctcaaggccccctttggacgcaaagatctttcgaggccaggtgtattccgaacttaagtaccacccagagatgagattcttccactggttcagcaagtggaggaagctgcatcgtgaccaggagtatgaggtcacctggtacatatcctggagcccctgcacaaagtgtacaagggatatggccacgttcctggccgaggacccgaaggttaccctgaccatctttgttgcccgcctctactacttctgggacccagattaccaggaggcgcttcgcagcctgtgtcagaaaagagacggtccgcgtgccaccatgaagatcatgaattatgacgaatttcagcactgttggagcaagttcgtgtacagccaaagagagctatttgagccttggaataatctgcctaaatattatatattactgcacatcatgctgggggagattctcagacactcgatggatccacccacattcactttcaactttaacaatgaaccttgggtcagaggacggcatgagacttacctgtgttatgaggtggagcgcatgcacaatgacacctgggtcctgctgaaccagcgcaggggctttctatgcaaccaggctccacataaacacggtttccttgaaggccgccatgcagagctgtgcttcctggacgtgattcccttttggaagctggacctggaccaggactacagggttacctgcttcacctcctggagcccctgcttcagctgtgcccaggaaatggctaaattcatttcaaaaaacaaacacgtgagcctgtgcatcttcactgcccgcatctatgatgatcaaggaagatgtcaggaggggctgcgcaccctggccgaggctggggccaaaatttcaataatgacatacagtgaatttaagcactgctgggacacctttgtggaccaccagggatgtcccttccagccctgggatggactagatgagcacagccaagacctgagtgggaggctgcgggccattctccagaatcaggaaaactgaaggatgggcctcagtctctaaggaaggcagagacctgggttgagcctcagaataaaagatcttcttccaagaaatgcaaacaggctgttcaccaccatctccagctgatcacagacaccagcaaagcaatgcactcctgaccaagtagattcttttaaaaattagagtgcattactttgaatcaaaaatttatttatatttcaagaataaagtactaagattgtgctcaatacacagaaaagtttcaaacctactaatccagcgacaatttgaatcggttttgtaggtagaggaataaaatgaaatactaaatctttctgtaaaaaaaaaaaaaaa

SEQ ID NO: 5050 - DNA, 2268 bp, Homo Sapiens
  NM_021823
ccgcgatatttgggagcggccccgagacgcgcctggcgcggatcctaaatcccgacagctttatagagcccaggcctggcaggctcccagaacttgaagccaccagaccccacatggaaccaaaggcctcctgtccagctgctgcacccttgatggagagaaaattccatgttcttgtgggtgtcacggggagtgtcgcagccctgaagttgcctcttctggtgtcaaagcttttggacattcctgggctggaagtagcagtggtcacaactgagagagccaaacatttctacagcccccaggacattcctgtcaccctctacagcgacgctgatgaatgggagatatggaagagccgctctgacccagttctgcacattgacctgcggaggtgggcagacctcctgctggtggctcctcttgatgccaacactctggggaaggtggccagtggcatctgtgacaacttgcttacctgcgtcatgcgggcctgggaccgcagcaagcccctgctcttctgcccggccatgaacaccgccatgtgggagcacccgatcacagcgcagcaggtagaccagctcaaggcctttggctatgtcgagatcccctgtgtggccaagaagctggtgtgcggagatgaaggtctcggggccatggctgaagtggggaccatcgtggacaaagtgaaagaagtcctcttccagcacagtggcttccagcagagttgacctgggatttctgtcatgggtgtccctctgtactcagaatgggttcaggccaagtcggtgaagatggatgttggcaaaataggaggataccctcatttgctgaatgggggacctgctctgagcctgcccaggggccaggcctgctccaggttaaactggacggaaggcccaggtctcagtttctttcaaccaggagaggccgctgcctagagcccctccccaccttttcctggatgggtgaggcaagccaggagagcaagcagtgttgtcctcacgggaggaggactgagcgactgggaaaactcggctctacatctcacccagaacggcttttagaaacaccacagctggagagtcctggctgagccttgggagtttcagctctttggcggggtgcccaggtgccatgcgatcagcgaagcctgcgagttggcaggactctgaggtttcctgcagaccatgccatgagattgaaggtgcggggaaataaagaaaaatcaccatttaggagactccattctttccctacaacccagctgtggtcccagagatcagggggtgttgccaggtgtggctggggaagggtctgggttcacaactcaccggcactctttagtccccgtataacatggtggttaaggataaagatctgaagccagacagcccctagttccaatcccagctctgccgcttactagcagtggcagtttggttcaggacttagccttcctgaccttcacttacctcagctatcttgttatcctaccctcagggagttgttgagaggattcagtgaaattttgtgtgcagaatacccatgccactgagtgcctggaacgtagtaaatgtcaaatcaatggaagttaaaactaggcatgcatatatgccagagagctttcctagcatttactgcaatgccctgtctcattttgggaaaaaggaaatcctggatgctaagttgacacatccctttatgcaagtgacaggtaagcagccaggagggttgaccctgccctgggtcccaggcctcttgcctgcttcttggtttcctctgttctcatcctttcagctttgctggacctgaggcaggggcctgggtgtctgtgcctccctaccccccagtacacatgaccaagggaagtagatccagagacaccatgcactctggcccagaaaccctctgctacccagcttttgacttaattgccatttggtgtggctgcagcggggagggcttgtctgcgtatttggagctgaggctgaggctggcttcctgccctctggcttccaggccaggtgtgagggacatcccatgtgggctctgagagcactgagagtagaggtgccttgaggggaccaggaagcctactggctggaatcagtgctccagcagcctccacagcctttatctcaacagcacttgacttcaccaggtgaccctttgggataaaattgccttagggtatgaaataaactataactaaaatggtaaaaaaaaaaaaaaaaaaaaaaaaaaaaaaaaaaaaaaaaaaaaaaaaaa

SEQ ID NO: 5051 - DNA, 1649 bp, Homo Sapiens
  NM_021824
gggactggtgagtagtgggcgatttaaaaacccgcgagtgtagttgtgaccttcgcggtaggtgccggttggggccggctgtgattgttatcttggtgctgcagaggacagcagaagaggagattgggtcagaaaactgccctgccgcaccagagcacagcgcactagtgggacaggggtcctgactcagacttaactggctgtgtctcgtggtttttcactgtcctggaaaaggcctgaagtggcactgaaatgaggcatagatgagtccccacgacagtccggtttgtagattccctgatctgcaattcttcccgttccttcatggatttgaaggctctcctttcttccttgaatgactttgcatccctctcgtttgctgagagttgggacaatgttggattactggtggaaccaagcccaccacatactgtaaatacactcttcctgaccaatgacctgactgaggaagtgatggaggaggtgctgcaaaagaaggcagacctcattctctcctaccatccgcctatcttccgacccatgaagcgcataacctggaacacatggaaggagcgcctggtgatccgggctctggagaacagagtcggtatctactctcctcatacagcctatgatgctgcgccccagggcgtcaacaactggttggctaaagggcttggagcttgtacctccaggcccatacatccttccaaagctcccaactaccctacagagggaaaccaccgagtagaattcaacgttaactacacccaagacctggacaaagtcatgtctgcagtgaaaggaattgacggtgtttctgtcacttctttttctgctaggactggtaatgaggaacaaacacggattaatctgaattgtactcagaaggctttgatgcaggtggtagattttctttcccggaacaaacaactttatcagaagacggaaattctgtcactggagaagcctttgcttctacatactggaatgggacggttatgcacactggatgaatctgtctccctggcaaccatgattgatcgaataaaaagacacctaaaactatctcatattcgcttagcccttggggtggggagaaccttagagtctcaagtcaaagtcgtggccctgtgtgctggttctgggagcagcgttctgcagggtgttgaggctgacctttacctcacaggtgagatgtcccatcatgatactttggatgctgcttcccaaggaataaatgtcatcctctgtgaacacagcaacactgaacgaggctttctttctgaccttcgagatatgctggattctcacttggagaataagataaatattatcctatcagagactgacagggaccctcttcaggtggtataattgcagaaacatcaggataacacattctacaaatcagctggatgccaacttaaatttgtaacatgagtcagtgggactggtgtgcttccagagagtgtcttcgagggtatcatcatttccggtttgttaatcttattcaccaaatgttctatcgctcgtaaggtaaaactgtaatataactaccatattaaataacaaatgttcattataaactctaggaaagattgaataaaatctgtttacttaacattcttaaaaaaaaaaaaaaaaaa

SEQ ID NO: 5052 - DNA, 3640 bp, Homo Sapiens
  NM_021830
gagttttgcttccgaggtcaaggcgagtagcatgtgcgggagactcacgttgccggcgaagtgggagagagaaaagtggtaacctggggctgggggccggcgcggcggagctcggagtagtagagcggagtgaagacacgggggaggatagagactggcattcctttgggccgggggattggcgggagtcgtgctgggtgctctcgccgtgttgaggtcccagtgaggggaaggagaagcggaagagggtctctagtcggggcctagggcaaagggactacaaaaaggatgcagatgactatagaaatgaggacgacgaggagatgctgtggaggagcagtagaggtgagaagatgatgcaaagaaactgtgtcagtgaggaactgtatagagggtcatagaggtgaggtggcggagagaaactaactaacggaccatagaggtgggggagccattgtagaaggacgtggacgcgaaagggtcgtgtagatgggcatatgtgtgaagcagcaacgtagaggggctgaagaggagaaattcatggagagaaagaatgcacctagagtgagctctgcagagtgctgcgtgggatatccctagagtttggtctagtgaaggcacgctaaccaggcacctaaggcatttcaagtagtgacttcccacatttggctaggaatgtgggtcctcctccgaagtgggtaccccctccgtatcttgttacccctgcgtggggagtggatgggtcggaggggcctgccccgaaacttggccccaggccctcctcgcagacgttacaggaaggagactctccaagccttggatatgccagtgttgcctgtaactgcaactgaaatccgccagtatttgcgggggcatgggatccccttccaggatggtcacagttgcctgcgggcactgagcccctttgcagagtcttcacagctcaaaggccagactggtgttaccacttccttcagcctcttcattgacaagaccacaggccactttctctgcatgaccagcctagcagaagggagctgggaagacttccaggccagcgtggaggggcgaggggatggggccagggaggggtttctgcttagcaaggcaccagaatttgaggacagcgaggaggtccggaggatctggaaccgagcaatacctctctgggagctgcctgatcaggaggaggttcagctggctgatacaatgtttggccttaccaaggttacagatgacacactcaagcgtttcagtgtgcgatatctgcgacctgctcgcagtcttgtcttcccttggttctcccctgggggctcaggattacgaggcctgaagctcctagaggctaaatgccagggggatggagtgagctacgaggaaaccactattccccgacccagcgcctaccacaatctgtttggattaccactgattagtcgtcgagatgctgaggtggtactgacgagtcgtgagcttgacagcctggccttgaaccagtccacggggctgcctacccttactctaccccgaggaacgacctgcttaccccctgccttactcccttacctggaacagttccggcggattgtattctggttgggggatgaccttcggtcctgggaagccgccaagttgtttgcacgaaaactgaaccccaaacgatgcttcttggtgcgaccaggagaccagcaaccccgtcccctggaggccctgaacggaggcttcaatctttctcgtattcttcgtaccgccctgcctgcctggcacaagtccatcgtatctttccggcagcttcgggaggaggtgctaggagaactgtcaaatgtggagcaagcagctggcctccgctggagccgctttccagacctcaatcgtatcttgaagggacatcgaaagggcgagctgacggtcttcacagggccaacaggcagtggaaagacgacattcatcagtgagtatgccctggatttgtgttcccagggggtgaacacactgtggggtagcttcgagatcagcaatgtgagactagcccgggtcatgctgacacagtttgccgaggggcggctggaagatcaactggacaaatatgatcactgggctgaccgctttgaggacctgcccctctatttcatgactttccatggacagcaaagcatcaggactgtaatagatacaatgcaacatgcagtctacgtctatgacatttgtcatgtgatcatcgacaacctgcagttcatgatgggtcacgagcagctgtccacagacaggatcgcagctcaagactacatcatcggggtctttcggaagtttgcaacagacaataactgccatgtgacactggtcattcacccccggaaagaggatgatgacaaggaactgcagacagcgtccatttttggctcagccaaagcaagccaggaagcagacaatgttctgatcctgcaggacaggaagctggtaaccgggccagggaaacggtatctgcaggtgtccaagaaccgctttgatggagatgtaggtgtcttcccgcttgagttcaacaagaactccctcaccttctccattccaccaaagaacaaggcccggctcaagaagatcaaggatgacactggaccagtggccaaaaagccctcttctggcaaaaagggggctacgacacagaactctgagatttgctcaggccaggcccccactcccgaccagccagacacctccaagcgttcaaagtgaaggccgtgcagagctggtcactgaaatgagcctgataggataggctggagcataaaactctgcaagggctcctctatcctgtggtcctgagctgtgtgcccttctcagtctgaggggcctaacctagagcaggtttccatagtgagaaaattcaatgtagcagactactgagaaactactgtgttgctcaggctttgtttgaggtcctgtatatacagcactgaaaagagagataaagtccctgcctgcatgcattctggcggaagagacaagcaagcaatgaacaaattagcagaaaacctagttttagtgaaaaatgctgtaaagaaaatagaaatgcgatagagtgctggcaggctagtgtagataagtggtctgaaaaggtgtctctgagccgagggcatgtgagctggggcctaaacaactagaaggagagagccacgtgaacatccggcgaaggggacccaggcagagagaaaaggaaatccaagccctgaggtaggaatgagcaggtcagattcaaggcagtgaggtcaggccgcatgaacctggaggggaatcggggacttcatgcgaaactccagcctaggctttcaaagtcaaagggtgatacagtgggtaccaagctcctctgctccccactttgtagagcctagcatgaggtggcatgtactagaattggatcctaggtgcttagccctgcaatatcagggcctcactggtgggagctgcctcgggctgggttgcttggtcatagagccatagaaggaagctgtcagcccggagtgcctgccacctagacactgatgccattgtgtgctgcctcaagactgctggagtcaggacattttatagagccttttccagttttactaaaaaatttttccattgaaaaaaaaaaaaaaaaaaa

SEQ ID NO: 5053 - DNA, 4396 bp, Homo Sapiens
  NM_021905
ccctctcttccccccgccctgccttcccttgcaccctccttcttccctccgcccgggagctctccctggtccccggcgccgcctccttccctcccggctccccgctccccgctcccgtggctgccgccgccccggggaagaagagacaggggtggggtttgggggaagcgagagaggaggggagagaccctggccaggctggagcctggattcgaggggaggagggacgggaggaggagaaaggtggaggagaagggaggggggagcggggaggagcggccgggcctggggccttgaggcccggggagagccggggagccgggcccgcgcgccgagatgttgctgctgctgctactggcgccactcttcctccgccccccgggcgcgggcggggcgcagacccccaacgccacctcagaaggttgccagatcatacacccgccctgggaagggggcatcaggtaccggggcctgactcgggaccaggtgaaggctatcaacttcctgccagtggactatgagattgagtatgtgtgccggggggagcgcgaggtggtggggcccaaggtccgcaagtgcctggccaacggctcctggacagatatggacacacccagccgctgtgtccgaatctgctccaagtcttatttgaccctggaaaatgggaaggttttcctgacgggtggggacctcccagctctggacggagcccgggtggatttccggtgtgaccccgacttccatctggtgggcagctcccggagcatctgtagtcagggccagtggagcacccccaagccccactgccaggtgaatcgaacgccacactcagaacggcgcgcagtgtacatcggggcactgtttcccatgagcgggggctggccagggggccaggcctgccagcccgcggtggagatggcgctggaggacgtgaatagccgcagggacatcctgccggactatgagctcaagctcatccaccacgacagcaagtgtgatccaggccaagccaccaagtacctatatgagctgctctacaacgaccctatcaagatcatccttatgcctggctgcagctctgtctccacgctggtggctgaggctgctaggatgtggaacctcattgtgctttcctatggctccagctcaccagccctgtcaaaccggcagcgtttccccactttcttccgaacgcacccatcagccacactccacaaccctacccgcgtgaaactctttgaaaagtggggctggaagaagattgctaccatccagcagaccactgaggtcttcacttcgactctggacgacctggaggaacgagtgaaggaggctggaattgagattactttccgccagagtttcttctcagatccagctgtgcccgtcaaaaacctgaagcgccaggatgcccgaatcatcgtgggacttttctatgagactgaagcccggaaagttttttgtgaggtgtacaaggagcgtctctttgggaagaagtacgtctggttcctcattgggtggtatgctgacaattggttcaagatctacgacccttctatcaactgcacagtggatgagatgactgaggcggtggagggccacatcacaactgagattgtcatgctgaatcctgccaatacccgcagcatttccaacatgacatcccaggaatttgtggagaaactaaccaagcgactgaaaagacaccctgaggagacaggaggcttccaggaggcaccgctggcctatgatgccatctgggccttggcactggccctgaacaagacatctggaggaggcggccgttctggtgtgcgcctggaggacttcaactacaacaaccagaccattaccgaccaaatctaccgggcaatgaactcttcgtcctttgagggtgtctctggccatgtggtgtttgatgccagcggctctcggatggcatggacgcttatcgagcagcttcagggtggcagctacaagaagattggctactatgacagcaccaaggatgatctttcctggtccaaaacagataaatggattgttatatccagaactcacagcccaacctgaacaacctgactgctgtgggctgctcactggctttagctgctgtcttccccctggggctcgatggttaccacattgggaggaaccagtttcctttcgtctgccaggcccgcctctggctcctgggcctgggctttagtctgggctacggttccatgttcaccaagatttggtgggtccacacggtcttcacaaagaaggaagaaaagaaggagtggaggaagactctggaaccctggaagctgtatgccacagtgggcctgctggtgggcatggatgtcctcactctcgccatctggcagatcgtggaccctctgcaccggaccattgagacatttgccaaggaggaacctaaggaagatattgacgtctctattctgccccagctggagcattgcagctccaggaagatgaatacatggcttggcattttctatggttacaaggggctgctgctgctgctgggaatcttccttgcttatgagaccaagagtgtgtccactgagaagatcaatgatcaccgggctgtgggcatggctatctacaatgtggcagtcctgtgcctcatcactgctcctgtcaccatgattctgtccagccagcaggatgcagcctttgcctttgcctctcttgccatagttttctcctcctatatcactcttgttgtgctctttgtgcccaagatgcgcaggctgatcacccgaggggaatggcagtcggaggcgcaggacaccatgaagacagggtcatcgaccaacaacaacgaggaggagaagtcccggctgttggagaaggagaaccgtgaactggaaaagatcattgctgagaaagaggagcgtgtctctgaactgcgccatcaactccagtctcggcagcagctccgctcccggcgccacccaccgacacccccagaaccctctgggggcctgcccaggggaccccctgagccccccgaccggcttagctgtgatgggagtcgagtgcatttgctttataagtgagggtagggtgagggaggacaggccagtagggggagggaaagggagaggggaagggcaggggactcaggaagcagggggtccccatccccagctgggaagaacatgctatccaatctcatctcttgtaaatacatgtccccctgtgagttctgggctgatttgggtctctcatacctctgggaaacagacctttttctctcttactgcttcatgtaattttgtatcacctcttcacaatttagttcgtacctggcttgaagctgctcactgctcacacgctgcctcctcagcagcctcactgcatctttctcttcccatgcaacaccctcttctagttaccacggcaacccctgcagctcctctgcctttgtgctctgttcctgtccagcaggggtctcccaacaagtgctctttccaccccaaaggggcctctccttttctccactgtcataatctctttccatcttacttgcccttctatactttctcacatgtggctccccctgaattttgcttcctttgggagctcattcttttcgccaaggctcacatgctccttgcctctgctctgtgcactcacgctcagcacacatgcatcctcccctctcctgcgtgtgcccactgaacatgctcatgtgtacacacgcttttcccgtatgctttcttcatgttcagtcacatgtgctctcgggtgccctgcattcacagctacgtgtgcccctctcatggtcatgggtctgcccttgagcgtgtttgggtaggcatgtgcaatttgtctagcatgctgagtcatgtctttcctatttgcacacgtccatgtttatccatgtactttccctgtgtaccctccatgtaccttgtgtactttcttcccttaaatcatggtattcttctgacagagccatatgtaccctaccctgcacattgttatgcacttttccccaattcatgtttggtggggccatccacaccctctccttgtcacagaatctccatttctgctcagattccccccatctccattgcattcatgtactaccctcagtctacactcacaatcatcttctcccaagactgctcccttttgttttgtgtttttttgaggggaattaaggaaaaataagtgggggcaggtttggagagctgcttccagtggatagttgatgagaatcctgaccaaaggaaggcacccttgactgttgggatagacagatggacctatggggtgggaggtggtgtccctttcacactgtggtgtctcttggggaaggatctccccgaatctcaataaaccagtgaacagtgtgactcggcaaaaaaaaaaa

SEQ ID NO: 5054 - DNA, 2565 bp, Homo Sapiens
  NM_021922
aacggctgcggcttcgggcggccgggtttctccggtctcccaacgccgaggagagcttgtaacaggcgctggagctggcccgccaccgccgcgtcagggacggcgctggagtcctccgttcccctcagcctctgagctgaggccccacaccagagtagggggcggcgcggcacccgtgccccggcatggcgacaccggacgcggggctccctggggctgagggcgtggagccggcgccctgggcgcagctggaggcccccgcccgcctcctgctgcaggcgctgcaggcggggcctgagggggcgcggcgcggcctgggggtgctccgggcgctgggcagccgcggctgggagcccttcgactggggtcgcttgctcgaggccctgtgccgggaggagccggtcgtgcaggggcctgacggccgtctggagctgaaaccactgttgctgcgattgccccggatatgccagaggaacctgatgtccctgctgatggccgttcggccatcgctgccggaaagtgggctcctctctgtgctgcagattgcccagcaggacctagcccctgacccagatgcctggctccgtgccctgggggaattgctgcgaagggatttgggggtggggacctccatggagggagcttctccactgtctgaaagatgccagagacagctccaaagtctatgtagggggctgggcctggggggcaggaggttgaaatccccccaggctccagaccctgaagaagaggagaacagggactcccagcagcctgggaaacgcagaaaggactcagaggaagaggctgccagtcctgaggggaagagggtccccaaaagattacggtgttgggaagaggaagaagatcatgagaaggagagacccgaacataagtcactggaatccctggcagatggaggaagtgcatctcctattaaggaccagcctgtcatggcagttaagactggcgaggacggttcgaatctggatgatgctaaaggtctggctgagagtttggagttgcccaaagctatccaggaccagcttcccaggctgcagcagctgctgaagaccttggaggaggggttagagggattggaggatgcccccccagttgagctacagcttcttcacgaatgtagtcccagccagatggacttgctgtgtgcccagctgcagctccctcagctctcagacctcggtctcctgcggctctgcacctggctgctggccctttcacctgatctcagcctcagcaatgctactgtgctgaccagaagcctctttcttggacggatcctctccttgacttcctcagcctcccgcctgcttacaactgccctgacctccttctgtgccaaatatacataccctgtctgcagcgccctccttgaccctgtgctccaggccccaggcacaggtcctgctcaaacagagttactgtgttgccttgtgaagatggagtccctggagccagatgcacaggttctaatgctgggacagatcttggagctgccctggaaggaggaaactttcttggtgttgcagtcactcctagagcggcaggtggagatgacccctgagaagttcagtgtcttaatggagaagctctgtaaaaaggggctggcagccaccacctccatggcctatgccaagctcatgctgacagtgatgaccaagtatcaggctaacatcactgagacccagaggctgggcctggctatggccctagaacctaacaccaccttcctgaggaagtccctgaaggccgccttgaaacatttgggcccctgaccatccaccaagggaccaccctcttggtgctccatcaccagcttcctgaagggcatttctttcttcaccaccttgtcttgagccctagcctgaggataaaggctgagcctggccatcccagattgcaactgcctccctgttacaggctgcatagggaatattggcttcccagccagcagggaggctcctgggctaagggagctcagctatattttctttttcatttcttttgtttttgagagaaggtattgctctgtcatccaggctggagtgcagtgatgcgattgatcatggctcactgtaacctctgcctcccaggctcgatcctcccatgtcagcctcccaagtagctgggactacatgcacatgacactatgcccagctaattttttattttgtagataatatgctggtcagggctggtcttgaactcctgagctcaagtgatcttcctgccttggcacccaaagtgttgagatttacaggtgtgagccaccacaccaggccagagctatatttccaaaggctgctggccccaggcacactcctcatcaattctcaggctgcagggacaaactttccgatagggctcagtaggatcaagccgacccagagtgggcatgggatgctccaggaggtctggggtaccagtgggctcagatgaagctcttgtgctcatgtatattatgaccttctgtgtttttgtttctgacttgaataatttatcaatggtgttgaataaaagcaagttcaataatgaaaaaaaaaa

SEQ ID NO: 5055 - DNA, 3105 bp, Homo Sapiens
  NM_021923
ccccaggtccggacaggccgagatgacgccgagccccctgttgctgctcctgctgccgccgctgctgctgggggccttcccgccggccgccgccgcccgaggccccccaaagatggcggacaaggtggtcccacggcaggtggcccggctgggccgcactgtgcggctgcagtgcccagtggagggggacccgccgccgctgaccatgtggaccaaggatggccgcaccatccacagcggctggagccgcttccgcgtgctgccgcaggggctgaaggtgaagcaggtggagcgggaggatgccggcgtgtacgtgtgcaaggccaccaacggcttcggcagcctgagcgtcaactacaccctcgtcgtgctggatgacattagcccagggaaggagagcctggggcccgacagctcctctgggggtcaagaggaccccgccagccagcagtgggcacgaccgcgcttcacacagccctccaagatgaggcgccgggtgatcgcacggcccgtgggtagctccgtgcggctcaagtgcgtggccagcgggcaccctcggcccgacatcacgtggatgaaggacgaccaggccttgacgcgcccagaggccgctgagcccaggaagaagaagtggacactgagcctgaagaacctgcggccggaggacagcggcaaatacacctgccgcgtgtcgaaccgcgcgggcgccatcaacgccacctacaaggtggatgtgatccagcggacccgttccaagcccgtgctcacaggcacgcaccccgtgaacacgacggtggacttcggggggaccacgtccttccagtgcaaggtgcgcagcgacgtgaagccggtgatccagtggctgaagcgcgtggagtacggcgccgagggccgccacaactccaccatcgatgtgggcggccagaagtttgtggtgctgcccacgggtgacgtgtggtcgcggcccgacggctcctacctcaataagctgctcatcacccgtgcccgccaggacgatgcgggcatgtacatctgccttggcgccaacaccatgggctacagcttccgcagcgccttcctcaccgtgctgccagacccaaaaccgccagggccacctgtggcctcctcgtcctcggccactagcctgccgtggcccgtggtcatcggcatcccagccggcgctgtcttcatcctgggcaccctgctcctgtggctttgccaggcccagaagaagccgtgcacccccgcgcctgcccctcccctgcctgggcaccgcccgccggggacggcccgcgaccgcagcggagacaaggaccttccctcgttggccgccctcagcgctggccctggtgtggggctgtgtgaggagcatgggtctccggcagccccccagcacttactgggcccaggcccagttgctggccctaagttgtaccccaaactctacacagacatccacacacacacacacacacactctcacacacactcacacgtggagggcaaggtccaccagcacatccactatcagtgctagacggcaccgtatctgcagtgggcacgggggggccggccagacaggcagactgggaggatggaggacggagctgcagacgaaggcaggggacccatggcgaggaggaatggccagcaccccaggcagtctgtgtgtgaggcatagcccctggacacacacacacagacacacacactgcctggatgcatgtatgcacacacatgcgcgcacacgtgctccctgaaggcacacgtacgcacacacgcacatgcacagatatgccgcctgggcacacagataagctgcccaaatgcacgcacacgcacagagacatgccagaacatacaaggacatgctgcctgaacatacacacgcacacccatgcgcagatgtgctgcctggacacacacacacacacggatatgctgtctggacgcacacacgtgcagatatggtatccggacacacacgtgcacagatatgctgcctggacacacagataatgctgccttgacacacacatgcacggatattgcctggacacacacacacacacgtgtgcacagatatgctgtctggacacgcacacacatgcagatatgctgcctggacacacacttccagacacacgtgcacaggcgcagatatgctgcctggacacacgcagatatgctgtctagtcacacacacacgcagacatgctgtccggacacacacacgcatgcacagatatgctgtccggacacacacacgcacgcagatatgctgcctggacacacacacagataatgctgcctcaacactcacacacgtgcagatattgcctggacacacacatgtgcacagatatgctgtctggacatgcacacacgtgcagatatgctgtccggatacacacgcacgcacacatgcagatatgctgcctgggcacacacttccggacacacatgcacacacaggtgcagatatgctgcctggacacacgcagactgacgtgcttttgggagggtgtgccgtgaagcctgcagtacgtgtgccgtgaggctcatagttgatgagggactttccctgctccaccgtcactcccccaactctgcccgcctctgtccccgcctcagtccccgcctccatccccgcctctgtcccctggccttggcggctatttttgccacctgccttgggtgcccaggagtcccctactgctgtgggctggggttgggggcacagcagccccaagcctgagaggctggagcccatggctagtggctcatccccactgcattctccccctgacacagagaaggggccttggtatttatatttaagaaatgaagataatattaataatgatggaaggaagactgggttgcagggactgtggtctctcctggggcccgggacccgcctggtctttcagccatgctgatgaccacaccccgtccaggccagacaccaccccccaccccactgtcgtggtggccccagatctctgtaattttatgtagagtttgagctgaagccccgtatatttaatttattttgttaaacatgaaagtgcatcctttccctccaaaaaaaaaaaaaaaaaa

SEQ ID NO: 5056 - DNA, 2876 bp, Homo Sapiens
  NM_021925
agggagagcgggcagccttccaggtggacagaaatggactcagaactcaaggaagaaattcctgtgcatgaggaattcattttgtgtggtggagccgaaacccaggttctaaaatgtgggccctggacagacctctttcatgatcaaagtgtcaaaaggcctaagctgcttattttcattattcctggtaacccaggtttttctgccttttatgtgccatttgcaaaggctttatactctttgacaaacagacgctttccagtttggactatcagtcatgctgggcatgcgttggctcccaaagacaagaagattcttacaacatcagaggattcaaacgctcaagaaattaaggacatttatggactaaatggacaaatagagcacaaactagctttcctgagaactcatgtgccaaaggacatgaaacttgtgctcattggccattcaataggcagctatttcacacttcagatgctgaagcgagtccctgagctcccggtaattcgtgcctttctgctctttccaacaattgaacgaatgtctgagtcacccaatggcagaattgccactccacttttgtgctggtttcgatatgttctctatgttactggctacttattattgaaaccgtgtcctgagacaatcaagtccttgctaatcagaaggggccttcaagtaatgaacctagagaatgaattttcaccattgaatatattagaaccattctgccttgctaatgctgcctaccttgggggccaagaaatgatggaggtggtgaagagagatgacgaaaccataaaggagcatttatgtaagcttacattttattatggtactatagatccttggtgtccaaaagagtactatgaagacattaagaaggattttccagaaggagacattcgactctgtgagaaaaacatacctcatgctttcatcacccattttaaccaggaaatggcagacatgattgctgactccctaaaggatgacttgtccaaaatgtaaattggcctgaggaacgagcccccactgccagtacatggaggcagtcagtgtactagacttagtaggtaaatgtttaattttgaagactgatattagaaatgaagaaagtgagaacctttgtcttacaaaccaactctccgctcgccatgttataggctgaagtaaacacagttgatgaatcattccataggtttaaccatacattttccaagactcagggaacacagtgatctacacagagtcttgtgtttgcacaagatgcccagtggcaccatatggtttattttggtaggcaggatctttgcagatgaaaaaaaaatctacatgtacttgattttaattgagttacattgtagaataggctcctctggaggaaattatgaaatacctactagaaaatgtaaaataaatcagtgaatgttaagagtatagttagatatgtgaagtgtatgagattatgacaaggatacactcatgttccaggagcaggaagtgaacctgggtctcctgtaagacagaagatgaagatgagcccaggctaacttagcacagatcttggctgagatcatcaatgtgacgtctaatgtacctgcactagacagagaataaagttcaccagacattactctggtcagctaaccagataaagaattgttgaaggaccccaactgtgcctcctgccacaggacaaccagcaagttctatgctgagccttagcctcccaggttataagctccctgcaggctcctcctctccagagccaggatggagaggcactgggctgtcccaaagcaggcttggatgtgccaacgtacagttgctccttctgtaattcttgcactaaaactccattaaagaccatcaatgagccaaatagtgtgctagccattgaggatggagttcttagctacttaatgattcttttcttctggaaatcttctagtgaataatttttaaaagcttcttttaaactgctcagtaaaacattgccatacattaactctccatttctgcattaacttcatttgctggaaagaaattattttgttaatgaaccaaacccagccattaagttatgtgaattcaccttctatagacacattgaggtatggcagagaagacacatattccctggcctagagtgggctgacaatattgctgcctcccctaaattgactcaatcttgagaaccacatactgcagtgacagttgatcatggatcagaaatattcctttttctcctagaggaaatccctcatggcattatcattccctaaggacaatgagatgtccctccgctcaaatcctaaagccccctgatgaaagatttggctctgatttgctgccaacttattggtaagtgctgaatgagttactgtgctttggcatagcttctacatcacagcaagtgacttctcagaggggaaaagccaagctccagacaaggagtgctgttagcccaaggggaagagctaatagatacataggccgtaagcacagggctgtacacagatcctttattggcatctgcatgagaggcctagaaatcggatgttagaagctaggaatcatggctctgagcgccttgcatacaggagatactcactgatactaaatcaaggcatgtaaacaatactgggtaaatcatacctaccagaataaagagtaacattcagagcttttcttttatctgttattttaaatgttactccatatttcaaaagtctgcacgtatgaaattgtgtcttatttctggtttttagagcctaagaaagatactcattcttaattcctatttatcatctgaaaaccaaatgaacttttgaaataaatgttttaccagcaaaaaaaaaaaaaaaaaaaaa

SEQ ID NO: 5057 - DNA, 4230 bp, Homo Sapiens
  NM_021927
gtgcagacgtcggcaagctgcgccgccgcttcgggttgcttccggatctggtacttgggcagagctccccggggttcattgtcttcgcttcacaggatctgtttgagtcctgtccaccggatcctacggggggtaccttcgaaaaaaaacgggctatgctgctgttgcgtgtgggtaccctctcctgacgcctccgccgcccgggtcatgtggaccctcgtgggtcggggctgggggtgcgcacgcgctctcgcgccacgagccactggggccgcgcttctggtggccccggggccccggtccgcgccgacccttggggctgctccagagtcctgggctaccgacaggctctacagctccgcagaattcaaggaaaaacttgacatgtctaggtttcctgttgaaaatattagaaatttcagtattgttgcacacgtggatcatggcaaaagtactttagctgacaggctcctagaacttacagggacaattgataaaacaaagaataataagcaggttcttgataaattgcaagtggaacgagaaagaggaatcactgttaaagcacagacagcatctctcttttacaattgtgaaggaaagcagtaccttttaaatctcattgatacaccgggccatgttgattttagttatgaagtatccaggtcactttctgcttgccagggtgttttacttgtggttgatgcaaatgagggaattcaagcccaaactgtagcaaacttctttcttgccttcgaagcacagctatcggtaattccagttataaataagatagatctgaagaatgctgatcctgaaagggttgaaaaccaaattgagaaagtgtttgatattccaagtgatgaatgtattaagatttctgctaaacttggaacaaatgttgagagtgttcttcaggcaattattgaaagaatcccccctcctaaagtgcatcgcaaaaatcctctgagagctttggtatttgactccacctttgaccagtatagaggtgtgatagccaatgtagcattatttgacggagtggtttccaaaggagataaaattgtatctgcacatactcaaaagacatacgaagttaatgaagtaggagtcttgaatcctaatgagcagccaactcataaattatatgcaggacaggtgggctatctgattgctgggatgaaagatgtcactgaagcgcaaataggagatacattatgtttacataagcaaccagtggagcccttgcctgggtttaaatcagcgaaaccaatggtatttgcaggaatgtatcctctagaccaatctgaatataacaatctgaagagtgctatagaaaaactgactttaaatgattccagtgtgaccgttcatcgggatagtagccttgctctgggtgctggctggaggctaggatttcttggacttttgcacatggaagttttcaaccagcgactggagcaagaatataatgcttctgttattttaacaacccctactgttccatataaagctgtactgtcatcatcaaaattgataaaggaacatagagaaaaagaaattacaattatcaatcctgcacaattccccgataaatcaaaagtaacagaatatttggagccagttgttttgggcactattatcacaccagatgaatacactggaaaaataatgatgctttgcgaggctcgaagagcagttcagaagaatatgatatttattgatcaaaatagagttatgcttaaatatctctttcctttgaatgaaattgtggtagatttttatgactctttgaaatccctatcttctggatatgctagttttgattacgaagatgcaggctaccagactgcagaacttgtaaaaatggatattctactgaatggaaatactgtagaggagctagtaactgttgtacacaaagacaaagctcattcaattggcaaagccatatgtgaacggctgaaggattctcttcctaggcaactgtttgagatagcaattcaagctgctattggaagtaaaatcattgcaagagaaactgtgaaagcctataggaaaaacgttttggcaaaatgttatggtggtgatattacccgaaaaatgaagcttttgaagagacaagcagaagggaaaaaaaagctgaggaaaattggcaacgttgaagttccaaaagatgcttttataaaagttctgaaaacacaatcttctaaataattggtgggaaaacaaagaattttcattgcaatttgtaatatgctgacaacagaaagaaaattataaaatttgcttgttactttcagggtattcaggttcaaataacctactagtctttcgttgaaagggagtagttagtgggtaggcaagagcttagattttgaagccatgttgcctgttctcaaatatctgttccaaccactcactagtaaggtgaccgtggccagattaacctttgtttcctcttcagtaaaatcgagattatactactacctacataagttgttgttgtgaagattaaatgaggtaatacgttaaatattcagaggtgcaagacacatagtaagcactcaattgtaactacagttaagtccttaaatgccatcgaaaggttcttagaaactgactttaagcaaaatgacacgtagcacaatgttcttgaatgatgtcatttccttaagtggtttgtaacatcgatgaggaaaaaaaattggtttatgcgtcatttcattttatttttatttattttttgagacagagtcttgccctgtcgcccaggctggagtgcaatggcacaatctcgactcactgcaacctctgcctcctgggttcaagagattctcctgcctcagcctccattacaggcgtgcaccaccatgctcggctaattttttgtatctttagtagagtcggggtttcaccatgttggccaggctggtcttgaactcctgacctcgtgatccacccaccgtggcctcccaaagtgctgattacaggtgtgagccaccatgcccagccatgtcatttcatttaaagtcacaatttccatgaatctcaacaagtgaggacctgctatattttgttgcatgcagtttttctttacggacactaaaaggccccatacttaagattccatctactttaagtttaaaggattttcagaatcaccttaagtgtcaaatttgttagcaggattaattgatatgaattcacttattaaacagtaaactcaaataacatagacatcaaataacagacatctgctctagttaatgataaaatgtttatagattttatcaggtggttagtttgaaactaaatggtttacatctaaattaagggcaggagctgtctttcagacattcaaaacgcatttgtgtaaaatgacaggtgtttggtattaccaggaactcataatgacattttaataattattgtctaaatttcataatcgaagcgattttagagtagttaacttgagatttcacagccagtaaatggctgtatttctccagagctctcagctcccatgtttattcagccaacgaacaaaccagactgcagactgtattagagcaagacaacatcatttagccattgatttttatcttctaccttgaatgaattgaatgaagaaaatgtcttttagggataaacactatcaaggatgaattttatactaaggttatatgaaagaaaaatctcaaaaccactaagccaaagggaagtcaagctgggaactgattgaggcaaacctgcctcccattttattcctaaataagacagccacaaagataaaatttgctcacaagggaattccttatggacaaagaactcaaagtcttcacatgaaacaaatgcataaatgattgctttctctgtttcatgtttcactaagccagattaaggtataactgactattcctctactctcctctcacatgtaaattgtatattcagtgaaaggctaatcagaaactcaaaaaaatgcaaccctttctctcttacctgcctatgcttgaagcccccgcccctcttcaagttgtcctgcctttcaagaccaatgtacaccttacacatactgattgatgtctcatgtctctctaaaatgtgtaaaaccaagctgtgccccaaccaccttgggcacatgtggtgaggacctcctgaggctgtgtcatgggcacaccttaaccctgggaaaataaactttctaaactgaaaaaaaaaaaaaaa

SEQ ID NO: 5058 - DNA, 4596 bp, Homo Sapiens
  NM_021928
aaaggaggcggggctgcggcggcgcgcgctcccggaacgcgcgcaccgcagacggcgcggatcgcagggagccggtccgccgccggaacgggagcctgggtgtgcgtgtggagtccggactcgtgggagacgatcgcgatgaacacggtgctgtcgcgggcgaactcactgttcgccttctcgctgagcgtgatggcggcgctcaccttcggctgcttcatcaccaccgccttcaaagacaggagcgtcccggtgcggctgcacgtctcgcggatcatgctaaaaaatgtagaagatttcactggacctagagaaagaagtgatctgggatttatcacatttgatataactgctgatctagagaatatatttgattggaatgttaagcagttgtttctttatttatcagcagaatattcaacaaaaaataatgctctgaaccaagttgtcctatgggacaagattgttttgagaggtgataatccgaagctgctgctgaaagatatgaaaacaaaatattttttctttgacgatggaaatggtctcaagggaaacaggaatgtcactttgaccctgtcttggaacgtcgtaccaaatgctggaattctacctcttgtgacaggatcaggacacgtatctgtcccatttccagatacatatgaaataacgaagagttattaaattattctgaatttgaaacaacatatttttatacttaatgaattgtatctcattaatctcttcccttacatcttcatgtattgttggtttgttttttggttttgggtttttttttttttttttttggtataagaactaacatcaaaaggcctgtttaaagggaaaggttaatgggctacttaatattatgaacaaaacaaaaaaacaaggctgccacagtggaatattatcttacaagaataagaactacataaaacagatttgtaaaaaatacatatttgaagtattccctgtatttccattattctttatggaatataaagtaagcatgaaaggtagttaaaactttcaggtgcctgtagagtcataataactgtattttatgccttgcattcacgcaaattcacattggatgtgatttaaaagtagacattctctttttcctcttttaggatatgtttgattactggaaaattaatatggttatttgttagaagtctggtttataaaaaagccaaaagtgatggaatttattccatttgtcttaggaaggcccataatacttgtttttcttacatgtgactagcaactttctccacttaaagactaaatacctctttatatgatgtaaattattctaattcattttaaaatcttttaggtcagcaaaatgtgtgtcttcagtgctttctctaaaaacgttcctttatagctttgtacttttttttttagcgttgccattgaaagttaaaatgtttgcatggtttaccctctgagttatgtttcttctagtgagcatgcctgctgtcactaagtgaattatttactactttttgtaggtctatattttaataattattgggataataataattgtggtatgctttccatttacaaaccactcatatactttagtgtatgtcatcctcaataatctaatgaggtaagtagtataagtgttagctctttgcagataagaaactgaaacccagaagtttattgaattgcttcattgttacctagccagcaaggagtggaattaaaacttgaactcagatcttctaattttctgagctcatcctttctcttatacctcagattgcagactaatcaaattttacttaaaaccttcctgatatttttgttaccctggacaccctttctattctagaaaaggtttcccattttatatggaagtgactaattttcaagctgccaacaacttatatcgaggtaatattttattctctgaataaattcatttcacttatattaaaagcataaggaaatctacatgtatgtaaaaataacttagaaattcagtacataatacatgattgaatacatgatcgtatttaacatgttttttttttctgcagtggacaaataaacatcctcaaagtagcaactgcaaatcagttacccttagaaaagcaagaccaaacactgtagttacactattagcagtgaccaaaaagggctaatattttctaagaatagtttaaattacagacatttgttatatttaccttatgtgaaatacatcactatttaattacattaattttaacatctgttgtgtggagttgtatagttcatgcaaaagcctgtgggtatgggtttttcaaaccagcagaaaggtcaaaggtacctgaatgctaaactgcctggctcccagctttttcattaaacttttcagggtcttggtttctttatctgtaaaatgacagagttggaccagttaactttaatggccatccttttacaccacacaagttgataaaatttatctgttcagcaaagagattgaacaaaaaagcacgttagtaatatgaagacaggaaaacgaatgaaagtctaacacataactcatattgatttactttatttctgttagattttacactctgaaaatttcacctcatttagtttgtacaaatactagacatggaaacttaaaatgtgcaggtgtcaaagcttaaaaatcaggtgtgtcctctttaaaggcatgtgcgataagcctgcagtcttaaccagacctggtaccagtttaacagttcatgatacttctgtgatgagtggatctgttagtctggtagagattaatgttgaaatttacttgaattacagttatttgacaagcccactttttttggagtttggtgaggaagataagtaaaaatgcccaactagtacaatgtggagaaagttttctgtttgcttgactaagggaaattgctcagaaaaagaatgctccaacatgggaataaggaccttcagtctcaggaactcatttttgggtgcagtttctacatttaaaaaattgacttgtgttcagtttgataaccagttcatttgctttagtctcagtgttttaaagaagtctcataatgttctacaaagacacaaagcttcaggcttatacaaaactgagtatgattagaaatacctgagcccagaaatgattctgagaaaagagaataatttgaagacacttatttaaaagtaattatggttagaaatgaattaatttaaaaatgtgttcacatatccctttctctaacagtttaacctagacaaacatctgtatcagtatttttttattcccctgattgattacatttggtttctttattctgaaaggaaaataacaaaaacttcagaaattcctaagggtgtaataagaaagtgggttttgagtttcctttcctggaattattttacagttctttggtgggtctcgtcagccaattcatagctgggctttaagattatcatcttagagatgatagatgggctttttaaagatttcatcttagagatgaaaagctgggctttttctctaagatgataatcttaaagcccagctattaattgataatgaacatttttcactatttttttttctatctgaagcttagagatctagagctttggatctttcgggtatatgtcaatggaggtattattttataatactttgcattgacatgaagtgggttcatgggggaaaaccatgagctgtgaacattggtagcaaacaagcatatattcatttcaaaactttccttgcttttagcagagagaagcctgtatatgttacatgtgtgactttcagtagtttaaagagatgtttcaaaaaattgttgcatgtttttgatgcaatttgggaaattgtttacttcacaatgtagtcattcataaaaaaattcatgaaaatactgaacatatgtttgaggatttttcttttcctttttaaatttttttattttttctgagacggagatctgctcttacgcccaggctagagtgaagtggcgcgatcttggcttactgcaacctccaccccccaggttcaagcgattctcctgcctcagcctccggagtagctgggattacaggcgcccgccaccacgtccggctaatttttgtattttcagtagagacggggttttgctatgttggccaggctggtctcaaactcctgacctcaagtgatccacctgcctcggcctcccaaagtgttaggataacaggtgtgagccaccgtgcccggctgaagatttttcttaattgcaataaatattcagcattttttctaatgaaaatgaattttgtttaccagtaaaagtatgcattttaaaagactttcagatttatgctttttacgtgaagctgctaaactaaaagtaaatggaagaaaccaagtctagtaggttttttctttttttttgtgggggtgggatgggggaggttagttacacttaaaatatcttctccagagactgtatgctcctatactagactgtaagctctttgagggcagtctgtcagatttatctttgtatcttccccagcgcctagtgtagtgccttgcacataataggcgcccaataaatattgatgaagaatgaa

SEQ ID NO: 5059 - DNA, 2990 bp, Homo Sapiens
  NM_021930
ggccgttccgacctccggtcaggagggggaggaacagagcacggccggcggctgcacgggcagggcctctctgggctgagaggaagaaaccagtgagacatcgagaggaagtcgctgtggcactcagtcctacggcctccgaggctgggtagtgagtgtgtcgctggccttagccagactccacaggccacgctggctgcgaatggagccgaggactcgcgcggaggcgagatgctaccagccggcgagatcggcgcctctcctgcagccccgtgctgctctgaaagtggtgacgaaaggaagaacctcgaggagaaaagtgacataaatgttacagttcttattggaagtaaacaagtcagtgaaggtacagataatggtgatctcccttcttatgtgtctgcattcatagaaaaggaagttggaaatgaccttaaatctttaaagaaacttgataaactcatagaacagaggacagtaagtaaaatgcagttagaagaacaggtacttacaatttcatcagaaattcctaaaagaattcgaagtgccttaaaaaatgcagaagaatcaaagcaatttcttaatcagtttctggagcaggaaactcatctcttcagcgccattaacagccatttgctgactgcgcaaccttggatggacgatcttggaaccatgattagccagattgaagagatcgaacgtcatcttgcttaccttaaatggatttcacaaattgaagaactaagtgataacattcagcaatatctgatgaccaataatgtaccggaggcagcctccactctagtgtctatggcagaacttgacattaaacttcaggaatcatcttgtactcatcttcttggtttcatgagagccacagttaaattctggcataaaattctcaaggacaagcttacaagtgattttgaggaaattttagcacagcttcattggccattcatcgcaccccctcaatcacaaactgttggcttaagtcgacctgccagtgccccggagatatacagttacctggagacactgttttgtcagcttttgaaactacaaacctcagatgaattacttactgagccaaagcaactcccagaaaaatactctcttcctgcctccccttctgtcatcctgcccatccaggttatgctgactcctcttcagaagaggttcaggtatcacttcagagggaaccggcagactaatgtgttaagcaagccagaatggtacttggctcaagtacttatgtggattggaaaccatactgaatttctggatgagaagattcagccaatattagacaaagtaggctctttggtaaacgcaaggcttgaattttctcggggccttatgatgctggttcttgagaagttagccactgatattccttgtctgctatatgatgacaatctcttctgtcatttggtggatgaagtactcttgtttgaaagggagctacacagtgttcatggctatcctggcacttttgctagttgtatgcatattctatcagaggaaacctgttttcagagatggttgacggtggagagaaaatttgctcttcaaaaaatggactcaatgctttcctcagaagctgcctgggtatcgcaatataaggatatcactgacgtggatgaaatgaaagttccagattgtgcagaaacttttatgactctactcttggttataactgacaggtataaaaatcttcccacagcttcccgaaagcttcagttcctggagttacagaaggacttagtagatgattttaggatacgattaacacaagtgatgaaagaagagactagagcttcccttggctttcgatactgtgcaattcttaatgctgtgaactacatctcaacagtactagcagattgggctgacaatgttttctttctacaacttcaacaggctgcactggaggtgtttgcagagaataatactctgagtaaattgcagctaggacagctagcctctatggagagctctgtctttgatgacatgattaacctcttagaacgtttaaagcatgatatgttgacccgtcaagtagaccacgtttttagagaagttaaagatgctgcaaaattgtataaaaaagaaagatggttgtccttgccatctcagtcagagcaggcagtgatgtccctgtccagttcggcttgcccgttgctgctgacgttacgagaccatttacttcagttggagcagcagctttgtttctccttatttaaaattttctggcaaatgcttgtagagaagctggatgtatacatctaccaagaaataattcttgctaatcacttcaatgaaggaggagcagcccagctgcagtttgatatgactcggaatcttttccctttgttttctcactattgcaagagaccagaaaattattttaaacatataaaagaagcctgtattgttttgaatttgaacgtcggttctgcactactgctgaaagatgtactgcagtcagcttcagggcagcttcctgccacagcagcattaaatgaagttggaatttacaaactggctcaacaagatgttgagattctacttaatttgaggacaaattggcctaatactggaaaataatgtctttcagaaaaaggtttctttggtttttgtttctaagaaagaggaagccaattggatttcaagttatatgatgaaattctgaattaatgaaactggaaaactttatagaattacttattatcttggatttatggtgttattaaaatgctgaccatatttccttcatcctcttgttcctaaggaaacaaaaacagaaaacgaaacaatgaaaactcaattctatttacaagtataaatgctgagtatgtctgttgaagacgagcagagatattaaattataaccaactttcaatttcctgtgctaattaagggaaattctgttgtggataatcaaacatagccaataaatttttttaaaactccaaaaaaaaaaaaaa

SEQ ID NO: 5060 - DNA, 3336 bp, Homo Sapiens
  NM_021931
ggagctagcctcgtgaccttttaccccaacatggctgcgcccgtgggaccggtgaagttctggcgacccggtacagaggggccaggtgtaagcatctctgaagagagacaaagtctggctgaaaactctgggacaacggttgtttacaacccttatgctgccctttccatagagcagcagaggcagaagctgccggtattcaagcttaggaatcatattttatacttgatagaaaattatcagacagtggtgattgttggtgaaacaggatgtgggaagagcacacagattcctcagtaccttgcagaagccggctggacagctgaaggaagagtggtaggagtgacccagcctcgaagagtggctgctgttacagttgcagggagagtagctgaagaaaggggtgcagtgctgggccacgaggtgggctactgcatccgctttgatgactgcaccgaccagctggccacgagaattaagtttcttactgatggaatgctggtcagggaaatgatggttgatccgttgttaacaaaatatagtgtcatcatgctggatgaagcccacgagaggaccttgtacactgacattgccattggcttgctaaaaaagattcagaaaaagcgaggggatcttcgattgattgtagcttcagccactctggatgcagacaaattccgggatttctttaatcaaaatgaaaccagtgatccagcaagggatacatgtgtgatccttacagtggaagggagaacatttccggtggatatcttttatctacaaagtcctgttccagattatatcaaatcaactgtcgaaactgtggtgaaaattcaccagacagagggagacggagacgttttagcatttcttactggccaggaagaggtagaaactgttgtgtcgatgctcatcgagcaggctcgagcactagctcgcactgggatgaagagacacctccgagttctccccatgtatgcaggactgccttcctttgagcaaatgaaagtgtttgaaagggtgtcacgcagtgtcagaaaggtgatagtggccaccaatgtggcagaaacctctatcacaatcagcggcattgtgtatgtgatcgactgtggctttgtgaaactccgagcctacaatcccaggacagctattgaatgcttggtggtggtgccagtctcccaggcatcagctaatcagcgagcaggacgtggtggtcgtagtcgctcgggaaaatgttatcgcctttatacagaggaagcctttgacaagttgcctcagtctacggttcctgagatgcagcgtagtaatttggcacctgtcatcctgcagctgaaagcactaggaattgacaatgtcctcaggttccacttcatgtcgccccctccagcacagtcgatggttcaagccttggagttactgtatgctctgggaggtctggacaaagactgtcgcctaactgaaccgcttggcatgagaattgcagagtttcctttgaatcccatgtttgccaaaatgctgcttgaatcaggaaacttcggctgttctcaggaaattctaagcatcgctgccatgatgcagatccagaatatctttgtggtccccccaaaccagaagtctcacgcaattcgagtgcaccgtaaatttgctgtggaggagggcgaccacctcactatgctcaatatatatgaagcatttatcaaacacaataaggactctaaatggtgtcaggaacatttcctgaattacaagggtcttgtcagagctgcgactgtaagagaacaattgaaaaagcttcttgtcaagtttcaagtgcccaggaagtctagtgaaggtgacccggatctggttctgaggtgcattgtctccggcttcttcgccaatgcagcgaggtttcattctactggagcttataggaccatccgtgatgaccatgagctgcacatacaccctgcgtcagtcctctatgcagagaagccgcctcgctgggtcatctataacgaagttatacagacctccaagtactacatgagagatgtgactgccattgaatcggcctggctgttggagctggctccacacttttatcaacaaggaacgcacctgtctctgaaagccaaaagggccaaggtccaggacccgtgagaggagcccacagctacagctgcagggactgctggcgtcctctcctccatgctgctgcccctggtcccaggtggggtgagctggcaccagctcctgtggaatgtttggttgctctgaagtgggctgcggcctgttcattagtcctttcttcccgctgcccacagcatttgcatccttgctgggatcctggaggactttgtgcatgggcaggcatccttctgtgctgcagcgggcagagtgggagttggctcactcagcacgctcactaacccagcatgccacttccagcaggcatgcagtcctggcccagctctatgggaaacaaggaggaaagttagccactgaaggccaaaacaccatgtggggtggacagagggtttgctgggctggctttgctttccctgctggggccacagctgtgttaaccaatgaggtctgctgccaggtgtgaacaagcatgtctctacgaatgaacgaaacattggggatctctgccgaaaccaccaaagggcatgtctgatgggcacagggtctcccaaacccagtggcttctgtctgtcctcagcccttgtccctgtttatctgcagccaggagacttgcaagggattggtgattgacagagaggactcgtgcgctgttttgtgttagcagaggatttgtgtttcacaggtaggcttagcgtcctctcagagtgtagtgccaggtcctggtgccacgctagctgagcactcaggagagttcatcagctcagatcccacagggcctcctctttagcaggaattcacaacagtttggatgccctaaacttctgtagctcaggaacatcactggtgtatttgtttttttgtttgtttgcttgggttcttgcaagagcgcgtggggacagttcttccagcaggcactggttttgttgccccagggctgctttgctgtgatgatgattgcatttcaacacatgccagatgcagattttttcccccttactgtttcaatgacctttattttaaaaacacatagcttgaaaatttatttttatactgatattagtttggatgtgccacttttggcaccaaacgtgtatgtcatttttatttccattttataaacatgtaaataatagtgataacttgttaataatagtaaacctttatacctaaagtaaatgtcttccctcccacaaaaaaaaaaaaaaa

SEQ ID NO: 5061 - DNA, 1588 bp, Homo Sapiens
  NM_021933
gcccctcacctgaccaatcaagacggccggccgaggcccctggaacggctcaggcggctgcggctgctacggcggcgcatgctaggggattctgccgggtagaagagctgggcctggaacccagccctgaggacatcctgcggcccaggggcaagtgacacctgctgagagaggcccaggatggtggaggctgaggaactggcacagctgcggctgctcaatctggagctcctgaggcagctgtgggtggggcaggatgctgtgcggcggtcagtggccagggcagcctcggagtcaagcctggaatccagcagcagctacaactcagagactccatcgaccccagagacgtcctcaacttccttgagcacctcctgcccacggggccggtcctccgtgtggggcccaccagatgcctgtcgaggggacctccgtgatgtggccagatcgggggtggcctctctcccacctgccaaatgccagcaccaggagtccctgggccgaccgagaccccactcagcaccctcgctgggcacctcaagcctgagggacccagagccctcagggaggctgggtgatccaggaccccaggaggcacagaccccgaggtccatcctggctcaacagagcaagctgtccaagcccagggtgaccttctctgaggagtctgcagttcctaagaggagctggcgcctcaggccatacctgggctatgactggattgcagggtctctggacaccagctcttccatcaccagccagcctgaggccttcttctccaagctgcaggagtttcgggaaaccaacaaggaggagtgtatctgcagccatcctgaaccccagttgccaggcctgcgtgagagcagtggcagcggcgtggaggaagaccatgaatgcgtgtactgttaccgtgtcaaccggcgcctgttcccggtgcctgtggatcccggtaccccctgccgcctgtgcaggacaccgcgagaccagcagggccctgggaccctggcgcagccagcgcacgtcagggtgagcatcccgctgtcgatcctggagcccccgcaccggtaccacatccaccggcgaaagagctttgacgcctctgacacactggccctgccccggcactgcctgctgggctgggacatttttcctccgaagtctgagaaaagctcagcccccaggaacctggacctctggtcctctgtctccgctgaggcccagcaccagaagctgtccggcaccagcagcccttttcacccggcctcaccaatgcagatgctgcccccgaccccgacctggtcagtgccccaggtccctcggccccacgtcccacggcagaagccctgaggactgactcctgggggagaacagcattcccgccgcctccagcctctcccctctggcaggcgcacccaggagatggaatcccctgcccgcccagctcaggcccagctgtcctaggttgggcaggtgggtggacccaagcttgtctgctgcctgagttccagagagggaggaccctggggtggagggtgagggattctgtggaagtttgtaaataaagctcagtgctctgcagctcaagtcc

SEQ ID NO: 5062 - DNA, 1550 bp, Homo Sapiens
  NM_021935
gccggcgtgagtcacggcggggctagcctttataacggcccggaggctcgcgggagccgccgcgcccgtccgcccgccgctccgcgctccacccagcgcacccgggccccgcgcccccaactgcctccggcggccgcccagtcccgagggcgccatgaggagcctgtgctgcgccccactcctgctcctcttgctgctgccgccgctgctgctcacgccccgcgctggggacgccgccgtgatcaccggggcttgtgacaaggactcccaatgtggtggaggcatgtgctgtgctgtcagtatctgggtcaagagcataaggatttgcacacctatgggcaaactgggagacagctgccatccactgactcgtaaagttccattttttgggcggaggatgcatcacacttgcccatgtctgccaggcttggcctgtttacggacttcatttaaccgatttatttgtttagcccaaaagtaatcgctctggagtagaaaccaaatgtgaatagccacatcttacctgtaaagtcttacttgtgattgtgccaaacaaaaaatgtgccagaaagaaatgctcttgcttcctcaactttccaagtaacatttttatctttgatttgtaaatgatttttttttttttttatcgaaagagaattttacttttggatagaaatatgaagtgtaaggcattatggaactggttcttatttccctgtttgtgttttggtttgatttggcttttttcttaaatgtcaaaaacgtacccattttcacaaaaatgaggaaaataagaatttgatattttgttagaaaaacttttttttttttttctcaccaccccaagccccatttgtgccctgccacacaaatacacctacagcttttggtcccttgcctcttccacctcaaagaatttcaaggctcttaccttactttatttttgtccatttctcttccctcctcttgcattttaaagtggagggtttgtctctttgagtttgatggcagaatcactgatgggaatccagctttttgctggcatttaaatagtgaaaagagtgtatatgtgaacttgacactccaaactcctgtcatggcacggaagctaggagtgctgctggacccttcctaaacctgtcactcaagaggacttcagctctgctgttgggctggtgtgtggacagaaggaatggaaagccaaattaatttagtccagatttctaggtttgggtttttctaaaaataaaagattacatttacttcttttactttttataaagttttttttccttagtctcctacttagagatattctagaaaatgtcacttgaagaggaagtatttattttaatctggcacaacactaattaccatttttaaagcagtattaagttgtaatttaaaccttgtttgtaactgaaaggtcgattgtaatggattgccgtttgtacctgtatcagtattgctgtgtaaaaattctgtatcagaataataacagtactgtatatcatttgatttattttaatattatatccttatttttgtca

SEQ ID NO: 5063 - DNA, 2239 bp, Homo Sapiens
  NM_021937
gggcgggccgggcgggtgtccgaggcggcggcggcggcatggcagggcggcgggtgaacgtgaacgtgggcgtgctgggccacatcgacagcggcaagacggcgctggcgcgggcgctaagcaccacagcctccaccgccgcctttgacaagcagccgcagagccgcgagcgcggcatcacgctcgatctgggcttctcgtgcttctcggtgccgctgcccgcgcgcctgcggtcgtctttgcccgagttccaggcagcgcccgaggccgagcccgagcccggcgagccactgcttcaggtcacgctggtcgactgccccgggcacgcctccctcatccggaccatcatcggcggggcccagatcattgatctgatgatgctggtcatcgatgtgaccaaggggatgcagacccagtcagcggaatgccttgtgatcggccagattgcctgccagaagctggtcgtggtgctgaacaaaatagacctcttacctgaaggaaagagacaggcagcaattgataaaatgaccaagaaaatgcagaagaccctagagaacaccaagttccgaggtgcaccgattatacccgtggcggccaagccggggggaccagaggcccccgaaactgaagctccacagggcattccagagctcattgagctcctgacgtcccagatttccatcccaacgagagacccctcgggaccgttcctcatgtctgtggaccactgtttctccatcaaaggccaaggcactgtgatgacagggaccatcctttcaggctccatcagcctcggtgacagtgtggagatccctgccctcaaggtggtgaagaaggtgaagtccatgcagatgttccacatgcccatcacttcagccatgcaaggagaccggctgggcatctgcgtcacccagtttgaccctaagctgctggagcgcgggttggtgtgtgcccccgagtccctgcacactgtccatgcggccctcatctctgtggaaaagataccgtatttccgggggcccctgcaaaccaaggccaagttccacattacagtgggccatgaaacagtcatgggccggttgatgttcttcagtcctgctccagataactttgaccaggagcctatactggactctttcaacttctctcaagaataccttttccaggagcagtacctgtccaaggatttgacaccagcagtgacagacaatgatgaggccgacaagaaggccggccaggccacagagggccattgtcctcggcagcagtgggccctggtggagtttgagaagcccgtcacctgccctcggctgtgcctggtgattggctccaggctagatgcggacattcacaccaacacgtgccggctagccttccatggcatcctgctccacgggctagaggacaggaactacgccgacagcttcctgcccaggctgaaggtgtacaagctgaagcacaagcatggccttgtggagcgggcgatggatgactacagtgtgatcggccgctccctgttcaaaaaggaaaccaacatccagctcttcgtggggctcaaggtgcacttgtccactggggaactgggcatcatcgacagtgccttcggccagagcggcaagttcaagatccacatcccaggtggcctcagccccgagtccaagaagatcctgacacccgccctcaagaagcgggcccgggctggccgtggggaggccaccaggcaggaggagagcgccgagcggagcgagccctcacagcatgtggtgctcagcctgactttcaagcgttatgtcttcgacacccacaagcgcatggttcagtctccctgagtgtccggtgacctcccccagggcctccttgcccagcccagtccaggctgctgtgccaaatcccaaccagccacgcctcagcctctcccagtctctccctgcagtcctgcagcagcagcccccacccccaagcttggtgctgagccctggtgaggagctgagggggatgggttgctggggccaggagggtctctcctccagcccctgcacactcccacccaggacagcccccagcccaactaggaaagggccatgggcagagggctggtagccagtatcttccactgccccatctgttggccacctgcaggccagtctcaaccctcccccaggtgggcaggcacttgatggctacaaataaatgtcccgtggccccagcccactctaaaaaaaaaaaaaaaaaaaaaaaa

SEQ ID NO: 5064 - DNA, 3351 bp, Homo Sapiens
  NM_021943
gcggccgctgcgactccggagccggcggggggctccggtccttccctgcgccaccgcacaggacatctctctggctggggagcggcggtgagacccgccgagggcgtctgtgtccctcctcccccgcggtcctcggtgcgtccgcacgcccctcctcctcggctccctccttcttctctccgcgcctctccgccccctccccgtctccgcaggccgagtggtgcggcccgcctccagctgaccggcctggaatcccggctccgagccccggactcgcgcccgcccgcgcgcccgctccttccccctccccccgccccgagccccccgacgccgccgccaccgcctcctcagagcggggcccgggcccagccgccgccaccgctgccgccgccgagctccgccgccgccgagcaccatgggagacgctgggagcgagcgcagcaaagcgcccagcctgccgcctcgctgtccctgcggcttctgggggtccagcaagactatgaatctctgttccaaatgctttgctgattttcaaaagaaacagccagacgatgattccgctccaagtacaagtaacagccaatcagatttgttttccgaagagaccaccagtgacaacaacaatacctcgataaccacgccaactcttagtcccagccagcagccgcttccgacagaactgaatgtaacttcaccgagtaaagaggagtgtgggccatgcacagacacagctcatgtctcattaatcacaccaacaaaaagatcctgtggtacagattcacagtctgagaatgaggcttcaccagtaaaacggccacgactacttgagaatacggaacggtccgaggaaaccagtcgatctaaacagaagagtcgacgtcggtgcttccagtgccaaaccaaactggagctggtgcagcaggaattgggatcgtgtcgctgcggttatgtgttctgtatgttacatcgcctccccgagcagcacgactgcacattcgaccacatgggccgtggccgggaggaagccatcatgaaaatggtgaagctggaccggaaagtggggcgctcctgccagcgcatcggggaggggtgctcctgaaggccaggcatggccaccacgtgacgctgttcttagttcactaatgttagccttatttaggacaaagtcagccagacaccttgtactgggcacgcgtcagactgcagccagtccgtttcctttctttagccagccatcctggtactgtagtttaggggttgatggtggttgaaattgatttctggctggttactaaggtgcctgctagccattgtataaaattaaaacatgaagaatattttttttttgagcatggctagtggatttaaaacaacacatacctgtcactgctggagtcaaacttataaaaagccttaagtggaaagtgttccagacggagactctgagttaatagaggagtagaagctggtgttaaagttcccacgacgcacatggctttgccagaaactctgtttaatgatcggcctttcacctcttcacttatccttagtcccagtagccaggatacctgatggccacgtgtgccttggccacgggaggctgctgagattggccacgtggctgggctgggtggtggcctcactctcccacagagctggaaatggggggtgggggacagattcttacggaaatttttttacctgacttgctatgaaaaaactcatcacacaagaagagaaacagtaacctcactttgaaaattagctccactcaagactagtccacgaacgagacccgccttttctacacaggatccaaggtcacgagaagcagccagagtgccccgcctccgccggctctggtctgccattcgccagtgcagggatctggcacggaccagatgtggcgaatggcagcacagcgcggtggctgggtctgcacactggcctctgcagccagatttctatattgggagttttttaaaaagacatttcatagccaacaagaatcagtagaagtgctgggagcagcagctggggaagctgccgcccacgggctctgccccttccagctggagccgcccgtgcctccaggggccaagaggatgatgtcgtggcctccattctcgtttctatgcagccccatagtccaaggacacccagtccacatctaccatatagcaagtttagtaagggaaggcagcatacgtcccagggacagtgggtttggatctgtctagaacagcggtttgtggctgtggcccagctccgagagtgatatttgctctggtaggtgagggcctgagggtacatttctccacctgtgccccctcatgttcacagaggatttcagcagctgcaactgcgcacgccaggtggggaagggtgggggtgggcctggttgccccatgttaggaaatcactaccagtcaggtggggctggggctgggtggacaggatcaggattcccttgaaagcccaggcagggtgagcagtcccagtggtcctagtgccgcatcagatccaggtgggtgagggcaggaggcccctgcggaggcagcgtggatctgcccacacataggctactggaatagtttaacccagcaactttcctttttataaaacaacaaatggttcaactctgtctgcaaattaacagctgaacacctgcaactgcaaatgttttttgatccgacgtactgaaataggaagtcatgctcttcccaccctccacccaccagagtggaacccgctgcaaaatccccagccttaattcttgcttcaggacccagaccggtgtcttgctctagggcaacccagggcagaggggccaggtctgcccagcgtttaccactgctgtcaagccacagcccttggccaccatacgggccatcctcagtgaggcagccccccataggcttccgccaagctctggtcccgaagaggctgtgcgagcccttcccggccctccccagggccccccgccccctcctctgcctgctgcgtggaggcagccatgggaaggagcccaggggagctggcctgggggagcgaagcccatgttcgcttcctgacttagagctggggggggtggggggtggggcttgttcccctgcagtatctgttctgtgaagtttgttaaatgtaaggaaagcttaaattcttgtatctttaaaagagaaaatcttatttaacccttttgtgttctagatttacttacacacatagcctagagctcagttttagttttaacattgtgaaaatattaaaagaatcttgtaactttattcttttttctcctgctgaaaaaaaaaattaaaccaatcgtatgaaaaaaaaaaaaaaaaaaaa

SEQ ID NO: 5065 - DNA, 7127 bp, Homo Sapiens
  NM_021946
ggggagtggccacagcaggtcctatctggtggtgagtggctgtcatgatctctacagcaccgctctacagcggcgtgcacaactggaccagttctgaccggattcgcatgtgtggcatcaacgaggagagaagagcacctctttctgatgaggagtcaacgacaggcgactgccagcactttggatctcaggagttttgtgtcagcagcagtttttccaaggtggagctcacggcagttggaagtggcagcaatgcccggggggcagacccagatggcagtgctacagaaaaacttgggcacaagtcagaagacaagcctgacgatccccagccaaaaatggactacgctgggaacgtggcagaggctgagggcctcttggtgcccctgagcagcccaggagacgggctcaagcttcccgcatctgacagcgccgaggccagcaacagcagggccgactgctcctggactccactcaacacccaaatgagcaaacaggttgactgctcacccgccggagtaaaggctttggactctcggcaaggtgttggagagaagaatactttcattttggcaactctgggaactggagtccctgtggaggggaccctgcccctggttaccactaacttcagtcctctgccagcccctatctgtccccctgctcccggttcggcctctgtgccccactctgttccagatgcattccaggttcccctctccgtccctgccccagtcccccattcagggcttgttccagtccaagttgccacttcggttccagctccttcccctcccttagcacctgtcccggctctggctccagcgccaccgtcagtgcccacgctcatctctgactcgaaccccctttctgtttcggcctcagtcttggtgcctgtgccagcttctgctcccccttcaggcccggttcccttgtcggctccagctcctgccccgctttcagtcccagtttcagctcctcccttggctctcatccaggctcctgtgcccccttcagctccgaccttggttctcgctcccgtccccactccggttctggctcccatgccagcatccacgcctccagcggcccctgcccctccgtctgtgcccatgcccactccaaccccatcttccggcccaccttctacccccaccctcatccccgcctttgctcctacaccggtgcctgcacccaccccagcccccatctttactccagcccctacacccatgcctgctgccacgccagctgccattcccacctctgcacccatcccggcctccttcagtttgagtagagtgtgctttcctgcagctcaggcaccagctatgcaaaaagtccccctgtcctttcagccagggacagtgctgaccccgagccagccgctggtatatatcccgcctccaagctgtgggcagccactcagtgtggccacactgccaaccactctaggggtttcctccactcttacgctccctgtcctgccgtcctacctgcaggacaggtgtctcccaggcgtgctagcctcccccgagctccgttcttacccgtatgcattttctgtggcccggcctctgacttcggattccaagctggtatctctggaggtgaacaggctcccctgcacttccccatccggtagcaccaccacccagcctgcacccgatggggtccctgggcctttggcagatacctcccttgttactgcttctgccaaggtgcttccaactccacagcctctgctgccagcccccagtgggagctcagccccaccgcaccccgccaagatgcccagtggcaccgagcagcaaacagaagggacttccgttaccttctctcctcttaagtcaccgccacagctggaacgagagatggcctctccacctgagtgcagcgagatgccccttgatctgtcctccaagtccaaccgccagaagcttccattgccgaaccagcgcaagacaccccccatgcctgtgttgacccccgtgcacaccagcagcaaggccctcctctccacagtcctgtctaggtctcagcgcacaacccaggctgccggtggcaatgtcacctcctgcctgggctccacttcctcgccctttgtcatctttcccgagatcgtgaggaatggggacccgagcacctgggtgaagaactcaactgcactgatcagcaccattcctggcacctacgtgggagtggccaacccagtgcctgcatccctgctgctgaacaaagaccccaacctgggcctcaaccgtgacccccgccatctccccaagcaggagcccatctccatcattgatcaaggagagcctaagggcactggtgccacgtgtggcaaaaagggcagccaggctggtgctgagggacagccaagcacagtgaaacgatatactccagcccgcattgcccctgggctgccagggtgccaaaccaaggaactctctttgtggaaacccacggggccggcaaatatttatccccggtgttcagtcaatgggaaacctaccagcacccaggtcctgcctgttggctggtccccgtaccaccaggcgtctctgctttccattggcatttccagtgccgggcagctgacccccagtcagggggcgcccatcaggcccaccagcgttgtttcggagttttctggtgtgccatctctcagctccagcgaagccgtgcacggacttcctgaggggcaaccacggcctgggggctccttcgttccagagcaggaccctgttacaaagaacaaaacttgccggattgctgccaagccttatgaagaacaagtcaatcctgtcctcttgaccctcagccctcagactgggaccctggcactgtctgttcagcctagcggtggggacattcgaatgaatcaggggcctgaggaatcagagagccacctctgctctgacagcactcctaagatggaaggcccccagggggcttgtggcctgaagctggcaggagacacgaagcctaagaaccaagtgctggccacctacatgtcccatgagctggtcctggccaccccccagaacctgcctaagatgcctgagctgcctttgctacctcacgacagccaccccaaggaacttatattggacgtggttccgagcagcaggaggggctccagcacagagcgcccacagcttggaagccaggtggatctggggcgagtgaaaatggagaaggtggatggtgatgtggtcttcaatttagccacctgcttccgggctgatggcctcccagtggctccccagaggggccaagctgaagttcgggctaaggccgggcaggctcgagtgaaacaggaaagcgtaggggtctttgcttgcaagaacaagtggcagccagatgatgtgacggaatctctgccgcccaagaagatgaagtgcggcaaagagaaggacagtgaagagcagcagctccagccacaagccaaggccgtggtccggagttcccacagacccaagtgccggaagctgcccagtgacccccaggaatccaccaagaaaagccccaggggggcttcagattcaggaaaagagcacaatggagtcaggggaaagcacaagcaccggaagccgacaaagccggagtcccagtctccaggaaaacgagccgacagccacgaggaaggttccttggaaaagaaagcaaagagcagtttccgtgactttattcctgtggttctgagcacccgcacgcgcagtcagtctggaagcatctgtagctcctttgctggcatggcagacagtgacatgggaagccaggaagtcttccccacagaagaagaagaggaggtaacccccaccccagctaagcgtcgaaaggtgagaaagacccaacgggacacccagtatcgcagccaccatgcccaggacaagtctctgctgagccagggccgaaggcacctgtggcgagcccgagaaatgccctggaggacagaggctgcccggcaaatgtgggacaccaatgaggaggaggaggaagaagaggaggagggcctgctgaagaggaagaaacgaagacggcagaagagccgaaaatatcagactggggagtacctgacagagcaagaagacgagcagcggcggaaagggagagcagatttaaaggcccgtaagcagaagacttcctcctcccaaagtttggagcaccgcctcaggaacaggaaccttctcttgcccaacaaagtccaggggatctcggattcaccaaacggtttcctcccaaataacctggaagagccagcctgccttgaaaattcagaaaagccatcaggaaaacgaaagtgcaagaccaagcacatggcaaccgtctcagaagaggcaaaggatgttgttctctactgcctccagaaagacagtgaagatgtgaatcaccgtgacaatgctggctacacagccctgcatgaggcttgttcccggggctggaccgacatcctgaacatcctgctggagcacggggccaacgtgaactgcagtgcgcaggacggcacgaggccagttcatgatgcggtggtcaatgacaacctggagaccatctggctcctgctgtcctatggggccgatcccacactggctacctactcgggtcagacagccatgaagctggccagcagcgacaccatgaagcgctttctcagtgatcacctctcggatcttcagggccgggcagagggtgatcccggtgtatcctgggatttttacagcagttctgtgttggaggaaaaagacgggtttgcctgtgacctcctacataatcctcctgggagctcagatcaagaaggagacgatccgatggaggaggatgatttcatgtttgaactctcagacaagcctcttctcccttgctacaacctccaagtgtcagtgtcccgcgggccctgcaactggttcctcttttccgatgtcttgaagaggctgaagctttcctcgaggatctttcaggcccggttcccgcactttgaaatcaccaccatgcccaaggccgagttctacaggcaggtggcctccagtcagctgctgacccctgccgagaggcctggaggcttggacgacagatcccccccaggctcctctgagactgtggagctggtgcggtacgagccagacctacttcggctcctagggtccgaggtggaattccagtcttgcaacagttgaccgggaaaacagcccctcctcttctttctccttccgagttcgcccttcccccacctccttgtctttccccgaccgagcaccagactgcagaatgaggcaataatacggaccaacaagaagccgccttatcaatgccagcattagcgactggactgtttttgtttttttggttacaattagttctcatctccctgtcgtcgtcattgttatcgtggttgctgatgggggtggaaagttgaactccatgtctgaggacaagaggtcccgggggtggtgggaggtggcgccggggtcccttggactggcctccttgttcatgaccaagaccaaacctgggccctggatggccttggcctgtcccgaggagaaatgagaaaatcccagatctctgagcgccccccaactccattcccctgtgttcttctgtcttctgtagtatttattttattagtatttaatttgtattgtttcattggtttctgataagtctgtatcactgtgacgatttgagacaacttgttgtattgagggactttctgtacctccttttctttttctttgttgatgagctctgacaaagctattccctggtgtttttttcccccactggggagggggtgaggtggaatggggtgggggaacatggacttgtgactaacgaagctggttgctgctggcccagggctgggggcttgggggtaaatcctgaggctttggtgctcccccacccacccattcccgccctttgcagcagccccgctatcttgagattagtgttgacagggaggggaggattgtgaggtgaggggttaataagttactctaataaaggagcgtggagaagggatctgaggggtgagggtggcccccctcctcacgccttcttcactgcccccctcagagtgcacaatacgagtttgttcctgcctccactctcccaccccgttctggcctccctgtctcaagatactgagcctctcacctcccagccctcagccacccccatccctgccccttctgagactcacagcacccctttccttcctctcctcccacctcctccctcagcccctcattctccttgggaatctgcagagggctctgggactcactgccggatgtgaaatccaggcgtcagctgtttcctaggcaagggcaggaaagtggtctccagcccttgctccactcatgcctgggggcctggggctgagtggtatccctacctggcctccccctggcctctgggcctccagcgctgggtttgtcgagtgagagagagagaggagcttgggttgcttccctgtccccgccccctctgtggcattgtccctcccactcttatttttctaccaattgctatttttccgaacaatccttgtagagtatgtaccatccaaaggcaggagggcctcgccgtggccggctctggttggagatggtacagttttattgtacaggtgctaaaacaacaacaacaaaaaagaaaatggaaaaaaaaaagattaaaaaaaaaaggaaaaaaaaaaagccagtttgaggatgggacaatctgttctctagaggctcctgagccatgcgggagcattggtggttattttctttgtattgtgtttgttctttgttcctgggggggaagttctcggcccccttctgtaggactgctccccacccccaccatactgcccagttggttttgaacagttgttttccctttttaagaaaaaaaaatacatatatatatacatatatatatataaagttgaggggttttggactttaatttgttggttttgttggggttcctggtattgtgtagtttatttcatgttctgtttgcctttccttttttcgcatttgggtgtatattctggctgccctttatgtttcattttaagcaactggctgtggagtcaaaaacacttgcatactgaaaaacctgtgtcaggg

SEQ ID NO: 5066 - DNA, 3331 bp, Homo Sapiens
  NM_021950
gtctatcagcgatttcatcttcaggcctggactacaccactcaccctcccagtgtgcttgagaaacaaactgcacccactgaactccgcagctagcatccaaatcagcccttgagatttgaggccttggagactcaggagttttgagagcaaaatgacaacacccagaaattcagtaaatgggactttcccggcagagccaatgaaaggccctattgctatgcaatctggtccaaaaccactcttcaggaggatgtcttcactggtgggccccacgcaaagcttcttcatgagggaatctaagactttgggggctgtccagattatgaatgggctcttccacattgccctggggggtcttctgatgatcccagcagggatctatgcacccatctgtgtgactgtgtggtaccctctctggggaggcattatgtatattatttccggatcactcctggcagcaacggagaaaaactccaggaagtgtttggtcaaaggaaaaatgataatgaattcattgagcctctttgctgccatttctggaatgattctttcaatcatggacatacttaatattaaaatttcccattttttaaaaatggagagtctgaattttattagagctcacacaccatatattaacatatacaactgtgaaccagctaatccctctgagaaaaactccccatctacccaatactgttacagcatacaatctctgttcttgggcattttgtcagtgatgctgatctttgccttcttccaggaacttgtaatagctggcatcgttgagaatgaatggaaaagaacgtgctccagacccaaatctaacatagttctcctgtcagcagaagaaaaaaaagaacagactattgaaataaaagaagaagtggttgggctaactgaaacatcttcccaaccaaagaatgaagaagacattgaaattattccaatccaagaagaggaagaagaagaaacagagacgaactttccagaacctccccaagatcaggaatcctcaccaatagaaaatgacagctctccttaagtgatttcttctgttttctgtttccttttttaaacattagtgttcatagcttccaagagacatgctgactttcatttcttgaggtactctgcacatacgcaccacatctctatctggcctttgcatggagtgaccatagctccttctctcttacattgaatgtagagaatgtagccattgtagcagcttgtgttgtcacgcttcttcttttgagcaactttcttacactgaagaaaggcagaatgagtgcttcagaatgtgatttcctactaacctgttccttggataggctttttagtatagtatttttttttgtcattttctccatcaacaaccagggagactgcacctgatggaaaagatatatgactgcttcatgacattcctaaactatcttttttttattccacatctacgtttttggtggagtcccttttgcatcattgttttaaggatgataaaaaaaaataacaactagggacaatacagaacccattccatttatctttctacagggctgacattgtggcacattcttagagttaccacaccccatgagggaagctctaaatagccaacacccatctgttttttgtaaaaacagcatagcttatacatggacatgtctctgccttaacttttcctaactcccactctaggctattgtttgcatgtctacctacttttagccattatgcgagaaaagaaaaaaatgaccatagaaaatgccaccatgaggtgcccaaatttcaaataataattaacatttagttatatttataatttccagatgacaaagtatttcatcaaataacttcatttgatgttccatgatcaagaaagaatccctatctctattttacaagtaattcaaagaggccaaataacttgtaaacaagaaaaggtaacttgtcaacagtcataactagtaattatgagagccttgtttcataaccaggtcttcttactcaaatcctgtgatgtttgaaataaccaaattgtctctccaatgtctgcataaactgtgagagccaagtcaacagcttttatcaagaatttactctctgaccagcaataaacaagcactgagagacacagagagccagattcagattttacccatggggataaaaagactcagactttcaccacatttggaaaactacttgcatcataaatatataataactggtagtttatatgaagcagacactaagtgctatagacactctcagaatatcatacttggaaacaatgtaattaaaatgccgaatctgagtcaacagctgccctacttttcaattcagatatactagtaccttacctagaaataatgttaacctagggtgaagtcactataatctgtagtctattatttgggcatttgctacatgatgagtgctgccagattgtggcaggtaaagagacaatgtaatttgcactccctatgatatttctacatttttagcgaccactagtggaagacattccccaaaattagaaaaaaaggagatagaagatttctgtctatgtaaagttctcaaaatttgttctaaattaataaaactatctttgtgttcttttctgcaacagatgattccaacatgggtgtttgtctattcttctttactcttgaaacattagaccatgggaggctcttacagccttgagttgatatttatacaacccaaatctaggtttgaacggtgaggtgtcaggtcatcaaatattcatgtctatatagtcttacacaggttctcaaaaaaaatgttcatgggataggtcattgataatggattccttattctgagaactccagacgactgaaatatatgagagaaggaaaaggacatagtaggagcaggcctgagaaaaaaatgaaagtcagaaatctttaaaaaaatacaagatcttatttctatcttattttttctcctcttctgaaatatatatgaggattcctctccaaacccatggtttctctaagaattttgagtcatttgtatgacctcaaataattagttttagctgacctcacataactccttataataggagacatctttaatgtctgctattaaagaaggatgaaaattcctatgaccttctccccgattatccctttggcaatatagagtcaaataataacattgaccaatagtaaacatgctttgccaagaagtagaagatatattctctagccttagtttttcctcccaatttgcatttttgtaaaaataatgttgtatccacaaaggaaataaactttaaaaacccaagtgca

SEQ ID NO: 5067 - DNA, 2308 bp, Homo Sapiens
  NM_021958
aaaactttgggagtttttagagacgagtttttttttttttctattacttttccccccccctaactaacggactattattgttgttgttttaaatttagctcttagggcttagctatttgggttttcttgcggtgtccggctcccgtctccctggctcccccgcccgccctgcggccccagcgcccctcgctctcatccagcccgcgaggagtgcgggcgccgcgccgcctttaaagcgaggccagggagcgaggcggtgaccggccgagatccggccctcgcctcctccctcggtggcgctagggctcccggcctctcttcctcagtgcgggcggagaagcgaaagcggatcgtcctcggctgccgccgccttctccgggactcgcgcgcccctccccgcgcgcccacccacccagtccggctggactgcggcagccgcgcggctcaccccggcaggatgttcgcagccgggctggctcccttctacgcctccaacttcagcctctggtcggccgcttactgctcctcggccggcccaggcggctgctccttccccttggaccccgccgccgtcaaaaagccctccttctgcatcgcagacattctgcacgccggcgtgggggatctgggggcggccccggagggcctggcaggggcctcggccgccgccctcaccgcgcacttgggctcggttcacccgcacgcctctttccaagcggcggccagatccccgcttcgacccaccccagtggtggcgccctccgaagtcccggctggcttcccgcagcggctgtctccgctctcagccgcctaccaccaccatcacccgcaacaacaacagcagcagcaacagccgcagcagcaacagcctccgcctccgccccgggctggcgccctgcagcccccggcctcggggacgcgagtggttccgaacccccaccacagtggctctgccccggccccctccagcaaagacctcaaatttggaattgaccgcattttatctgcagaatttgacccaaaagtcaaagaaggcaacacgctgagagatctcacttccctgctaaccggtgggcggcccgccggggtgcacctctcaggcctgcagccctcggccggccagttcttcgcatctctagatcccattaacgaggcttctgcaatcctgagtcccttaaactcgaacccaagaaattcagttcagcatcagttccaagacacgtttccaggtccctatgctgtgctcacgaaggacaccatgccgcagacgtacaaaaggaagcgttcatggtcgcgcgctgtgttctccaacctgcagaggaaaggcctggagaaaaggtttgagattcagaagtacgtgaccaagccggaccgaaagcagctggcggcgatgctgggcctcacggacgcacaggtgaaggtgtggttccagaaccggcggatgaagtggcggcactccaaggaggcccaggcccaaaaggacaaggacaaggaggctggcgagaagccatcaggtggagccccggctgcggatggcgagcaggacgagaggagccccagccgttctgaaggcgaggctgagagcgagagcagcgactccgagtccctggacatggcccccagcgacacggagcggactgaggggagtgagcgttctctgcaccaaacaacagttattaaggccccggtcactggcgccctcattaccgccagcagtgctgggagtggtgggagcagcggcggcggcggcaatagtttcagcttcagcagcgccagcagtcttagtagcagcagcaccagtgcgggttgcgccagcagccttggcggcggcggcgcctcggagcttctccctgcaacacagcccacagccagcagcgctcccaaaagccccgagccagcccaaggcgcgcttggctgcttatagactgtactagggcggaggggatccgggccttgcgtgcagcctcccaaccatgggctgggttttgtgcttactgtatgttggcgacttggtagggcaggagacgcagcgtggagcctacctcccgacattcacgcttcgccccacgctgctccgactggctgcagcggacactgcccaaagcagaggggagtctcagtgtcctgctagccagccgaacacttctctccggaagcaggctggttcgactgtgaggtgtttgactaaactgtttctctgactcgccccagaggtcgtggctcaaaggcacttaggacgccttaaatttgtaaataaaatgtttactacggtttgtaaaaaaaaaaaaaaaaaaaaaaaaaaaaaaaa

SEQ ID NO: 5068 - DNA, 1724 bp, Homo Sapiens
  NM_022355
agtgtgtccggaattggtgggttcttggtctcactgagttctagaatgaagctgcagaccctcgcagtgagtgttacagctcttaaggctctctgactgccacccctgcctgcctgcccggccctgcacaacatgcagccctccggcctcgagggtcccggcacgtttggtcggtggcctctgctgagtctgctgctcctgctgctgctgctccagcctgtaacctgtgcctacaccacgccaggcccccccagagccctcaccacgctgggcgcccccagagcccacaccatgccgggcacctacgctccctcgaccacactcagtagtcccagcacccagggcctgcaagagcaggcacgggccctgatgcgggacttcccgctcgtggacggccacaacgacctgcccctggtcctaaggcaggtttaccagaaagggctacaggatgttaacctgcgcaatttcagctacggccagaccagcctggacaggcttagagatggcctcgtgggcgcccagttctggtcagcctatgtgccatgccagacccaggaccgggatgccctgcgcctcaccctggagcagattgacctcatacgccgcatgtgtgcctcctattctgagctggagcttgtgacctcggctaaagctctgaacgacactcagaaattggcctgcctcatcggtgtagagggtggccactcgctggacaatagcctctccatcttacgtaccttctacatgctgggagtgcgctacctgacgctcacccacacctgcaacacaccctgggcagagagctccgctaagggcgtccactccttctacaacaacatcagcgggctgactgactttggtgagaaggtggtggcagaaatgaaccgcctgggcatgatggtagacttatcccatgtctcagatgctgtggcacggcgggccctggaagtgtcacaggcacctgtgatcttctcccactcggctgcccggggtgtgtgcaacagtgctcggaatgttcctgatgacatcctgcagcttctgaagaagaacggtggcgtcgtgatggtgtctttgtccatgggagtaatacagtgcaacccatcagccaatgtgtccactgtggcagatcacttcgaccacatcaaggctgtcattggatccaagttcatcgggattggtggagattatgatggggccggcaaattccctcaggggctggaagacgtgtccacatacccggtcctgatagaggagttgctgagtcgtggctggagtgaggaagagcttcagggtgtccttcgtggaaacctgctgcgggtcttcagacaagtggaaaaggtacaggaagaaaacaaatggcaaagccccttggaggacaagttcccggatgagcagctgagcagttcctgccactccgacctctcacgtctgcgtcagagacagagtctgacttcaggccaggaactcactgagattcccatacactggacagccaagttaccagccaagtggtcagtctcagagtcctccccccacatggccccagtccttgcagttgtggccaccttcccagtccttattctgtggctctgatgacccagttagtcctgccagatgtcactgtagcaagccacagacaccccacaaagttcccctgttgtgcaggcacaaatatttcctgaaataaatgttttggacatagaaacagaaaaaaaaaaaaaaaa

SEQ ID NO: 5069 - DNA, 2696 bp, Homo Sapiens
  NM_022356
atgcgccgcccggcttggaaggtggggcttcgcccgggggcgggccttcgccgggggtaggactccggccttggtggcgggtggctggcggttccgttaggtctgagggagcgatggcggtacgcgcgttgaagctgctgaccacactgctggctgtcgtggccgctgcctcccaagccgaggtcgagtccgaggcaggatggggcatggtgacgcctgatctgctcttcgccgaggggaccgcagcctacgcgcgcggggactggcccggggtggtcctgagcatggaacgggcgctgcgctcccgggcagccctccgcgcccttcgcctgcgctgccgcacccagtgtgccgccgacttcccgtgggagctggaccccgactggtcccccagcccggcccaggcctcgggcgccgccgccctgcgcgacctgagcttcttcgggggccttctgcgtcgcgctgcctgcctgcgccgctgcctcgggccgccggccgcccactcgctcagcgaagagatggagctggagttccgcaagcggagcccctacaactacctgcaggtcgcctacttcaagatcaacaagttggagaaagctgttgctgcagcacacaccttcttcgtgggcaatcctgagcacatggaaatgcagcagaacctagactattaccaaaccatgtctggagtgaaggaggccgacttcaaggatcttgagactcaaccccatatgcaagaatttcgactgggagtgcgactctactcagaggaacagccacaggaagctgtgccccacctagaggcggcgctgcaagaatactttgtggcctatgaggagtgccgtgccctctgcgaagggccctatgactacgatggctacaactaccttgagtacaacgctgacctcttccaggccatcacagatcattacatccaggtcctcaactgtaagcagaactgtgtcacggagcttgcttcccacccaagtcgagagaagccctttgaagacttcctcccatcgcattataattatctgcagtttgcctactataacattgggaattatacacaggctgttgaatgtgccaagacctatcttctcttcttccccaatgacgaggtgatgaaccaaaatttggcctattatgcagctatgcttggagaagaacacaccagatccatcggcccccgtgagagtgccaaggagtaccgacagcgaagcctactggaaaaagaactgcttttcttcgcttatgatgtttttggaattccctttgtggatccggattcatggactccagaagaagtgattcccaagagattgcaagagaaacagaagtcagaacgggaaacagccgtacgcatctcccaggagattgggaaccttatgaaggaaatcgagacccttgtggaagagaagaccaaggagtcactggatgtgagcagactgacccgggaaggtggccccctgctgtatgaaggcatcagtctcaccatgaactccaaactcctgaatggttcccagcgggtggtgatggacggcgtaatctctgaccacgagtgtcaggagctgcagagactgaccaatgtggcagcaacctcaggagatggctaccggggtcagacctccccacatactcccaatgaaaagttctatggtgtcactgtcttcaaagccctcaagctggggcaagaaggcaaagttcctctgcagagtgcccacctgtactacaacgtgacggagaaggtgcggcgcatcatggagtcctacttccgcctggatacgcccctctacttttcctactctcatctggtgtgccgcactgccatcgaagaggtccaggcagagaggaaggatgatagtcatccagtccacgtggacaactgcatcctgaatgccgagaccctcgtgtgtgtcaaagagcccccagcctacaccttccgcgactacagcgccatcctttacctaaatggggacttcgatggcggaaacttttatttcactgaactggatgccaagaccgtgacggcagaggtgcagcctcagtgtggaagagccgtgggattctcttcaggcactgaaaacccacatggagtgaaggctgtcaccagggggcagcgctgtgccatcgccctgtggttcaccctggaccctcgacacagcgagcgggacagggtgcaggcagatgacctggtgaagatgctcttcagcccagaagagatggacctctcccaggagcagcccctggatgcccagcagggcccccccgaacctgcacaagagtctctctcaggcagtgaatcgaagcccaaggatgagctatgacagcgtccaggtcagacggatgggtgactagacccatggagaggaactcttctgcactctgagctggccagcccctcggggctgcagagcagtgagcctacatctgccactcagccgaggggaccctgctcacagccttctacatggtgctactgctcttggagtggacatgaccagacaccgcaccccctggatctggctgagggctcaggacacaggcccagccacccccaggggcctccacaggccgctgcatgacagcgatacagtacttaagtgtctgtgtagacaaccaaagaataaatgattcatggttttttttacttggtttgttcagacaatggaaatttgcccattctgtcaaaaaaaaaa

SEQ ID NO: 5070 - DNA, 1756 bp, Homo Sapiens
  NM_022357
gcttgggggcggaaaagccgtggcgcccccttgcgtggcgcgtcggtctcagagtcgcgtgacttcaaccccctcttcgggaggctgggtcgtcatgatccggaccccattgtcggcctctgcccatcgcctgctcctcccaggctcccgcggccgacccccgcgcaacatgcagcccacgggccgcgagggttcccgcgcgctcagccggcggtatctgcggcgtctgctgctcctgctactgctgctgctgctgcggcagcccgtaacccgcgcggagaccacgccgggcgcccccagagccctctccacgctgggctcccccagcctcttcaccacgccgggtgtccccagcgccctcactaccccaggcctcactacgccaggcacccccaaaaccctggaccttcggggtcgcgcgcaggccctgatgcggagtttcccactcgtggacggccacaatgacctgccccaggtcctgagacagcgttacaagaatgtgcttcaggatgttaacctgcgaaatttcagccatggtcagaccagcctggacaggcttagagacggcctcgtgggtgcccagttctggtcagcctccgtctcatgccagtcccaggaccagactgccgtgcgcctcgccctggagcagattgacctcattcaccgcatgtgtgcctcctactctgaactcgagcttgtgacctcagctgaaggtctgaacagctctcaaaagctggcctgcctcattggcgtggagggtggtcactcactggacagcagcctctctgtgctgcgcagtttctatgtgctgggggtgcgctacctgacacttaccttcacctgcagtacaccatgggcagagagttccaccaagttcagacaccacatgtacaccaacgtcagcggattgacaagctttggtgagaaagtagtagaggagttgaaccgcctgggcatgatgatagatttgtcctatgcatcggacaccttgataagaagggtcctggaagtgtctcaggctcctgtgatcttctcccactcagctgccagagctgtgtgtgacaatttgttgaatgttcccgatgatatcctgcagcttctgaagaagaacggtggcatcgtgatggtgacactgtccatgggggtgctgcagtgcaacctgcttgctaacgtgtccactgtggcagatcactttgaccacatcagggcagtcattggatctgagttcatcgggattggtggaaattatgacgggactggccggttccctcaggggctggaggatgtgtccacatacccagtcctgatagaggagttgctgagtcgtagctggagcgaggaagagcttcaaggtgtccttcgtggaaacctgctgcgggtcttcagacaagtggaaaaggtgagagaggagagcagggcgcagagccccgtggaggctgagtttccatatgggcaactgagcacatcctgccactcccacctcgtgcctcagaatggacaccaggctactcatctggaggtgaccaagcagccaaccaatcgggtcccctggaggtcctcaaatgcctccccataccttgttccaggccttgtggctgctgccaccatcccaaccttcacccagtggctctgctgacacagtcggtccccgcagaggtcactgtggcaaagcctcacaaagccccctctcctagttcattcacaagcatatgctgagaataaacatgttacacatggaaaaaaaaaaaaaaaaaaa

SEQ ID NO: 5071 - DNA, 3703 bp, Homo Sapiens
  NM_022362
aatcgcctccggctgcgtgcccagcagccgccttccctctcggtgccaccgccccatttcaggccccgcccctccctggaactgcctaggcagaagccggcaggcacgtgaccccggcgccccgcccccttgcgcttccccggagattggctcgggaggcgcatgcgcggagagcccgtctcgagccaccgcccatatcccctcccacggtctctagttcgcgttatggccgctgccgcggctgtggaggcggcggcgcctatgggtgccctatggggcctcgtgcacgacttcgtcgtgggtcagcaagagggccccgctgaccaggtggctgcagatgtgaaatctggcaactatacagtgttacaagttgtggaagcccttgggtcctctctagagaatccagaaccccgaactcgggcacgagcaatccagcttttgtcacaggtgctactccactgtcacaccttgctcctggagaaggaagtggtacacctgatactgttctatgagaaccggctgaaggaccatcatcttgtgatcccatctgtcctgcagggtttgaaggcacttagcctgtgtgtggccctgcccccagggctggctgtttctgtgcttaaagccatcttccaggaagtgcatgtacagtccctgccacaggtggaccgacacacagtctacaatatcatcaccaattttatgcgaacccgggaagaagagctaaagagcctaggagctgacttcacctttggcttcatccaggtgatggatggggaaaaggatccccgtaatcttctggtggccttccgcatcgtccatgacctcatctccagggactatagcctgggaccctttgtggaggagttgtttgaagtgacatcctgttatttccctatcgattttacccctccacctaatgatccccatggtatccagagagaagacctcatcctgagtcttcgcgctgtgctggcttctacaccacgatttgctgagtttctgctgcccctgttgattgagaaagtggattctgaggttctgagtgccaagttggattctctacagactctgaatgcttgctgtgctgtgtatggacagaaggaactgaaggacttcctccccagcctttgggcttctatccgcagagaggtgttccagacggcaagtgagcgggtggaggcagagggcctggcggccctccactccctgactgcgtgtttgtctcgctctgtgctgagggctgatgctgaggacctccttgactccttccttagcaacattctacaggactgcaggcaccacctgtgtgaaccggacatgaaactggtgtggcctagtgccaagctgttgcaggcagctgcaggtgcatctgcccgggcctgtgactctgtcaccagcaatgtactgcctttactgctggaacagttccacaagcacagtcagagcagccagcggcggacaatccttgaaatgctcctgggtttcttgaagctgcagcagaaatggagctatgaagacaaagatcaaaggcctctgaatggcttcaaggaccagctgtgctcactggtattcatggctctaacagaccccagcacccagcttcagcttgttggcatccgtacactgacagtcttgggtgcccagccagatctcctatcttatgaggacttggagctggcagtgggtcacctgtacagactgagcttcctgaaggaggattcccagagttgcagggtggcagcactggaagcatcaggaaccctggctgctctctaccctgtggccttcagcagccacctcgtacccaagctcgctgaggagctgcgtgtaggggagtcaaatttgactaacggagatgagcccacccaatgctcccggcatctgtgctgtctgcaagccttgtcagctgtatcaacacatcccagcatcgtcaaggagacactgcctctgctgctgcagcatctctggcaagtgaacagagggaatatggttgcacaatccagtgacgttattgctgtctgtcagagcctcagacagatggcagaaaaatgtcagcaggaccctgagagttgctggtatttccaccagacagctataccttgcctgcttgccttggctgtgcaggcctctatgccagagaaggagccctcagttctgagaaaagtactattggaggatgaggtgttggctgccatggtgtctgtcattggcactgctacaacccacctgagccctgagttagctgcccagagtgtgacacacattgtgcccctcttcttggatggcaacgtgtcctttctgcctgaaaacagcttcccgagcagattccagccattccaggatggctcctcagggcagaggcggctgattgcactgcttatggcctttgtctgctccctgcctcgaaatgtggaaatccctcagctgaaccaactcatgcgggagcttttggaactgagctgctgccacagctgccccttttcttccaccgctgctgccaagtgctttgcaggactcctcaacaagcaccctgcagggcagcagctggatgaattcctacagctagctgtggacaaagtggaggctggcctgggctctgggccctgtcgtagtcaggccttcactcttcttctctgggtaacaaaggccctagtgctcagataccatcctctcagctcctgccttacagcccggctcatgggcctcctgagtgacccagaattaggtccagcagcagctgatggcttctctctgctcatgtctgactgcactgatgtgctgactcgtgctggccatgccgaagtgcggatcatgttccgccagcggttcttcacagataatgtgcctgctttggtccagggcttccatgctgctccccaagatgtgaagccaaactacttgaagggtctttctcatgtacttaacaggctgcccaagcctgtactcttgccagagctgcccacgcttctttccttgctgctggaggccctgtcctgccctgactgtgtggtgcagctctccaccctcagctgccttcagcctcttctactggaagcaccccaagtcatgagtcttcacgtggacaccctcgtcaccaagtttctgaacctcagctctagcccttccatggctgtccggatcgccgcactgcagtgcatgcatgctctcactcgcctgcccacccctgtgctgctgccgtacaaaccacaggtgattcgggccttagccaaacccctggatgacaagaagagactggtgcgcaaggaagcagtgtcagccagaggggagtggtttctgttggggagccctggcagctgagccctcagtcctggcctagactgttctgacaatctaacctgggattactaactgttgagccatcttccccaaagcagggaaaccactggtctctgactgcctttcccacagacacagcacaaatgctaggcctctgttgcatggctgtacaaagaacataagagtccatatttctagtggatttgtaaaataagtgtgtgtgagacacttgcgtttgaagaaagatctagggtcctgggtctcttgcatttatatgtcagaaaaggggcgatatgctgctgaggggtgagtgcatatgagtgtggccctgaggaccagggctggcagatgttgtctacctgctgaagaataaagatttcttttggtaaaaaaaaaaaaaaaaaaa

SEQ ID NO: 5072 - DNA, 1799 bp, Homo Sapiens
  NM_022366
ctagtgtttacttccgcttgacctggcccggacgccagaaaatgttccacgtgggataccctgcgtggggttcactgtagtagctgcactaggtgattcttggagcgggcctgagagacaaggacatgtggatcccagtggtcgggcttcctcggcggctgaggctctccgccttggcgggcgctggtcgcttttgcattttagggtctgaagcggcgacgcgaaagcatttgccggcgaggaaccactgtgggctctctgactcctctccgcagctgtggcccgaaccggatttcaggaatccgccaaggaaggcgtctaaggccagcttagactttaagcgttacgtaaccgatcggagattggctgagaccctggcgcaaatctatttgggaaaaccaagtagacctccacacctactgctggagtgcaatccaggtcctggaatcctgactcaggcattacttgaagctggtgccaaagtggttgcgctcgaaagtgacaaaacttttattccacatttggagtccttaggaaaaaatctggatggaaaactacgagtgattcactgtgacttctttaaactagatcctagaagtggtggagtaataaaaccacctgctatgtcttctcgagggctctttaagaatttgggaatagaagcagttccttggacagcagacatccctttaaaagtagttggaatgttcccaagtagaggtgagaaaagggcactttggaaactcgcatatgacttgtattcctgtacttctatatataaatttggacgaatagaagtaaatatgtttattggtgaaaaagaattccagaaactaatggcagatcccggaaatccagacttgtatcatgtattaagtgttatctggcaattagcttgtgagattaaggttctgcacatggagccttggtcatcatttgatatatacacccggaaagggccgctggaaaacccaaagcgtagggaattattagaccaattacaacaaaagctgtatcttattcaaatgattcctcgtcaaaatttatttaccaagaacttaacacctatgaactataatatattttttcacttgttaaagcactgttttgggaggcgcagcgccactgtaatagaccacttacgttcattgactccacttgatgcgagagatatattgatgcaaataggaaaacaggaggatgagaaagtagttaacatgcaccctcaagacttcaaaacactttttgaaactatagagcgttccaaagattgtgcttataaatggctgtatgatgaaaccctggaagataggtagcaactagactgtcgtttttggtggagcggttcatttatttggaaactatgacatgaaaaccaaatttgaaaactcacatcctttcagcagaaggtaactgttcttgtcttgcacaagccaggcagatcatttctcctaagctgatatcattggcttattggatgaaacagtgtctgctattttattcacaattgaataaaatgaaaacttcaattaattgtggatttgatcagattgaattcgttttgtttcagattcctatttaaatatttcacttgtactgttgctgatttttgcatcttcttgaagagcaagagtctgtacattattaagcttagaaagtaagcaaaactgatttactggtttgcctttcagtttgttgaaatgtattgtcaagtactgtacaatgaaattgtttaaattttaatatgatttaagctttttagaaattaaaatattttaaataagaaaaaaaaaaaaaaa

SEQ ID NO: 5073 - DNA, 3313 bp, Homo Sapiens
  NM_022367
gatctgtcacaactcgagaggtggaaattccggtttccctggcctagagctcccagtgctggctttggcatgatgggcacctggagggccgcactcccgttccagccaggctgagccttctgtcccctgcctctggggcctgggaaccccccttcttctttctcctgaatggcacccccgccctagaatccagacaccgagtttcccactgtggctggttcaagggtatgtgagagctccctggtgacagtctgtggctgagcatggccctcccagccctgggcctggacccctggagcctcctgggccttttcctcttccaactgcttcagctgctgctgccgacgacgaccgcggggggaggcgggcaggggcccatgcccagggtcagatactatgcaggggatgaacgtagggcacttagcttcttccaccagaagggcctccaggattttgacactctgctcctgagtggtgatggaaatactctctacgtgggggctcgagaagccattctggccttggatatccaggatccaggggtccccaggctaaagaacatgataccgtggccagccagtgacagaaaaaagagtgaatgtgcctttaagaagaagagcaatgagacacagtgtttcaacttcatccgtgtcctggtttcttacaatgtcacccatctctacacctgcggcaccttcgccttcagccctgcttgtaccttcattgaacttcaagattcctacctgttgcccatctcggaggacaaggtcatggagggaaaaggccaaagcccctttgaccccgctcacaagcatacggctgtcttggtggatgggatgctctattctggtactatgaacaacttcctgggcagtgagcccatcctgatgcgcacactgggatcccagcctgtcctcaagaccgacaacttcctccgctggctgcatcatgacgcctcctttgtggcagccatcccttcgacccaggtcgtctacttcttcttcgaggagacagccagcgagtttgacttctttgagaggctccacacatcgcgggtggctagagtctgcaagaatgacgtgggcggcgaaaagctgctgcagaagaagtggaccaccttcctgaaggcccagctgctctgcacccagccggggcagctgcccttcaacgtcatccgccacgcggtcctgctccccgccgattctcccacagctccccacatctacgcagtcttcacctcccagtggcaggttggcgggaccaggagctctgcggtttgtgccttctctctcttggacattgaacgtgtctttaaggggaaatacaaagagttgaacaaagaaacttcacgctggactacttataggggccctgagaccaacccccggccaggcagttgctcagtgggcccctcctctgataaggccctgaccttcatgaaggaccatttcctgatggatgagcaagtggtggggacgcccctgctggtgaaatctggcgtggagtatacacggcttgcagtggagacagcccagggccttgatgggcacagccatcttgtcatgtacctgggaaccaccacagggtcgctccacaaggctgtggtaagtggggacagcagtgctcatctggtggaagagattcagctgttccctgaccctgaacctgttcgcaacctgcagctggcccccacccagggtgcagtgtttgtaggcttctcaggaggtgtctggagggtgccccgagccaactgtagtgtctatgagagctgtgtggactgtgtccttgcccgggacccccactgtgcctgggaccctgagtcccgaacctgttgcctcctgtctgcccccaacctgaactcctggaagcaggacatggagcgggggaacccagagtgggcatgtgccagtggccccatgagcaggagccttcggcctcagagccgcccgcaaatcattaaagaagtcctggctgtccccaactccatcctggagctcccctgcccccacctgtcagccttggcctcttattattggagtcatggcccagcagcagtcccagaagcctcttccactgtctacaatggctccctcttgctgatagtgcaggatggagttgggggtctctaccagtgctgggcaactgagaatggcttttcataccctgtgatctcctactgggtggacagccaggaccagaccctggccctggatcctgaactggcaggcatcccccgggagcatgtgaaggtcccgttgaccagggtcagtggtggggccgccctggctgcccagcagtcctactggccccactttgtcactgtcactgtcctctttgccttagtgctttcaggagccctcatcatcctcgtggcctccccattgagagcactccgggctcggggcaaggttcagggctgtgagaccctgcgccctggggagaaggccccgttaagcagagagcaacacctccagtctcccaaggaatgcaggacctctgccagtgatgtggacgctgacaacaactgcctaggcactgaggtagcttaaactctaggcacaggccggggctgcggtgcaggcacctggccatgctggctgggcggcccaagcacagccctgactaggatgacagcagcacaaaagaccacctttctcccctgagaggagcttctgctactctgcatcactgatgacactcagcagggtgatgcacagcagtctgcctcccctatgggactcccttctaccaagcacatgagctctctaacagggtgggggctacccccagacctgctcctacactgatattgaagaacctggagaggatccttcagttctggccattccagggaccctccagaaacacagtgtttcaagagaccctaaaaaacctgcctgtcccaggaccctatggtaatgaacaccaaacatctaaacaatcatatgctaacatgccactcctggaaactccactctgaagctgccgctttggacaccaacactcccttctcccagggtcatgcagggatctgctccctcctgcttcccttaccagtcgtgcaccgctgactcccaggaagtctttcctgaagtctgaccacctttcttcttgcttcagttggggcagactctgatcccttctgccctggcagaatggcaggggtaatctgagccttcttcactcctttaccctagctgaccccttcacctctccccctcccttttcctttgttttgggattcagaaaactgcttgtcagagactgtttattttttattaaaaatataaggcttatgtatgaaaaaaaaaaa

SEQ ID NO: 5074 - DNA, 4554 bp, Homo Sapiens
  NM_022370
gagggcacgaagaggcaccgaccgtacccaggcgcaccggcaggagagcggcaccgtggctgccgcagcgcgcagaggctgtggaggggcttacggctcccagcccacgggtctcagacccaggggctgggcccccagcccccagtcccgatcccagctgggtcgagccatgctgcgctacctgctgaaaacgctgctgcagatgaacttgttcgcggactctctggccggggacatctccaactccagcgagctgctcttgggcttcaactcctcgctggcggcgctcaaccacaccctgctgcctcccggcgatccctctctcaacgggtcaagggtaggaccggaggacgctatgccccgcatcgtggagcagccgccagatctgctggtctcccgaggcgagcccgccacgttgccctgccgcgctgaaggccgaccccgacccaacattgagtggtacaagaacggggcgcgtgtggccactgtgcgggaggatccgcgtgcgcaccgcctgctgctgcccagcggcgccctcttcttcccgcgcatcgtgcacgggcgccgcgcgcggccggacgaaggtgtctacacttgcgtggctcgcaactacctgggggcagcagcgagcagaaacgcctcgctggaagtggcagtcctccgtgatgatttccggcagtctcctggaaacgtggtggtggcagtgggggagccagcagtactggaatgcgtgcccccccgcggccacccggagccttccgtgtcctggaggaaggacggtgcaagactcaaggaagaggaaggaaggatcacgatccgtggagggaagctgatgatgtcacatacactcaagagcgatgcaggcatgtatgtgtgcgtagcctccaacatggcgggagaacgggagagtgcggcagctgaagtcatggtactggagcgtccctcattcctgcgcagaccagtgaatcaggtggtcctggctgatgcccctgtgactttcctatgtgaggtgaagggggatcccccacctcgtctacgctggcgcaaggaggatggggaactgcccacaggcaggtatgagatccggagtgaccacagcctttggattgggcatgtgagtgccgaagatgagggaacgtacacctgtgtggcggagaacagtgtgggccgcgctgaagcatctggctccctcagtgttcacgtcccaccccagttggtgacccagccccaggaccagatggcagctcctggagagagcgtggctttccagtgcgagaccaaaggaaaccccccacctgccatcttctggcagaaggaggggagtcaggtcctgcttttccccagtcagtcacttcagccgacggggcgcttctcagtgtctccaagaggccaacttaacatcaccgcggtgcagcgtggggatgctgggtactacgtgtgccaggctgtcagtgtggctggcagcatcctggccaaggccctgctggagataaaaggagcctctttggatgggctgcctcctgtcatcctccagggaccagccaatcagacgctggtgcttggctcctccgtgtggctgccctgcagagtgactgggaaccctcaacccagtgtccgatggaagaaggatgggcagtggctgcagggggatgacctccagttcaagacaatggccaacggtaccctgtacatcgccaatgtgcaggagatggacatgggcttctacagctgcgtggccaagagttccacaggggaagccacatggagcggctggcttaagatgcgggaagactggggagtatcaccagacccccctacagaacccagttcccctccgggggctccctctcagccagtggtcactgagatcaccaagaacagcattaccctgacctggaagcccaacccacaaactggggctgcagtcacgtcttatgtgatagaggccttcagcccagcagctggcaacacatggcgtactgtggcagatggcgtgcagctggagacacacacagtcagcggtctgcagcccaataccatctacctgtttctggttcgagcagtgggagcctggggcctcagtgagcccagccccgtctctgagcctgtccgtacacaggatagcagcccctctaggccagtggaggacccatggagaggccagcagggactggcggaagtggctgtgcgcctgcaggagcccatagtcctgggaccccggaccctgcaggtgtcctggactgtggatggcccagtccagctggtgcaaggtttccgggtgtcttggagggtagcaggccctgagggaggaagctggacaatgttggacctacagtccccaagccagcaaagtactgtgctaagaggactccctccagggacccaaatccagatcaaggtgcaagcccaaggccaggaggggctgggggctgaaagcctctctgtgaccaggagcattcctgaggaggcccccagtggccccccacagggagtggcggtggccttggggggtgatggcaacagcagtatcactgtgtcctgggaacctccactcccctcccagcaaaatggggtcatcacggaataccagatctggtgcctgggcaatgagagccgctttcacctcaatcgatctgcagcaggctgggcacgctccgcaatgctccgaggactggtgcccggtctcctctatcgaaccctggtcgcggcggccaccagcgcaggcgtgggcgtgcccagtgccccagtgctggtgcagctgccgtccccgccggacctggagcccgggctggaggtgggcgcggggctggcggtgcggctggcgagggtgctgcgggagcccgccttcctcgcgggcagcggcgcagcctgcggggcgctgcttctcgggctctgcgccgccctctactggcgccggaaacagcgcaaagagctcagccactacacggcctcttttgcctacacaccggcagtgtccttcccgcactcagagggcctctctggagccagttccaggccacccatgggccttggccccgccccctactcatggctggcagattcgtggccccacccatctcgaagcccctcggcccaggaacccaggggaagctgctgccctagcaatcctgacccggacgacagatattacaacgaagcgggaatctccctgtatctagctcagacggccaggggcacggccgcccctggcgagggtcctgtctatagcaccattgacccagcgggggaggagctgcagaccttccatgggggcttcccccaacatccctcaggagatctgggtccctggagccagtacgctcctccagagtggagccagggggacagtggagccaagggaggcaaagtgaagcttctggggaaacctgtgcagatgccctctctgaactggccagaagccctgcccccacctcctccttcttgtgaactgagctgcctagaagggccggaggaggagctggagggcagctcagagccagaggagtggtgcccgccaatgcctgagagaagtcacctgacggagcccagctccagtggagggtgcctggtcaccccatcccgaagggaaaccccctctcccacaccttcctatggacagcagtccacagccactcttacaccctcacctcctgaccctccccagcccccaactgacatgccccatctccatcagatgcccaggagggtgccccttgggccgagttcccctctcagtgtatcccagcccatgctgggcatccgtgaagcgaggcctgctggcttgggtgctggccctgcagcctcaccccacctcagccccagtcctgcccctagcacagccagcagtgccccaggcagaacctggcaggggaatggggagatgactcccccacttcaaggaccccgtgctcgattccggaagaaacccaaggctcttccctacaggagggagaacagtcctggggacttgcccccaccacccttgccaccgccagaggaagaggcgagctgggccctagagctgagggcagcaggcagcatgtcctccctggagcgggagcgcagtggggagaggaaagcggtccaggccgtgcccctggcagcccagcgggtgctccacccagatgaagaggcctggctcccatacagcagaccaagcttcctgtcccggggccagggcaccagcacatgttccacggccggcagcaactcttccaggggctccagcagctctaggggctcccggggccctggccggagccggagtcggagtcagagccggagccagagccaaaggccaggacagaaacgccgagaggaaccaagatgacccttgttggggcattgagaatatcatgagtgccacggggaaggggagtagggatgtcttttcccccccagcagtgatgagtggggctagctgaagcccattggtttccacgatttcaattggctgagaaggcagagagctagctcctccctttctttctttttccacctgagacttgtttataaaaaacaaaacaataaaaagagtctgatcagagcccaggg

SEQ ID NO: 5075 - DNA, 2138 bp, Homo Sapiens
  NM_022371
agtgcgcactcagcccggcccgccggtcgccacagcaacaccaatcccgggttcaagcccgcctaggaagtgcggtccccgcctgaccgccccgggcttaagggagcctggctaggccggcagccggatggtcccgcagctcggggccggccatgcttcgcggtccgtggcgccagctttggctctttttcctgctgctgctcccgggcgcgcctgagccccgcggcgcctccaggccgtgggagggaaccgacgagccgggctcggcctgggcctggccgggcttccagcgcctgcaggagcagctcagggcggcgggtgccctctccaagcggtactggacgctcttcagctgccaggtgtggcccgacgactgtgacgaggacgaggaggcagccacggggcccctgggctggcgccttcctctgttgggccagcggtacctggacctcctgaccacgtggtactgcagcttcaaagactgctgccctagaggggattgcagaatctccaacaactttacaggcttagagtgggacctgaatgtgcggctgcatggccagcatttggtccagcagctggtcctaagaacagtgaggggctacttagagacgccccagccagaaaaggcccttgctctgtcgttccacggctggtctggcacaggcaagaacttcgtggcacggatgctggtggagaacctgtatcgggacgggctgatgagtgactgtgtcaggatgttcatcgccacgttccactttcctcaccccaaatatgtggacctgtacaaggagcagctgatgagccagatccgggagacgcagcagctctgccaccagaccctgttcatcttcgatgaagcggagaagctgcacccagggctgctggaggtccttgggccacacttagaacgccgggcccctgagggccacagggctgagtctccatggactatctttctgtttctcagtaatctcaggggcgatataatcaatgaggtggtcctaaagttgctcaaggctggatggtcccgggaagaaattacgatggaacacctggagccccacctccaggcggagattgtggagaccatagacaatggctttggccacagccgtcttgtgaaggaaaacctgattgactacttcatccccttcctgcctttggagtaccgtcacgtgaggctgtgtgcacgggatgccttcctgagccaggagctcctgtataaagaagagacactggatgaaatagcccagatgatggtgtatgtccccaaggaggaacaactcttttcttcccagggctgcaagtctatttcccagaggattaactacttcctgtcatgaaggctagaggaagacttcctggaactgcctttcttccactaacaggaccctgggacctgtaggagcaccccgtttgggactgtgaggtgtttgagggtgtggactggcatccagcagccactaacaaacacacaactggtgtgtaaaaggcaggccttacattagaagccaagccaatcctttttcttttttttggaggtcccaccgagatagataggaacttggattgctgaattcaaaaacagagcccattcttaagatcacttggtgccttaaagacacgcattccaaagtggaatgtggttgaagaaagtgggccaggtggttgaagaaagccatgtgggagctcagcaaatcccaagggcttattatgacactccagatggtctccttagcatctcagctcttctgcaaggaagagcttgggtgttaggcctcagaggctgtagggtccttgggttacagagccggggagaacgaagttctgtgacccaggggtggagaatacactctaggtttgcaggctggtgggctttcaaattggtacttccagaggaaagccaagctgcttctgttgtgagcgaatcagccaagagcctgaggctgaagggaaaagtacacagaggaagatattttacaaaccaggtcagtgtaggccaagacttatggtctacagattttggcgggggaggggggaccttttcaaagacaatagggggtcttgacatgtttgttgtatgtaaagatgataagattaaaatttttgattttcctaaaaaaaaaaaaaaaaaa

SEQ ID NO: 5076 - DNA, 1931 bp, Homo Sapiens
  NM_022372
gtagtgggtcagggagggcaccggaacagcgcgacccgacagcccgggaaacggacagccgtgtcagaagggcaggtgccagtgggcaggaggccggagagaaagccgcagcttccttccacctcgcgccgggcccgcggccgcgcacggggaccgctccgagttcctcccggcgggaaccccccgccccagaactttggtctcgtcccacccacccccgcccgcgccatggtctcgccctagggagccatcgataactctacgctcggcctcgatcgactcgctccggctcccctcgccgtcctggacacggcggagtgcggagccgcccgtaagatgctctgacctttgacccctgccgttcagctctagggcccgtgcaggccacaccatgaacacctccccaggcacggtgggcagtgacccggtcatcctggccactgcaggctacgaccacaccgtgcgcttctggcaggcccacagcggcatctgcacccggacggtgcagcaccaggactcccaggtgaatgccttggaggtcacaccggaccgcagcatgattgctgctgcaggttaccagcacatccgcatgtatgatctcaactccaataaccctaaccccatcatcagctacgacggcgtcaacaagaacatcgcgtctgtgggcttccacgaagacggccgctggatgtacacgggcggcgaggactgcacagccaggatctgggacctcaggtcccggaacctgcagtgccagcggatcttccaggtgaacgcacccattaactgcgtgtgcctgcaccccaaccaggcagagctcatcgtgggtgaccagagcggggctatccacatctgggacttgaaaacagaccacaacgagcagctgatccctgagcccgaggtctccatcacgtccgcccacatcgatcccgacgccagctacatggcagctgtcaatagcaccggaaactgctatgtctggaatctgacggggggcattggtgacgaggtgacccagctcatccccaagactaagatccctgcccacacgcgctacgccctgcagtgtcgcttcagccccgactccacgctcctcgccacctgctcggctgatcagacgtgcaagatctggaggacgtccaacttctccctgatgacggagctgagcatcaagagcggcaaccccggggagtcctcccgcggctggatgtggggctgcgccttctcgggggactcccagtacatcgtcactgcttcctcggacaacctggcccggctctggtgtgtggagactggagagatcaagagagagtatggcggccaccagaaggctgttgtctgcctggccttcaatgacagtgtgctgggctagcctgtgacccctcgggactgcctggtgcaggtggtggcagctggagggacccatgcagcacccaggtcagagcagaccctcccctgccggcctgcgccagctggacctgatggccccctgtggcgccttgacctgctgggccaggctgccctgggactctcagcccccagttgcttatccagatgtgacagagctcgacccaagccaggctgcacactcctggactgggctagcctgcactgcctgggaaagtcggccgagggcccaaagctgctgaggggtctgaggctggtgcccacccccaagctagtgtgttctctgcccctccctgcccgcgtttcagggcctcggtccatagagaacaccaccaccatggccaggtggaagggtttattagtccctgccagcagctgtcctccctggtgcaggtggcctggccagcccactggattggggacgggccaggctgggccaggtcgggggctcagtctgggaggtaataaaagcagaccgacacgcagatgttgctcgggaagcagaaaaaaaaaaaaaaaaaaaa

SEQ ID NO: 5077 - DNA, 762 bp, Homo Sapiens
  NM_022440
gtctgcgcggagtctgagcggcgctcgtcccgtcccaaggccgacgccagcacgccgtcatggcccccgcagcggcgacggggggcagcaccctgcccagtggcttctcggtcttcaccaccttgcccgacttgctcttcatctttgagtttgtgttctcctacatagccactctgctctacgtggtccatgcggtgttctctttaatcagatggaagtcttcataaagccgcagtagaacttgagctgaaaacccagatggtgttaactggccgccccactttccggcataactttttagaaaacagaaatgcccttgatggtggaaaaaagaaaacaaccacccccccactgcccaaaaaaaaaagccctgccctgttgctcgtgggtgctgtgtttactctcccgtgtgccttcgcgtccgggttgggagcttgctgtgtctaacctccaactgctgtgctgtctgctagggtcacctcctgtttgtgaaaggggaccttcttgttcgggggtgggaagtggccaccgtgacctgagaaggaaagaaagatcctctgctgacccctggagcagctctcgagaactacctgttggtattgtccacaagctctcccgagcgccccatcttgtgccatgttttaagtcttcatggatgttctgcatgtcatgcggactaaaactcacccaacagatctttccagaggtccatggtggaagacgataaccctgtgaaatactttataaaatgtcttaatgttc

SEQ ID NO: 5078 - DNA, 3475 bp, Homo Sapiens
  NM_022451
cttcggcacgtgtgtcattccccgggatttctgtagtaaccctgcttctggtgaacttgtctggccggcattcatttaaggcctaaggatgaaggcgagaagaaataaaaaacagattccaagctttcgcaagttaataaaaactagtaaagtcaaacttgaaaacaagctaaaaaataagcagtttaaacaacaaagcactctcaagaagtaccgaaaagaacagaggaaactaaggcaagctgtgaaagatgctgtgtctaagaaacccattccattggagaacccaaaggaaaagcgaccaggtaaaaggattgagagggaagaagaggaagaagaagaagcccttcctttagatatgatggatgaagatgacttacagttaatgaaggatttaggacaaagagtatcttttctaacaagagatctttcttctagtgagcctgttcatgcgaagaaacggaagcatgaacgcattatagataaatatgaaaaaataccaagaactctgcaaactgcaccagagaaggaactgattcatttacttcctatcaaagataaaagtggtataatcccacagactagggagaagccagttactgatagtaacaaagatgaagaggatcaagaagaagagagggaacttgaggaagagatcattgaagatcctattcaagagctgaccatagaagaacatttgattgagagaaagaagaaattacaggagaagaagatgcatattgcagccttggcatctgccatattatcagatccagaaaataatattaaaaaattgaaagaattacgttctatgttgatggaacaagatcctgatgtggctgttactgttcgaaagctggtaattgtttctctgatggagttatttaaagatattactccttcatataaaatccggcccctcacagaagcagaaaaatctactaagacccgaaaagaaacccagaagttaagagaatttgaagaaggcctggttagccaatacaagttttatttggaaaatctggaacaaatggttaaagattggaagcagaggaagctgaagaaaagtaatgtagtttccttaaaggcatacaaaggactggcagaagtcgctgtgaagagcttgtgtgagctgttggtggcactacctcattttaactttcacaacaacatcatcgtattgattgtccctctcatgaatgacatgtcaaaattgatatctgaaatgtgttgtgaagctgtgaagaaactctttaagcaagataaattaggccaagcttctcttggtgtaattaaagtgatttctggttttgtgaagggcagaaattacgaagttaggccagagatgttaaaaacatttttatgcctaagaatcaaggaagtagaagtgaaaaaagatacagaagacattaataaaccaaaaaaatttatgactttcaaagaaaagagaaaatctctatcaagaatgcagagaaagtggaagaaagcagaagagaaactagagcgagagcttcgagaggcagaagcttcagagagtactgagaaaaaacttaaactgcacacagagactctgaatattgtgtttgtaacctacttcagaatattgaagaaggcccagaggtcacctctcctgccagcagttctagaaggtcttgccaagtttgctcaccttataaatgtggaattttttgatgatctgttagtagttcttcatactctcattgagtctggtgacctaagctatcaagaaagtcttcactgtgtccagactgcttttcatattctttctggacaaggtgatgttctgaatattgatccattgaaattctacacacatctctacaaaacactgttcaaattacatgcaggtgctaccaatgaaggtgttgagattgtactccagtgccttgatgtcatgctaactaagcgcagaaagcaagtttctcagcagcgagctcttgccttcatcaaacgcctttgtacccttgctcttcatgttcttccaaattcaagtattggcattttagcaactaccagaatattaatgcatactttccccaaaacagatctactgcttgacagtgaatctcagggaagtggagttttccttcctgaactggatgagcctgagtactgcaatgctcagaacactgctctgtgggaactgcatgctctgcggaggcattatcatcccatagtgcagagatttgcagcccacctgatcgctggagcaccttctgaaggctctggagcactcaaaccagagttgagtcgaagatctgctactgaactttttgaggcatatagcatggcagaaatgacattcaatcctcctgttgaatcttcaaaccccaaaataaagggtaaatttttacaaggggattcatttttgaatgaagatttaaatcagctaatcaaaagatactccagtgaagttgctactgaatcgcctctggatttcacgaaatatttgaaaacatcactacactagtagaggaatgaagtcagtggactttcttgtatatttgtgtgtgcagatgtacataaagatgagttgttaacttaggatcttttctttttatacaaggaaagcttcctaagaatgtctaggaagaagaggaagaatgaccctttgcatggcacagggttctgcccctattctgaatatgtcattccatcaaggagatcaaaagcctttttttctccccagtatttggaaattactttcttgatgatgctgccttttaaaagcttcacgtacattatagttttttaaaaaaatctttggactggatcttactgaagtgcagttgctatattaaaattagggcatagagcacagaaaaatcaagaccatgagaagacattttaccatttagctactttttataactaaatactctttaaatatttttatttcaatactgtggatggaaatgagaagcattctaaatttgagttaatatatttttatgaagatatttgagaaaagaaaaaaatagcttgtattcaggttcattggcttttgctggatgatccacctaaagaagttacctaatttggccttttaaaaaaggtgttagtgtttattatagctactttcaaggaaagtttgaatatgattctagtctctaaagttcttcacgttttctgacattccctggagggtgactggggaagaattgctccagggtagaagaaccaggcccaagactttaccattctgatctagagacaaaggatactcaatgaggagcttttttcccctcttggaacaggtaaaatgctttttcttattaatataattataaaacagtattttatgtaacagctattcccatattctaggagtggcctaagaaatgcgtgtttcagtgactagattataaatattctctattgtgaatagttgaataaaacagctgtttttttctgcaaaaaaaaaaaaaaaaaaaaaaaaaaaaaaaaaaaaaaa

SEQ ID NO: 5079 - DNA, 2801 bp, Homo Sapiens
  NM_022457
gggaccgcggtggcggcggcggcctcgacagcggtagtgccttctactccgcttttttagtttcctccgccccctcccgtgggacgctgttgtgtggctgccttaaaaaaaaacgcaactttattgttcctcagccccacctccggctcggcgggcgtcctcaggatgcactgaggctgaggggaggggaggcggcggagggtcgaggtcgcggtccctctcctccgagcgcccggctggaggggagggagtcacgatgtctggtagccgccaggccgggtcgggctccgctgggacaagccccgggtcctcggcggcctcctcggtgacttccgcctcctcgtctttatcctcttccccgtcgccgccttccgtggcggtttcggcggcagcgctggtgtccggcggggtggcccaggccgccggctcgggcggcctcgggggcccggtgcggcctgtgttggtggcgcccgccgtatcgggtagcggcggcggggcggtgtccacgggcctgtcccggcacagctgcgcggccaggcccagcgccggcgtaggaggcagcagctccagcctaggcagcggcagcaggaagcgacctctcctcgcccccctctgcaacgggctcatcaactcctacgaggacaaaagcaacgacttcgtatgccccatctgctttgatatgattgaagaagcatacatgacaaaatgtggccacagcttttgctacaagtgtattcatcagagtttggaggacaataatagatgtcccaagtgtaactatgttgtggacaatattgaccatctgtatcctaatttcttggtgaatgaactcattcttaaacagaagcaaagatttgaggaaaagaggttcaaattggaccactcagtgagtagcaccaatggccacaggtggcagatatttcaagattggttgggaactgaccaagataaccttgatttggccaatgtcaatcttatgttggagttactagtgcagaagaagaaacaactggaagcagaatcacatgcagcccaactacagattcttatggaattcctcaaggttgcaagaagaaataagagagagcaactggaacagatccagaaggagctaagtgttttggaagaggatattaagagagtggaagaaatgagtggcttatactctcctgtcagtgaggatagcacagtgcctcaatttgaagctccttctccatcacacagtagtattattgattccacagaatacagccaacctccaggtttcagtggcagttctcagacaaagaaacagccttggtataatagcacgttagcatcaagacgaaaacgacttactgctcattttgaagacttggagcagtgttacttttctacaaggatgtctcgtatctcagatgacagtcgaactgcaagccagttggatgaatttcaggaatgcttgtccaagtttactcgatataattcagtacgacctttagccacattgtcatatgctagtgatctctataatggttccagtatagtctctagtattgaatttgaccgggattgtgactattttgcgattgctggagttacaaagaagattaaagtctatgaatatgacactgtcatccaggatgcagtggatattcattaccctgagaatgaaatgacctgcaattcgaaaatcagctgtatcagttggagtagttaccataagaacctgttagctagcagtgattatgaaggcactgttattttatgggatggattcacaggacagaggtcaaaggtctatcaggagcatgagaagaggtgttggagtgttgactttaatttgatggatcctaaactcttggcttcaggttctgatgatgcaaaagtgaagctgtggtctaccaatctagacaactcagtggcaagcattgaggcaaaggctaatgtgtgctgtgttaaattcagcccctcttccagataccatttggctttcggctgtgcagatcactgtgtccactactatgatcttcgtaacactaaacagccaatcatggtattcaaaggacaccgtaaagcagtctcttatgcaaagtttgtgagtggtgaggaaattgtctctgcctcaacagacagtcagctaaaactgtggaatgtagggaaaccatactgcctacgttccttcaagggtcatatcaatgaaaaaaactttgtaggcctggcttccaatggagattatatagcttgtggaagtgaaaataactctctctacctgtactataaaggactttctaagactttgctaacttttaagtttgatacagtcaaaagtgttctcgacaaagaccgaaaagaagatgatacaaatgaatttgttagtgctgtgtgctggagggcactaccagatggggagtccaatgtgctgattgctgctaacagtcagggtacaattaaggtgctagaattggtatgaagggttaactcaagtcaaattgtacttgatcctgctgaaatacatctgcagctgacaatgagagaagaaacagaaaatgtcatgtgatgtctctccccaaagtcatcatgggttttggatttgttttgaatatttttttctttttttcttttccctcctttatgacctttgggacattgggaatacccagccaactctccaccatcaatgtaactccatggacattgctgctcttggtggtgttatctaatttttgtgatagggaaacaaattcttttgaataaaaataaataacaaaacaataaaagtttattgagccacaaaaaaaaaaaaaaaaaaaaaaaaaaaa

SEQ ID NO: 5080 - DNA, 4909 bp, Homo Sapiens
  NM_022458
gactgcgcggcgcccgccctcccttagtcagagctgctcgtctgaggctgctgaggcgacggccggtgtcgtggtcgcggtacctgttccaacacggctcgcgggcccgtgccggctccggtccccggcgcggctgtccgagcccctgcggcgggcggacgatggtgtggcggagcacgcggacgcgggcggcgcggcggcgggcatgaaggaggatggaagggcaggacgaggtgtcggcgcgggagcagcacttccacagccaagtgcgggagtccacgatatgtttccttctttttgccattctctacgttgtttcctacttcatcatcacaagatacaagagaaaatcagatgaacaagaagatgaagatgccatcgtcaacaggatttcgttgtttttgagcacgttcactctcgcagtgtcagctggggctgttttgcttttacccttctcaatcatcagcaatgaaatcctgctttcttttcctcagaactactatattcagtggctaaatggctccctgattcatggtttgtggaatcttgcttcccttttttccaacctttgtttatttgtattgatgccctttgcctttttctttctggaatcagaaggctttgctggcctgaaaaagggaatccgagcccgcattttagagactttggtcatgcttcttcttcttgcgttactcattcttgggatagtgtgggtagcttcagcactcattgacaacgatgccgcaagcatggaatctttatatgatctctgggagttctatctaccctatttatattcctgtatatcattgatgggatgtttgttacttctcttgtgtacaccagttggcctttctcgtatgttcacagtgatgggtcagttgctagtgaagccaacaattcttgaagacctggatgaacaaatttatatcattaccttagaggaagaagcactccagagacgactaaatgggctgtcttcatcggtggaatacaacataatggagttggaacaagaacttgaaaatgtaaagactcttaagacaaaattagagaggcgaaaaaaggcttcagcatgggaaagaaatttggtgtatcccgctgttatggttctccttcttattgagacatccatctcggtcctcttggtggcttgtaatattctttgcctattggttgatgaaacagcaatgccaaaaggaacaagggggcctggaataggaaatgcctctctttctacgtttggttttgtgggagctgcgcttgaaatcattttgattttctatcttatggtgtcctctgttgtcggcttctatagccttcgattttttggaaactttactcccaagaaagatgacacaactatgacaaagatcattggaaattgtgtgtccatcttggttttgagctctgctctgcctgtgatgtcgagaacactgggaatcactagatttgatctacttggcgactttggaaggtttaattggctgggaaatttctatattgtattatcctacaatttgctttttgctattgtgacaacattgtgtctggtccgaaaattcacctctgcagttcgagaagaacttttcaaggccctagggcttcataaacttcacttaccaaatacttcaagggattcagaaacagccaagccttctgtaaatgggcatcagaaagcactgtgagacgcacagacggcgtcttctgccaccaagagacccgagaactccagattcacgacattcctgtcccatgtagaagcatttccattcaaccgtggcccctcttcagaacctagacctatcagtgccatttttttttcataatctacgaagaacttggctatggctgatcttttttaaatttaactttctgatggaccctgtagtttccagttaagtgcagattccttacagacatatagaacagcgcattcttctgtagacatttgctcatgttggtaaatacaatcacccatatgaaaaaattgttttcacctgatatgaaaatgttagaaaaggcaaactccgggacttctaaagatttacttaaatcccattatgtactttattcagaatgtagaagctgacttgaaaggcatccttggtactaagtgaagcttattcagaaaatgcatttttcaaatgcaatggcaactgcttgtagatatcatttttgcagtgtatgttggagctgtaatggttgcaattatgtttcttatttccttaaaagcaaaaagcgtagtttctgatttatgttatagaatgatactgattagactttgagccaaggggaaaatactaaattcttttaaacctggagccttagagagccacaggaatatcttctgttgtacagtctaataagctgtggtaggaagtatcatgtaatcacagtttaatgacagtttatgtatatatataattcagtattccctctgataacatagttgccagtgtttaatacacttgtaacttggatttttaccttataggctatatgtatactcagttttttaaagcatttttttcagagatcacttaattccccatgcttctgcaatgcatataaaaactataaatgccgagtggtagaaactcctctttcttcatagtcctcaggctttggttacatttgcatatgccatttgaagcctccagcttttaccagtttaacatccaaagttcacagcatcagcattcatggtgtaagaacagttttgcagtataacacgatctgataatcattcagttattaaattgtaaataattattgggatggtttcttggctttaagtccactgaataaaaactatgaaattgcactctgtgtcaaccatccactaggatagaataccgaaatctgtgcatgcaaaaataggagatgggcccatttgcacacaattcgtagttatgcagtctgctatataaatatgttcacatgcactgtgtgtatgaaaatagatggtctgtgttcagacaaaagtaaaacatttttttcaaattgttacatttaaaggttttctgggagaaatttatgaaacgcaggctgtgtctatttgacatcagaaatttccactttaaaccaaaataataagaaactttaatctgtatatttacaacctttgttgagtacacttcccccttatttatacgtctgcatttccttccgagcttcacatctttctaaaatgcagcttggttttaaaataaaagaacattcattttgtgattctaaacaagcttcagtaaataccaccagtatagtactggtgaatttctcagcataaaatcgacatacctaaaaagttaataaaattcagctcttttccaatttcattgttatgcctattgaagtattaattgccaggtttgatttttagtgaagcttggagtccatactttgagcagaccaagtgaagggaagaacagaaagaaactcaggagtagagtaatatcacttctcacttacaccactttcaggcacatccaaagagttcctagatacttggaaaatgtctgaaaatttttaagtaaaatactaaacttttcagtgtttagctcaactttttgttcatttggaagtttctctccatccgaggacttaagccagttttggatttgtaagccctgagtacaatacacttcctggaggcatcctcactgctgttgaagcaaaggatatgcatggggtggaaggacggcttcgaacctgggactcatatgccttgagaacaaatagattgttacagccttgggctgctgcgtaatcacggttcctcgaggctcttcctgagcacatgcccaagcatctgcctctggagagactgactccaaatgcaggtgcttccattggagctaggtcggaggctgctttatatgacgaactccagaaatggatgccagaatacggaggccaaacgttctgagtcctggtaaggacagtcgctctgggggtcctcattttactgcagttcctgcacgccagtgaaagagaggagatagaccctggaaggcagagctgcagatgctcatcatcaggtcaattctggagctacagttttgtttctgactggatagggatgcaccagtgactgtcacatcaagcagtccttttattctctctcctttagtatcgattttaaagggcattaggcactatggttccagagtttcttggggaaaacttgcagattcttattaattggttctgcaatacttaaataaattattttacaattataagttttcagattataacatttgtattaatttttactgattttccaagatacttcttagatttactatttacgtagctttatgtacattctctgtaaaaatagacctctaaatatgaggctttacatgaaatttgtacacacatacacactaatgttagctccttaaattgctgcactaaggtgctggttagtagagatggacggagcctctcgcgttttgctctcagatgtgttaaaggcgcacgtgtacctgctctcagcggcagtgcggcctccccatctgctgggtgcccatggccctccctgcagcctcagtgatgacctcgtctgccagggacacaggttttcatcatttacaggctcttatgtgctagttttgttggtagcacgttatttaatgcataaaggcagaattcttacaagtttttttttttaatgtgaacatagatgcagcaccgactttttaaacttgaaaaaactggtataatgttaacttttaaaaataacatttggacacactagtaattgatttttgtttacagattgttttgtttacaaattgttagtctttgtttctatgagatacttttagtgtgactttttaaatgtcttagaaattaaaagttgtacaaaaagtgatttcaaaaaaaaaaaaaaaaaaaa

SEQ ID NO: 5081 - DNA, 9902 bp, Homo Sapiens
  NM_022459
agaatgcagcgcatggcgcgtcattgaagagagaccatgatggcggcggcgctggggcccccagaagtgatcgctcagctggagaacgcggctaaagttctgatggcaccaccttccatggtcaataatgaacaacgccagcatgcagagcacatattcttatcatttaggaaatcaaaatcaccatttgcagtttgcaagcatattttggaaactagtaaagtggactatgtcctctttcaagctgccacagccataatggaagcagttgtccgagagtggattctcttggaaaaaggtagcatcgagtctctgcgaacattccttttaacctatgtcttacaaaggcccaaccttcaaaagtatgttcgggaacagattctactagcagtagcagtaattgtaaaaagaggatcattagataaatcaattgactgcaaaagcatttttcatgaagtcagccagttgattagtagtggcaatcccactgtgcaaactctggcctgttctattctgactgcgctattgagtgaattttcaagttcaagtaaaactagcaacattggattgagcatggaattccatggtaactgcaaaagagtttttcaggaagaagaccttcgtcagatcttcatgttaactgttgaagttctgcaggagttcagcaggcgggaaaacctcaatgctcagatgtcttcagtatttcagcgttaccttgcactcgccaatcaagtcttgagctggaactttcttcctccaaatttgggcagacattatatagctatgtttgaatcctcgcaaaatgtgctgttgaagccaacagagtcctggcgggagactcttctggacagcagagttatggagcttttcttcacagtacatcgaaaaatcagagaagattcagatatggcacaagattctctgcagtgccttgcccagttagcttctcttcatggacccatcttcccagatgaaggatcacaagttgattatctagcacacttcattgagggattactgaatactatcaatggaattgaaatagaagattctgaagctgtggggatctccagcattatcagcaacctgataaccgtgttcccacgaaatgttttaactgccattccaagtgaacttttctcctcctttgttaactgcctcacacacctcacttgttcttttgggcgaagtgctgcattggaagaagtgcttgataaagatgacatggtatacatggaagcatatgataaattgttggagtcctggttaactttggttcaagatgacaaacatttccataaaggcttttttacccaacatgcagttcaagttttcaattcctatattcagtgccacctagctgctccagatggcacaagaaatttgactgccaatggtgtggcctctcgtgaggaggaagaaataagtgaacttcaagaggatgatcgagaccagttttctgatcaactggccagtgtaggaatgctaggaagaattgctgcagaacactgtatacctcttctgacaagtttattagaagaaagagtaacaagactccatggtcagttacaacgacatcagcaacagttacttgcttcaccgggttcaagcactgttgacaacaaaatgcttgatgatctctatgaagatattcactggcttattttagttacaggctacctcttagctgatgatactcagggagagactccgctaatacctccagaaataatggaatattccattaagcattcatctgaagttgacattaatacaacacttcaaattttgggatctccaggagaaaaggcttcttccatcccagggtacaacagaacagattctgtgattaggctgttgtctgccattctcagagtttcagaagttgaatctcgagcaataagagcagatctcactcatctactaagtccccagatgggcaaagatattgtttggtttttaaaacgctgggcaaagacttatctcctggtggatgaaaaactgtatgatcagataagtctgccattcagtacagcgttcggagcagatacagagggttctcagtggataattggctacctcttacaaaaagtcatcagtaacctctcagtctggagtagtgagcaggaccttgcaaatgacactgtgcagctccttgtcactttggtggaaagaagagaaagggcaaacttagtaattcaatgtgagaactggtggaatttagctaagcagtttgcaagccgaagcccacctcttaatttcttgtcaagtcctgtgcagaggacattgatgaaggctctagtcttaggaggttttgcacatatggacacagaaaccaaacagcagtattggacagaggttcttcagccacttcagcagcgattcttaagagtgataaaccaagaaaacttccagcagatgtgtcagcaagaggaagtcaagcaggaaatcactgccacactagaggccctgtgtggcattgctgaggctacccagattgacaacgtagcaatcctgtttaattttttaatggacttccttaccaattgcattggattgatggaagtttacaagaataccccagagactgtcaatctcattatagaagtttttgttgaagttgcacataaacagatatgctatcttggagagtccaaagctatgaacttatatgaagcctgccttactttgttgcaagtgtattctaagaataatttagggcggcaaagaatagatgttacagcagaagaagagcaataccaagacctgcttctcattatggaacttcttactaacctgctgtcaaaagaattcatagatttcagtgatacagatgaagtgtttagaggacatgagccaggtcaagcagcaaacagatctgtgtcagcagcggatgttgtgttgtatggagtaaacctaattctgcccttgatgtcacaggatctcttgaagtttccaaccctttgtaatcagtactacaaattaatcacatttatctgtgagatttttcctgaaaaaataccacagcttcctgaggatctgtttaaaagtctgatgtactccctagaattaggaatgacatcaatgagttcggaggtttgccagctttgcctggaggccttgacaccgttagctgaacagtgtgcaaaagcacaagaaacagactcaccactttttctagcaacacggcactttcttaagctggtttttgatatgctggttttgcaaaagcacaacacagagatgaccactgcggctggcgaagctttctacacgttggtgtgtttgcaccaggctgaatattctgaactggtcgaaacattactatcaagtcagcaagacccagttatttaccagagattagcagatgccttcaacaagctcactgcaagcagcactcctcctacgctggatcggaagcagaagatggccttcttaaagagtttagaagaatttatggcaaatgttggtggtctcctttgtgtaaaataaacaacagaactttatgcttaatttagatcctttctgcaaagtgcactgaattgctgaaagttgacttgagtcttgtcctattcctcagttcatttggccattttggattttggagagcctgaaactttgatatgtatgtaatacagtgaaacaggagaggtcaacttggcatcagcttctgctgttaagtgttagccacaatctgtcatatatatgtcttttagattctgaatggtgatttaaaattttcaaaatgaaattccatatatgtgcaaacagatatgggcaccacgaaatacatatgcagtgccttttttccttttaacataggtggctagccaaagtttagaatttttgtcattaaatatgaaatggatatatgctaggcagtgtttctcaaaatctccatagatcgcctgcatcacttgaggagctggtgaaaaggcagattcttaggcccaactgtagaccttcagagtcagaatgtctggttgttgggcccaggagtcttcatgttaataagcttctccctttcgtcaccccaaaagttttgaatcaatgaaagagacattgaaaactcttaagaggttttgtgctttctagcttttcctccctttgatgattgggttttataattcagcaggaaggggaaacatcaccaggggtttgttggctttttcttagcttgctttcttgcttgcttgctttcttgcttttcttgctttctgtctctctctttcttttctctctctctctcacatcaacccagtgctgcaggttttgtgtaatacaagtcactaatcatactctgatgcctgaacttgaggaggaaaatacatgtatatttttgttccgtaaaaataaccttaggaactgtagccatttcattgccttaattttaagaggaaaatacaaaaacagctgatttgttttagtaagaaaccacgtcttgatgcttcagagttggtttagggtgttagctgctatgaacctgttgcccctttcgatcgtgtatttatgtaggtttatcagtgaaatgaaaggcttgtttccgtctagtctaactttttgagtgtgtttctatccagccacatagcccatatctactctaaatggcttgcttaagcaataattattttaaaggatgtgaatcactgattcacacagactattgcacgttggggcattaggggcaataattcttatccagacatgggagccagtgaatttaatttcagagattaaaaattcactttagatcctctagtttgatctcttaatcaggatttttatacagctgccaggctcccctaattcagtgtgccagcttacaatgtggaaatgaaagctaatttatacacagcaggcatatgaaactccactcattgcagtactttcacagcacagtgacaggtagaggactctggcacaggtgcactcatgaaactctgcttccaccatgttcctgacacctatctattaaaccattctgcaaatacggtttttctacctgattgcatatagcatatgtgtcattacatgtgatgctgtgcaaaactttgtataattctgtgttattaacagttaacaaaactggagcatctgaattacatccaacctgtgcatgtgatgttaggtagatgtgaatgcagggccttgggccataacttacatttctctcaatttgattagctttgagtcacaattaaggggaagcaaaaacatcttgaaaagactgctaggaaggaaattaatatcagtcatccagaagtacacgtttctgtattttaaaaaatactttgatgcatttatttttaggtgttttttttttccccttaaaaaacttgaagtgatatgcagcagtaatctatttgttttgcattgttcttggtgttttgtgtttcccagatccctcaagctttctcagctgttgtgaattatgtgtatctgtgtgtgtgctaagtacagtctctttaccaaagggcactgaaacacacaattgactggacaggtccacgcgccatgacaaaactataatcaagttattaaaactaaagaggagtgggaaaggaatgccttggtaagtaaaaaggcatctatatttaataacttttatccagatggcaacatatttgcaaaatttgcccagatcctattacaatactaaaaatagaaaatttcacctccatattcctgaggtgtaatttcattagactagttttagtttaaaaagaccttcttcagattggaccaaataatacttataagatcagcagaatgttgaatattagctcactggggtggggagaagccactaccattttttaggtgatggggatgccactgagttgcaacggctagaccttttcagggtggttgtgtccatgtttgcctgattggatgcttattcactttgtgttttcttttgttttattttgtccaattttgtctttagctgtgtttattaacttctccggtcttgttttgttttaatgctcttggcccagtgggtgtcaagaacactggcttaattcaagtcagttgattttttttctattaaaactgttgttaaaatattttttaaaacaaaaacattatttgtgccctcttttatatatgtcaaagggacactgtcaagtatttcatttttagatttttgttttataaaatttctgttgttcatatagtatcctttaacctctagttttccatacatcctttgtttgtttctcattttattttccttgacccatttatttcccaaggcacaatcactaaagactttgtactttcacagtctgttaatgtggtagcacctgtaactgtgttcttgttctgttaaaaggattgatttgcttttatagtccttgtgctggatgagtggctgcctcagtagcaaaactacctgacagtatttgacagtgtcctttccagcaccattatttgggtctttcagggtggccatctctgttagaagacagtagcatgttaacatcactgcattgagtttttgtctggtgtaaagtatgacttttaatgtaaacaaactgcaggtttttttcaaactaattttaagaatttagtcttatttcgttgtaaactgtgtatctaattatattacattactctgttcagatgggatggttactaccacttgtccatgattttcatttgaaaagcaagtatctatatcatttccccccagtcagcattatttaacactccccttaactgtctttgaactttctcttttaacaaaaatgtcaagtctttatagttgtaatatcaccatgtttcccatttctgttaatacttctatgaacccctaaagtattgaagggaactagctgtcagtttcaaggattacaagtttgagtctcctagtattcaacatcattctgaaccctgaaataatatttttctctgttaaacaatttttatctgtttgccacctctgttgttagaggtggttgtcaattgaccttactaagttagctgtctttgatgaggaattattgttattggttcctgaataaaacattaaccttttaagtcagaaggaacctcggtacttcttaaggtttgtttgtgttttctaaaaccagagaataaggaactgatttggctatgaggtttaacattataattttctgtaagctttcccacaaaaaaacattgttgatttgaggatataataatgttttaatctttttaaaatataagtggttattctctgacttggtaactatgttctgaaaacactgcatttaagaatttttaaaaattggttttctaaaattaaaatgtccaaattaggcatattgctgagctcaaattgatgtgaaatgccatggttccagttgaattttaagcatattttcatttagatataaaatatatgaagtatgctttgttgattatagtgagaacccatgacatagttaaccaaagaatatgtttggttcaaataaaaatagaagcttaatactgggcattcatactttttaaagagaatgaatgaagaaatcggtttcctgctgtagttctctatgggtaagtcttagtaaagacgagaatgctgaagtcggccgtggcgattccctcctaggaactgggaggtgtggcttgcccattacccgcttgaagctcacatctttaccctcctctcccactgtggtttgatcttcacctattcccaggccctcccagcaattggagaggtgtctttttttttggttttggttttttttctccccgtctgcattcttaggcctcttagctattaggaactgtcagatacatactagtagctaattttcctagcctgaaattatatactgcatctgcactatgtacctactagggatctgacctcaagtgttttctgagcccaggcttcctggtgtggtgtcttttaccacataaaattattacaaattgcaaatgttggtattgtgatttgattatctgtacaaagaaagaagctctatgcagtgagtttgtggtttaatggtcacaaaaatgttagcactgctaccactcagcacgtgtaaaattttttaaatttataaatattaaaattttaaacttacactaagacttttcagttttatttaaagacccagggatgagtgtactgtttaaatatttacctctattaacataactaatgaaggtataaaattgcatttagtttttcagaagatgctgcaatatgattttaggaaataaggctatgtattgagccagttataggctgaatatcaggttgataaaattttatttgtatttttaaaattcataaatgggagttaaaatgtgtcttttcactaaatatttttattacatttttgttttgaccatgtgtgatttgttcatgggtatttagctagactcttttatgaaatgcattgaaatggtgctagtttgtttaccattataggaagattgacactggggacattacacggtcctaaaataattttaaatttaaaaaaatgaagacatctgtacagataaaaatcaagatttgcatcaccttctgggagaacccgtggtactcacagaatatccagtattagaaatataaaaattttgtctatattttataatatttatctcagcccacagtcttagaaacagtttcacagttactagttaagtcattatctttggtgcatatttagtaaatacttttagcaagtcattctttttggcctttcagggaaagtggtgaattaccatattactgtgtgctagatagatccaccctttgcccagtgttaaatcttgtaaacatatgaagtgaaaagttaatttttaaagaaaatgcatctttaaaatgttcatttttaacctgaatttgctttgaatattctttgatttgtaatgttgttatttagcttatattgagatttattccactccaaaggtggataaagaaaagttgtttaagaaaaccaattagagtgtattttgaatttttgtttctttcattaccaagtgtggggccatacacacaggctaatcatctgtcatttgagacccacagatgatttcaaaggtcccaaataaatacacatctataactgttttttaaaagacatctttaatggtgctctccaaaaatacaattcggttgcttatgagtgatgcctttgacaggctgattagattataaaacagttttgtttttttaaacatagggtctcagattgagtcttgtgcattctatgtaatctcaaatggcagttcagtttgactttcttttaaaactaagtggaaatggtatatttggtgaaactaatgaaagaatcttttgctgggaaattccatacagcacccccagcagcatcctgtctcagtctggcgtataattcaacctcctactgagtgtccctgtaaattatttttaatatatagcatgagagtgaactgaggtaagtcattgatgtttcccagagatgatgaatgaacaaaagcaaataggatctgctaaacatttttattcccacagtagtgagcagttttgttcttgttttgataatgttcatttctgcctaatcttaggcttcaaatacacctttaagaaagcccaagatgtattgagtagtagaacttcttatttgtacacctgtttataactgcactgccctggatgttatggttatttctaaggactgacctggtaaagctacttgaactggtagactgcagggtagaggcagacctagattcaatgtctaactaagctgcttagggcttacattaatttccacaggtctgttatccatatcatgagtttataagtgttcctcccaaagaaaaaatttaaaagtgatggatgaaatataatagtagatgctcaataaattccattgtatttaaagattaaaaaaaaaaaaaaaaaa

SEQ ID NO: 5082 - DNA, 3415 bp, Homo Sapiens
  NM_022461
agtacgccgcgcgccactcctgcacttccccacccccacgaccgaacctggcttcgctaacgccctcccagctccctcgggcctgacttccggtttcctcgcgcgtccctggcgccgagcccgcggacagcggcagccccttttccggctgagagctcatccacacttccaatcactttccggagtgcttcccctccctccggcccgtgctggtcccgacggcgggcctgggtctcgcgcgcgtattgctgggtaacgggccttctctcgcgtcggcccggcccctcctgcctcggctcgtccctccttccagaacgtcccgggctcctgccgagtcagaagaaatgggactccctccgcgacgtgcccggagcagctcccttcgctgtggaagcggcggtgtcttcgaagaaaccggaagcccgtggtgacccctggcgacccggtttgttttcggtccgtttccaaacactaaggaatcgaaactcggcggccttgggggcggccctacgtagcctggcttctggttgtcatggatgcactggtagaagatgatatctgtattctgaatcatgaaaaagcccataagagagatacagtgactccagtttcaatatattcaggagatgaatctgttgcttcccattttgctcttgtcactgcatatgaagacatcaaaaaacgacttaaggattcagagaaagagaactctttgttaaagaagagaataagatttttggaagaaaagctaatagctcgatttgaagaagaaacaagttccgtgggacgagaacaagtaaataaggcctatcatgcatatcgagaggtttgcattgatagagataatttgaagagcaaactggacaaaatgaataaagacaactctgaatctttgaaagtattgaatgagcagctacaatctaaagaagtagaactcctccagctgaggacagaggtggaaactcagcaggtgatgaggaatttaaatccaccttcatcaaactgggaggtggaaaagttgagctgtgacctgaagatccatggtttggaacaagagctggaactgatgaggaaagaatgtagcgatctcaaaatagaactacagaaagccaaacaaacggatccatatcaggaagacaatctgaagagcagagatctccaaaaactaagcatttcaagtgataatatgcagcatgcatactgggaactgaagagagaaatgtctaatttacatctggtgactcaagtacaagctgaactactaagaaaactgaaaacctcaactgcaatcaagaaagcctgtgcccctgtaggatgcagtgaagaccttggaagagacagcacaaaactgcacttgatgaattttactgcaacatacacaagacatccccctctcttaccaaatggcaaagctctttgtcataccacatcttcccctttaccaggagatgtaaaggttttatcagagaaagcaatcctccaatcatggacagacaatgagagatccattcctaatgatggtacatgctttcaggaacacagttcttatggcagaaattctctggaagacaattcctgggtatttccaagtcctcctaaatcaagtgagacagcatttggggaaactaaaactaaaactttgcctttacccaaccttccaccactgcattacttggatcaacataatcagaactgcctttataagaattaatttggaagagattcacgatttcaccatgaggacacttatctctttcagtggtcctcccaagaaattatttaacaaactgaaaggagattttgattaaaattttgcagaggtcttcagtatctatatttgaacacactgtacaatagtacaaaaaccaacatagttggttttctagtatgaaagagcaccctctagctccatattctaagaatctgaaatatgctactatactaattaataagtaaacttaaggtgtttaaaaaactctgccttctatattaattgtaaaattttgcctctcagaagaatggaattggagattgtagacgtggttttacaaaatgtgaaatgtctaaatatctgttcataaaaataaaaggaaaacatgtttcttcaaattgcataatggaacaaatggcaatgtgagtaggttacatttctgttgttataatgcgtaaagatattgaaaatataatgaaataaaagcatcttaggttataccatctttatatgctattgcgtttcaatatttaagatttaaagtgattttttggtcacagtgttttgttgataaaatttttttagaattgaagtttgaattctaagacttgaaacaacctgatcactgaagccaactttgtcccagcacattccttaagtcctaattgggaaaaaaaaaaaaaaaaatgaaatagttgaaaaactctggggtgtaaacaaatgattgtaaccctacacactattcaataagtagtagaaggagcatcacacagatttcagtctaatctgcccttctgtgggccataatataaacataaatgtgtgtaatgataaaaagtcattttcttcaaagagactacagctagctgcacattgtgtagagcagcttctaaattgttagactttgtgttgaaatgtaatattctatttattgagaaagtgatttaaaattattatttttaatcatagaaatcagggtttgggctgtattgatattgtcgatcatgaaatgtccacacttattctaagtggccaattatttggaaataaagaaggaaataaagatggcttcacatggaaatttaagttctttcagggtggagatttacttggttcatacaccttttgcctgaattaaagtatttcatgtaggaggacttttatcctttttgatagacagtttcatatatcttgaactcaatatctcagatctcttctactgtattactgaatagcatacatacatagacaatgttcgccattcactagatatttttttctattatcttacacttattcaagcttgtctgtgattaatggaattggtgtcagatgctggaatttattctgaccaatgaacacagctgactcaggggagtacaatctcctgccaagtaatagaaccaaacccaatatgcataaaagaaatacaatactccaggctttagctgaaggaagcaactacctgtgtaataacaaagcagcaaaaactatttctcatgtggctgcataggctgtatattatatctgatctctaatgtagcttactggtttgccttttttaaaaccaaaattggaaattttcctttgtaaagaaaaaaagtcttatgagataattgcttgattaatgttttgaacaataccaagaaattgtttaattaaaataaatatttttgtttgaaattgaaaaaaaaaaaaaaaaaa

SEQ ID NO: 5083 - DNA, 3565 bp, Homo Sapiens
  NM_022468
gattcccgggcccacccgacccagcggcgcgaccctggccctccgggaccctccgctgactccaccgcgcacttcccgggacccccacacacatcccagccctccggccgatccctccctactcggtgccgggtgccccccgccctctccaggcccggatctcctcccccaggtccccggggcggccccagccaggcccccttcgaaccccgccggcggcccgggctggggcgcaccatgcggctgcggctccggcttctggcgctgctgcttctgctgctggcaccgcccgcgcgcgccccgaagccctcggcgcaggacgtgagcctgggcgtggactggctgactcgctatggttacctgccgccaccccaccctgcccaggcccagctgcagagccctgagaagttgcgcgatgccatcaaagtcatgcagaggttcgcggggctgccggagaccggccgcatggacccagggacagtggccaccatgcgtaagccccgctgctccctgcctgacgtgctgggggtggcggggctggtcaggcggcgtcgccggtacgctctgagcggcagcgtgtggaagaagcgaaccctgacatggagggtacgttccttcccccagagctcccagctgagccaggagaccgtgcgggtcctcatgagctatgccctgatggcctggggcatggagtcaggcctcacatttcatgaggtggattccccccagggccaggagcccgacatcctcatcgactttgcccgcgccttccaccaggacagctaccccttcgacgggttggggggcaccctagcccatgccttcttccctggggagcaccccatctccggggacactcactttgacgatgaggagacctggacttttgggtcaaaagacggcgaggggaccgacctgtttgccgtggctgtccatgagtttggccacgccctgggcctgggccactcctcagcccccaactccattatgaggcccttctaccagggtccggtgggcgaccctgacaagtaccgcctgtctcaggatgaccgcgatggcctgcagcaactctatgggaaggcgccccaaaccccatatgacaagcccacaaggaaacccctggctcctccgccccagcccccggcctcgcccacacacagcccatccttccccatccctgatcgatgtgagggcaattttgacgccatcgccaacatccgaggggaaactttcttcttcaaaggcccctggttctggcgcctccagccctccggacagctggtgtccccgcgacccgcacggctgcaccgcttctgggaggggctgcccgcccaggtgagggtggtgcaggccgcctatgctcggcaccgagacggccgaatcctcctctttagcgggccccagttctgggtgttccaggaccggcagctggagggcggggcgcggccgctcacggagctggggctgcccccgggagaggaggtggacgccgtgttctcgtggccacagaacgggaagacctacctggtccgcggccggcagtactggcgctacgacgaggcggcggcgcgcccggaccccggctaccctcgcgacctgagcctctgggaaggcgcgcccccctcccctgacgatgtcaccgtcagcaacgcaggtgacacctacttcttcaagggcgcccactactggcgcttccccaagaacagcatcaagaccgagccggacgccccccagcccatggggcccaactggctggactgccccgccccgagctctggtccccgcgcccccaggccccccaaagcgacccccgtgtccgaaacctgcgattgtcagtgcgagctcaaccaggccgcaggacgttggcctgctcccatcccgctgctcctcttgcccctgctggtggggggtgtagcctcccgctgatggggggagccatccagaccgaacagcgccctccacggccgagtcccccgccgctggacctggtcgggggttgtgaggcgctgcggaggccccttgtctgttcccacggacgggggctcgggcgcggactaagcaggggggatctcccgcgcaggggcggcggcggcggggaccggtcgcctggcgctgggctcagtctcctcagggtctgagaccccggcgctgccaccggaacccgccttcaggggcgcacgcgcgctgggaccatgcgtcggtcgtcgcccccgtcgttccctcccggctgccgccagggggcggtcggaccccgcctcccgagcccggggaggggcggggaggacaaggggcgggcccgcggcctcacccggagggacggcagccccggtcgcgcgctggccccgcaggaccttccttttccaggaagagccagcttttctcggagcgcagtcctgggactctccgcagccccgccccgcctggccactgcgtctggcattcctgggtcgttagaggacaggcctgactgcgaagctgtgccttgcccctctcccacccgcagtttctcaccccgttctgctcccacaaggcccccctacagtcactgccacactggtggggacctgggacccagacccggaaccagcccagatatcacccctgaggacccatgcgccacgtcctgggtggtggaatcagtggctggagggacgacccttgctctccaggctgttaaccttttccgttgctcccccgccacccacctcctcctccccaggccacccaacttgggcacctccctgggcccagaactgccttccattcaatggggaacccttctatccccaagaaccccttccctgcttgcaccctggagagaacagcttgactcccatcaactcaacgctggtggaaagacagggaccgaaccctggctcaggcctggtcattgcctcctcagcactccctcctgggaggccttagctctagagtgaggggtgggtggaacctgggggcacctcgttcaccctgtccccactccccacagttttaggatctaaatgattgcctctggaactattcttctagactatcccacatcagaatcactgggaaatttaagtttgcagatcccacactcaccctgaatcctcactcagggtggggtcaggaatctgcattttaactagtcgcggggattgtggggggcagtagctggctgtttcgtggcatttctgtggctctgcagtgttcctccaccccaggaccaatatgttcaggccacaccgatggcctgaaccccatgggtagagtcacttaggggccacttcctaagttgctgtccagcctcagtgaccccctagtgcttcctggagctgaggctgtgggcggctgtcccagcaaccatgcgaggggttgccccagttgctcatacaaacagatcagcatgaggacagaaggcaggagactttggtcagttacctgggaattctgggctgccaggaaacgatttgggcctctgtcagtttcttttccatgtatgaggagggggaaatttgtatattagaaacttattcatcccactcaggacaataaaaacgaatgtacaaaaaaaaaaaaaaaa

SEQ ID NO: 5084 - DNA, 10487 bp, Homo Sapiens
  NM_022473
acgcgggggagtgcagctggcaccatgggtgtgctccagagcaacttctgcttgctctgagccccctgccctgcctcccctttcaccatgtttcctctgacaagattttaagtacagcaattcaagaagatttctcctcctaaacgacatttatctgaagtctattgcctcttgattgctggaaaagaatcttaaaatcatttcaaaagtaacttataaacaaacttattaaaagtgatgaaaggagcattgaaattaattagcactaatttttcactgtgccaaagtgtgcagtgtccttcagaggaaacaataacagatctggtgagtgtgccatgccagtggggagaattgaatgtccctcatctccctctttccctagggacattagtcatgagtgccgagtgtgcggggtcacagaagtgggtctttctgcatatgcaaagcacatttctggccagttgcacaaagataacgttgatgcccaggaaagagaagatgatggaaaaggagaggaagaggaagaagattattttgacaaggaactcattcagttaataaaacaaaggaaagaacaaagtcgacaagatgaaccttccaatagcaaccaagaaataaactctgatgacagacgaccccaatggagacgagaagaccgaattccttaccaagacagagagagttacagtcagcctgcatggcatcatcgtggacctccacagcgggattggaaatgggaaaaagatggctttaataatactaggaaaaacagctttccacattctttgaggaatggtggtggaccaagaggacgttccgggtggcataagggtgttgcaggaggctcctcgacttggtttcacaaccatagtaattctggaggtggttggctttcaaatagtggagcagtagattggaatcataatggtacaggaaggaattccagttggctttctgaaggaacaggtggcttttccagttggcatatgaacaacagtaacggaaactggaaatccagtgtacgtagtacaaataattggaattacagtggccctggagacaaatttcaaccaggcagaaacagaaattctaactgtcaaatggaagacatgactatgctatggaacaagaaatctaataagtcaaacaaatacagtcacgacagatataattggcagcggcaagaaaatgacaaacttggtacagttgccacatatagaggtccttctgaaggatttacaagtgataaatttccttcagaaggcttactcgacttcaattttgagcagctggaaagccaaaccactaaacaagcagacactgctacttccaaagttagtggaaagaatggcagtgcggcaagggaaaagcctcgtcgctggacgccttacccttctcagaagactctggatttacagtcgggattgaaagacatcactggtaacaagtcagaaatgatagagaaacctctctttgattttagcttgataactacaggaatacaggagccccaaactgatgaaacacgtaattccccaacacagaaaacacaaaaagaaatacatactggatctcttaatcacaaggcctcttctgattccgctgcttccttcgaggtggtgagacagtgccccactgcagaaaaacctgaacaagagcatacaccaaataaaatgccatcattgaaatccccactccttccatgtccagccactaaatcattgtctcaaaagcaagatccaaagaatatctcaaaaaacaccaaaacaaattttttttcccctggagaacactcaaatccctcgaacaagcccactgtggaagataaccatggtccttacatatccaaactgcgtagttcatgtcctcatgttttaaaagggaataaaagtacatttggctctcaaaagcaatctggtgataatttaaatgatactttacgaaaggccaaagaggtgctacagtgtcatgagtcattgcaaaatccacttcttagcacttctaaaagtaccaggaactatgcaaaagcaagtagaaatgtagaagaatctgaaaaagggtctttgaaaattgagtttcaagtgcacgcactagaagatgaaagtgatggagagacatctgacacggaaaagcatggaacaaaaattggaaccctaggttctgcaactacagaattgttatctggcagcactcgaactgctgatgagaaagaggaggatgaccgcatcctgaagacttctagagagctatccacttccccatgtaatcccatagttcgccagaaagaatctgaattacaaatgacatctgcagccagtccacaccctggcttattgctagacttgaaaacctctctagaagatgcacaggttgatgactctattaaatctcatgtatcttatgaaacagaaggctttgagagtgctagcttggatgcagagcttcaaaaaagtgacatcagtcagccctcgggccctctcctgcctgaactaagtaagcttggctttcctgcctcacttcagagggatctaacccggcacattagtttgaagagcaaaactggagtacaccttcctgagccaaacctcaatagtgcccgccgcattcgcaatattagcggtcaccgaaagagtgagacagagaaggagtctgggctcaagccaaccctacggcagattctaaatgcatctcggagaaatgtcaactgggaacaggtcattcagcaagtaaccaagaaaaagcaagagctgggcaaaggcttacccaggtttggcatagaaatggtaccccttgttcaaaatgaacaagaagccttagatttggatggggaacctgatctgtccagtctagaaggattccagtgggaaggtgtttccatttcctcgtcccctggcttggcaagaaagcgaagcctttctgagagcagcgtgatcatggacagagctccttctgtgtatagcttcttcagtgaggaaggtacaggcaaagaaaatgagccccagcagatggtttcacctagtaactcattgagggctggacagagccagaaagcaaccatgcacctcaaacaagaagtgacacctcgggctgcctccctccgaacaggtgaaagggctgaaaatgttgctacccaaaggcgacatagtgcacaattatcctctgaccatataatacctttgatgcatttggcaaaagacttgaacagccaggagaggtctataccaccgtcagagaatcagaattcccaggagagtaatggagagggaaactgtctgtcatcaagcgcatcctcagcccttgcgatctccagtttagcggatgcagccacagatagtagctgtacctctggtgctgaacaaaatgatggccaaagtattagaaagaaacgaagagccactggagatggatcttctcctgaactcccaagtcttgagagaaaaaataaaagaaggaaaattaaaggaaaaaaagaacgttctcaggttgaccagctgctgaatatttctttaagggaggaagaacttagtaagtcattgcagtgcatggataacaatcttctgcaagcccgtgcagcccttcagacagcttatgtggaagttcagaggctacttatgctcaagcagcagataactatggagatgagtgcactgaggacccatagaatacagattctacagggattacaagaaacatatgaaccttctgagcacccagaccaggttccctgtagcctcacacgagaacgaaggaacagtagatctcaaacatccattgatgccgcactgctgcccactccctttttcccactttttctggagcctccatcttcccatgtgtctccatcacccaccggagcctctcttcaaataaccacgtctcctactttccaaacccatggcagtgtccctgctccagactcatcagttcagattaaacaagagcccatgtctcctgaacaagatgagaatgtgaatgctgtgccaccaagctctgcctgcaatgtgtccaaggaattactggaagctaatagagagatcagtgacagttgtccagtttatccagtcatcactgctagattgtccttaccagagtcaacagaaagtttccatgagcctagccaagaactgaagttttctgtggagcaaagaaataccagaaacagagaaaactctccctcttcccaatcagctggtctttctagcataaataaagaaggggaagagccaaccaaaggcaatagtgggtctgaagcctgtaccagttcttttctaagattgtcttttgcttcagaaacccctttggagaaggaaccccactctccagctgaccagcctgaacaacaggcagaatccactttgacatcagctgagactaggggaagcaagaaaaagaagaaactccggaagaagaaaagtctacgggctgcccatgttcctgagaatagtgacactgaacaggatgttttgactgttaaacctgtaaggaaagtaaaagctggaaagttaattaaaggggggaaagtaacaacctccacttgggaagacagcaggactggtcgggagcaggagagtgtcagagatgagccagatagtgactcgtctctggaagtcctagaaattcctaatcctcagttagaagtagtagccattgattcttcagaatcaggagaagagaaaccagacagcccatctaaaaaggatatttggaactctacagagcaaaacccactagaaacgtctcgttctgggtgtgatgaagttagctctaccagtgaaattggcactcgctataaagatggcatccctgtaagtgtggcagaaactcagactgtgatctcctccataaaaggatcaaagaattcttcagaaatatcttcagagccaggagatgatgatgaacccacagaaggaagctttgagggacaccaagctgccgtaaatgcaattcagatatttgggaacttgctatatacctgttcagcagataaaactgttcgggtttataatctggtgagtcggaaatgtattggtgtctttgagggtcatacctccaaagttaactgcctcctggttactcagacctccgggaagaatgctgccctttacaccgggtccagtgaccataccatccgctgctataatgttaagagccgagagtgtgtggagcagttacagctggaagaccgggtcctctgcctccacagtagatggcgaatcctctatgcgggactggcaaatggcactgtggtcaccttcaacataaagaacaacaaacgacttgagatctttgaatgccatggccctcgggcagtcagctgtcttgctacagctcaggaaggtgcccgaaaactgctggtcgtggggtcttatgactgcacaattagtgtacgcgatgcccggaatggactgctcctcagaactctggagggccatagcaaaaccattctttgcatgaaggtggtgaatgatctcgtgttcagtggctccagtgatcagtcagtccatgctcacaacattcacactggtgagctcgtgcggatctataaaggtcacaatcatgcagtgactgtggtgaatatcctaggaaaagtgatggtgactgcttgcctggataaatttgttcgtgtctatgaattacagtctcatgatcgattacaagtttatggaggacacaaagacatgattatgtgtatgaccatccataaaagcatgatttacactggctgttatgatggcagtattcaggccgtgaggcttaatctgatgcagaattaccgctgttggtggcatggttgctctctgatatttggcgttgtagatcatttaaaacaacacttgctgaccgaccacactaatcccaacttccagactctgaaatgtcgctggaagaactgcgatgcttttttcactgctaggaaaggatccaaacaggatgctgcaggacatattgaacgacatgctgaagatgacagcaaaattgattcatgaagttttttgcctcccacgttgggaagtcattagttgaactattttcacattggccccccacacaggccactctcttccctttcttggtgaagtaaggaaggagaaagtggttactagccaggcatacccctagcataagtctgggcagctctatgggatgataaattacacttttaagttcttgctggaggttttaaatagatttagacaaatgttaaggaaccatacttctctgggacagcatggcatatagtgatatatgctatttgcgttctccagatgtttattgaagatacagatcctaattggttacccagtttgaccctaatcatatgtatattttattgatttcagtttgcaatttttaatttatgttcttatgatggtttaaacctatagtcaggcttttaagtacaagtttgtttaagtgccagactttgaggatcagttttaatttctccatttgtaatagctgggtatttaaactggaagcaaatagttttctttcttaacaattatgtgcagtgtgtgtcactgttttcttgctttatagatagagctggctttaagtgctaaaggacacagtagatttttgacaaacagtggctgctctgctgactatcttttaggaattcaggaagcaaatcacatagtgacaagtccttacagacaccacttctagtaaatctctgtaaatgtggatagaaagctcagtgtgaggcagtgcgtagacctaacgtctacctttacatctgctgttgaacctgggcactacctgttacagatcctgtcaggctgttgaactggaggtgtacctttatcttcctttctagtgtctgaccctgcaagcctaatgttggtttgaacccttttggtttgttcagttgccagcctccatctctcccactgtatggccgtgcctagaccgatggcagccatcgaatattcctctgggctcacggggtgttttccacccccctgcagcaactaagatggtgggggagagggggttagaataaagcatctgaatacagttttcaggacctcaagcagacttcctagagacttgtttctgagacagttctttgccttcacttccctgctagctgggaaagaagagtggagcagagactctgcctggccactgagaacagccaaattcacaaaccctcagtggggctttgtttttggattttctccggactcatcagtaaacctgtagaagtgtcgctttccagccttttgtttctggatcctcaaaactcagaacgtggccgggcgtggtggctcacgcctgtaatcccagcactttgggaggctgaggcaggcagatcacctgaggctaggagttgcagaccagcctggccaacatggcaaaaccccgtctctactaaaaatacaaaaagccgggcgtggtgggcgcctgtaatcccagctgctcaggaggctgaggcaggagaatcgcttgaacccgggaggcagagattgcagtaagctgagatcgtgccactgcactccagcctggtgacagagtgagactccgtctcaaaaaaaaaaaaaaaaactcagcttcttcagagagataaaattgggggaggagcccagggccacataccaagctttgggacatggtgcctcatgctctctgggattgcagaccatccaggtctgtcttcgcccctgttagtgcacatatatccactcacatgtcttccctcaggctatcgggcagggggacttcaccagggggtttatggataggcttcaagagggtctgtgagcccccagaaattgtgtgtgagactgagtatgtgttcttttttccaggaaaggctccagtggttcttacttgatccaaaaaatgtcaagaattaatctaggaggccgggcctggtggctcacacctgtaatcccagctctttgggaggccgaggcgggtggatcactcaaggtcaggcatttgagaccagcctggccaacatagtgaaaccccgtctctattaaaaatacaaaaattagctgggtgtggtggtatgtgcctgtagtctcagctactcaggaggctgagacaggagaatcacttgaaccctggaggtagaagttgcagtgagccaagatcatactactgcactccagcctgggcgacaagagtgaaactccacctcaaaaaaaaaaaaaaaagagttaatctaggagataatgaatggcctagtactagataatatatggccccacaagctcttgacttctgtccttggggaaagccattttgttaaccacactagtgagatttacatgatgcttaatggagaacagagaagatcttgttgcaaaaggtgtattaaatatttgtgctgtttctgtatgagattgagaagcttttcccacctctcacccctatttcctataaggatatccagagaagccaaactgttctgtgggtttgggaatggtcatttcccgggaaaatgcatctggatcgatgactaaacctggcccttttctctgggctgtagtgaagccgcattttcacgctggctggcagtgtgctgagagcctcgaatgctctgcggcgtagtgcccttctgccctgcctgacgatgtatcgaaaagatgagagtgaaggagactttgtgcagcaggaaacgggtaggtgaggtgttgggcagttgtgggaacttctgagagtattacagagtggtagaatcggtaagaactctgatttggacttcgctttggtggaactgtgtgcctatacctgcctgtgtgtgtgcaagtgtgcaggttcctttgtatgtatgtgtacgtgtgggaacctgtgtttgtcatatttttcttcatttcacaaaggctttttttgaagcagtggcagtatgcctttgtttcaagaacacatgaaattcttttaacaccagattagtgtgttaccccaaatgaacggttctagccctctattaagaaataaagggaccataagcattttggctgcttatggctgtgtgttactacttacaagagtcttgaaaattatacagaactttgccttctttttttaatgtcttccacaatgttgtgactgattataaccctgtttcccctcagagaagagctatggctcagggatctgtgttgactctggcatttagtggctttgtgaaggaaagaaaccattaaatgacctgacaaaaactgactcatgtctttaaagtagttgaagccacttttagaatgttactctcggttgcttttgtctaattctaatggcttaaagccaagaaaaccatagtataaatctttttgtgtacctatgctagtgtttaaatggcagttcgttgtgataaagtatcagtcacttcaagttttctgtgaaagtttttaattaggttaaaaataattttggcatacgtctctactcagtttataaagcagttccacaccatgcaaacaaaactctaacagcaaaggttatcttgacctgatgttacttgaatctgagagaaagtcattacttactactgcactcctgcttttgtgggaaaaattttcttcttccccagaagagttaacagttgagtgttcagctcctgacttacctttaatttagaggcaatattattactgtttaagtgattatttgcttaacacaggttttattttgtctttttgctggtagattatacaagggacaactttagtgatgaggcatgtggatgatttggtgggagtaggtatatacttagtggaatggtttattttatggaagagaattcattggaggtgagattgaagtatattgtgaagtgggatttgaacagcacatatgctctggtttgctcaaataactgcagtttatgcttacatctaaattttgtttctgttacctaaacgggagcttctagaattacgaaggccatacctgccacatttataaaataatggttttatccctgcccccaaatcatcaggttcctcgggtttaagagaagtggtctaatagacaggaatagaagttgtggtggaggtgatttgggatagactaggtttccttatgcaagtggatatgagctcctcatagaaaccagacctactgtattagacagtaacctctaacctcacctccaagcccaagtatatggccctgctgggttacctggtgactacatttcccagattcactctaaattcaaggtagtgacccaaataaattgggaaaggagggggtcaaggaggaaaagctgttgaaaatctttctcctatttaagagaaatatatgccctagagctgctccagcacccttggtttctgatttttttaatattgaatatggattagaagaatgaaatcagatgacacctgactgcaaaaatgtttataagcaaatagccttcttacattttggtataaagctgtgaacttcgtaactttgtaaagcaagatataaagcaaatacaagaggaaaataaagtacttttactaattgaaaaaaaaaaaaaaaaaaaa

SEQ ID NO: 5085 - DNA, 1372 bp, Homo Sapiens
  NM_022488
cgggtgctgatgcgagtcggtggcagcgaggacattttctgactccctggcccctgacacggctgcactttccatcccgtcgcggggccggccgctactccggccccaggatgcagaatgtgattaatactgtgaagggaaaggcactggaagtggctgagtacctgaccccggtcctcaaggaatcaaagtttaaggaaacaggtgtaattaccccagaagagtttgtggcagctggagatcacctagtccaccactgtccaacatggcaatgggctacaggggaagaattgaaagtgaaggcatacctaccaacaggcaaacaatttttggtaaccaaaaatgtgccgtgctataagcggtgcaaacagatggaatattcagatgaattggaagctatcattgaagaagatgatggtgatggcggatgggtagatacatatcacaacacaggtattacaggaataacggaagccgttaaagagatcacactggaaaataaggacaatataaggcttcaagattgctcagcactatgtgaagaggaagaagatgaagatgaaggagaagctgcagatatggaagaatatgaagagagtggattgttggaaacagatgaggctaccctagatacaaggaaaatagtagaagcttgtaaagccaaaactgatgctggcggtgaagatgctattttgcaaaccagaacttatgacctttacatcacttatgataaatattaccagactccacgattatggttgtttggctatgatgagcaacggcagcctttaacagttgagcacatgtatgaagacatcagtcaggatcatgtgaagaaaacagtgaccattgaaaatcaccctcatctgccaccacctcccatgtgttcagttcacccatgcaggcatgctgaggtgatgaagaaaatcattgagactgttgcagaaggagggggagaacttggagttcatatgtatcttcttattttcttgaaatttgtacaagctgtcattccaacaatagaatatgactacacaagacacttcacaatgtaatgaagagagcataaaatctatcctaattattggttctgatttttaaagaattaacccatagatgtgaccattgaccatattcatcaatatatacagtttctctaataagggacttatatgtttatgcattaaataaaaatatgttccactaccagccttacttgtttaataaaaatcagtgcaaagaaaaaaaaaaaaaaaaaaaaaaaaaaaaaaaaaaaaaaaaaaaaaaaaaaaaaaaaaaaaaaaaaaaaaaaaaaaaaaaaaaaaaaaaaaaaaaaaaaaaaaaaaaaaaaaaaaaaaaaaaaaaaaaaaaa

SEQ ID NO: 5086 - DNA, 1854 bp, Homo Sapiens
  NM_022490
cttttccggcccgcagcgcggcctgggctcccgcgtgtttaaaagtgcgcttgtggctgctgctgtcttaactcctgtgcttggcggacagacaggcgagatggcggcggaggtgttgccgagtgcgaggtggcagtattgtggggcgcccgacgggagccagagagctgtactggtccagttctccaacgggaagctacagagtccaggcaacatgcgctttaccttgtatgagaacaaagattccaccaaccccaggaagaggaatcaacggatcctggcagctgaaacagataggctctcctatgtgggaaacaattttgggactggagccctcaaatgcaacactttgtgcaggcactttgtgggaattttgaacaagacctctggccaaatggaagtatatgatgctgaattgttcaacatgcagccactattttcagatgtatcagttgagagtgaactggcgctagagagtcagaccaaaacttacagagaaaagatggattcttgtattgaagcctttggtaccaccaaacagaagcgagctctgaacaccaggagaatgaacagagttggcaatgaatctttgaatcgtgcagtggctaaagctgcagagactatcattgatacgaagggtgtgactgctctggtcagcgatgctatccacaatgacttgcaagatgactccctctaccttcctccctgctatgatgatgcagccaagcctgaagacgtgtataaatttgaagatcttctttcccctgcggagtatgaagctcttcagagcccatctgaagctttcaggaacgtcacgtcagaagaaatactgaagatgattgaggagaacagccattgcacctttgtcatagaagcgttgaagtctttgccatcagatgtggagagccgagaccgccaggcccgatgcatatggtttctggataccctcatcaaatttcgagctcatagggtagttaagcggaaaagtgctctgggacctggagttccccacatcatcaacaccaaactgctgaagcactttacttgcttgacctacaacaatggcagattacggaacttaatttcggattctatgaaggcgaagattactgcatatgtgatcatacttgccttgcacatacatgacttccaaattgacctgacagtgttacagagggacttgaagctcagtgagaaaaggatgatggagatagccaaagccatgaggctgaagatctccaaaagaagggtgtctgtggccgccggcagtgaagaagatcacaaactgggcaccctgtccctcccgctgcctccagcccagacctcagaccgcctggcaaagcggaggaagattacctagacgcatgctttccagacagggcgttttggctgcatcacagccactggctggtcctattcatttccatttttatgtatgttttgaaaagaaaaggtccggggatggtggctcacacctgaaatcccagcactttgggaggccgaggcaggaagatcattgagctcaggagtttgaaaccagtctggacaacatggggagaccccatctctaccggaggaaaaaaaaaagagtcaggcctggtggtgtgcgcctgtaatcccagctactcgggaggctgaggcaggacgattacttgagcttgggaaatcaaggttgcagtgagctatgattgtgtggccacactccatcctgggtcacagagtgagaccttgtctcaaaaaagtaacataaggaaaaaagaagccttgctttagcacaggtatgaagccagaagccagcatctcaactgtgcttgtcttatgcagaaatataaagcgatggccaggttggacttc

SEQ ID NO: 5087 - DNA, 2929 bp, Homo Sapiens
  NM_022492
atttccgggtcactgtagatgcgatggcgccgattccaaagactgtggggcggatcaagctagactgctctctacggcccagctgcccactggaggtcgctgctgcacccaaactttgcaaggaattcggtccagaggattacggcgaagaggacatagtggattttcttcgacggcttgtggagagtgatccccagggcctgcaccggatccatgtggatgggagcagcgggcggctgcagctgtggcaccatgattacctcctgggccacttggatgatgaagggaaatcaactggacagagtgacaggggcaagggggctgagggactgggcacctactgtggtctccgcaagtccttcctgtatcctccccaagagtctgagccctgccctcaaagcccctctgcctctgccaccttccccagtgtctcagacagcctgcttcaggtggccatgccccagaagctcctggtgacagaagaggaagccaatcgcctggctgaggagctggtggctgaggaggagcgcatgaaacagaaagcagagaaaaagcgactcaagaagaagcgtcaaaaggaacggaagcgacaggagcgtttggagcagtactgtggggagcccaaggccagcactacctcagatggagatgagagccccccatccagccctggaaacccagttcagggacagtgtggtgaagaagaggactcactggatctatctagcacttttgtgtctctggctttgcgcaaggttggggattggcccctcagtgcccgcagagagaagggactgaaccaggagccccaaggcaggggtctggccctccagaagatgggtcaagaggaagagagccctccaagagaggagaggccccagcagagtccaaaggtacaggcatctccgggactgctggcagctgccttacaacagagccaggaactggcaaagttgggtaccagctttgctcaaaatggtttctaccatgaggccgtggtcctcttcacccaggccttgaagctcaacccccaggaccaccggttatttggaaatcgttccttctgccatgagcggttgggtcagccagcgtgggccctggctgatgcccaggtggcccttaccctacggcctggctggccccggggcctcttccgcctgggcaaggccttgatgggactacagcgcttcagagaggcagctgctgtgtttcaggaaactctgagaggtgggtcccagcctgacgcagcccgagagctccgctcttgccttctccacctcacactgcagggtcagcgaggaggaatctgtgcaccacctctgtcacctggggccctccagccacttccccatgctgagctggcaccctcaggcctaccttccctcaggtgccctcgaagcactgctttgaggtcccctggcctgtctccactcttgcattatccttcatgtcaccgaagccaccccaaccagcccctctcccagactcagagtagaaggccccatcctctcaagccccaggacccttcaaagggctgggacatcctgggacttgggctccagcatctgtctcaggccagatgagggggcaccggtccctcatagggcagggccatgtatatatcccttggtgggggacatagtgtggtgacagttcactgcatattttgagaccttattctctagatccatagttaatgatgccctggcagtcattcctcttgccatggggaagcttctgatgagagaaaggagccccacatccactgaaacatcctttggttctcaagcttcttctggaggcagtaaggaaaaataaaacccaccaaggctcaagaagggaactatagaaaagttcaggtttttaggctatagcagagacagtgagaaagcatctgggcctttctcttcctcttggtccaggggacctcattcaccaactagagcttggtgtacaggaacggggtcacagtgctgagggggcttgagtcccacctttcagcttgatggatgctcacctcttctcagccccagctcgtgccctgtttttctagccatagcccccagattactcacagctcctcatgccatttcctgtccagattgctatgtatgactctgacctctcttgtccagtggtctggtgctcacctcctctcactgctagaatattcaccaagggtttgcatttgggaagtcccttaccagctcctgcttagagctggtagggccatacatgtccacactcccaactggtggctctcccgctgaatggggcctcagcaggtgcccaagctgctacaaccttggccactctgtttctccaccccagcactgggcatggtaattagcctttccccatgttaatttattcagttttttcaagggtcaactgaattccccacttcctgggtaagaagcatgatctccttttaatttcacgtctaagatcctggcagcttcccctagctggttcctctgtagtcctgctgggactgtcagctcatttaaatgtgggtctgcagaaggctttaggtctcccccaacccccttacctttcacagaggaacctttcatcaggataaatgattattgctgccctgtgggtcttgctcaatactgttcatacctggagagagaaggtattgaaacatctcctttatgtgtgactttcccaaatttttaaaaattgtttatggtttaggccccttaaatactgtgtagcaggatgaagtctaccattaccagctgggtcaccttggatgggtctgtcaacatctaagcctcagttccctcacctgtaaaaatgagggtagtccctacctcataagggatattgtgaggatggaaagcgaaagtgtgagaaaatacctcccaagtgcctggtacatagtgggtgctaaataaaccactttttgtctgcaactgtc

SEQ ID NO: 5088 - DNA, 2187 bp, Homo Sapiens
  NM_022494
agagtcctggcgagggcgctggccgagaggtgctcggcttgtagcaggtcccgcactccagcctctcgctgccagggtttgctctctgcttgtcctgggctgaggtgtccatgacggagtcatccaaggaggaaaaaatctgttccgggtgagcccaggccgccccggatatgcgatggctgaggagcagacaccagggaccacactgaggttgggtttcagaccaagacactggattctcctagttaagataaagagctttgggtgcctgacagtgaaaatggtgtaatctgcgttaacagttcacagcttgaaggcatgacaattaaagaacacacatggacttgtggcacatggaaatgtgcgcacagaaaaaggaaatctataattcttttaaagtaggaaggcattcttccttgccaaaatgggtacgttctgttcggttatcaagtttgaaaatctacaagaattaaagagactgtgtcactggggtcccatcatagcccttggtgttatagcaatatgttctaccatggccatgattgactctgtgttgtggtattggcccttacatacaactggaggaagtgtgaatttcatcatgttgataaattggactgtcatgattctttataattacttcaatgccatgtttgtcggtccgggctttgtccctctggggtggaaaccggaaatttctcaggataccatgtatctccagtattgtaaagtctgccaagcatacaaggcaccacgttcacatcactgcagaaagtgtaacagatgtgtgatgaagatggaccatcactgtccttggatcaacaactgttgtggttaccaaaatcatgcttcgttcacactgtttctccttttagcaccactgggttgtatccatgctgctttcatttttgtgatgactatgtacacacagctttatcatcggctctcctttgggtggaacacagtgaagatcgacatgagtgcagcccggagagatcctcttccaattgttccatttggattagctgcatttgctaccaccttgtttgccttgggattagctttaggaacaaccatagctgttgggatgttgttttttatccagatgaaaataattctcagaaacaaaacttctattgagtcatggattgaagagaaggctaaagatcgaattcagtattatcaactagatgaagtctttgtttttccatatgatatgggaagtagatggaggaactttaaacaggtatttacgtggtcaggggtccctgaaggagatggacttgagtggccagtaagagaaggctgtcaccaatacagcttaacaatagaacagttgaaacaaaaagcagataagagagtcagaagtgttcgctataaagtaatagaagattatagtggtgcctgctgccctctgaataaaggaatcaaaaccttcttcacaagtccctgcaccgaagagcctcgaatacagctgcaaaaaggggaattcattttagccacaagaggtttacgatactggttatatggagacaaaattcttgatgattcctttatagaaggtgtttcaagaataaggggttggttccctagaaaatgtgtggaaaagtgtccctgtgatgctgaaacagatcaagccccagagggggagaagaaaaatagatagctgctgttaaaacaaaattatcctttaagtctgcttaattacttgaaaattgtacatattactaaagaattatgcaatgagcctactctggttaagatgttcttttcctcaaaggtgccctagtgccatgatttaaatatttttattaccattttgaaatggagaagccattctgcatatgcctttgaattcctgcccttctttaccacctcttcctccccctcaaaggaaaaacatttcatccaagtaagttaacggcattttctgtaggattttcttatgcactgcacactctggacctcacctgcagatacagttccccccttgccaggagcatctgcatgtggtacttctcttttccctcagttgatatttcttatatgatattctagatactatagaactcaatttgtcagattcagtataacctcagattttgttacctgtcttttaaaaatgcagattttgtcaaatcaaataaagatcaatggatgttgggtataaaaaaaaaaaaaaaaaaa

SEQ ID NO: 5089 - DNA, 3952 bp, Homo Sapiens
  NM_022495
aacgacgctcttgcgtaaaggcccggcccaagggaacgttcagggcgtctcggctttccccgctgctgcttctgctaggcccagtgcgagaccagagcacgagcgactcccgtcgtccccggccaggcagatgttggcctagtcctggcgcgaacgaagcgcgctatttccctgcttcctctaggccaagcctgctttacggcagggcccgcctcgggagcgagcacagaccggggcagcgaggccagccaggcgccgacgaggtccccgaacgcgcacgcgctccgttcagctccgggtggcggccgccggagtagacgttagccatggaaaccgagagctggcccgggcggggccgcggtgagctcgttattcggccgccgcagcttttctgcctccgcattcgggcactaaccaacctcccggcgggagcgcccagcccgagtttacctgcaaaaatgcggtccctgggatgccttcgcgtcttctcttccctcgggtgacttgaggtttgtggtaaatatgccagctctagaacacatgaatcagattttacacatcttgtttgtatttttaccctttctgtgggcacttgggactctgcccccacccgatgcacttctcttatgggcaatggagcaggttttagagttcggccttggaggctcatctatgtcaacccacttacggttattagtaatgttcatcatgtctgctggaacagctatagcatcatatttcattccaagcactgttggtgtggttcttttcatgactggatttggtttcttgctgagtctgaacttaagtgatatgggtcacaaaattggaaccaaatctaaggatttacccagtggtccggaaaaacatttttcatggaaggaatgccttttctacatcattatattagtcttggctcttttagaaactagcttgcttcatcactttgctggcttctcacagatttctaaaagcaattcccaggctattgtgggctatggtttgatgatattacttataatactgtggatacttagagaaattcaaagcgtatatatcattggaattttccgaaatcccttttatccgaaggatgtgcaaactgtgactgtattctttgagaagcaaactaggctcatgaagattggtattgtcagacggattttgctaactttagtatcaccttttgccatgatagcatttctttcattggacagttccttacaagggctccactcagtgtctgtctgtattggattcacaagagcctttagaatggtatggcagaatacagaaaatgctttattggagacagtcattgtatcaacagtacacttgatctccagtacagacatatggtggaacagaagcctggatacaggactcagactcttactggttggtatcatacgtgatcgtttgattcagttcatctctaaattgcagtttgccgtgactgtgcttttgacatcatggacagagaaaaaacaacgtcgaaaaacaactgccactttatgtatactcaacattgtcttttctccattcgtgttggtcatcatagttttttctacactactctcttctcccttactccctcttttcacccttcctgtgttcttggtggggtttccccgacctattcagagttggccaggagcagcaggcaccacagcctgtgtgtgtgcagatacagtgtactactaccaaatggtgcccaggttgactgctgtactgcagactgcaatggcagctggaagtttaggtctcctcctacctggatctcattacttgggccgttttcaggatcgtttaatgtggataatgattctggaatgtggctatacttactgctctattaacattaaggggttagaattgcaggaaacatcctgtcatactgcagaagctcgcagagttgatgaagtttttgaagatgcttttgagcaagaatacacaagagtatgttcccttaatgaacactttggaaatgtcttgacaccctgtactgttttgcctgtgaaattgtattctgatgccaggaatgttctatcaggcataattgattctcatgaaaacttaaaagaatttaaaggtgacctcattaaagtacttgtgtggatacttgttcaatactgctccaaaaggcctggcatgaaagagaatgttcacaacactgaaaataaagggaaagcacctctaatgttgcctgctttgaacactttgccacctcccaaatccccagaagacatagacagtttaaattcagaaacttttaatgactggtctgatgataatatttttgatgatgagccaactatcaaaaaagtaatagaagaaaaacatcagttgaaagatttgccaggtacaaatttgtttattccaggatcagtagaatcacagagggttggtgatcattctacaggcactgttcctgaaaacgatctttacaaagcagttctattaggataccctgctgttgacaaaggaaaacaagaggacatgccatatattcctctcatggagttcagttgttcacattctcacttagtatgcttacccgcagagtggaggactagctgtatgcccagttccaaaatgaaggagatgagctcgttatttccagaagactggtaccaatttgttctaaggcagttggaatgttatcattcagaagagaaggcctcaaatgtactggaagaaattgccaaggacaaagttttaaaagacttttatgttcatacagtaatgacttgttattttagtttatttggaatagacaatatggctcctagtcctggtcatatattgagagtttacggtggtgttttgccttggtctgttgctttggactggctcacagaaaagccagaactgtttcaactagcactgaaagcattcaggtatactctgaaactaatgattgataaagcaagtttaggtccaatagaagactttagagaactgattaagtaccttgaagaatatgaacgtgactggtacattggtttggtatctgatgaaaagtggaaggaagcaattttacaagaaaagccatacttgttttctctggggtatgattctaatatgggaatttacactgggagagtgcttagccttcaagaattattgatccaagtgggaaagttaaatcctgaagctgttagaggtcagtgggccaatctttcatgggaattactttatgccacaaacgatgatgaagaacgttatagtatacaagctcatccactacttttaagaaatcttacggtacaagcagcagaacctcccctgggatatccgatttattcttcaaaacctctccacatacatttgtattagagctcattttgactgtaatgtcatcaaatgcaatgtttttattttttcatcctaaaaaagtaactgtgattcttgtaacttgaggacttctccacacccccattcagatgcctgagaacagctaagctccgtaaagttggttctcttagccatcttaatggttctaaaaaacagcaaaaacatctttatgtctaagataaaagaactatttggccaatatttgtgccctctggactttagtaggctttggtaaatgtgagaaaacttttgtagaattatcatataatgaattttgtaatgctttcttaaatgtgttataggtgaattgccatacaaagttaacagctatgtaatttttacatacttaagagataaacatatcagtgttctaagtagtgataatggatcctgttgaaggttaacataatgtgtatatatttgtttgaaatataatttatagtattttcaaatgtgctgatttattttgacatctaatatctgaatgtttttgtatcaagtagtttgttttcatagacttcaattcataaactttaaaaaacttttaataaaatattttccttccttttcaaataaaaaaaaaaaaaaaaaaaaa

SEQ ID NO: 5090 - DNA, 4574 bp, Homo Sapiens
  NM_022497
agtggaacctggctctggggagaagccgcgtgagatccgcgcgggtgctagctagtcctttctcgtcgctgctcggctcgcggcccgtggggtcggccccgccaccgttgccgccatgcccatgaagggccgcttccccatccgccgcaccctgcaatatctgagccaggggaacgtggtgttcaaggactccgtgaaggtcatgacagtgaattacaacacgcatggggagctgggcgagggcgccaggaagtttgtgtttttcaacatacctcagattcaatacaaaaacccttgggtgcagatcatgatgtttaagaacatgacgccgtcacccttcctgcgattctacttagattctggggagcaggtcctggtggatgtggagaccaagagcaataaggagatcatggagcacatcagaaaaatcttggggaagaatgaggaaaccctcagggaagaggaggaggagaaaaagcagctttctcacccagccaacttcggccctcgaaagtactgcctgcgggagtgcatctgtgaagtggaagggcaggtgccctgccccagcctggtgccattacccaaggagatgagggggaagtacaaagccgctctgaaagccgatgcccaggactaaggcccacggtcactgtgggctggggtgatggtgtctgaccagtggggagattggaatgggattactttggcccagggaagcccctggttctgtccctggagactctggaaatccttttgcattaaaaggactttacacacctgtgtaaaaggatgtgggagaggagggtctgaagctgagctgctaaatgaatatccctgctctgctggtcaataaaacgcttcctaatagcagcttggcgtgtatctggtcctagtgaagaggaaggcctgtgtagcagaaaggctttgggcctgagaggttaaggccacagcctgttgacacctgttttggtcctgcgaccctttactggtctccgctggctttgaatcttcctctgggctctactctggagaacataagggctgctgtggttgagtctggctagcactgtctgtggttggcagtgtgtacacccctccgttcagttccttgggggtatttttcagaaatccaaaggcaacccttcgtgcagtgctcacttttttaagtacagttgattacccttgcctgctggggggcctagccatgggccagagatggaggagccccagtggctgacaggccagcctcactcaggcacgtacctgctgaccagtcagccactgccaacccatggcccagccactgtgtgcattagcagggaggtttgtaggccatggaggaaatgaggagacaccacctagtggagacattggggccctgctggggggatggtgtctatagctggctctgctggctccctcaggccctgcttaccaagctctggaggagggagtgctgcattactgagcaccttccttgttctttcctcataggacactgatgttactgtcactttagttatgctaaagtggaggtttcagcctccagaagacagcagagccttctagggtcaccttaagaataggtttagctaggctgggtgtggtggctcatgcctgtaatcccagcactttgggaggctgatgtgggcggatagttgagcccaggagttcgagaccagcctgggcaacatggcaagaccttgtctctacaaaaagtacaaaaattagatgggtgtggtgtttcgcgtctgtagtcccagctatttgggaagctgaggtgggaggatctcgagcctgcgagatcaaggctgcagtgaatcatgatcgtgcgctactgcactccagcctgggccacagagcaagactgtctcaagaaaaaaaattttttaaataagtttaattataaagtgaaggaccagttggaccacggacccctagaaactcagccaaggagacctgactttatctgagacaggaaggcagtggttaaaagaattaaaaaaggacagtggtgcttgacagagcaggactgaagttttcattcctctacctgctggggccttggtcaagtcctaaaagctttccaggtctgtaactggttttgtctgtaaaatggggaaaaggttaccttttctgccacatgaagtagctggctggtgaaatgatgtcatactacgatgtgtttcattaactgttggagattatcacattaaattgagcagatttggatcttttacatttgatgctcaagtttgattctgtaccagatctgggtttggggtgatggcttgtcgggggtgggaggggaaggtgggcagagactgatgtataatggacaggtgttccttgagtgacagacttacaaagggagtgtttaattgaaatctagcatcttgtctctctgctatcagcattttggctgggtggaaaaagctctcctccacagagagccctcccatgtctgctggtttcagttccccacccaactgactgaagtcttgaccttgataccacctgcctgggcgttctacttggctgcaagggctcttcagaaagcacctagttccttttggctttcatctgcagtgtaggtctccatagctagtgacacacaaagccttatgagagtattccttccctctagggcccaaagaggctgctaaccagcaggaatgtcctgaaccaaaaggagtggtgaccattctctagacagaataaatgtctggtccctaatgggacagataactagggtttgagttcaggcttgacacaggagcaatgggcagtgaggtggacagcccagaccctgaaaggacgtgtggagacagcagcagtcctgtggtgcagttactgcctgtgtggccagcttcacaggcagcagataatttgtggaaataaacattattttctttttttgttccctgtaggctacttgatcctggatagtttctctttaaacctttgtctttccctattttgtttagtagtgatgaaagatgggtttaaaatatacagaaatgggagaaaattaattagagaaaatgtgaggattttataattgataacatgttcttaattttacttgcacaagcagtgttcacagccttattctgaagtgaccacttttcttctctttgaggcactacctggcagcaccatctaaacctgtatcatctgctgtggtcccagttactcaggaggctgaggcaggaggatcacttgagcccaggaggttgaggctggagtgagccatgactgtaccactgcattccagcctgggtgacggagtgaggccctatctgcctgccagtgagttctgtcatgcatcagactttggacctcagaattttcacctggaacatgagaggtcagatgacataatgaatatgttctaacttctgaaacttttggagcttgtttttgcccttgatagcacgtatccttagagaataagcttgccaatttaaggcctgtctgtaatggcatctgaatgttccagcagcctaactgtgctctgctccagaaacatgtgtgtggcttccctacctccacaccaaggagctgccttgctgggtggatgtaaagactgtcctgccagggtttcccactaaaggtattaataagtccagtggaccacagagggcccaatccctcttggccgctaaggctaaggtaggagccagagagctgtagagacaggaccaccaggatgcttcatgtccataacacaagagagcgctgcattgtttgggggccaggcattactactatcatgaagaaaaatgaagagcaggatgcatgttagtctttaattcacttttaatagtataaacctcatttaggtagtagtattaagccacaacaataatgccacattgaaacagcatttaataaaatgcataaagctaattcatgcactgcaatactctatatacaaacacaacaatgcaaattcttcttcaagactgaagacattgattagatataaaattcagtttaaaaagaacatgctattttttaaatgccatcacataaacaaagtgatttcacagggagaagaaagctgtataaagctgcagctttcaacaggttttaaacctggcattaaaatgtaatggcaaaaccaatattttctatattgtgaagggcaaaggttacagaaacggtcccaagaaaatctaacacccaaattttcctttgatagatagatgcctttaaaagggctggtaatgcagttacattctaacagagaagtccaaactacaggtaaaaactacggcttgtactgtgaaaaatgtgcagcttttcagttataaaactagttgaacactggtttacaagataatccgtagaacagagagactgtagaaaaatattccagcacttgagttgtgtgtggcagcagcatttgagtccatgaatgctatggtcattaaaataattgattatactttcctaaagaaaagccattttttaatgcaaagtctactacttccaaatgttattccaaacattaaattttaacagtctatcaatcaataaatgttgaacattttttttctaaaaaaaaa

SEQ ID NO: 5091 - DNA, 1836 bp, Homo Sapiens
  NM_022549
cggggaaggggtggggtggaggcgggagcggagccgggcgccgccggagctgcgcggggagcgctcgctggctggctggctggctggctctccgctgcgctgcgctgcgctccggccgctcccgcggcccgtggatgggggtgtccggctgagccccgggatccgcctccctccgccaggacccgcacagataaactcatcctgaaagtcgctgttgttctcctgctgagcaagaatggaggccccactggtgagtctggatgaagagtttgaggaccttcgaccctcctgctcggaggacccggaggagaagccccagtgtttctatggttcatctccccaccatctcgaggacccctccctctccgagcttgagaatttttcttccgaaataatcagcttcaagtccatggaggacctcgtaaatgaatttgatgagaagctcaatgtctgctttcggaactacaacgccaagaccgagaacctagctcccgtgaagaaccagttacagatccaagaggaggaggagacccttcaggacgaggagtaagaagtcttaattgccctctcctgcttcagtcgagagccctgtagtccttgtctccttgacatagtgctggtttctgtctataggtttatgggctattactttcattttcgtgttgccagcggagcagtgccctggtacttgctgtcatagctctatatatgtccctttacagtcccctgaggagaactttcttaaattgaaaccttagaggaatgaaggttttcctagatacaaaatggaatttcaggagcacagtaaatttcagggtctgtctatcttaagctttctttatatcagtggaaatccagcgagatattagaaataaaggccagaaaaaattaattaaccatgatggatgaatctatgttattggactaatttgcttcaagaaacaccagaattttgaaaatcccgaatttttgacagcccctcaggcctggagagttatctacagatgttaggatatgtccacataagaaagcatctaaactgaactgagagcacagcgggctaccctggacaaagtaaaggtggaaactaggtgatgtggcctttgagtatgcagattccttgtatcacttgctcgctactttctagggtcttaatagtagtcaagaaaagggatctgagaaaagtactctttcaggagggactagaaagagaagggggtgatatgttacacaaattaaagaaggatgtcttaggcatttagtaaaaattcagtggttccccgctatcctcgggggatgtgtttttttgttttgttttgttttgtttttttttgagatgaagtttcattctatcgcccaggctggagtgcaatggcacaattttggctcactgcaacctccacctcccaggttcaagctattctcctgcctcagcctcctgagtagctgggactacaggtgtgcgccaccatgcccgactaatttttgtattttgagtagagatgggagtttcaccatgttggccaggctggtctcgaactcctgacctggtgatttgcccgccttggcctcccaaagtgctgggattacaggcgtgagtcaccacacctggcccatggtgggggatatgttttaagacccccagttaatgcctgaaaccgctgctagtaccaaaccctaatgttttttcctgtatgtacgtacatatgataaagttcagtttataagttaggcacagtaagagactaacaacagctcacagcaaaatagagcaattataacaatatattgtaataaaaattatgtgaatgtgaaaaaaaaaaaaaaaaaaaaaaa

SEQ ID NO: 5092 - DNA, 2990 bp, Homo Sapiens
  NM_022553
tccggggctagtttgtgtttcagacttccatatttccatttgcagttgggtgaagtggttagagctgaaaggggacagctggagtcaaacaacttaactcaaatatctgggaacgatttcgcgctgaggaagaccctttgggacttgtagctccactccggggaacggactcgccgggactgacagttgccggaagtgaggctgcggggaatggccgccgctgcgaccatggcggctgcggcccgggaactggtgttgcgggctgggacctcagatatggaggaggaagagggcccgctggcgggtggtcctgggctccaggaaccactgcaacttggggagttggatatcacttctgatgaattcatcctggatgaagtggatgttcacattcaggcaaatctggaggatgagttagtaaaggaagctcttaaaacgggtgtagatctccgtcactattcaaagcaagttgagctggagctacagcagattgaacagaaatccattcgggattatattcaagagagtgagaatatagcatctctacacaaccagatcacagcctgtgatgctgtcctggagcgaatggagcagatgttgggagcttttcagagtgacctcagctccatcagctctgagatccggacactgcaggaacagtcaggagccatgaacattcgacttcgaaatcgccaggcagttcgggggaaacttggggagcttgttgatggtctggtggtgccttctgctctggtcacggcaattctggaggctccagtgacagagcccaggttcttggagcagctacaggagctggatgccaaggcagccgcagtcagagagcaggaagctagaggcacagcagcctgcgcagatgtcagaggcgtgctcgatcggctccgggtcaaggcagtgacgaagatccgagagtttatcctccagaagatttattccttcaggaaacccatgaccaactatcagatcccccagacggccctgctgaagtacaggttcttctatcagtttctgctgggcaatgaacgagcaacagcaaaggagatcagggatgaatatgtggagacgctgagcaagatttacctgtcttactaccgctcttacctggggcggctcatgaaggtgcagtatgaggaagtcgctgagaaagatgatctaatgggtgtggaagatacagcaaagaaaggattcttctcaaagccatcgctccgcagcaggaacaccattttcaccctaggaacccgcggctctgtcatctcccccactgaacttgaggcccccatcctggtgcctcacacagcgcagcgcggagagcagaggtatccatttgaggccctcttccgcagccagcactacgccctcctagacaattcctgccgcgaataccttttcatctgtgaattttttgttgtgtctggcccagctgcacacgacctgttccatgctgtcatgggccgtacactcagcatgaccctgaaacacctggattcttatctagctgactgctacgatgccattgctgtttttctctgtatccacattgttctccggttccgtaacattgcagcaaagagggatgttcctgccctggacaggtactgggaacaggtgcttgccttgctatggccacggtttgaactgatcctggagatgaatgttcagagcgtccgaagcactgacccccagcgcctaggggggttggatactcggccccactatatcacacgccgctatgcagagttctcctccgctcttgtcagtatcaaccagacaattcctaatgaacggaccatgcaattgctgggacagctgcaggtggaggtggagaattttgtcctccgagtggcagctgagttctcctcaaggaaggagcagcttgtgtttctgatcaacaactatgacatgatgctgggtgtgctgatggagcgggctgcagatgacagcaaagaggttgagagcttccagcagctgctcaatgctcggacacaggaattcattgaagagttgctgtctcccccttttgggggtttagtggcatttgtgaaggaggctgaggctttgattgagcgtggacaggctgagcgacttcgaggggaagaagcccgggtaactcagctgatccgtggctttggtagttcctggaaatcatcagtggaatctctgagtcaggatgtaatgcggagtttcaccaacttcagaaatggcaccagtatcattcagggagcgctgacccagctgatccagctctatcatcgcttccaccgggtgctgtcccagccgcagctccgagccctccctgcccgggctgagctcatcaacattcaccaccttatggtggagctcaagaagcataagcccaacttctgatgtgccagaaaccgccctgagatctgccggtcatctccatggacttctgcaccccattccatacccttcttcacctggggtaccccttccagttttccccttgcttcccaggcccttgacatggcttacctgccttcactcccagcaccttgcccaacaggataagctggatccccttggccttctgaatatcccagtgtcttcaggtttcccaagaccacttccctgtgggcttccaaaatggcctttatcatttctccagtctgtcaccctcctttcctgctcccatacacccaaggcttgtttcttcccctgtaaaaaccactgcctcaatctctggttcactcaactagtcaccatgtcctgaggcatgaagcctcctcagctcttggaattgctggcaaggggtgactgcctctgagtcattgtgtttttcaaagtgatttcttttctgtagctttttgacctaagatctcagcaatttgaacactaacctctcccctcctggctcaagaattactccgaagtcagtctgcagaaaataaatatttagtatgacatgacacttaaaaaaaaaaaaaaaaaaaaaaaaaaaaaaaaaaaaaaaa

SEQ ID NO: 5093 - DNA, 1158 bp, Homo Sapiens
  NM_022555
gcctgctgctctggcccctggtcctgtcctcttctccagcatggtgtgtctgaagctccctggaggctccagcttggcagcgttgacagtgacactgatggtgctgagctcccgactggctttcgctggggacacccgaccacgtttcttggagctgcgtaagtctgagtgtcatttcttcaatgggacggagcgggtgcggtacctggacagatacttccataaccaggaggagttcctgcgcttcgacagcgacgtgggggagtaccgggcggtgacggagctggggcggcctgtcgccgagtcctggaacagccagaaggacctcctggagcagaagcggggccgggtggacaattactgcagacacaactacggggttggtgagagcttcacagtgcagcggcgagtccatcctcaggtgactgtgtatcctgcaaagacccagcccctgcagcaccacaacctcctggtctgctctgtgagtggtttctatccaggcagcattgaagtcaggtggttccggaacggccaggaagagaaggctggggtggtgtccacgggcctgatccagaatggagactggaccttccagaccctggtgatgctagaaacagttcctcggagtggagaggtttacacttgccaagtggagcacccaagcgtaacgagcgctctcacagtggaatggagagcacggtctgaatctgcacagagcaagatgctgagtggagtcgggggctttgtgctgggcctgctcttccttggggccgggctgttcatctacttcaggaatcagaaaggacactctggacttcagccaacaggattcctgagctgaagtgcagatgacaatttaaggaagaatcttctgccccagctttgcaggatgaaaagctttcccgcctggctgttattcttccacgagagagggctttctcaggacctagttgctactggttcagcaactgcagaaaatgtcctcccttgtggcttcctcagttcctgcccttggcctgaagtcccagcattgatggcagcgcctcatcttcaacttttgtgctcccctttgcctaaaccctatggcctcctgtgcatctgtactcaccctgtaccacaaacacattacattattaaatgtttctcaaagatggagtt

SEQ ID NO: 5094 - DNA, 3002 bp, Homo Sapiens
  NM_022572
cggcaggcaggttccccgcggggggccggggccgggccgttgcctagcaacgccgagccccgcccggccggcgcgtgcctgcccccagcatggcttggcagggctggcccgcggcgtggcagtgggtcgccggctgctggctcctcctcgtccttgtcctcgtcctacttgtgagcccccgcggctgccgagcgcggcggggcctccgcggtctgctcatggcgcacagccagcggctgctcttccgaatcgggtacagcctgtacacccgcacctggctcgggtacctcttctaccgacagcagctgcgcagggctcggaatcgctaccctaaaggccactcgaaaacccagccccgcctcttcaatggagtgaaggtgcttcccatccctgtcctctcggacaactacagctacctcatcatcgacacccaggcccagctggctgtggctgtggacccttcagaccctcgggctgtgcaggcttccattgaaaaggaaggggtcaccttggtcgccattctgtgtactcacaagcactgggaccacagtggagggaaccgtgacctcagccggcggcaccgggactgtcgggtgtacgggagccctcaggacggcatcccctacctcacccatcccctgtgtcatcaagatgtggtcagcgtgggacggcttcagatccgggccctggctacacctggccacacacaaggccatctggtctacctactggatggggagccctacaagggtccctcctgcctcttctcaggggacctgctcttcctctctggctgtgggcggacctttgagggcaatgcagagaccatgctgagctcactggacactgtgctggggctaggggatgacacccttctgtggcctggtcatgagtatgcagaggagaacctgggctttgcaggtgtggtggagcccgagaacctggcccgggagaggaagatgcagtgggtgcagcggcagcggctggagcgcaagggcacgtgcccatctaccctgggagaggagcgctcctacaacccgttcctgagaacccactgcctggcgctacaggaggctctggggccggggccgggccccactggggatgatgactactcccgggcccagctcctggaagagctccgccggctgaaggatatgcacaagagcaagtgatgcccccagcgcccccagcccagcccactccccgcatggggaggccgccaccaccaacacctcatcatccttctcatcgctaacaccaccacctccatcggcacccaagcgggcatcatccccccacactgctcaggggaggggagggatcaggcgatgagactgtgaggccaaaagaagggggcctgttggaggctgggaaccccgcagcgcgaggctgcctcatcaacggcaagaggaaaggaggggtctcgggacatctccagaccctaccaactgggagggtcccctcctccttccctactcctgggacggcagcaaggacatgggggctgctgttagcttctccgtcaggaggcctcatctcactgtagccctggaacccagggtccatcttgcccttcccccatccatggttgggaaagaagctcagcccctcacagtggcctcaagtgtgatgccttacaaaagcaccactcagatgggcagctggactctggtgtcctgagactctgccctcttcccacagcctccctgccccacccatccctgcaaagccatttttcagacagagccattcctaagaacactgaagggctggaatgctggctggccactctctgcctcagtggcctccctacagcctggaagaaggagggtcctgattgccaaggaaacctcctcattgggctaaggagacactggagtctggagtgtggagccccacagtcttgcaggtcacatgctctccttgcacatctggcctggttgtacccactggcctctgcctctgccctgggccaaaagggcccctccttgccaggggagagacagccacggtcctctttggccgatgctgtattctcattttggcccttgttcttaggcccgtctgcccgccttcctccatctaacctttcctgttttatccgcagcccttttcttctttgagttagtaaagatttattctgtaacctgacactcatctggccctttgcagtttgccagccatattcccatgtgatttcccactggatccaggcccccatccggctggcaggagggggctctgacgtgcaggttggaaatcagaagtctgtgagagcgcgggagtgcatggcagctctgggtcccagacctggcccgacccctctgcttcacctccagctctgctgctcctctactcttgggtcgagatccctttggagccacagcgaggaaccctgtggtcctcaggcaggtgtaccttgagtcagccaggagccctcttttcctgtgtcaaagcctgccctcgggctctgctcacctctggtgaccctccaagatgcccctgccctcagtttcccctcatgatctggcctctgcccccttctctagccacagcctctagtacactttagcaataccaccagactagttagagttccccactcaccaagcaagacatgcagtttcatgcctctgtgccttcgctcatgctgtttcttccgactggaatgccttcccctgctcctcctgccttgtctgcctggcaagttcatctctcacgatcccctcaaaggccccctcctccaggaaggcaacccctgtgcccctcccctccaggctacctctgcactttgtcaatgcttctcttgtggcacttatcacactgtattttacttgtttacatgtttgtctccccttctagactgtgaatccttaagggcatggactgtatcttatgcatctctgtatttctgcgcctagcacggtgcctagcacacagtaggcgctcaataaatgttgaatgaatgaatgatttaatcaagaaaaaaaaaaaaaaaa

SEQ ID NO: 5095 - DNA, 6329 bp, Homo Sapiens
  NM_022574
gattgggggcggtggtctgggtgtgattcctgtgggggaaaccagcccgaggtgccttggctcaggcttgcctgcctggagtccttgtcgtgtacccgtctgtggccctagagtcacctcctgctccttttcactgggtttctccccagaccaagcccctggatttgagcttctgagcagccaactgatttttttcatgagggaaagaattttgctcctagatttatttctaatccttttctccgtaactgaccttttctctgtaagctatttgtggctctagtgggtttttgtttgcttgcttgtttttgttttatctttgccctgaacgtccatcctggcctcggctgcctccctccccgagttcttcactacacctcctgtctcagcctcccagagagggtggcgagggtgctgatgcccagagacaccatccggcgaatggacctctcctgtcatgcggggcagggcagggctgccggcagagccatgtcctgaaccctccctcctcccccctgctctccttaagggtctttcccagatgtgaaggtccctcccaggctctactgaggtcagaccaattcccagtggcttgggtaccctcgttcactccagcaccagcccctgccctccttcttcccgggccaggctgccaggtgagccccgggccaagggtggttgccctgctgaggccgaaaggactcgagcttcccatctcctcgcctcccccaggtctttcaccgtctggactcatctctgggtaactcatggtgtgagtggccacgtggctggctcaggtgagtccttttagaccccaggtgacccaccagctagtccggggcccattgttgtgcccactaggatgtcccccatggtgtcctccctgcgctttaaagttctccttcgtgtgctgttcttcatggcccctgttcccccacaggtgtttggacagtgaacgccaggtcccctcctccccacccccggcctctcaaacacgcccagccccacgatggcagcagagacactcaactttgggcctgagtggctcagggccctgtccgggggcggcagcgtggcctccccacccccgtcccctgccatgcccaaatacaagctggctgactaccgttatgggcgagaggaaatgctggctctctacgtcaaggagaacaaggtcccggaagagctgcaggacaaggagttcgccgcggtgctgcaggacgagccactgcagcccctggctctggagccgctgactgaggaggaacagagaaacttctccctgtcagtgaacagcgtggctgtgctgaggctgatggggaaaggggctggcccccccctggctggcacctcccgaggcaggggcagcacgcggagccgaggccgcggccgtggtgacagctgcttttaccaaagaagcatcgaagaaggcgatggggcctttggacgaagcccccgggaaatccagcgcagccagagctgggatgacagaggcgagaggcggtttgagaagtcagcaaggcgggatggagcacgatgtggctttgaggagggaggggctggcccaaggaaggagcacgcccgctcagacagcgagaactggcgctccctacgggaggaacaggaggaggaggaggagggcagctggaggctcggagcagggccccggcgagacggcgaccgctggcgctccgccagccctgatggtggtccccgctctgctggctggcgggaacatggggaacggcggcgcaagtttgaatttgatttgcgaggggatcgaggagggtgtggtgaagaggaggggcggggagggggaggcagctctcacctgcggcggtgccgagcgcctgaaggctttgaggaggacaaggatgggctcccagagtggtgcctggacgatgaggatgaagaaatgggcacctttgatgcctctggggccttcttgcctctcaagaagggccccaaggagcccattcctgaggagcaggagctggacttccaagggttggaggaggaggaggaaccttccgaagggctagaggaggaagggcctgaggcaggtgggaaagagctgaccccactgcctcctcaggaggagaagtccagctccccatccccactgcccaccctgggcccactctgggggacaaacggggatggggacgaaactgcagagaaagagcccccagcggccgaagatgatattcgggggatccagctgagtcccggggtgggctcctctgctggcccacccggagatctggaggatgatgaaggcttgaagcacctgcagcaggaggcggagaagctggtggcctccctgcaggacagctccttggaggaggagcagttcacggctgccatgcagacccagggcctgcgccactctgcagccgccactgccctcccgctcagccatggggctgcccggaagtggttctacaaggacccacagggcgagatccaaggccccttcacgacacaggagatggcagagtggttccaggccggctacttttccatgtcactgctggtgaagcggggctgcgatgagggcttccagccgctgggcgaggtgatcaagatgtggggccgcgtgccctttgccccagggccctcacctcccccactgctgggaaacatggaccaggagcggctgaagaagcaacaggagctggccgcggcggccttgtaccagcagctgcagcaccagcagtttctccagctggtcagcagccgccagctcccacagtgcgcgctccgagaaaaggcagctctgggggacctgacaccgccaccaccgccgccgccacagcagcagcagcagcagctcacggcattcctgcagcagctccaggcgctcaaaccccccagaggcggggaccagaacctgctcccgacgatgagccggtccttgtcggtgccagattcgggccgcctctgggacgtacatacctcagcctcatcacagtcaggtggtgaggccagtctttgggacataccaattaactcttcgactcagggtccaattctagaacaactccagctgcaacataaattccaggagcgcagagaagtggagctcagggcgaagcgggaggaagaggaacgcaagcgtcgagaggagaagcgccgccagcagcagcaggaggagcagaagcggcggcaggaggaggaagagctgtttcggcgcaagcacgtgcggcagcaggagctattgctgaagttgctacagcagcagcaggcggtccctgtgccccccgcacccagctccccgcccccactctgggctggcctggccaagcaggggctgtccatgaagacgctcctggagttgcagctggagggcgagcggcagctgcacaaacagcccccacctcgggagccagctcgggcccaggcccccaaccaccgagtgcagcttgggggcctgggcactgcccccctgaaccagtgggtgtctgaggctgggccactgtggggcgggccagacaagagtgggggcggcagcagcggcctggggctctgggaggacacccccaagagcggcgggagcctggtccgtggcctcggcctgaagaacagccggagcagcccatctctcagtgactcatacagccacctatcgggtcggcccattcgcaaaaagacggaggaagaagagaagctgctgaagctgctgcagggcattcccaggccccaggacggcttcacccagtggtgcgagcagatgctgcacacgctgagcgccacgggcagcctggacgtgcccatggctgtagcgatcctcaaggaggtggaatccccctatgatgtccacgattatatccgttcctgcctgggggacacgctggaagccaaagaatttgccaaacaattcctggagcggagggccaagcagaaagccagccagcagcggcagcagcagcaggaggcatggctgagcagcgcctcgctgcagacggccttccaggccaaccacagcaccaaactcggccccggggagggcagcaaggccaagaggcgggcactgatgctgcactcagaccccagcatcctggggtactccctgcacggatcttctggtgagatcgagagcgtggatgactactgaccagcccggacccccagcccctgggctgtaggccagggcagccacagcggcgtggaccgagggtcccagcctgcaggctccccgcagagagcacaggaagaggcaggggcggggtccccagcacttgttacaaacacacgatgcaccttaactcacccaccacgaggcactttacagactgggggagggggtttttctttttatttttttttttaattttaaacgactgaagaaaacattaggagaggcaaaaatattgttaaaaactagactctaaacaccccttcctgctgtgaggatagtgggtgtgacaatggaaggtccacagaggtttttgttttttggttttttttttttttttaagaaaaaaagatgaaaaatgaaaaaaaaaatggttaggaggctgaaagaaaaaacacactgttattttggggcagtggggacacaggccccgtggacctgtcctgcctggcccccaaggccatacttaccccccagaaggcgggccatggggtaactggaagctgggggccagcagtttgcacaggaggcctgtctgagccccacccgccagacctgttgtgagcagctcctgtcactgaggctggctgaggtgtccggggtggggccaaagtagccccttggcttcgctgctttgggggacagttgcacaaattggacgagtggccccagctctctggctgccatcttgtgctggccgagtagacgggaggggccaagccgtgccaacctctctggctggcagggtggggcagcaggactctggttctggtgaggggcgtctcccactgctgccattttgggggacaccctgggtttgaacctgaaagccccagctctctgccttgccacgtgaatgtattctttgggccacaagcccccgcctcacccctgcctgagctgcctcacccctgtgagcggcgggggtggatgattgctccagaggctgcagagagaaggctgagctgtttctccagtgaagggggcaggaggaggggcctcaaaggcaaggagtgggtggctttgggcttagggttgcagtagaggggctgccgcccggggccccaacctgtagccagctcgtaagatgtggaccacccagctctgcacctgacccttccgctgaccaaatgggagaggagcaggtggccttccgggtctgatatgatgcgctttttaccgttgggtaaggttggggtgaagagaagtgtgcggctcctgggtcagaggaggctgccccttctattgctcacccacttcttattcccggtcccctacttgggttcgtctccgcccattttgggttttgtaacagttttgtcttttgggtttctcatccagctcctcccattgacctcattgctcagagtgcagtattagggcaaggcttcgccactgcctccctccatgaatgtatttctccctcctgccctggggacatggggagtggcccgtttctttccccatctagtcccagaaagatggtgtttggttttctgttgttggatttttttttttttttttttttttttgcaccaaagtggcaactaggtcagtgttgggggatcaagctggcctcggggtggggggcccccacctgcctctccctggttcccacagtgttagcgtccctgaaaagacaatattctctctaaagcaataaggggtgacgggccggggggagtgtttgctgctgctggcccccagctccccttccctcttgccaggtgtgggggagactcctgttgtgactgaatgtaacccccccacccctgccgcagccaatgcaggggaagggggacactcttcctgtctcttctccccagctaaagagactttggacttagggggcccatgagcctggagaggccttaaccctgtgaggaagtatagggggagccctctcccacccccatccccttctgagagtggtcaatgtttacaagcccctgagcccccctgcccagggactcagaccctgttgctgtccttccccggccccggtcttcctgggccctcgctgctcccctgcccttcctggggttggggtgggtgcaggggtcaccgtgttccctgtctgccttgtacccacagtctccccgccccctctccaccctgtgtgacttccctctcttttacctgctcctgtaaatactcccttctcccaataaaacttggtgtgtgttctccc

SEQ ID NO: 5096 - DNA, 2769 bp, Homo Sapiens
  NM_022575
ctaggtgggtgtcccctcggtgcttcccagctgccgtctgcaccagccatggactgctacacggcgaactggaacccactcggggactctgccttttaccggaaatatgagctgtacagcatggactgggacctgaaggaggaactcagggattgcctggtggctgctgcaccctatgggggccccattgcactgctgaggaacccctggcggaaggagaaagctgctagtgtgaggccagtgctcgatatatactctgcttccggcatgcctctggccagcctgctgtggaagagtggacccgtggtgtccctgggctggtcagctgaggaggagctgctctgtgtgcaggaagatggtgctgtactggtttatgggcttcatggtgacttccggagacacttcagcatgggcaatgaagtgctccagaaccgggttctggatgcccggatctttcacactgagtttggttccggagtggccatcctcacaggggcccaccgcttcaccctcagtgccaatgtgggtgacctcaaactccgccggatgccagaggtgccaggtctgcaaagtgcaccctcctgctggactgtgctgtgccaggaccgagtggcacacattcttctggctgtggggcctgacctttacctcttggaccatgcagcctgctccgcagtgacgccccctggcctggccccaggagtaagcagcttcctacagatggctgtctccttcacctaccgacacctggcactcttcacagacacaggctacatctggatggggacagcatcactcaaggagaagctatgtgagttcaactgcaacatccgggcacctccaaagcagatggtctggtgcagccgtcctcgtagcaaggagagggccgtggtggtggcctgggaaaggcggctgatggtggtgggcgatgcacccgagagcatccagtttgtgctggatgaggactcctacctggtgcctgagctcgatggggtccgcatcttctcccgcagcacccacgagttcctgcatgaggttccagcggccagcgaggaaatcttcaaaattgcctcaatggcccccggggcgctgctcctggaggctcagaaggagtatgagaaagagagccagaaggcggacgagtacctgcgggagatccaggagctgggccagctgacccaggccgtgcagcagtgcattgaggctgcaggacatgagcaccagccagacatgcagaagagtctgctcagggccgcctccttcggaaagtgtttcctggacagatttccacccgacagcttcgtgcacatgtgtcaggacctgcgtgtgctcaatgctgttcgggactatcacatcgggatcccgctcacctatagccaatataagcagctcaccatccaggtgctgctggacaggctcgtgttgcggagactttaccccctggccatccagatatgcgagtacttgcgccttcctgaagtacagggcgtcagcaggatcctggcccactgggcctgctacaaggtgcaacagaaggatgtctcagatgaggatgtggctcgagccattaaccagaagctgggggacacgcctggtgtctcttactccgacattgctgcacgagcctatggttgtggccgcacggagctggccatcaagctgctggagtatgagccacgctcaggggagcaggtaccccttctcctaaagatgaagaggagcaaactggcactaagcaaggccatcgagagcggggacactgacctggtgttcacggtgttgctgcacctgaagaacgagctgaaccgaggagattttttcatgacccttcggaatcagcccatggccctcagtttgtaccgacagttctgtaagcatcaggagctagagacgctgaaggacctttacaatcaggatgacaatcaccaggaattgggcagcttccacatccgagccagctatgctgcagaagagcgtattgaggggcgagtagcagctctgcagacagccgccgatgccttctacaaggccaagaatgagtttgcagccaaggctacagaggatcaaatgcggctcctacggctgcagcggcgcctagaagacgagctggggggccagttcctagacctgtctctacatgacacagttaccaccctcattcttggcggtcacaacaagcgtgcagagcagctggcacgtgacttccgcatccctgacaagaggctctggtggctgaagctgactgccctggcagatttggaagattgggaagagctagagaagttttccaagagcaagaaatcacccattggctacctgccttttgtggagatctgcatgaaacaacataacaaatacgaagccaagaagtatgcttcccgcgtgggtcccgagcagaaggtcaaggctttgcttcttgttggcgatgtggctcaggctgcagatgtggccatcgaacaccggaatgaggctgagctgagcctcgtattgtcccactgcacgggagccacagatggggccacagctgacaagattcaacgggccagggcacaagcccagaagaagtgaggagtccatcctgtacatctcaagcaaggggttcctcccctagcacctgggcttggcagaagggccatagttcatccagctcctcccctagagcaatgctgaggagcgggggcatggtagcagggctgtctggttttaaataaagttggaacacttcaaaaaaaaaaaaaaaaaaaaaaaaaaaaaaaaaaaaaaaaaaaa

SEQ ID NO: 5097 - DNA, 10276 bp, Homo Sapiens
  NM_022648
ctcagttgctcccagcagtggccctgggaccagctctgctccttgcaccccgctccctgcctggacacaggctcactcgctgccttcttctgggggaaaccagcttcttgccagccacagctgctgcctccgccactggccaccgcccctgtcctgggagtcccttggcccagacacccacctgacttagtggctcctctgcaggaaaggtggctgccccctgcgttcctccatccaaccatgagctggtgcccatcaccactgagaatgcaccaaagaatgtagtggacaagggagaaggagcctcccggggtggaaacacacggaaaagcctcgaggacaacggctccaccagggtcaccccgagtgtccagccccacctccagcccatcagaaacatgagtgtgagccggaccatggaggacagctgtgagctggacctggtgtacgtcacagagaggatcatcgctgtctccttccccagcacagccaatgaggagaacttccggagcaacctccgtgaggtggcgcagatgctcaagtccaaacatggaggcaactacctgctgttcaacctctctgagcggagacctgacatcacgaagctccatgccaaggtactggaatttggctggcccgacctccacaccccagccctggagaagatctgcagcatctgtaaggccatggacacatggctcaatgcagaccctcacaatgtcgttgttctacacaacaagggaaaccgaggcaggataggagttgtcatcgcggcttacatgcactacagcaacatttctgccagtgcggaccaggctctggaccggtttgcaatgaagcggttctatgaggataagattgtgcccattggccagccatcccaaagaaggtacgtgcattacttcagtggcctgctctccggctccatcaaaatgaacaacaagcccttgtttctgcaccacgtgatcatgcacggcatccccaactttgagtctaaaggaggatgtcggccatttctccgcatctaccaggccatgcaacctgtgtacacatctggcatctacaacatcccaggagacagccagactagcgtctgcatcaccatcgagccaggactgctcttgaagggagacatcttgctgaagtgctaccacaagaagttccgaagcccagcccgagacgtcatcttccgtgtgcagttccacacctgtgccatccatgacctgggggttgtctttgggaaggaggaccttgatgatgctttcaaagatgatcgatttccagagtatggcaaagtggagtttgtattttcttatgggccagagaaaattcaaggcatggagcacctggagaacgggccgagcgtgtctgtggactataacacctccgaccccctcatccgctgggactcctacgacaacttcagtgggcatcgagatgacggcatggaggaggtggtgggacacacgcaggggccactagatgggagcctgtatgctaaggtgaagaagaaagactccctgcacggcagcaccggggctgttaatgccacacgtcctacactgtcggccacccccaaccacgtggaacacacgctttctgtgagcagcgactcgggcaactccacagcctccaccaagaccgacaagaccgacgagcctgtccccggggcctccagtgccactgctgccttgagtccccaggagaagcgggagctggaccgcctgctgagtggctttggcttagagcgagagaagcaaggcgccatgtaccacacccagcacctcaggtcccgcccagcagggggctcggctgtgccctcctctggacgccacgttgtcccagcccaggttcatgtcaatggtggggcgttagcatctgagcgggagacagacatcctggacgatgaattgccaaaccaggatggtcacagtgcgggcagcatgggcacactctcttctctggacggggtcaccaacaccagtgaggggggctacccagaggccctgtccccactgaccaacggtctggacaagtcctaccccatggagcctatggtcaatggaggaggctacccctacgagtctgccagccgggcggggcctgcccatgctggccacacggcccccatgcggccctcctactctgcacaggagggtttagctggctaccagagggaggggccccacccagcctggccacagccagtgaccacctcccactatgcccatgaccccagcggtatgttccgctctcaatccttttcggaagctgaaccccagctgcccccagctccggtccgagggggaagcagccgggaggctgtgcaaaggggactgaattcgtggcagcagcagcagcagcagcagcagcagcctcgcccacctccacgccagcaggaaagagcccacttggagagtcttgtagccagcaggcccagccctcagccattggcagagacccccatccccagtctccctgagttcccgcgagcagcctcccagcaggagattgaacagtccatcgaaacactcaatatgctgatgctggacctggagccagcctccgctgctgccccactacacaagtcccagagtgtccccggggcctggccaggggcttctccactctcctcccagcccctctctggatcctcccgtcagtcccatccactgacccagtccagatctggctatatccccagtgggcattcgttgggaacccctgagccagccccacgggcctctctggagtctgtccctcctggcaggtcttactcaccttatgactatcagccatgtttggctgggcctaaccaggatttccattcaaagagcccagcctcttcctccttgcctgccttccttccgaccacccacagccctccagggcctcagcaacccccagcctctctccctggcctcactgctcagcctctgctctcaccaaaggaagcgacttcagacccctcccggactccagaggaggagccattgaatttagaagggctggtggcccacagggtagcaggggtacaggctcgggagaagcagcctgcagagcccccagcccctctgcggaggcgggcggccagtgatggacagtatgagaaccagtctccagaagccacatcccctcgtagccctggggttcgctcccctgtccagtgtgtctccccggagctggctcttaccatcgctctcaatcctggagggcggcccaaagagccccatttgcacagctacaaggaggccttcgaggagatggagggaacctccccgagcagcccaccacccagtggggtgcggtcccccccgggtctggccaagacacccctgtctgctctgggcctgaaacctcacaacccagcggacatcctgttgcaccccacaggagttaccagaagacggatccagccagaggaagatgaggggaaggtggtggtcaggctgtcagaagagccccggagctatgtggagtctgtggcacggacagcggtggctggaccccgagctcaggactctgagcccaagagctttagtgctccagccacccaggcctatggccatgagatacccctgaggaacgggaccctgggtggctcctttgtctcccccagccccctctccaccagcagccccatcctcagtgctgacagcacttcagtggggagtttcccgtcgggagagagcagtgaccagggtccccggacgcccacccagcctctgttggagtctggcttccgctcaggcagcctgggacagcccagcccgtctgcccagagaaactaccagagctcttctcctctcccgactgtgggcagtagctacagcagccccgactactcacttcagcatttcagctcctctccggaaagccaggctcgagctcagttcagtgtggctggcgtccacacggtgcctgggagccctcaggcgcgccacagaacagtgggcaccaacactccccctagtcctggcttcggctggcgggccatcaatcccagcatggctgcccccagcagtcccagtttgagccatcaccagatgatgggtccaccaggcactggcttccatggtagcactgtctccagcccccagagcagtgcagcgaccaccccggggagccccagcctgtgtcggcacccagcaggggtctaccaggtttctggcctccacaacaaagtggccaccaccccggggagtcccagcctgggccggcaccctggggctcaccaaggcaacctggcctccggtcttcatagcaatgcaatagccagccctggaagccccagcctgggccgtcacctcggagggtctggatctgtggttcccggcagcccctgcttggaccggcatgtggcctatggtggctattctaccccggaggatcggagacccacactgtcccggcagagcagtgcctctggctaccaggctccttccacgccctccttccctgtctcccctgcctactaccctggcctgagcagccctgccacctccccgtcaccagactccgcagccttccggcaagggagcccaacaccagccttgccagagaagcgaaggatgtcagtgggagaccgggcaggcagcctccccaactatgccaccatcaatgggaaggtgtcttcgcctgtcgccagcggcatgtccagtcccagtgggggcagcaccgtctccttctcccacactctgcccgacttctccaagtactccatgccagacaacagcccggagacgcgggctaaagtgaagtttgtccaggacacttctaagtattggtacaagcctgagatctccagggagcaggccatcgcgctcctcaaggaccaggagccgggggccttcatcatccgcgacagtcactccttccgaggcgcgtacgggctggccatgaaggtgtcttcgccacctccaaccatcatgcagcagaataaaaaaggagacatgacccatgagctggtcaggcattttctgatagagactggccccagaggagtcaagctcaagggctgccccaatgagccaaacttcggatcgctgtctgccctggtctaccagcactccatcatcccattggccctgccttgcaagctggtcattccaaaccgagaccccacagatgaatcgaaagatagctccggccctgccaactcaactgcagacctgctgaaacaaggggcagcctgcaatgtgctcttcgtcaactctgtggacatggagtcactcactgggccacaggccatctctaaagccacatctgagacgttggctgcagaccccacgccagctgccaccatcgttcacttcaaagtctctgcccagggaatcactctgactgacaaccagagaaagctctttttcagacgccactaccctctcaacactgtcaccttctgtgacctggatccacaggaaagaaagtggatgaaaacagagggtggtgcccctgctaagctcttcggcttcgtggcccggaagcagggcagcaccacggacaacgcctgccacctctttgctgagcttgaccccaaccagccggcctctgccatcgtcaacttcgtctccaaggtcatgctgaatgccggccaaaagagatgaaccctgccccttgcccagggccagtgccatggggaaggggcttgtggggaggggacccatgaatcctgaccactcttgaacccagaaggaggactttgggccaatttcggaggagagaagaaagtgcaacgtggggagagggaagtgaattgcagaggggagggggaaaagagagagagagagagagagagagagagagagaaagatggaggagaagaacttggattcccctgggtagatggaaactgcaaaaacccaaagcctccaaaactaaccaggtccacctaacaccccctccctcccctaagaagatggatgtcctcaaaagagaaggaacaaacctccttgggaatccacattttttgggggaatggaaaagctctgtctccctaactcaactgctttgcaaggggaaatcaagctgggagaatctttttctggccacctgtggggtaggttgtcaaaccaaacagagccaccgtgggacatcaagtggaagaacttgtttgcttgaaagtatctcagacccaaggcacctcaggtctctttgctgtgcctccactatattgtcgtgtgggtgtgtgtctgcacccacatcctcacacattgatctagatctgcctttatccactcgaattataaacagctcggcttgtccttgtcccatgtgtttgtagacacacatgcatactgtccaaagattagggttggtggtggcagtgcagcaggggagggacaaacaaccaagctatgggtgacagaggctctctcctggtgcctgcacctgcactctagtgaccctgggtgccgccagacccttctcttctacaaagaccccagcaggagtgggagggtctgcaatggcatcgccctgtcctgccttggccagaagcctggagctttggtttgaggaggtagagatatgtgtatccataggaagagatctgtcagaacaggcagctgttgagctcggggtgtcttccccaaggcatgtggctcagcagcaagaaaggcaagttgctcctgctggggccctggactctgccttagctcccacctctcagccttgttattgggtttcatgcccctggaccagccttatctcagacctgcttacctgcatgatgcctttttgggggctggggattgagtcttgctgctctgcccagccctgttctattctgcagggtccctgtgttggaattctccctggggaacctactttctgctcagtgaggctccggccagaaacctggagtccttatcctcccctctgtaagtgttttagggtctggcttttgcaggcaccctctgacctcagcagagctcctgggcctgctgcctgcacaccacatcgcctacctacaatgccaaagcctcactgtcaccctttctgccttggtttccctagctgagccacgctgcccatgcagcagagggcagaaggcttgcacttgggccaaagggcctaaggtccactggacagttgggaaaacacctgaccaccatttaaggactctaagccagaatggaaaattcaccaggactccattcttaagcctatgcgagtcccctagagagaggcattgtactgatatataaatattatataatatatacatgagacatactgacagaatctgtaagctaataaaatgtaagaaaaggttaaaaaaagaataggtaaattgacaagaagtatttattgtttttccatattgctttattgccttccttggggataaaccaattcctatccttttttatatgtgtaagtaaagcctgaagtgtagggggcctttgttcttgaagcagccagggtctccttgccctggccttggccttccctagactgtgtggggctcagcattgggaggggttgcacatgtcccagcctttggcccccttacttttcagcaagccaggggcccagcagtcagctcccaggatgtgtggggagctgtccctgactctgcaggcctgagcgagtgtgtgagcatgcggggacatgggtgtgtatggcacacataggtgcgtgtgtgtcttttgtattttttctcctccaaggagctgtgtcagtgtggacgttctgtttcagggagttggaaaggagggtgtctgcagaaggtggagagcaggggcagaggccccactggccaccccctgcttcccagagtgaaaccttgtgcctggtgaccaaagtccctccaaagtgctcttccttctgggttattcaagccaaatatctgggtttccccctctcctcattccctagcaaaccccaattatcttccaagataggagatatttcccatccccttcctttgtaaatatctcatctcccactggagagcccaggagcctattcctggcatggatgttctgtccacacttgaggctgggcggtgtatcagacccttcaagcagcctggctggggcccaggactgagtctggggtcagctttcacggtcgcttttcccttcctcaccacccaccacagcccaccttgcatgcatggccagcccctccactccagcctgagccatgtgtgcccctgcgggaggacccattcatgccagaaagctggtaactccctcccagcatccctgcggaaggagtcagtttctgagagtgtgacttttcaaggcgaatgatggggaagggttccccagtccccacagtggccccacctctgggccctgcaccagagcccttctgtgtcacggcgggctgtgcacccatgcacacacctacgcacacacaacactccgcactgcagtatattcttgccaaagatttcctttaaaagcaagcacttttactaattattattttgtaaatgtttatcttcttctgtcttctccctccctgaatctattttactgttgtttattgttgaatctgtgtgtcagccaggagagcgctgtctggccttgaacatgggctgggatgggaaagggtctgggagaagatgggcaacaaagagccagggagtcatggacatcgcagcgacgcagaccccagcaggttcagtcccgtgctgccaccagctgtccagctgggtgtctggagggaagagggcagaggagggtcatgtcccttcagctgggggaggggcccagtgagctccacgtggctttttcccaaagggagcaagagggaaggattgggcgagaaaacaatggagaggggacctgcgaaggaaaacagggaggaagtgagcggtttgatcagcctgctatcacggtgttctggctctcttatttagccaggcgcttaagggacagatacatcacatcctaagtttgggaaaggcctttgacccatgtcatctgagcgtctcctccagtagctctgaaagctgtggacaccaatggccaggattccttctcccctggtttttgaggatccctgggtcttctgagactggccaggagagggatggtggggccagtggttgtgtgaaagcaggaggggcagccctcctggacaagtgtgatccccctataaacggctctcaggaggttagtgagtaggagattctgccttgttctgatgagcctgtgcaggggctccaggggagcatgctgtccagggggcacagaagggtggtgagtgtgatcaaatctagtctcactcccactttttagtctcactcctacttttgtccaccacccctgcctcctggatcttctcccactttttttttcagctttaggacctggggagatcctgtgagtcaaggcagacacccaatcctgcccccacactcggggtcctccaagaggttggggggcagagtcccagagcagccctttaccccaggtccaggccctggaatcctgagactcgcgtttccttggccagtggtaacacaggacgtgtgtgcgcatgtgcaagtgtggatgtatgtgtgtgcgtgtgttttgctcatttctttagggaacttgggagtcggggttggaggtgctgggcaatggaacttcaaattcaatgtcgcccagcagtgaggggagtcgggaggtgaggcctgtaggccaaccaattggtggagtctcagcgatagcccaggtgagaagtggttcacccagaggggcagggtgggggcctcgggcagatctgtccctcttggcacctctgtcctcaaatgtccaaaatgttggaggacctctgttcatatcccacgcctgggctcttgccagcagtggagttactgtagagggatgtcccaagcttgttttccaatcagtgttaagctgtttgaaactctcctgtgtctgtgttttgtttgtgcgtgtgtgtgagagcacatcagtgtgtgcaggctgtgtttccccatttctctcctcccttcagacccatcattgagaacaaatgtaagaaatcccttcccaccaccctccctgcctcccaggccctctgcgggggaaacaagatcacccagcatccttccccaccccagctgtgtatttatatagatggaaatatactttatattttgtatcatcgtgcctatagccgctgccaccgtgtataaatcctggtgtatgctccttatcctggacatgaatgtattgtacactgacgcgtccccactcctgtacagctgctttgtttctttgcaatgcattgtatggctttataaatgataaagttaaagaaaactctg

SEQ ID NO: 5098 - DNA, 2404 bp, Homo Sapiens
  NM_022652
gagacgctcgctgtttgtatccattgaggagctgcctcgcgcagggggtgtgcgaggctgagtccaagagatagcaaatcgagtcttaaataatccggggagaaagacgcccgggtagatttgaggtgcagccttggagggagggattagaagccgctagactttttttcctcccctctcagtagcacggagtccgaattaattggatttcattcactggggaggaacaaaaactatctgggcagcttcattgagagagattcattgacactaagagccagcggctgcagctgggtgcagagagaacctccggctttacttctgtctcgtctgccccaaccgctagcctcggcttgggtaaggcgaggcggaattaaaccccgctccgagagcggcagcttcgcgcgcggtgcgctcggcctatgcctgccccgaggggcgtctggtaggcaccccgccctctcccgcagctcgacccccatgatagatacgctcagacccgtgcccttcgcgtcggaaatggcgatcagcaagacggtggcgtggctcaacgagcagctggagctgggcaacgagcggctgctgctgatggactgccggccgcaggagctatacgagtcgtcgcacatcgagtcggccatcaacgtggccatcccgggcatcatgctgcggcgcctgcagaagggtaacctgccggtgcgcgcgctcttcacgcgcggcgaggaccgggaccgcttcacccggcgctgtggcaccgacacagtggtgctctacgacgagagcagcagcgactggaacgagaatacgggcggcgagtcggtgctcgggctgctgctcaagaagctcaaggacgagggctgccgggcgttctacctggaagatgaagcccggggcaagaactgtggtgtcttggtacattgcttggctggcattagccgctcagtcactgtgactgtggcttaccttatgcagaagctcaatctgtcgatgaacgatgcctatgacattgtcaaaatgaaaaaatccaacatatcccctaacttcaacttcatgggtcagctgctggacttcgagaggacgctgggactcagcagcccatgtgacaacagggttccagcacagcagctgtattttaccaccccttccaaccagaatgtataccaggtggactctctgcaatctacgtgaaagaccccacacccctccttgctggaatgtgtctggcccttcagcagtttctcttggcagcatcagctgggctgctttctttgtgtgtggccccaggtgtcaaaatgacaccagctgtctgtactagacaaggttaccaagtgcggaattggttaatactaacagagagatttgctccattctctttggaataacaggacatgctgtatagatacaggcagtaggtttgctctgtacccatgtgtacagcctacccatgcagggactgggattcgaggacttccaggcgcatagggtagaaccaaatgatagggtaggagcatgtgttctttagggccttgtaaggctgtttccttttgcatctggaactgactatataattgtcttcaatgaagactaattcaattttgcatatagaggagccaaagagagatttcagctctgtatttgtggtatcagtttggaaaaaaaaatctgatactccatttgattattgtaaatatttgatcttgaatcacttgacagtgtttgtttgaattgtgtttgttttttcctttgatgggcttaaaagaaattatccaaagggagaaagagcagtatgccacttcttaaaacagaacaaaacaaaaaaagaaaattgtgctcttttctaatccaaagggtatatttgcagcatgcttgactttaccaattctgatgacatctttacggacactattatcactaagaccttgttatggcgaagtctttagtctttttcatgtattttcctcatgattttttctctttatgtagtttgactatgccttacctttgtaaatatttttgcttgtgttgtcgcaaaggggataatctgggaaagacaccaaatcatgggctcactttaaaaaaagaaagaataaaaaaaccttcagctgtgctaaacagtatattacctctgtataaaattcttcagggagtgtcacctcaaatgcaatactttgggttggtttctttcctttaaaaaaatttgtataaaactggaagtgtgtgtgtgtgagcatgggtacccatttgataagagaaatgcatttgattgtgaagaagggagagttaaattctccattatgttcgtggtgtaaagtttagagctggaatttattataagaatgtaaaaccttaaattattaataaataactattttggctattgaaaaaaaaaaaaaaaaaaaaaaaa

SEQ ID NO: 5099 - DNA, 6329 bp, Homo Sapiens
  NM_022662
cgcgtccatttgaacgtctcgcacgccttcctgccattagcactcgagcccgctgctgttgcccgttcttcctccagaataggggagggagagggaatgagaagctgctgcggcccaagagtcactgtgaaggaccccgccgctgccctcgggcctcctcggcccctgcgcctccggggagcagccggggctcgccgcgcctgacgcgtcccgagttatacagaaataatgttgatatttggaacccatgtcgaacttctatgaagaaaggacaacgatgattgcagcaagggatttgcaggaatttgttccttttggtcgagaccactgcaagcaccaccctaatgctttgaaccttcaacttcgccagctgcagccagcttctgaattatggtcttctgatggtgctgctggcttggtgggatcccttcaggaggttacaatccacgagaaacagaaggaaagctggcagttaaggaaaggagtaagtgaaattggagaagatgtggactatgatgaggaactctatgttgctggaaatatggtgatatggagcaaaggaagtaaaagccaggcattggcagtttataaagcatttacagttgacagtcctgttcagcaggcattgtggtgtgacttcattatatcacaggataagtctgaaaaggcctacagtagcaatgaagtagaaaaatgcatatgtatattgcaaagctcatgtattaacatgcatagcatagaaggaaaggattacatagcttcattaccatttcaggttgcaaatgtttggcccactaaatatggattgctgtttgaacgaagcgcttcttcacatgaagtacctccaggttcacccagagaacctttacctactatgttcagcatgctgcacccactagatgaaataactccacttgtttgtaaatctggaagtctttttggttcatcacgggtgcaatatgttgtagatcatgcaatgaaaattgttttcctcaatactgacccctctattgtaatgacttatgatgctgttcaaaatgtgcattctgtgtggactctccggagagtcaaatcagaggaagagaatgttgttttaaagttctctgaacaggggggaaccccacagaatgtggccactagcagctccctcacagcacatctcagaagcctctccaaaggagattcccctgtgacttcacctttccagaattactcctccattcacagccagagtcgctcaacctcatcacccagtctacattctcgctcaccttctatttccaacatggcagctctaagtcgtgctcattctcctgcgttaggagtgcactctttttcaggggtgcaaaggttcaacatttcaagccataatcagtctccaaagagacatagtatttctcattctccaaatagtaattctaatggctcctttcttgcaccagaaacggagccaattgttcctgaactgtgtattgaccatttgtggacagaaacgattactaatataagagagaaaaattcacaagcctcaaaagtgtttattacatctgacctatgtgggcaaaagttcctgtgctttttagtagagtcccagctccagttacgctgtgtaaagtttcaagagagtaatgataaaacccagctcatctttggttcagtgaccaacataccagcaaaggatgcagcaccagtggagaaaatagacaccatgctggtcttggaaggcagtggaaacctggtgctatacacaggagtggttcgggtgggaaaggtttttattcctggactgccagctccctctctgacgatgtccaacacaatgcctcggcccagtactccactagatggcgttagtactccaaagcctcttagtaaactccttggatcattggacgaggttgttctgttgtccccagttccagaactgagggattcttcaaaacttcatgattctctctataatgaggattgtactttccaacagcttggaacttacattcattctatcagagatcctgtccataacagagtcaccctggaactgagtaatggctccatggttaggatcactattcctgaaattgccacctctgagttagtacaaacgtgtttgcaagcaattaagtttatcctgccaaaagaaatagcagttcagatgcttgtcaagtggtacaatgtccacagtgctccaggaggacccagttatcactcagagtggaatttatttgtgacttgtctcatgaacatgatgggttataacacagaccgcttagcatggactagaaattttgactttgaaggatcactttctcctgtcattgcgcccaaaaaagcaaggccttccgagactggatctgatgatgactgggaatatttactaaattcagactaccaccagaatgttgagtctcatcttttgaacagatctttatgtctgagtccttcagaagcttcacagatgaaggatgaggatttttcacagaatctcagtctggattcttctacacttctctttactcacatacctgcaatttttttcgttcttcaccttgtgtatgaggagcttaagttgaatactctaatgggagaaggaatttgttcacttgttgaacttctcgttcagttggcaagggacttaaaattggggccttatgtagatcattactatagagactacccaacgcttgtcagaactactggacaagtgtgcacaattgatccaggtcaaacaggatttatgcatcatccatcattttttacgtctgagccaccaagtatttatcagtgggtgagttcttgtctgaagggtgaaggaatgccaccttatccttacctccctggaatctgtgaaagaagcagacttgtagtcttgagtattgcactgtacatacttggtgatgagagcttggtttctgatgaatcctcacagtatttaaccagaataactatagccccccagaagttgcaagtagaacaagaggaaaacaggtttagtttcaggcattctacatctgtttctagtctagctgaaagattggttgtctggatgactaatgtaggattcactttaagagatttggaaactcttccctttggaattgctcttcccatcagagatgcaatttatcactgtcgtgagcagcctgcctcagactggccagaagctgtctgtctcttgattggacgtcaggatctttccaagcaggcctgcgaaggaaacttacccaaagggaagtctgtgctctcatcagatgttccttcaggaacagaaactgaggaggaagatgacggcatgaatgacatgaatcacgaggtcatgtcattaatatggagtgaagatttaagggtgcaggatgtgcgaaggcttcttcagagtgcgcatcctgtccgtgtcaacgtagtgcagtacccagagctcagtgaccacgagttcatcgaggaaaaggaaaacagattgctccaattgtgtcagcgaactatggctcttcctgtaggacgaggaatgtttaccttgttttcgtaccatcctgttccaacagagccattgcctattcctaaattgaatctgactgggcgtgcccctcctcggaacacaacagtagaccttaatagtggaaacatcgatgtgcctcccaacatgacaagctgggccagctttcataatggtgtggctgctggcctgaagatagctcctgcctcccagatcgactcagcttggattgtttacaataagcccaagcatgctgagttggccaatgagtatgctggctttctcatggctctgggtttgaatgggcaccttaccaagctggcgactctcaatatccatgactacttgaccaagggccatgaaatgacaagcattggactgctacttggtgtttctgctgcaaaactaggcaccatggatatgtctattactcggcttcttagcattcacattcctgctctcttacccccaacgtccacagagctggatgttcctcacaatgtccaagtggctgcagtggttggcattggccttgtatatcaagggacagctcacagacatactgcagaagtcctgttggctgagataggacggcctcctggtcctgaaatggaatactgcactgacagagagtcatactccttagctgctggcttggccctgggcatggtctgcttggggcatggcagcaatttgataggtatgtctgatctcaatgtgcctgagcagctctatcagtacatggttggaggacataggcgctttcaaacaggaatgcatagggagaaacataaatcaccaagttatcaaatcaaagaaggagataccataaatgtggatgtgacttgtccaggtgctactctagctttggctatgatctacttaaaaaccaataacagatctattgcagattggctccgagcccctgacaccatgtatttgttggactttgtgaagccagaatttctcttgcttaggacacttgctcgatgcctgattttgtgggatgatattttaccaaattccaagtgggttgacagcaatgttcctcaaattataagagaaaatagtatctctctcagtgaaatcgaattgccgtgctcagaggatttgaatttggaaactttgtcccaagcacatgtctacataattgcaggagcctgcttgtctctgggttttcgatttgctggctcagaaaacttatcagcatttaactgtttgcataaatttgccaaagattttatgacttatttgtccgcacctaatgcttctgttacaggtcctcataacctagaaacttgtctgagcgtggtgctgctgtctctcgccatggtcatggctggctcaggaaacctaaaggttttgcagctttgtcgcttcttacacatgaaaacgggtggtgaaatgaactatggttttcacttagcccaccacatggcccttggacttctatttttgggaggaggaaggtactctttgagcacatcaaattcttccattgccgctcttctctgtgccctttatccgcacttcccagctcacagcactgacaaccggtatcatctccaggctctccggcacctctatgtgctggccgcggagcccaggcttctagtgcctgtggatgtggacacaaacacgccctgctatgccctcttagaagttacctacaagggcactcagtggtatgaacaaaccaaagaagaattgatggctcctacccttcttccagaactccatcttttaaagcagattaaagtaaaaggcccaagatactgggaactgctcatagatttaagcaaaggaacacaacacttgaagtccatcctttccaaggatggggttttatatgttaaactccgggcgggtcagctctcctacaaagaagatccaatgggatggcaaagtttgttggctcagactgttgctaacaggaactctgaagcccgggctttcaagccagaaacaatctcagcattcacttctgatccagcacttctgtcatttgctgaatatttctgcaagccaactgtgaacatgggtcagaaacaggaaattctggatctcttttcttcagtactctatgaatgtgttacccaggagaccccagagatgttgcctgcatacatagcaatggatcaggctataagaagacttgggagaagagaaatgtctgagacttctgaactttggcagataaagttggtgttagagtttttcagctcccgaagccatcaggagcggctgcagaaccaccctaagcgggggctctttatgaactcggaattcctccctgttgtgaagtgcaccattgataataccctggaccagtggctacaagtcgggggtgatatgtgtgtgcacgcctacctcagcgggcagcccttggaggaatcacagctgagcatgctggcctgcttcctcgtctaccactctgtgccagctccacagcacctgccacctataggactagaagggagcacaagctttgctgaactgctcttcaaatttaagcagctaaaaatgccagtgcgagctttgctgagattggctcctttgcttcttggaaatccacagccaatggtgatgtgaccgtgtctggcggtgaacctaccctgaaacgtgacttctgcacaacaaacgtgaccaaacatcaaagctaaagcaatgtttataaagttttatggtataactagggggaaatgagctgcacaaacctcaatgtattttaaatctgttgctgtcatcattaacggtatatgacatataaaagcaagttaaaatttacttttgtaaataaagtttttggtttgtttccaaaaaaaaaaaaaaaaaaaaa

SEQ ID NO: 5100 - DNA, 5405 bp, Homo Sapiens
  NM_022719
cgcgcctgctgggcccgagctttttcctgggatagcgatggagacgccgggcgcatcagcgtcgtccttgttgcttcccgccgcgtccaggcccccgaggaagcgcgaggcgggagaggctggggctgcgacgagcaagcagcgggtcctggacgaggaagagtatatcgagggcctccagacggtcatccaaagggatttctttcctgatgtggagaagctccaggcacagaaggagtacctggaagccgaggagaatggagacttggaacggatgcgccagattgccatcaagtttggctctgccttgggcaagatgtcccgggagcccccgccaccctatgtgactccagccacatttgaaacccctgaggtgcatgcaggcactggagtggtgggcaacaagcccaggccccgcggccgaggcctggaggatggagaggctggagaggaggaggagaaggagccgctgcccagcctagatgtcttcctgagccgctacacgagtgaggacaatgcctccttccaggagatcatggaggtggccaaggagagaagccgggcacgccacgcttggctctaccaggctgaggaagagtttgagaagaggcagaaagataatctcgaactcccgtcagcagagcaccaggccatcgagagcagccaggccagtgtggagacctggaagtacaaggccaagaattccctcatgtactatccagagggtgtccctgacgaggagcagctgtttaagaagccccggcaggtggtacataagaacacgcgcttccttagggaccccttcagccaagccctgagcaggtgccagctccagcaggcagccgccctcaatgcccagcacaaacagggcaaggtgggccccgatggcaaggagctgatcccccaggagtcccctcgagtgggtggatttggatttgttgccactccttcccctgcccctggtgtgaacgagtccccgatgatgacctggggggaggttgagaacacacccttgagagttgaagggtcggaaacgccctacgtggacaggacacccggcccagcttttaagatcctggagccaggccgcagggagcggctgggtctgaagatggccaacgaggccgctgccaagaaccgggccaagaagcaggaagccttgcggagagtgacggagaatctggccagcctcacccccaaaggcctgagcccagccatgtcgccagccctacagcgccttgtgagcaggacggccagcaagtacacagaccgggccctgcgggccagctacacaccatccccagcacgctccacccacctcaagaccccggccagtgggctgcagacccccacaagcacaccggcgcctggctctgccacacgcacccctctcacacaggacccggcctccatcacggacaacctgctgcagctccctgcccggcgcaaagcttcggacttcttttagagccaggcctgggctgggctcatagacgcttcacagagcctgcagggcagctgtacacccagcagaggactccagccttctcggggcccaggcctgggccagaagctgttgaccataccaggagtcactggagaaaggggctgtgctggggccagactggcacaaggcactcgtgcccacaccacaccccagggccttgccaagctgtttgctgtttaattggccccttgaactgtcattaaagaacacctaggtacagtctggggggttgcctctccatcttgctccccacacgagccctagccttgccctggggcctgcatcacgtctcaggactgcggggcttgaagcgaggggccccccaggtgaggaagctgcaggtggggcggctgtgggagcaccgggtgactggcgttgctttctgcggcactcggaacctgtgttctgagttgagctcacatcctgcagtgctttctgcttctctggggggatatgaaggagaaacggagcccttggaagttgtacccttaggttcccctgcggttctgggcccaggtctgcagcctccactctgggcttgccggctgtgaggtgcgctggttataggactgtgtgggggctgcatatcaggtgatctcagctatcaccttctcccagcacctggcttccagctcatggggtgggactatcccactcacccctctgctataggcactgcccatcttatgctgctggccctggcctcacctggtcacttccaccaacaggagctcccagataacagtgggttgctggacagatcaggctgggactcttaaggggtgggggacgtggggccttcagtgctttatcccctaggaaagggtgcacgttatcccaagggagcccccaggaagtggggagggaggggggaggagcatgtctaggtgctgaccacctggagcacttggccagcaagtgggccgcatgctttgggagcaatgggtgacccagcaggaagcacaaaagaccggccagtgtgccatcatcaagggctgctgagcagcttgaagagccactgggtggggagggcacacggggaggtctcagctggggctgcccctggaggacagggcagggaacttgagggctgaggacagaaatctcacatgactccaggaaatagaggaagaggaggatgctgagcgagggattgtgagggagtgggggtaggtcagagggggctgaactgcaggaagccagggggagtcgtggaccactggagctggccagccccagggcattggggacaaggccaggtcagagggagacagtgtgggcctggtgggtggaccctggcagaggccctcttgtcccccacaaggccaggccacactgtgattctgcctgtacctgagcatctgtcctgtgctcctaggccggagaccactgtgtgtcaggtggggcggttggctgagtcccagagaaaaacactcctcactgggcactcttgatgcttgcacacaccctgtggtttatttggtggtcagtaaggaacgtctttgctgctaagtggaagaaagctaatggaacgtaatcaaaatagtggtttaattgacgaattttacttgcacctgtgccttcttcagatcctacctgcctacttagtttacgtgaaggccgactgcaccatgccccccaaccccgacccccaccacacacaacggggccattgtcatgctaggtgcttgctttccccacctcagctccggagatgtgatggtctttggccctggaggtctcggccagcctgtcctccatcctgttctcgttctcgggcaccaccagcagccggtgctgggttttggctccaagcttgtggtcgggccggtggtcgggcctcaagcctgtcttggtgtccagtttgcactcagcgcggtacttgccctccccctccctcttgaaggaggcagaagacgtggctttgggcttggggggctgcagccacgagtggctgaggatctcatcgatgtggagccgctggctgacgtcgggctgcagcatgcggtagatgaggtccttgcactcgcaggtcaggttcttggagcgcgggaagtccacacggtgctccttctggatacgcagcatcttcctgatgtcggagtcgtcatagggcatggagccgcagaccatgatgtacaggatcacgcccaggctccagatgtcatacaccttgggctggtaggggatgctctgcagcacctcgggggctgcatatgctgccgacccgcagaaggtcttgctgaggatgatgcgcccattgctgtcccgcaggcagcgcttggagaagccaaagtcagacagcttgatgttgaagtccttgtcgaggagaaggttctcgcacttgaggtcccggtggacgatgtccaggtcgtggcagtacttgacggcggaggagagctgtcggaacatcttgcgtgccacgtcctcatgcagggctccctggcacttgatgaactcgaggaggtcgccctggacgccaagctccatgatgatgtagatccgtccgtcagaggtctcaaagatctcgtaagtcttgatgatggagccgtggttgacagttgccaggatgtccatctcccgaggaaggaatctctccacaaagtcagtaggtgttttcttgcggtcgatgatcttgacagccacattgaacttgaggcgctcagagtaggcagatttgacttttgcgtaggaacccttgccaagattgatgcctacgatgtaacccttcttccttaggactgtggcatcgtccatggtgccaggagcgactggcgccgctgccgtctacatccccccgtcatgtgggccagcaggcattgtcctcatttacactaccggaggcgtctggctgggctgccctgggctgggcttcgactcaggggtggaacactcagcattgtctccgggtgacttcagccaatgaactcataaagccaaggagtgggggcggggactgggctgagggagaacagggtctctggaaccgtggaagccaggctggtctggcaggagcacccactccccgcccgctggaaggaagcctgtccccaggacaggactctggtggccctgctgctgctgcattggtttccctgtcacaagtcaagctggaggggaggcggcccacgtccagcctgtttgcatcacctggctgtggggactgaccctgcattggtctttgtcccactagggtgggtttcctgcagcttctttggctatgaagaaaagcacccccagggctgtgtccttggtgtggtaggacagttgtccctgacagtcacccagacaggcctgcatagcaccccagttacacagacagatttccacagcactgccttaccattgagcacatagttaaatctagggaaatcagtgcccagacatcaaagctagaaatgaaacatggtcagcaggagccttgcatgggcttctcttttgctggagcaagccaaaataataggaacggttttacattcctagtgccaggacccatctcgggtcgacaaaatctgaagacaagttaagggaacaggcagctgtttgaatagatcaattggatagtctaaggcagctctctggaccaagctgtaaaggagatacaatcgaaataatcactccggtaccacagtagacaggccttgaaggcactgggccccttttaatcggacttagcaagcattttttttgcctctgaccttctccttggaacaaaattagttaccagtagacttaggtgattgctgtactgcatgtaggcacataaccccaacctatataaacagtaagaaaattgtagcactttgagttggtctgctggaattatctccagccttctccctgtatccagttacagtgataaactcccttctttcctaaaaaaaaaaaaaaaaaaaaa

SEQ ID NO: 5101 - DNA, 4536 bp, Homo Sapiens
  NM_022720
aggcccgccctccgctcgcccggcgcggcaggcgggtgccggcgaccggagagcctggacaggctttccagatggctgcggcggtcggtcggtgaggctttcccggctgtggtttggctgcgggcggcttgggcagcccgcgggcgcctcaggtagaagaagaaaggtgccactccggcatgaagacagactcgcttagtcgccagtcacttaagctgagtgcattgtgatttccaataattgaggcagtggttctaaaagctgtctacattaatgaaaagagcaatgtggccagcttgactaagccgccagcgcacagcgcggcaggacgcgcccgggtctcagcggacttgtgcatgttagctgtgtagatttatgtgagggcttgtaaaactctggtcttgtaaactagtcttaagcgcttttaatatggagacagatgagagcccctctccgctcccgtgtgggcccgcaggagaagcggtgatggagagccgagctcgccccttccaagcgctgccccgtgagcagtctccaccacctcccctgcaaacgtccagtggtgcagaggtaatggacgttggctctggtggtgatggacagtccgaactccctgctgaggaccccttcaacttctacggagcttctcttctctccaaaggatccttctctaagggccgcctcctcatagacccgaactgtagtggccacagcccgcgcaccgcccggcacgcacctgcggtccggaagttctcccctgaccttaagttgcttaaggatgtaaagattagcgtgagctttaccgagagctgcaggagtaaggacaggaaggtgctgtacacaggagcagagcgcgacgtgcgggcggagtgcggtctgctccttagccctgtcagtggggacgtgcatgcttgtccctttggcgggagtgttggtgacggggtaggcatagggggtgagagtgctgataagaaggatgaggagaatgagctggatcaggaaaagagagtggagtatgcagtgctcgatgagttagaagattttactgacaatttggagctagatgaagaaggagcaggcgggttcacggctaaagcaatcgttcagagagacagagtggatgaagaggccttgaatttcccctacgaggatgactttgacaacgatgtggatgctctgctggaagaaggcctttgtgcccccaaaaagaggcgaacagaggaaaaatatggcggagacagcgaccatccgtccgatggagagacaagtgtgcagccgatgatgaccaagattaaaacagtgctcaaaagtcgtggccgcccacctacagagccgctgcccgacgggtggatcatgacattccataactctggagtcccggtgtacctacacagagagtctcgggtggtcacctggtccaggccatacttcttgggaacgggaagcatacggaaacacgaccctcctctgagtagcatcccttgtctgcattataagaaaatgaaggacaacgaggaacgggagcaaagcagtgacctcacccctagtggggatgtgtcccccgtcaagcccctgagccgatctgcagagctggagtttcccctggatgagcctgactctatgggtgctgacccggggcccccggacgagaaagacccactaggggctgaggcagcccctggggccctggggcaggtgaaggccaaagtcgaggtgtgcaaagatgaatccgttgatctcgaggaatttcgaagctacctggagaagcgttttgactttgagcaagttactgtgaaaaaattcaggacttgggctgagcggcggcaattcaatcgggaaatgaagcggaagcaggcggagtccgagaggcccatcttgccagccaatcagaagctcattactttatcagtgcaagatgcacccacaaagaaagagtttgttattaaccccaacgggaaatccgaggtctgcatcctgcacgagtacatgcagcgtgtcctcaaggtccgccctgtctataatttctttgaatgtgagaacccaagtgagccttttggtgcctcggtgaccattgatggtgtgacttacggatctggaactgcaagcagcaaaaaacttgcgaagaataaagctgcccgagctacactggaaatcctcatccctgactttgttaaacagacctctgaagagaagcccaaagacagtgaagaactcgagtattttaaccacatcagcatcgaggactcgcgggtctacgagctgaccagcaaggctgggctgttgtctccatatcagatcctccacgagtgccttaaaagaaaccatgggatgggtgacacgtctatcaagtttgaagtggttcctgggaaaaaccagaagagtgaatacgtcatggcgtgtggcaagcacacagtgcgcgggtggtgtaagaacaagagagttggaaagcagttagcctcacagaagatccttcagctgctgcacccacatgtcaagaactgggggtctttactgcgcatgtatggccgtgagagcagcaagatggtcaagcaggagacatcggacaagagtgtgattgagctgcagcagtatgccaagaagaacaagcccaacctgcacatcctcagcaagctccaagaggagatgaagaggctagctgaggaaagggaggagactcgaaagaagcccaagatgtccattgtggcgtccgcccagcctggcggtgagcccctgtgcaccgtggacgtgtgagggaggtggcacgggccagggcgcgggggccgccagccgcacttctgaggagaccagcagtcatgcatcgtgcaccacagtgtcaggcctccaacccacgctccttccctgtggccaacctgtgggcccggccttagggtggaggctttagtgtacagggacagccatggccacacagcacacatgtggagcagcggctctccctggaaagctccaggcctgaatggatggactcagcgactgcaccagtggcagctggtgactgtggacagtggtggaccctgcttctgtgcacctgctgcaggctctttttatgaaggctttcatgaattttagtatgtaatacgcactgacgacacatgatgcttggatgacagatgagaggggatggctgagtcctgtggctggcccgtgatgccaggtggcccatgtgcccagggcgcctgcagggctgctacagggacctggtcaggaggtgcacatggtgccctgccctcacccaccctctgtgtttccccttctttgaaaaggtagaagagaaaggaatattttaaacctttttggcttaaacagaattttagcatcagaactagctttctgggattggaggcaaaccatcaaggtggtccctctccagtctggacacgatgccagcaaggatgacgtcctgccacctcctggagttaccctggcctcctagggtccctttttctgatgaagtcttaattccctaaaagcgcctctttggacactgaggccctctctgcctttcctggcctccggcaacagttttttacaaagattttttgcagtcgagtccatatgtccacccattgatttttaaagcttttgtgatattttagcattttgaaagactttcacagtgagagtagaaggtagatttggaatcatgcattttagcaagtggacttgttgaaacaggaagcaagggccttcagtgtagcccattcttgatccagagctgttgcctgtgacagcggtttctctggatgtcaaaggcagctgcctggtgcccagcttgcttctcgactggtggcccctatgggtgggtgtgcgatggaaatgtgttcctgccggagtctgaggcaccagggtgtgctcaaaggctggccctggtggtggactggcacctgtgcagagtgccgtgtgcttgtggtgcgccatctgaagcaagagtccagcgttctgccgtgtctgtcccccaccatgccccctacaggcggtactgatggcgcttttttttttttttctgtcaggaaaacaatgttggcctgtgggccgcccacaacatatccttccctcactacctgtgtgaccaaggttggcttctgttgacctttaaaaaagaaaccctcaactcaaattgctataattagacacttgcttctgtcttgcctcctgtctgcagctgtgaatagtcatttgactgtgactgttgcccttagccagccagatgcgcctgtgaaccaaagcttcgtgcacatgtgttcccctaaaggttggggagcctcgctgtgtcttgctgttcccaggcaccaccacagcaggtgctgccatactcttgtggtctctgtgcgccccccccccccccccacccgtctgccaagcatgggtatgaatcgtgcacacagccatgcttcaaggccggggcaggggagcctgtgctgatgccatccagggcactgggctgtgcctggaaggcgagccttgattgtctgaacacataaagcaaactgtccagaagggaaaaaaaaaaaaaaaaaa

SEQ ID NO: 5102 - DNA, 1977 bp, Homo Sapiens
  NM_022730
ggggtgatcatggacgcttgacaacctgcgggcaggcgccgggaggccgagccagcgactaagaggaccgagaggtggcgtggacagatttcaaggccagagaatggcaggggaacagaaaccctcaagtaatctcctggagcagtttattttactagccaaaggtaccagtggctcagccctcactgctctcataagccaggtcttagaggctcccggagtgtatgtctttggagaacttctggagctggccaacgtgcaggagcttgcggaaggagctaatgctgcttatttgcagttgttgaacctgtttgcctatgggacatacccagattacatagccaacaaggagagcctgccagaactgagcacagctcagcagaacaagctgaagcatcttaccatcgtgagcttggcatcaagaatgaagtgtatcccctactccgtgttgctgaaagacctggagatgcggaatctccgggaactagaagaccttatcattgaggctgtctacactgacatcatccagggcaagctggaccagcgaaaccagctgctggaagtggatttctgcattggccgtgacatccgaaagaaggatatcaataatattgtcaagaccctgcatgaatggtgtgatggctgtgaagcagttctactgggcatcgagcagcaagttctgagagccaaccagtacaaagagaaccacaaccgaactcagcagcaggtagaagcagaggttaccaacatcaagaagacactcaaagccaccgcatcctcctcggctcaggagatggagcagcagctggctgaacgggagtgtccccctcacgctgagcagaggcagcccaccaagaagatgtccaaagtgaaaggtctggtctccagccgccactagggccggctggggcagctggcactcaccaggcctgggtcaggtggggaggggacaccaagggcccatttcctcccctctctacctgcagtgagttccagacctgcccgtcccctcaccagcgcctccccaccctgttggtactgttccagaaaaactgttactccccctcacccactccctccttccccagttgttcccttcagactcaggggctccaccaatgccatcccaaaacagggtcagacactgctcagcttccctccaggaggttcttgtctctgtgtaagggcttgtctccctcccagtttttcttttgctccacgtcattttgtcaggctggttataagccggaggcagctttaaccagcccccagggatgattgtgaaggaggcccctccccttgtgaggagggggcactcctctccagcccctggtaccacagtcctcacgatggtgcagtgatttctagccaggcgtcaagatgcgctgctttccctctcctgcctcattccttgttggcagctccagttcaggccgtggagggacgtgatgctgggctgtgtttactaaacccacgggttttcagcctcttaagcccagctccgatctccaattagttgagagcgctgggttgactaacctctggtatctgagcacagacagagggtgctgtgggtctgctgggtggcagaaatggttccttccggcttggcgttctctcctggccactcttcctgctgcctctgactactcagccttgttttcggtgtgtaggccccagctgcccactggaactgccggctaatgcttgctctcccaagatctttaactcctcctggctgcacctgggtagggatggtggcatcgatgcccctctgtctgctgaaggacctgttgctgcttctgtcttttcacccctccttggctgatgacccagagccctctgatgatggcattctcctggcaagagaaaaagacttaactagacttctgaacttgaacagtttcaggttatattttaatttttttttttttgtacaggttctgattctaatacatttcaacatgcttttgtccc

SEQ ID NO: 5103 - DNA, 1729 bp, Homo Sapiens
  NM_022734
agccttcaagtcggcccaaacacggtttctgcctcaaggattatttatataaccattgcttattggctgctggcaaacactcgctcttctcgttggctgaaactgtcgggagaagttctgcgaaggctgctccttgcggcgttgggactgagggtcacaggcacctgtatttccgtttccggttcgcctccggagccatggcggcggcactgaagtgtctactgacattaggaagatggtgccccggccttggagtggctccccaggcccgggcgctcgccgccttagtacccggagtgacccaggtagataacaagtccggtttcctgcagaagaggcctcatcgccagcaccctggcatcctaaagctgccgcacgtgcggctgccacaggcactggctaacggtgcccagttattgctacttgggagcgctgggcccactatggagaatcaggtgcaaacactgaccagttatctctggagcagacatttgcctgtagagccagaggagttgcaaagacgggctaggcatcttgagaaaaaattcctggaaaacccagacttatctcagacagaggagaaacttcgtggagcagtgctacacgcactacgtaaaactacctaccattggcaagaactgagctacactgagggactgagcctggtgtatatggcagcaagactggatggtggctttgcagcagtctccagagcattccatgagatccgggctcgaaatccagcatttcagccacaaactttgatggactttggctcaggtactggttctgtcacctgggctgctcacagtatttggggccagagcctacgtgaatatatgtgtgtggacagatcagctgccatgttggttttggcagaaaaactactgaaaggtggttcagaatctggggagccttatattccaggtgtctttttcagacagtttctacctgtatcacccaaggtgcagtttgatgtagtagtgtcagctttttccttaagtgaactgcccagcaaggctgaccgcactgaggtagttcaaaccttatggcgtaagacaggtcatttcctggtactggtggagaatggaacaaaagctgggcacagccttctcatggatgccagggatctggtccttaagggaaaagagaagtcacctttggaccctcgacctggttttgtctttgccccgtgtccccatgaactcccttgtccccagttgaccaacctggcctgtagcttctcacaggcgtaccatcccatccccttcagctggaacaagaaaccaaaggaagaaaagttctctatggtgatccttgctcgggggtctccagaggaggctcatcgctggccccgtatcactcagcctgtccttaaacggcctcgccatgtgcattgtcacttgtgctgtccagatgggcacatgcagcatgctgtgctcacagcccgccggcacggcagggatttgtatcgttgtgcccgtgtcagctcctggggagatcttttacctgtgcttactccgtctgcgtttcctccatctacggctcaggatccctctgagagttgatgaggatgtgtaacaagtattttcttctatcgtgcctgccagggctgaagctgcctggtatccaggaggggaatgctggtatccccatatgtctgtgtttgtttgagatttttaataataaataataaatttttgaagaatggaaaaaaaaaaaaaaaaaa

SEQ ID NO: 5104 - DNA, 2379 bp, Homo Sapiens
  NM_022736
agtcacccaggaaaagcgaaccgcgccaggccctgtcatcgaccgctgggtccgtcctcccagcgctcgcggccgctcacatgggcgtggccctgcgtgacctgccggggcgtcacgtgagctcccggagtcatgtgaccgccgtcttgacagtgttccacgggcgctgcttcctgcctgggtttggagttgtcaccactttcccctctccgtctcctgcgggcgcaatggaggaggaggatgaggaagcgcgggcgctcctggcaggcggccctgacgaggccgacagaggtgccccggccgcccctggagccctgccggccctctgcgaccccagtcgcctggcgcaccggcttttggtgctgttactgatgtgcttccttggctttggcagctatttttgctatgataatcctgctgcccttcagactcaagttaaacgagatatgcaagtgaataccacgaaattcatgctgctgtatgcctggtattcttggcccaatgtagttttgtgtttctttggtggctttttgatagaccgagtatttggaatacgatggggcacaatcatttttagctgctttgtttgcattggacaggttgtttttgccctgggtggaatatttaatgctttttggctgatggaatttggaagatttgtatttgggattggtggcgagtccttagcagttgcccagaatacatatgctgtgagctggtttaaaggcaaagaattaaacctggtgtttggacttcaacttagcatggctagaattggaagtacagtaaacatgaacctcatgggatggctgtattctaagattgaagctttgttaggttctgctggtcacacaaccctcgggatcacacttatgattgggggtataacgtgtattctttcactaatctgtgccttggctcttgcctacttggatcagagagcagagagaatccttcataaagaacaaggaaaaacaggtgaagttattaaattaactgatgtaaaggacttctccttacccctgtggcttatatttatcatctgtgtctgctattatgttgctgtgttcccttttattggacttgggaaagttttctttacagagaaatttggattttcttcccaggcagcaagtgcaattaacagtgttgtatatgtcatatcagctcccatgtccccggtgtttgggctcctggtggataaaacagggaagaacatcatctgggttctttgcgcagtagcagccactcttgtgtcccacatgatgctggcctttacgatgtggaacccttggattgctatgtgtcttctgggactctcctactcattgcttgcctgtgcattgtggccaatggtggcatttgtagttcctgaacatcagctgggaactgcatatggcttcatgcagtccattcagaatcttgggttggccatcatttccatcattgctggtatgatactggattctcgggggtatttgtttttggaagtgttcttcattgcctgtgtttctttgtcacttttatctgtggtcttactctatttggtgaatcgtgcccagggtgggaacctaaattattctgcaagacaaagggaagaaataaaattttcccatactgaatgagaagttaaaatgaatgtgtcatgagaatgggcttaacacatcgttggtttgaaaacttccatttttaaaaatttagagtttagtcattagaaaaaataatggactggaaagttatatttatatccaaatatacctatttcaaagtgtatttgtgaggcctgttttagcctgtgtcttttgtattgtgtgttgctaaagaattctacttttagtaggctaatcaacaatgaaagggttagaaaattgctgtggaacatccaggtgaacttcaggaaagacagtgaaaaatggaaaacgttggagcttctgttgagataatcttcattaggtatatatcttagggatacagccttttctttatcttatagcaggaaaaaaaaacttttgagggaaatagaagggctgcgttacacaaaataaacaatggcattgtcataggccttccttttactagtagggcataatgctagggaatatgtgaagatgtttttatgaagtctctttctgatcacgaacaatagcttgcgctctactctgtagttatgtggattgccgagcaatgacccttttcaatttcttatttctgtgttactgaggaccctaatcacttagggatgtaattttatagtataaactttctgtacagtttttcttatagtctaataagtaaaaagtgtccttcaaattatgataattgcctatgtacatggataaattaaaacactgcacacggagtaaaaaaaaaaaaaaaaaa

SEQ ID NO: 5105 - DNA, 4221 bp, Homo Sapiens
  NM_022742
agcctcttcttcactggctcccgccctctttcagtcttggccctctcctccctgtccccccggactaaatacgcacaccccctctttctttctgtgcaagcaagagggtcctggaacagcgggttctgaggaggctgggaggcagggctgagaggtggccgagagagaggagtcgcagagccgccagagtgagtcaggcacctccactgggattacagatcccagagcctcgaggagctggaagacatgtccccttctttcctctgcaccccagcccgcagccagccccccaccccccagcccctcctttctccctgctctcaggacccacagtgaccactctaggctcctatgaggcttccgagggctgtgagaggaagaagggccaacgctgggggtccctggaacgacgggggatgcaagctatggagggggaggtgttactcccagctctctatgaggaggaagaggaagaggaagaggaggaagaagaggtggaagaagaagaagaacaagtgcagaaaggtggcagtgttggctctctgtcagtcaacaagcaccggggactgagcctcacggagacagagctggaggagctgcgggctcaggtgctgcagctggtggcagaactggaggagacccgggaactggcagggcagcatgaggatgactccttggagctacaggggctcctggaggatgaacggctagccagcgcccagcaggcagaggtgttcaccaagcagatccagcagctccaaggtgagctgcgttctctacgggaggagatttccctgttagagcatgagaaagaaagcgaacttaaggaaatagaacaggaattgcatttggcccaggctgagatccagagtctgcggcaagcagcagaggattccgcaactgaacatgagagtgacatagcatccctgcaggaggatctctgccggatgcagaatgaacttgaagacatggaacgcattcggggagattatgagatggagatcgcctccctccgtgcagaaatggaaatgaagagctctgaaccatccggtagtttaggtctctcagattactctgggttacaagaagaactgcaggagctgcgggaacgctaccatttcctgaatgaggaataccgggccctgcaggagagcaacagcagcctcacggggcagcttgcagatctggagagtgagaggacacagagagcaacagagagatggctgcagtcccaaacactgagtatgacgtcagcagagtctcagacttcagaaatggatttcttagagcctgatcctgaaatgcagttgttacggcagcagctacgggatgctgaagagcagatgcatggcatgaagaacaagtgtcaggaattgtgttgtgagttggaagagctacagcatcatcgccaggtcagtgaggaggagcagaggcggctgcagagggagctcaagtgtgctcagaatgaggtgcttcggtttcagacctcccacagtgtcacccagaatgaggagctgaagtccagactctgtaccctgcagaaaaaatatgatactagccaggatgagcagaacgagctcttgaagatgcagctgcaacttcagactgagctccggcagctcaaagtcatgaaatccacacttgtagaaaaccagagtgagaaggagttactgtgccggctgcagaagctgcacctccagcaccagaacgtcacatgtgagaaggaaaagctgctggaacggcagcagcagctgcaggaggagctgcagtgccatgaggcagagctgcagcacctcagggatacggtggcctccttcaaagagagcaatgagaaggacacagagacgcacgctcagcttcaggagatgaagcagctgtaccaggccagcaaggacgagctggagcggcagaagcacatgtatgaccagctggagcaggacctcctgctctgccagctggagctgaaagagctcaaggcctcccaccccattccggaggacaaaggaaagtgtgctaataagtgtgacacactgctgtccagactgacagaattgcaggaaaagtacaaggccagccagaaggagatggggcagctgcagatggagcagtgtgagctcctggaggatcagaggaggatgcaggaggagcagggccagctgcaggaagagctgcacaggctcacactgccactgccaaagagtggcctcttactcaagagtcaggagctactcaccaagttagaagacctgtgtgagctgcagctgctctaccaaggcatgcaggaggaacagaagaagctgatacagaaccaagactgtgtattaaaagaacaattagagatccacgaagagctgcgacgtttcaaagagtctcatttccaggaagtgttggagaatcccgatgattccaaattggctaagtcctccaaatgtaatcgaaacaagcaatccaagctgctcatggagcagatgcaggccctgcaggtgatgtatgacgccggtcaggcgaagcaggagctcttgcagcaagagcaagggaggctcctagaggagcggaagaggctgcaggcagacttgcagctctgcctggaagaaatgcagctgcttcaagtccagtccccttctataaaaatgagccttgagtcctacgggaagagctatggtagcatggtccccagcaatgagaactgtcgcaagacttatgataccactgtggatgacaatgagagctattacaagagttacaccagcacccagaccagcagcaagagctttctcaagagctatgacagcagcaccagtgccagtgaggcctatgggaagagttactgcactaccagcaacagcagcattacctataagaagagttacggcagcaccagtagctctgacacctgccagaagagttttgtcagcagctgcactgacgaggaacctgctgagcctgaagacatggagcgctttgaggaaatggttgtgaaagtgctgatcaagctgcaggcggtgcaggccatgtaccagataagccaggaggaacacagccagctgcaagagcagatggaaaagttactggccaagcagaaagacctgaaggaagagctggatgcctgtgaaagggagttcaaggagtgcatggaatgccttgaaaagcccatggccccccagaacgacaagaatgagatcaaagaactgcagaccaagctgcgggagctgcagctgcaataccaggctagcatggatgagcaggggcggcttctggtagtgcaggagcagctggaggggcagctgcagtgctgccaggaggagctccgccagctcagggagaagaggccttctgttgtcaaagaagcccgggggaagaatgctaataagaacatgaacaagaatgccaatggggttaaaatgaaaaaggtgaccaagccatgctcggatacttctgagagcgaccttgagaccagaaagagtctggaggtagtgctgtactacaaggccagccagaggaaattagatggactagcaaaagaggaggaaaagaaagaggagatggaggaggaaaaaaaggaagtgaaagaggaagcaaaggagcagtgtggggatgagctagttgctgagccagcagatcctgaggaagctaaatccacagaagatcaggaggaaaatgaagaggacaaagaggaagaggagaaggaagaagacagtgaagaggaggaggatgacgccgactcttcccttgaaagtcccgaagaaaataaccccctcagactttccgagagcaaaaagtcatcccctacccccaatccccccatcttctccttgcctcttgtaggcctggtggtcatctcggctttgctctggtgctggtgggctgagacgtcgtcctaatgcagaacatgtttgggttgtggaagcctatggtattcttggctattgcagctgtggctctgtatgtgttacccaacatgcgacagcaggagtcagagttctgcctcatggagtgatggcagaccttggccagcgcgagggcagatccccagtggccaccaccctcagctttgggcaggacacactgtgccagaaccctccccatatgttccatgtgtccccatctcctcagcctcagtcacccaggctgaaaaggcttgtggggagcggctgacttccatctcctgccttgtgtaagaacctgagttccttgtaattaaatatcaactgaattacatga

SEQ ID NO: 5106 - DNA, 1469 bp, Homo Sapiens
  NM_022743
gaggtggatttgagagatacctcccctccttctgctcagctgccttgcagtaattaaactctttctctgctgcaacacccctactgttctccgtgtattggcttttctgggcagcaggaaggaaaagctgatgcgatgctctcagtgccgcgtcgccaaatactgtagtgctaagtgtcagaaaaaagcttggccagaccacaagcgggaatgcaaatgccttaaaagctgcaaacccagatatcctccagactccgttcgacttcttggcagagttgtcttcaaacttatggatggagcaccttcagaatcagagaagctttactcattttatgatctggagtcaaatattaacaaactgactgaagataagaaagagggcctcaggcaactcgtaatgacatttcaacatttcatgagagaagaaatacaggatgcctctcagctgccacctgcctttgacctttttgaagcctttgcaaaagtgatctgcaactctttcaccatctgtaatgcggagatgcaggaagttggtgttggcctatatcccagtatctctttgctcaatcacagctgtgaccccaactgttcgattgtgttcaatgggccccacctcttactgcgagcagtccgagacatcgaggtgggagaggagctcaccatctgctacctggatatgctgatgaccagtgaggagcgccggaagcagctgagggaccagtactgctttgaatgtgactgtttccgttgccaaacccaggacaaggatgctgatatgctaactggtgatgagcaagtatggaaggaagttcaagaatccctgaaaaaaattgaagaactgaaggcacactggaagtgggagcaggttctggccatgtgccaggcaatcataagcagcaattctgaacggcttcccgatatcaacatctaccagctgaaggtgctcgactgcgccatggatgcctgcatcaacctcggcctgttggaggaagccttgttctatggtactcggaccatggagccatacaggatttttttcccaggaagccatcccgtcagaggggttcaagtgatgaaagttggcaaactgcagctacatcaaggcatgtttccccaagcaatgaagaatctgagactggcttttgatattatgagagtgacacatggcagagaacacagcctgattgaagatttgattctacttttagaagaatgcgacgccaacatcagagcatcctaagggaacgcagtcagagggaaatacggcgtgtgtctttgttgaatgccttattgaggtcacacactctatgctttgttagctgtgtgaacctctcctattggaaattctgttccgtgtttgtgtaggtaaataaaggcagacatggtttgcaaaccacaagaatcattagttgtagagaagcacgattataataaattcaaaacatttggttgaggatgccatcaaaaaa

SEQ ID NO: 5107 - DNA, 2774 bp, Homo Sapiens
  NM_022744
caaaagctcggcatggctgacgacgcgggtttggagaccccgctgtgttccgagcagttcggctccggggaggcacggggctgccgcgccgccgcggacgggagcctgcagtgggaggtcgggggctggcgctggtgggggctctccagggccttcacggtcaaacctgaaggacgagatgcgggcgaagtgggggcttccggggccccctcaccgcccctctccgggctccaggccgtgttcctgcctcagggcttccctgatagcgtcagcccggactacttgccctaccagctgtgggattccgtgcaggcgtttgcttccagcctctccggctccctagccacccaggcagtcttgctgggcataggggtggggaacgcaaaagccactgtttcagctgccacggccacctggctcgtgaaagattcaactggcatgctgggccgcatcgtctttgcctggtggaaagggagcaaactggactgcaatgccaagcagtggaggctttttgcggacatcctcaatgacgtagccatgttccttgagattatggctcctgtatacccaatctgtttcaccatgaccgtctccaccagcaacctagccaagtgcatcgtgagtgttgctggtggggccactcgggctgccctgaccgtgcaccaggctcggaggaacaacatggctgacgtgtcagccaaggacagcagccaggagacgctggtgaacctggcggggctcttggtcagcctcctgatgctccctctggtgtcaggttgccctggcttcagccttggatgtttcttcttcctcactgccctccacatctacgccaactaccgcgcggtccgagccctggtcatggagaccttgaacgaaggccggctccggctggtcctgaagcactaccttcagaggggagaggtactcgacccaactgcagccaatcgcatggagccgctgtggacaggtttctggccagctccgtctctatccctgggggtccccttacaccgcttggtctccagtgtctttgagctgcagcagctggttgaggggcaccaagaatcctacctcctctgctgggaccagtcacaaaaccaggtacaggtagttctgaaccagaaggcaggccccaagaccatcctaagggccgccacacatgggctgatgcttggggccctgcagggagatggaccccttccagcagagctggaggagctgaggaaccgggtgcgggcaggtcctaagaaagagagctgggtcgtcgtcaaggagacacacgaagtgttggacatgctgttcccaaagttcttgaaaggactgcaggatgccggctggaagaccgagaagcaccagctagaggtggatgagtggagggccacatggcttctgtctcccgaaaagaaggtcttgtgagcagcccagacggaggcccaagcccagggcaggaacctggagcaaggacactttggccacagcaggacaggggaaaggcagctttatttttccttagggcaactgcagcgggtgggccaggccctcatgggaagtgactgccaatcagatgcagtgggccccaggcagaggaaggccgggagaaggggagccaggaccttctcaccccactgccccttccccttttctggggagcaccgcaggctcctcacccccacttcctgtgaggctgtggcttatggtgtccaacgcagttggtcttaggcatagaagccccagaggaacacggccactgccatcatgagcagggcattgaggttgaccacacgggcccagctcgggtcctcgctgatgtcctccagccgcctggctgctgccgctgcctcctcctgggtaaggggcggaggactgcccaccccacctctgctcattccacaaaaccagagcaggcactggcggaagaggcttggtgccggggcctggggctctgagggaaattgaggccctgcagttagtttgcgggaactcagctcctccagccccacctcccagcatggtgccctaccattcatctccatggcactctctgggcacccattctgtacagggagtgaggagccttgctgctcatcagcatccaggtcctcccgttcctccttgctatgccggagactgaagaccaggcggtggagctggggagggtgggagcacgaacgaggtgggagttctgtccccccatgcctggccctaaagtctcttgcacaccagctcgtcactgcctgccctacccacctctgtccagtctacacacccagcccaggcttaactcatgccaactccaccctacatggctgccctgtgccctcgggataaaccccaagcccctgagcttgtgtttaaagccgttggccttgctcccccagctttgtcagctcaggtctgtctacacccagatggtagcgcttgtgacactggcctggcagtcctgctcacagtgttctgtgcctgtgtgctcccaccctttcctcctgctgctgcagaaacccggccatccttccacacccagatctcttgtcctgtcctcaccccaccctgccaccatcagccctgcctggagccacctgccctttggcaacaaaaccaaacctttttgtgggcgttcaagatggtattgtgcccaccagtcagatcctgtgttttgagtcccaaaggccatgccaaggattggctttgggaggctttaatcaccaacccatcaacatcaagcctcccccaggccggttcaaataaatgtatttaaataaaaaaaaaaaaaa

SEQ ID NO: 5108 - DNA, 2258 bp, Homo Sapiens
  NM_022746
acagcgccctgcagcgcaggcgacggaaggttgcagaggcagtggggcgccgaccaagtggaagctgagccaccacctcccactccccgcgccgccccccagaaggacgcactgctctgattggcccggaagggttcaggagctgcccagcctttgggctcggggccaaaggccgcaccttcccccagcggccccgggcgaccagcgcgctccggccttgccgccgccacctcgcggagaagccagccatgggcgccgccggctcctccgcgctggcgcgctttgtcctcctcgcgcaatcccggcccgggtggctcggggttgccgcgctgggcctgaccgcggtggcgctgggggctgtcgcctggcgccgcgcatggcccacgcggcgccggcggctgctgcagcaggtgggcacagtggcgcagctctggatctaccctgtgaaatcctgcaagggggtgccggtgagcgaggcggagtgcacggccatggggctgcgcagcggcaacctgcgggacaggttttggcttgtgatcaaccaggagggaaacatggttactgctcgccaggaacctcgcctggtcctgatttccctgacctgcgatggtgacaccctgactctcagtgcagcctacacaaaggacctactactgcctatcaaaacgcccaccacaaatgcagtgcacaagtgcagagtgcacggcctggagatagagggcagggactgtggcgaggccaccgcccagtggataaccagcttcctgaagtcacagccctaccgcctggtgcacttcgagcctcacatgcgaccgagacgtcctcatcaaatagcagacttgttccgacccaaggaccagattgcttactcagacaccagcccattcttgatcctttctgaggcgtcgctggcggatctcaactccaggctagagaagaaagttaaagcaaccaacttcaggcccaatattgtaatttcaggatgcgatgtctatgcagaggattcttgggatgagcttcttattggtgacgtggaactgaaaagggtgatggcttgttccagatgcattttaaccacagtggacccagacaccggtgtcatgagcaggaaggaaccgctggaaacactgaagagttatcgccagtgtgacccttcagaacgaaagttatatggaaaatcaccactctttgggcagtattttgtgctggaaaacccagggaccatcaaagtgggagaccctgtgtacctgctgggccagtaatgggaaccgtatgtcctggaatattagatgccttttaaaaatgttctcaaaaatgacaacacttgaagcatggtgtttcagaactgagacctctacattttctttaaatttgtgattttcacatttttcgtcttttggacttctggtgtctcaatgcttcaatgtcccagtgcaaaaagtaaagaaatatagtctcaataacttagtaggacttcagtaagtcacttaaatgacaagacaggattctgaaaactccccgtttaactgattatggaatagttctttctcctgcttctccgtttatctaccaagagcgcagacttgcatcctgtcactaccactcgttagagaaagagaagaagagaaagaggaagagtgggtgggctggaagaatatcctagaatgtgttattgcccctgttcatgaggtacgcaatgaaaattaaattgcaccccaaatatggctggaatgccacttcccttttcttctcaagccccgggctagcttttgaaatggcataaagactgaggtgaccttcaggaagcactgcagatattaattttccatagatctggatctggccctgctgcttctcagacagcattggatttcctaaaggtgctcaggaggatggttgtgtagtcatggaggacccctggatccttgccattcccctcagctaatgacggagtgctccttctccagttccgggtgaaaaagttctgaattctgtggaggagaagaaaagtgattcagtgatttcagatagactactgaaaacctttaaagggggaaaaggaaagcatatgtcagttgtttaaaacccaatatctattttttaactgattgtataactctaagatctgatgaagtatattttttattgccattttgtcctttgattatattgggaagttgactaaacttgaaaaatgtttttaaaactgtgaataaatggaagctactttgactagtttcagaaaaaaaaaaaaaaaa

SEQ ID NO: 5109 - DNA, 7639 bp, Homo Sapiens
  NM_022748
agccagccaggaggacgggcccgcccgcgcgctactcggagcccagcctcgttgcggccatcgccctgccggaccgcgcctcaggctcccccagccggaagaattaacctcgagtctgcacgcttttaagaacaaggcctttaaaaaatccaaagtgtgtggagtttgcaaacaaattattgacggtcaaggtatttcatgccgagcctgcaagtattcctgccacaagaaatgtgaagccaaggtggtgattccctgcggtgtgcaagtccgactggaacaggctccagggagttccacgctgtccagttctctctgccgtgataaacctctgcggcccgtcatcctgagtcccaccatggaggagggccatgggctggacctcacttacatcacggagcgcatcatcgctgtgtccttccctgccggctgctctgaggagtcctacctgcacaacctacaggaggtcacgcgcatgctcaagtccaagcacggggacaactacctggtattaaacctttcagaaaagagatatgaccttacgaagcttaacccaaagatcatggatgtgggctggccagagctccacgcaccgcccctggataagatgtgtaccatatgcaaggcgcaggagtcctggctgaacagcaacctccagcatgtggtcgtcattcactgcaggggcgggaaaggacgcataggagtggtcatatcatcctacatgcatttcaccaacgtctcagccagcgccgaccaggcccttgacaggtttgcaatgaagaagttttatgatgacaaagtttcagctttaatgcagccttcccaaaaacggtatgttcagttcctcagtgggctcctgtccggatcggtgaaaatgaatgcctctcccctgttcctgcattttgtcatcctccacggcacccccaacttcgacacaggtggagtgtgccggccctttctgaagctctaccaagccatgcagcctgtgtacacctccgggatctacaacgttggcccagaaaaccccagcaggatctgcatcgtcatcgagccggcccagcttctgaagggagatgtcatggtgaaatgctaccacaagaaataccgctcggccacccgtgacgtcattttccgcctgcagtttcacactggggctgtgcagggctacgggctggtgtttgggaaggaggatctggacaatgccagcaaagatgaccgttttcctgactatgggaaggttgaattagtcttctctgccacgcctgagaagattcaagggtccgaacacttgtacaacgaccacggtgtgattgtggactacaacacaacagacccactgatacgctgggactcgtacgagaacctcagtgcagatggagaagtgctacacacgcagggccctgtcgatggcagcctttacgcgaaggtgaggaagaaaagctcctcggatcctggcatcccaggtggcccccaggcaatcccggccaccaacagcccagaccacagtgaccacaccttgtctgtcagcagtgactccggccactctacagcctctgccaggacggataagacggaagagcgcctggccccaggaaccaggaggggcctgagtgcccaggagaaggcagagttggaccagctgctcagtggctttggcctggaagatcctggaagctccctcaaggaaatgactgatgctcgaagcaagtacagtgggacccgccacgtggtgccagcccaggttcacgtgaatggagacgctgctctgaaggatcgggagacagacattctggatgacgagatgccccaccacgacctgcacagtgtggacagccttgggaccctgtcctcctcggaagggcctcagtcggcccacctgggtcccttcacctgccacaagagcagccagaactcactcctatctgacggttttggcagcaacgttggtgaagatccgcagggcaccctcgttccggacctgggccttggcatggacggcccctatgagcgggagcggacttttgggagtcgagagcccaagcagccccagcccctgctgagaaagccctcagtgtccgcccagatgcaggcctatgggcagagcagctactccacacagacctgggtgcgccagcagcagatggttgtagctcaccagtatagcttcgccccagatggggaggcccggctggtgagccgctgccctgcagacaatcctggcctcgtccaggcccagcccagagtgccactcacccccacccgagggaccagcagtagggtggctgtccagaggggtgtaggcagtgggccacatccccctgacacacagcagccctctcccagcaaagcgttcaaacccaggtttccaggagaccaggttgtgaatggagccggcccagagctgagcacaggcccctccccaggctcgcccaccctggacatcgaccagtccatcgagcagctcaacaggctgatcctggagctggatcccaccttcgagcccatccctacccacatgaacgccctcggtagccaggccaatggctctgtgtctccagacagcgtgggaggtgggctccgggcaagcagcaggctgcctgacacaggagagggccccagcagggccaccgggcggcaaggctcctctgctgaacagcccctgggcgggagactcaggaagctgagcctggggcagtacgacaacgatgctggggggcagctgcccttctccaaatgtgcatggggaaaggctggtgtggactatgccccaaacctgccgccattcccctcaccagcggacgtcaaagagacgatgacccctggctatccccaggacctcgatattatcgatggcagaattttaagtagcaaggagtccatgtgttcaactccagcatttcctgtgtctccagagacaccgtatgtgaaaacagcgctgcgccatcctccgttcagcccacctgagcccccgctgagcagcccagccagtcagcacaaaggaggacgtgaaccacgaagctgccctgagacgctcactcacgctgtggggatgtcagagagccccatcggacccaaatccacgatgctccgggctgatgcgtcctcgacgccctcctttcagcaggcttttgcttcttcctgcaccatttccagcaacggccctgggcagaggagagagagctcctcttctgcagaacgccagtgggtggagagcagccccaagcccatggtttccctgctggggagcggccggcccaccggaagtcccctcagcgctgagttctccggtaccaggaaggactccccagtgctgtcctgcttcccgccgtcagagctccaggctcctttccacagccatgagctgtccctagcagagccaccggactccctggcgcctcccagcagccaggccttcctgggcttcggcaccgccccagtgggaagtggccttccgcccgaggaggacctgggggccttgctggccaattctcatggagcgtcaccgacccccagcatcccgctgacagcgacaggggctgccgacaatggcttcctgtcccacaactttctcacggtggcgcctggacacagcagccaccacagtccaggcctgcagggccagggtgtgaccctgcccgggcagccacccctccctgagaagaagcgggcctcggagggggatcgttctttgggctcagtctctccctcctccagtggcttctccagcccgcacagcgggagcaccatcagtatccccttcccaaatgtccttcccgacttttccaaggcttcagaagcggcctcacctctgccagatagtccaggtgataaacttgtgatcgtgaaatttgttcaagacacttccaagttctggtacaaggcggatatttcaagagaacaagccatcgccatgttgaaggacaaggagccgggctcattcattgttcgagacagccattccttccgaggggcctatggcctggccatgaaggtggccacgcccccaccttcagtcctgcagctgaacaagaaagctggagatttggccaatgaactcgtccggcactttttgatcgagtgtaccccgaagggagtgcggttgaaagggtgctcgaatgaaccatatttcgggagcctgacggccttggtgtgccagcattccatcacgcccttggccttgccgtgcaagctgcttatcccagagagagatccattggaggaaatagcagaaagttctccccagacggcagccaattcagcagctgagctgttgaagcagggggcagcctgcaatgtgtggtacttgaactctgtggagatggagtccctcaccggccaccaggcgatccagaaggccctgagcatcaccctggtccaggagcctccacctgtgtccacagttgtgcacttcaaggtgtcagcccagggcatcaccctgacagacaatcagaggaagctcttcttccggaggcattaccccgtgaacagtgtgattttctgtgccttggacccacaagacaggaagtggatcaaagatggcccttcctcaaaagtctttggatttgtggcccggaagcagggcagtgccacggataatgtgtgccacctgtttgcagagcatgaccctgagcagcctgccagtgccattgtcaacttcgtatcaaaggtcatgattggttccccaaagaaggtctgagaactcccctccctccctggacccaccgatgcctctcgaagccctggagacagccgttgggtgagggtggggcccccactttttaccaaactagtaaacctgacattccaggcccatgaggggaaagaggatcttccagctctgcaaaaacaagaacaaacaacatcaccgtgaattggcctttcctgaaagtgacttatctgacacatctctgtagccacatgctttttgggtagaagaagctgggcatgggtgcaccccaccccctagggtccccatgggaaagggacatgcaaggaaacagcacagaacacgaggtggtccccatgtccctggcacactagcattccgggggatgaggaatccccagcccttgaggcagaggtgccgagtgactgccatgcttcgcccgtccgcatgggcgcttctgtccagctgcacccgaggccgggggtttccctcacctcggtcttcccaagatggagatgctaacgaaactgagaagggggcgtatgtttgacgaaggtttgtgcaagtcaggcccttctggaacacagcagggcctacaacgaggggcctttgcgatgggctgtgaggatgggggtggtgggaagaattggccacgttggagaccccatgccaccccaccatggtgagtgctctgtgcctcctgctcacctgtggtgagctgggcgagctgggcgagctgggcgagctgggctggggagagcctgtgaggaccgagaggagaaatgagaagaaggaacaaaaatattatttctatgtaatttatattttacttatgccaaattatttatgataatttgccattgctatactgtaccagtgtcaaatgctgcagcctgccaagctgtgattttgtgaggcttgtccctatgtaggatgcaccgcaggcccctggccactgaaagagtgtgcagtggactgtgggtctcccatatgcggtgccgcccaaaggtggctttgcctcaagcaacctaccctgatgttttactcattggaatgtttttccccgattgtggatgacttcttttctgatggagagagtccaggagggatggaaaactcctggatttaagctcagcatcccccacatgggcttttcgatcatcttcaggcctgaagctgcacgacctgaagttcgcctgcatttatcagccctctttgtgctgctccttgccaccttggggttcctgctggggaccatgtgtggttgtggcatgtgtgagcagaagggaggatgaggaaaaagagaagaaaccccggtactgacaagctgtttttgagtgccactgtttgccatcatctaagccactgaatcaagtgtatttcaggcttatttcaacattccaatgccctggttttcctgcttgaatctgttcgtggtcaaaggtttgggggaatttgtgaccctggaacatccccagagtgaaagatggagctgggccacatcagaataaggccttggccccatcctctcacagcctaggtgctctgcaggcatgctgactgtcctgattgcgatccagcccgaaattccctcctctgctttcaaaagtcaaatcccccattcttaggccacactggtgtcacaagctcctgtcagggagctggggtttgggaatgtgctttgtgaactctgctttaaagtgaggggccgaggaaaacttagaaacaggcagagttggaagcagccaaatcacagtgggtgttgtgtgtgtgtgcgtgtgtgcatgcgtgcgtgtatgcgtgtgtgaaagcaggtggaccattccactttttagctcctattgatgcaccaaaccaagtgcctcatttctgtgccaaatgtttgccttggtcgttgtggacctccttctctaacttgcggtggcatgactgtcaggaggtgctggcattttcagcagatcctcatgtgttgaccctgatgtctttagcagaggcctctagcatctcggtttttcatccactgcaggaatgtggccacagggagcagaggtttgtactttccccaagaggtcctcatcctgagacggtctctacccatgtttaacccaaagagtgcaggccaggttccttatccttctgatgaaggatgagagagctcatttagaagtcagagcaaactagggtctcagtattgagaaacgcagcctgccagggaatcacagagacatcggggtgcccgcgatggccctcatgaagccatgcctcgacggcattcaggaagccctgcaaacgtgctttttgaactcattggccaggtgtgatttttacacaaggtaaacgtggtcaagggcatcggggaatttgctccaagcagatagctccctctgaggaaccaaaggaagcaagtttccacgatttctgaagagctggtataggaagtttctttcttccttttgtgttacatgtgcattaaacagaacaagctgtgtgtcatcacagattgtactgtgggctcagaaaccgtgagagagcccccaccgtggacaccggctctagggccacaggaaaaggaacgtttccaggcattttgtctccagggctcccgctggacaggcacgtactgccctggggagtaaatgcggagagttcacgaactgtgcccaacgcatgttatagccagggtcctactaactactcagtaaaagaacgtattgttgtattcctccagtgttaagctatagccatgttaaaagtcactgtgcatttattctcagcatcaaataccttgtaacgtcttctctgccttgttagtgcatatttttacttttctgatactgtaaagaatatatccagtatgtaaatgaatgttctataaatcttttgtatagtcattttctctgctccttaaatatcatctctattcagagtataataaaattatgaacttggtaaaaaaaaaaaaaaaaaaaaaaa

SEQ ID NO: 5110 - DNA, 3759 bp, Homo Sapiens
  NM_022749
agagcgctgccgccgccgctttcgcccgggagccgggggccgggcgccatcatgctgagccggctcggggcgctgctgcaggaagccgtgggggcgcgcgagcccagcattgacctgctgcaggccttcgtggagcactggaagggcatcacgcactactacatcgagagcacagatgaaagcacccccgccaagaagacagacattccctggcggctgaagcagatgctggatatcctggtgtatgaagagcagcagcaggcggccgcgggtgaggcagggccctgcctggagtacctgctgcagcacaagatcctggagactctctgcacgctgggcaaggccgagtaccccccaggcatgcggcagcaggtgttccagttcttcagcaaggttctggcgcaggtgcagcaccccctgctgcattacctcagcgtccacaggcctgtgcagaaactcctccgacttggtgggactgcttccggatccgttacagaaaaggaggaggtgcagttcaccaccgtcctctgctccaagatccagcaggacccagagctgctcgcctacatcctggaaggtaaaaagattgtaggtaggaagaaagcatgcggagaacccactgccctgcctaaggacacaaccagccacggggacaaggactgctcccacgatggtgctcctgccaggccccagctggacggggagtcctgtggggcccaggccttgaacagccacatgcctgctgagaccgaggagctggacggtgggaccacagagagcaacctgattacctccctgcttgggctgtgccagagcaagaagagtcgggtggccttgaaggcccaggagaacctgctgctcctggtgagcatggcctccccagcagctgccacctacctggtacagagcagcgcctgctgccctgcgatcgtccggcacctttgccagttgtaccggtccatgcctgtcttcctggaccccgcagacattgccaccttagagggcatcagctggaggttacccagtgccccgtctgatgaggcttccttccctggcaaggaggccttggctgccttcttgggctggtttgattactgcgaccacctcatcacagaggcacacacggtggttgcggacgccttggcgaaggctgtggctgagaacttcttcgtggagaccctgcagccccagctcctgcacgtgtccgagcagagcatcttgacctccaccgccctcctcacagccatgctgcgccagcttcgctcccctgcgctgctgcgggaggccgtggctttcctcctgggcacagaccggcagcctgaagcccccggggacaacccccacaccctgtatgctcatctcatcgggcattgtgaccacctctctgatgagatcagcatcaccacactccggctgtttgaggagctgctgcagaagccccacgaggggatcatccacagcctggtcctgcgcaaccttgagggccgcccttacgtggcctggggctcaccagagcctgagagctatgaggacaccctagacctggaggaagacccctacttcaccgacagcttcctggattccggctttcaaactcccgcaaagcctcgcctagctcctgctaccagttacgatggcaaaacagcagtgaccgagatcgtcaacagtttcctgtgcctggtccccgaggaagccaagacctctgccttcctggaggagacaggctatgacacatacgtccacgatgcttatggcctgttccaggagtgcagctcccgcgtcgcctcctggggctggcctctgacccccacacctttggacccccatgagcccgagcgacctttcttcgagggccacttcctccgagtgctgtttgaccgcatgtcccggattctggatcagccatacagcctgaacctgcaggtgacctcggtcctgtcccggcttgccctcttcccccacccccatattcatgagtacctgctggatccgtacatcagcctggcccccggctgcaggagcctattctccgtgttggtgagggtgatcggggacttgatgcagagaatccagagggtaccccagttcccaggcaagctgctcctggtgcgcaagcagttgacgggccaggctcctggggagcagctggaccaccagaccctcctccagggcgtggtggtgctggaggagttctgcaaggagctggctgccattgccttcgtcaagtttcccccacatgatcctcgccagaacgtctccccagccccggaagggcaggtctgagccagcaccagggcggtgggagactcctgtccacacctctgccccagagctgcctcctgcctggcactgccgccacactcccctcctgggatggggcttctgctcccgggctcactcaaggagactgcggcatgttgaccacaccagactgggtttcagggaatgggcatgccaggtgccaaggagccaaacagatggctttccaggcagcaaggtccttggggccttcttggaggagcttgggtgacagccaggtgagcacccagaccccagaccctcatgtgctgtgtgcctggccccttctgtactggccatttgtggccagggccaagcctgtgactcaactccaggggcaagatggggagtgagctgatggctccgagactggtcaggagcccaggccagtgagatggggcctggagccttgtctgtgtcacattaggtaccatgggagctgctgagacctgacattttgtcccctgcctacatggcttggcccatggagaaggagcagtgaatgggatcgtcggggaagcccctcttcctgctctgctcccctggaaactgttgcaaaactcccagccgcctcatggcaaatgcccaaagcatgttccgcacccaggcgggggcccctgctaatgagaaccttggtgcagctgcagccaggaggggagcgggcccaggagccaggctcaggtccagctggttcctctctggcgccttctgaacccgtctcagcaggtccacagcacctgggcagaggtcagagaccaggggaggccgggccttgccctcccttctgcccagggcccagtgttcttgatagaagacccttctggggagccagggagctcaggggacagataagggaaggacgccccctgactccaggcccctgagcctggcgggaagtggctgcggcccaggcagccagtcctggtggtgttctccctgcatgccctccgtggctgggctgccaccccacccggcccgaatctgtcttgacctgcaggaatacacgggcggcgccaggcattacctcacagcgggactacacagttgctggctttgctcctgggcaaggaggagcaggccagagcctcttttgcttccttttcttgcccatgccgcttctagaagccaggcacaggttgccaagaggtgacacgaaacaggaggaaactcagtgacctctgcctctcccacattcctccccgcgggggaggacctcgccgctctgaagagcaccgtgcacatgtgggtgcacaaacgtgggtgttggtgtggacggggcgcagatctccgtggatgaactgcgtctggactcttagattcataaaatattcgagggtttgggagtcacagaccctcccctctcctcagtgcactttggcatttgcacggtgtcttccccggacagcacagcaataaatggtgtgattgcgtggaaaaaaaaaaaaaaaaaaaaaaaaaaaa

SEQ ID NO: 5111 - DNA, 3805 bp, Homo Sapiens
  NM_022750
attcctggattacctcctcaaagggctctaacaactcgcattgctctcagcgtgtgagagggtcctttgctctgaagggtcttctaaaatatttgttcaatcgttacttagcaggggctgggagtaacggattttattttattttattttattttttgagacggagtctcgctctgtcgcccaggctggagtgcagtcgcgcaatctcggctcacggatttgctcttttaaaggacatacccttttatgtttaaatgaaggaactcattgatgcaccgaggcgaaaggaacctttaattaagtgcgtcttctatgcggagtgatcgcttttgtcacttgttcgaggggtgagagctcccgtcagttgtccctgtttctgtgagccgtctacgaagcccgggcttggcctgggcgacgctgagcggctttaaccggcggcgtccagccggctccgccagcgctgccgccgccctcgaggctccctctgactgaaggcgcgctgagcatcgcggcattaggggctcctggtccctcaaacatccagggaagccattttcagggactaggtactgacccccgcgagccgccacagccacagcccgcgctccgggccgaacgcccgagctcaagagctcccgagcttccgtcgggcggcggcctcacagctgggggccctgaggcggaaggcgcagccgctcagctgcggaccgggggcgtggcgagggcgcacaggttctgtttttcgccggcccggggccgctttcggtttcgtttcccgccggcgtctccaccctgcgagagccgcccgccagccagcgtccgccgccgtccgcgtcgcgccacccgcggtccgacgggagcaggcccagcggccatggcccaggccggcgtcgtcggtgaggtcacccaggtgctgtgcgcggccgggggcgccctggagttgcccgagctgcggcgccgcttgcggatgggcttgagcgccgacgcgctggagcggctgctgcggcagcgtgggcgcttcgtggtggcggtgcgggcgggcggcgcagccgcggccccggagcgcgtggtgctggccgcctcgccgctgcgcctgtgtcgcgcgcaccagggctccaagccgggctgcgtggggctctgcgcgcagctccacctctgcaggttcatggtctacggcgcctgcaagttcctgagagccgggaagaactgtaggaatagtcacagcttgacaaccgaacacaacctgagtgtgctgagaactcatggcgttgaccacctgagctataatgagctatgccaactcttgtttcagaacgacccctggcttttgccagaaatttgccaacattacaacaaaggagatggaccccacggctcttgtgcctttcaaaagcagtgcatcaagctccatatctgccagtattttttacagggggaatgcaagtttggcactagctgtaagagatcccatgatttctctaattctgagaatctggaaaaattggagaagttgggtatgagctcagacctggtgagcaggctgcctaccatttatagaaatgcacatgacatcaagaataagagctctgcccccagcagagtgcctcctctttttgtcccacaggggacttctgaaagaaaagacagttcaggttctgtgtccccaaacactcttagccaggaggagggtgatcagatctgtttgtaccatatccggaaaagttgtagctttcaagataagtgccatagagttcatttccatttgccgtatcgatggcaattcttggatagaggcaaatgggaggatttggacaacatggaacttattgaagaggcatattgcaatcccaaaatagaaaggatcctgtgctctgagtcagccagtacctttcactctcattgtctgaactttaacgccatgacttacggtgctacccaggctcgccgcctctccacggcctcctctgtcaccaaacctccacacttcatcctcaccactgactggatttggtactggagtgatgagtttggttcttggcaggaatatggaagacagggcacggtgcaccctgtgaccactgtcagcagtagcgacgtggagaaggcctacctggcctactgtacaccggggtctgacggccaggcagccaccttgaagttccaggccggaaagcacaactacgagttagatttcaaagccttcgttcagaaaaacctggtctatggcacaactaaaaaggtttgccgcagacccaaatacgtgtctccccaggatgtgacgaccatgcaaacctgcaataccaagtttccaggcccgaagagcatcccagactattgggactcctctgccctgccagacccaggctttcagaagatcacccttagttcttcctcggaagagtatcagaaggtctggaacctctttaaccgcacgctgcctttctactttgttcagaagattgagcgagtacagaacctggccctctgggaagtctaccagtggcaaaaaggacagatgcagaagcagaatggagggaaggccgtggacgagcggcagctgttccacggcaccagcgccatttttgtggacgccatctgccagcagaactttgactggcgggtctgtggtgttcatggcacttcctacggcaaggggagctactttgcccgagatgctgcatattcccaccactacagcaaatccgacacgcagacccacacgatgttcctggcccgggtgctggtgggcgagttcgtcaggggcaatgcgtcctttgtccgtccgccggccaaggagggctggagcaacgccttctatgatagctgcgtgaacagtgtgtccgacccctccatctttgtgatctttgagaaacaccaggtctacccagagtatgtcatccagtacaccacctcctccaagccctcggtcacaccctccatcctgctggccttgggctccctgttcagcagccgacagtgagcgcacaggagtgttccaggcctttcacctgctctgccttgaaatggctatttgggcctttccttttctttttaaacagaaacttttaatgaactgttctcttaacattgacctctcaatgaagttatgttcttaatctcttgctaataatgatttttacttttaagtcacttttgggttcactagtggattaaccagaagtgattgtagttgagtccagttttgctttttaataatgtgttgaagttttagtttttactctttgttgactttgctgcttattggcaccagggacagagtttctagatacaattttatggattggttttaatttttatgagtttgtctctgcagtgattcggtttctcagagtctcatggcatcatagtttttccagaatgacacagtagccaccggtggatgacagcccacgggcggcacagtcacttctgcctgttgttctgacaccaacccaggcagctctgctgtggcttctcctgggctctggcattagttggtctgtgtcacattgtcagaacaggtggctgctgtgtggtgccatcgagtccctgctggttccccttgtcctgggagggtcacccattgcccaaggaagtgcatccacctggcaggtgacctggaggagtagcttccccgaggacccccaggcttggcctgtgattgcgcaaacccacatttcctaagcacactggacacccttcgagtgtgggttttaacatccctgtgagattgaatacttgtgccacacatgtcacaaaagagtatggaaataaaagaaaatttatccgaaaaaaaaaaaaaaaa

SEQ ID NO: 5112 - DNA, 3167 bp, Homo Sapiens
  NM_022752
aggggcgttgctgagggtagctgggggcgagagcgaggctacggagcaggcgagaggcgacggcgagagctagagcgggcgcagcgttagggtggccgtgcaaggggagccgtggcccgggcccggggcgtgcgagacggcggaagcagcccagggccttgctgccgccatgactgaggaatcagaggagacagtcctgtacattgagcaccgctatgtctgctctgagtgcaaccagctgtatggatcactggaagaggtgcttatgcaccaaaactcccacgtgccccagcagcactttgagctggtgggcgtggctgatcccggagtcactgtggccacagacacagcttcaggcacgggcctctatcagacccttgtgcaggagagccagtaccagtgcctggagtgtggtcaactgctgatgtcacccagccagctcctggagcaccaggagctgcacctgaagatgatggcaccccaggaggcagtgccagctgagccatcacctaaggcaccacccctgagctccagcaccatccactacgagtgtgtggattgcaaggctctctttgccagccaggagctctggctgaaccaccggcagacgcacctccgggccacacccaccaaggctcctgcccctgttgtcctggggtccccagttgttctagggcctcctgtgggccaggcccgagtggctgtggagcactcataccgaaaggcagaagagggtggggaaggggcgactgtcccatctgccgctgccaccaccactgaggtagtgactgaggtggagctgctcctctacaagtgctctgagtgctcccagctcttccagctgccggcggatttcctggagcaccaggccactcacttccctgctcctgtacccgagtctcaggagcctgccttacagcaggaggtgcaggcctcgtcacctgcagaggtgcctgtgtctcagcctgaccccttgccagcttctgaccacagttacgagctgcgcaatggtgaagccattgggcgggatcgccgggggcgcagggcccggaggaacaacagtggagaagcaggcggggcagccacacaggagctcttctgctcagcctgtgaccagctctttctctcaccccaccagctacagcagcacctgcggagtcaccgggagggcgtctttaagtgccccctgtgcagtcgtgtcttccctagcccttccagtctggaccagcaccttggagaccatagcagcgagtcacacttcctgtgtgtagactgtggcctggccttcggcacagaggccctcctcctggcccaccggcgagcccacaccccgaatcctctgcattcatgtccatgtgggaagacctttgtcaaccttaccaagttcctttatcaccggcgtactcatggggtagggggtgtccctctgcccacaacaccagtcccaccagaggaacctgtcattggtttccctgagccagccccagcagagactggagagccagaggcccctgagccccctgtgtctgaggagacctcagcagggcccgctgccccaggcacctaccgctgcctcctgtgcagccgtgaatttggaaaggccttgcagctgacccggcaccaacgttttgtgcatcggctggagcggcgccataaatgcagcatttgtggcaagatgttcaagaagaagtctcacgtgcgtaaccacctgcgcacacacacaggggagcggcccttcccctgccctgactgctccaagcccttcaactcacctgccaacctggcccgccaccggctcacacacacaggagagcggccctaccggtgtggggactgtggcaaggctttcacgcaaagctccacactgaggcagcaccgcttggtgcatgcccagcacttcccctaccgctgccaggaatgtggggtgcgttttcaccgtccttaccgcctgctcatgcaccgctaccatcacacaggtgaatacccctacaagtgtcgcgagtgcccccgctccttcttgctgcgtcggctgctggaggtgcaccagctcgtggtccatgccgggcgccagccccaccgctgcccatcctgtggggctgccttcccctcctcactgcggctccgggagcaccgctgtgcagccgctgctgcccaggccccacggcgctttgagtgtggcacctgtggcaagaaagtgggctcagctgctcgactgcaggcacacgaggcggcccatgcagctgctgggcctggagaggtcctggctaaggagccccctgcccctcgagccccacgggccactcgtgcaccagttgcctctccagcagcccttggaagcactgctacagcatcccctgcggcccctgcccgccgccggggtctagagtgcagcgagtgcaagaagctgttcagcacagagacgtcactgcaggtgcaccggcgcatccacacaggtgagcggccatacccatgtccagactgtggcaaagcgttccgtcagagtacccacctgaaagaccaccggcgcctgcacacaggtgagcggccctttgcctgtgaagtgtgtggcaaggcctttgccatctccatgcgcctggcagaacatcgccgcatccacacaggcgaacgaccctactcctgccctgactgtggcaagagctaccgctccttctccaacctctggaagcaccgcaagacccatcagcagcagcatcaggcagctgtgcggcagcagctggcagaggcggaggctgccgttggcctggccgtcatggagactgctgtggaggcgctacccctggtggaagccattgagatctaccctctggccgaggctgagggggtccagatcagtggctgactctgcccgacttcctctttggcacctccattccctgttgctgaaggccctccagcatccccttaagcatctgtacatactgtgtcccttcctcttcccatccccaccaccttgtaagttctaaattggatttattctctcgtgaggggggtgctctggggtccttgacacacataaaggtgcccccccaccttccacctcttagcactggtgaccccaaaaatgaaaccatcaataaagactgagttgccagcagtgtgtagagtggaaaaaaaaaaaaaaaaaaaaaaaaaaaaaaaaaaaaaaa

SEQ ID NO: 5113 - DNA, 4317 bp, Homo Sapiens
  NM_022753
ctggtgttggcccggctgactcggggtaggggaggtcggggagggggcgataaaatggcgcagggggcggagtgaggcgcagtcgttcgcccaggctttggcccggcttccggaggaaggtgggagtcaatcattttgacaagtctcctgaaaggaacagctagcaggaactgaaacctttttccatttggtctcgtggcaaaggcagagattgctccagcagctccacacaaaatgatgtgctcacgggtgccctctgaacagtcttctggtacctctctcttgcctaaagacggtgccccattttcttgggattccttggatgaggatggattggatgactccttgctggagctgtcagagggagaagaagatgatggtgatgtaaattacacagaggaagagattgatgcactgttgaaggaagatgacccatcatatgagcagtcttctggggaagatgatggtgggcatgttgagaagggagaaagagggagtcaaattctacttgatactccccgagagaaaaattcatcgtacagcctgggaccagtagctgagactcctgacctcttcaaactacctcagctaagtacatcaagtggtcatggaccagctcatactaaaccattaaacagacgctctgtactagaaaagaatcttataaaagtaactgttgcaccatttaatccaacagtttgtgatgctctgcttgataaggacgagactgattcgtccaaagatactgaaaaactctcttcccttggagaagagatgagagaagatggtcttagcccaaatgaaagcaaactttgtactgaatctgaagggatcagccccaataactctgcctggaatgggccccagctctcttcttcaaacaataactttcaacagactgtctctgataaaaatatgcctgacagtgagaaccctacgtctgtattctctcggatctcagaccattcagagactcctaatatggagttatcctgcagaaatggtggttcacacaagtcaagttgtgaaatgagatctctggttgtttccacctcatcaaacaaacaggatgttcttaacaaggattctgggaagatgaaaggccatgagagaagactaggcaaagtcattcctgttctacaaactaagaccaggactaatgttccgacgttttcacagtcaaatctagaacagcagaagcagctttatctcaggagtgtcattgctcatatagaagacccagaggacactaaccaaggtatctcgggggagctttgtgccttgatggatcaagttcatcatatgcagcactcaaaatggcagcatccttcggacctcaccacgcgaaactacgcccgccgacagaaacatctgcaaagatacagtctgactcagtgggttgacaggaacatgcgaagccaccatcggttccagcgtctcccagacttctcgtacagttaatttgtgtcatcccatcagcaatgaaggtccctatccagggtcctgcttggagcagcatttcatgttcttttgctgttttgtgctttgccgattttggattttatttttcacaaaatttttatttaaaaaactcgtcaccttttggaaatgcccattgccgacttgaatttttttgtatgaagtccctcctgattttgtgtgtgtgtgtctgtgtttaagcaagcgttcggttggtatagtttttttttgtttttttaatttaaattgaaggtagctgcctcctgaaagccagcattaagccagaacacccaggttcaagcaaaagacccacctctctgcagaggcaaagtctactttctggtacctcaaagaaatcattgttcaatcttccataaggaagagattctttaccaggctgtgagccagtgttagataacttgtgaatggatataagttacttttaacaacccctcttacttttttatttgaatcctctgaatacctgtcagtattttaaagttggcaatccaggacattataagtaggatggagcaggagaagaatcctattgaaaggacaaattaaaatagtaaatcctctcctctcccttctgtaggtactagctgccttgatttttttttgtgggtgggggggattttttcattccttattgaacttattttgcacaatagtgtttacaaatcttatacatcttactttgacagaagacttataataccttgtggtcttgagactggttgtctcctttgcctttcttcaaggattttcctttttctttttaccccccagtgaccactctgctctttaggattctagtggcagtattcttgtaacctgttagacgtggatatacctcttcaggatggcctccttgctgtctttattgaagagctgcccacccagagtcttgactctagggcaggctagtgctattgtggtgtcagttgatatttagtttcatttgctgaaccccaaatttgagtgttagttagggagcctccattctgtgggagagtgtggaaaggcactcttttttctccatattagttaacaagaggtgtctttaggccctggatgttaccatctcatttggtcaagcccctgatacctagtttcacatggatgctaacgtggatgtaatatagttgtgacagcctatgcacaaaagcattacctgatcttaaggtttggtattctaaccaaagttgacagactgtgcgtctgtcttaatggatgtcttaggagttggttattctctcttttttttttgagacggagtttcgctgttgttgcccaggctggagtgcaatggcgtatctccactcaccacaacctccgcctcctgggttcaagggattctcctgtcttagcctcctgagtagctgtgattacaggcatgcgccaccatgcctggctaatttcatattttttagtagagacaggatttctccatgttggtcaggctggtcttgaactcctgacctcaggtgatctgcccacctcggcctcctaaagtgctgggattacaggcatgagccactgcacctggccggttattctctctttacagatagctatagacatcattttaggaagtgttgcagtctggcatttgtgctattgttcattctctgtgaaggctgttcatagttgctatagcctgtgtttagttttgtgatttcatcaatcccatctttctgtgtgagtaatgcattctaaacatcctaccccactttagaaacggacgtggggaacgcttggtcatttaagccaacaataaatttaggtgaatgtccctaagtgtttactgtttttatccagtcaaggatttgcttttccttgaacatttgttttaaattctggggccaaaatgcaaaggagaagttctattcaaaggcagtagttgaaatctattattttagttagcctacttggcatttactacatcggtcacttctccaggctgccctaaattaggttgatggagtgagacatgccaaacatccacctttgggaccatagcatagttaaaattaaatgtagttggaatagctagcattgcagctacagtagggaactgtagtctagttccctacagaaaacccaaggagtgaagggacaggattttgcctaggcaaaaatctaagactcgtgccctcctggtacatggggttttaagactgaatgtgtaataggagcactgcctttgccaaatcaaatgagtgacaggttaactagaaaatgtgacaatcacatttcctcttagctcaaataattctgtttttccaaagctttagcagcttaattaaatctgttggactgggggaggagagagctgttctctagtggttaacatggtattctttaagaagaaaaaacaaagccaaagaaaactcattatctggcatgttcgccttaaagatggtactgggtagaatctggagttttcatctcttttcaaagctgcatatctcttatatttggtattggcctctaagtctaatattgcagttggaattcttgctgtattattttttaagcaagtgttaggtgcatttaactgctttcttcatccatgacgacattcccaccatgggggtcttgacaaagcagagtaaaaatatgctgtttacattgtttacttacaagtaaggagcctgaaataacctgtagtttcgaatgcaggccctgatttactggcgttgtcagtttcaattatgaaactgaagtttggtgcctcctctttatcatgttttttcccttgtagcagttgtgtttaatgtcattaaaaagaaataaaagttctttgtcagtgaaaaaaaaaaaaaaaaaaaa

SEQ ID NO: 5114 - DNA, 2991 bp, Homo Sapiens
  NM_022754
acaggcgcgcgcgaggacgcgctccggggacgcgcgaggacgccgtggcgggagaagcgtttccggtggcggcggaggctgcactgagcgggacctgcgagcagcgcgggcggcagcccgggggaagcgtccgggaccatgtctggagaactaccaccaaacattaacatcaaggaacctcgatgggatcaaagcactttcattggacgagccaatcatttcttcactgtaactgaccccaggaacattctgttaaccaacgaacaactcgagagtgcgagaaaaatagtacatgattacaggcaaggaattgttcctcctggtcttacagaaaatgaattgtggagagcaaagtacatctatgattcagcttttcatcctgacactggtgagaagatgattttgataggaagaatgtcagcccaggttcccatgaacatgaccatcacaggttgtatgatgacgttttacaggactacgccggctgtgctgttctggcagtggattaaccagtccttcaatgccgtcgtcaattacaccaacagaagtggagacgcacccctcactgtcaatgagttgggaacagcttacgtttctgcaacaactggtgccgtagcaacagctctaggactcaatgcattgaccaagcatgtctcaccactgataggacgttttgttccctttgctgccgtagctgctgctaattgcattaatattccattaatgaggcaaagggaactcaaagttggcattcccgtcacggatgagaatgggaaccgcttgggggagtcggcgaacgctgcgaaacaagccatcacgcaagttgtcgtgtccaggattctcatggcagcccctggcatggccatccctccattcattatgaacactttggaaaagaaagcctttttgaagaggttcccatggatgagtgcacccattcaagttgggttagttggcttctgtttggtgtttgctacacccctgtgttgtgccctgtttcctcagaaaagttccatgtctgtgacaagcttggaggccgagttgcaagctaagatccaagagagccatcctgaattgcgacgcgtgtacttcaataagggattgtaaagcagggaggaaacctctgcagctcattctgccactgcaaagctggtgtagccatgctggtgagaaaaatcctgttcaacctgggttctcccagttacggaaaccttttaaagatccacattagccttttagaataaagctgctactttaacagagcacctggcgtgggccaagtgcctgatactcccttacactgaatcatgttatgatttatagaaatacctttcctgtagcttttatagtcattgtttttcaaagacgatataccagccctcacccaggttttaaaaaagcactggtaggcatagaataggtgctcagtatatggtcagtaaatgttctattgattatcaatcagtgaaaaaagaaatctgtttaaaatactgaattttcatctcactcccattgcaaatcaaggagatctcagcagtgaactgggaaaatacaaaagctctgggctaatctataaaaacttaccctgaaatattaagggcagtttgcttctagtttggggattgcgctagcccaatgaaggtgatgaagcttttggatttggagggtaaaagctccttcacaccccttccaaaagtcagtcacagaccactgcaacatgccttccctgctggatcattatatacattcagattgtgagtggattgccttggttgacttttaatttattgttttttgttcttataaagatgataatcttaccttgcagttattgactttatattcaattatttacatcaaataatgaaataactgaaatgtacaaatgtcaaattttggaagtatattcaataccaatgctgtatgagtgggctgaatccagttcattgttttttttttggtaagaagtgagactacagttccagctacctacatgtcttttcttgtcatccttatagatctctttggctttcagaaagatacagtgataatgtgtgtatgaatcagtcacaatgaattttacttgaatattgtatgttgcattccacttcatttgaaaataatgaaaccatgtaccactgtttacatcatctgtagtgatttcatagataatatatttaatatgacagattatgtttcaactctgtagatgtttaacgtcatagacagttggccctctgtatccgtgagctctatatctgtgaattcaaccaagtttggatggaaaattttttttttttttttttttttgagacggagtctcgctctgtcacccaggctggagtgcagtggcgtagtctcggctcactgcaagctccgcctcccgggttcacgccgttctcctgcctcagcctctctgagaagctgggactacaggcgcccgccaccacgcccggctaatttttttgtatttttagtagagacggggtttcactgtggtctcgatctcctgacctcgtgatccgcccgccttggcctcccaaggtgctgggattacaagcgtgagccaccgcacccggcctgaaaatattttctaaaaagataaaaaatatacataacgatgaaaaataatacaaatttaaaaaccaatacagtataacaactatttacatagtgcttacattgtattaggtgttataagcaatctagagatgatttagcaagtatacaggaggatgtgcctaggttatatgcaaatactgtgccattttatatcaggaacttgagcatctgcagatattggtatcggagggcggtcctggaaccaagcatccacggatactgaggggtgacatttcatgaagtgtagatcattgtattcagagattgtaaatgaaaaaaatatagaaactatttagttttggtagattttttttctgacaatgtgaccagactgaatttcctcataaagaaaaaatggcgtgccttgtg

SEQ ID NO: 5115 - DNA, 2166 bp, Homo Sapiens
  NM_022756
gcccgcctcagcccaacatggcgatgcacaacaaggcggcgccgccgcagatcccggacacccggcgggagctggcggagctcgtgaagcggaagcaggagctggcggaaacattggcaaatttggagcgacagatctatgcttttgagggaagctacctggaagacactcagatgtatggcaatattattcgtggctgggatcggtatctgaccaaccaaaaaaactccaatagcaaaaatgatcgaaggaaccggaagtttaaggaagctgagcggctcttcagtaaatcctcggttacctcagcagctgcagtaagtgcattggcaggagttcaggaccagctcattgaaaagagggagccaggaagtgggacggaaagtgacacttctccagacttccacaatcaggaaaatgagcccagccaggaggaccctgaggatctggatggatctgtgcagggagtgaaacctcagaaggctgcttcttctacttcctcagggagtcaccacagcagccataaaaagcgaaagaataaaaaccggcacagcccgtctggcatgtttgattatgactttgagattgatctgaagttaaacaaaaaaccacgagctgactattagaagacacattagtgcagaagcttccaggctgtagagccctgcttcccttctctgacctcacaaagataaacatccttcacctgagttcgtggccatccacctctgctctcccagacccagtgcctgtgactttgagtagtttgttctaaatgtggtgacaaacaagtcatttctgtaagacattgggtcttactttatgtcatttttagtaacagaactgcaggaagatcaagacaatgttgtaatcccggcaagttgctaactgtgcgtttctcccttcttagaatgaatgtctcccccaaaactggctggcaccagcttcatctgtgatacccttcaagaaatgttctctggttttgttttatgctgaaagtagaacacaagtcacatttcagatggaggctgtaaatatctggcattttcttatattgttttatgttttcttgtttttctcttgttgtttttatcttattttctttggggtttttttgtaatgcctttgtacagctcatactttcctgctgacatatctgatcatctctttcatgcagttgccaatattcataactgaaaataatctggtttatcataagtaaaatgggaaacttgcctctgttttttgcaaggggaggtaaagagtgtttagtaattacctatcttaaatctttctgagttggtagtagattcatgttcaaggaacaggaaaaatggaaaaacataagtttaaatcagttctttttaaataactttttattcttttgtataaataaaatttcacaggcttcaaattctcatgctttacttttaaacccgagattgttttttcacttatttattcatatcatgccttatggaaatttctttttctgtattttctctctttgctggtattcacctgattaaatattgctctaaaaatcaccatggcatatggaaagtctcaaaattataccaaaagtgataacttatgtcgttcttaagtggagtgaaaggatagcatcagtgagagccagtgttgcccaccaggtctccctttcttggagggcttgttggggctgaggaatctgctagtaatcgttacctgcctctagtgctgtggtgaacttgcgacagggtctggctgcacattggaatcacctgagaagttttaaaatactcatgcctggatcccatccctagagactggggtacagcctagttattgggaatttctttaaaagagttcctgggattctgataagaagccaggttgagaaccactacattagaagactgaatggtttaatttacatcctatgttatgattggtctaagggataagatttggggtctaacctttcctttcactctagttagtcatagtccttgacttatgcctatatctttgtaagaaatagtatgtttcatttgtgatagtattggtagggctgaatatggatggcatctactgtaaaacaagtctaccttgtcagatgtgcaaaagctttcactcttgttctcaaataaacttttgtgggtttttttaaaaaaaaaaaaaaaaaaa

SEQ ID NO: 5116 - DNA, 4187 bp, Homo Sapiens
  NM_022757
gacaagccgggaagcttggaggggtctattgcgtacgcccaaggcgctgggcctggagcaggagaaagggagtggaggcgcgtcggagactatgaagcgcggcattcggcgggatcctttccggaagcggaagctcggcgggcgggccaagaaggtccgggagcccacggcggttaattctttttaccgtgaggcttcacttccctcggtctgggcttctctgaggcggcgagagatggtcaggtctggagctcgaccgggccaggtgttatcttcaggaaggcacactggacctgctaaattaacaaatggaaagaaagcgacctatttaagaaaaataccacgttttaatgcagattctggctattccatccattctgattcagaaagtcaggctgaaactgtacacgggcttgatggttgtgcttctttgctgagggacattttgagaaatgaagattcagcatcttcagataataagaaacagatacctaatgaagcttctgctagaagtgaaagagacacatcagacctagagcaaaactggtcattgcaagatcattatagaatgtattcacccataatataccaagccctctgtgagcacgtgcagactcagatgtcactgatgaatgacttgacttcaaagaacatccctaatggaattcctgctgtaccatgccatgctccctctcattctgaatctcaggcaactcctcattctagttatggcttatgtacctccaccccagtctggtcacttcagcggccaccctgccctccaaaggttcattctgaagttcaaactgatggcaacagtcagtttgcatcacaaggtaaaacagtttctgcaacctgtactgatgttctacggaattcatttaataccagtcctggagttccatgtagcctgcccaaaactgacatatcagctattccaacattgcagcaactgggccttgttaatggaattctgccacaacaaggaattcataaggaaacagacctactaaaatgtattcaaacatatttgtctctttttcgatctcatggaaaagaaacgcatctggacagtcagacacaccgaagccctactcagtcacaaccagctttcttggccactaatgaagaaaaatgtgccagagagcaaattagagaggccacaagtgaaagaaaggatttaaacatacatgtgcgagatacaaaaacagtgaaggatgtacagaaggcaaaaaatgtgaacaagacagctgaaaaagttagaattataaaatatttgttgggagagctcaaggccctggtagcagaacaagaggattcagaaattcagaggttgattacagaaatggaggcatgtatatctgtacttccaacagtaagtggaaacacagatattcaagttgagatagcactggccatgcaaccattaagaagtgagaatgctcagttacgaaggcagttgagaattttgaaccagcaactcagagaacaacagaaaactcaaaaaccatctggtgctgtggattgcaaccttgaattgttttctcttcagtcattgaatatgtcactgcaaaatcaattggaggagtcactaaagagccaggaattactgcagagtaaaaatgaagagctgttaaaagtgattgaaaatcagaaagatgaaaacaaaaaatttagtagtatatttaaagacaaagatcaaactatacttgaaaataaacagcaatatgatattgagataacaagaataaaaattgaattggaggaagccctagtcaatgtgaaaagctcccagtttaagttagaaactgctgaaaaggaaaaccagatattggggataacattacgtcagcgtgatgctgaggtgactcgactaagagaattaaccagaactttacagactagcatggcaaagcttctctccgatcttagtgtggacagtgctcgctgcaagcctgggaataaccttaccaaatcactcttgaacattcatgataaacaacttcaacatgacccagctcctgctcacacttccataatgagctatctaaataagttagaaacaaattacagttttacacattcagagccactttctacaattaaaaatgaggaaaccatagagccagacaaaacctatgaaaatgttctgtcctccagaggccctcaaaatagtaacactaggggcatggaggaagcatctgcacctggaattatttctgccctttcaaaacaggattctgatgaagggagtgaaactatggctttaatagaagatgagcataatttggataatacaatttacattccttttgctagaagcactcctgaaaagaaatcaccactttctaagagactatcccctcagccacaaataagagcagctacaacacagctagtcagcaacagcggacttgctgtctctggaaaagaaaataaactgtgtacacctgtaatctgttcctcttcaacaaaggaagcagaagatgcacctgaaaaactttccagagcatctgatatgaaggacacacagctcctcaagaaaataaaggaagcaattggtaagatccctgctgccaccaaggagccagaggaacaaactgcatgtcatggcccatcaggttgtcttagcaacagccttcaagtgaaaggcaatactgtctgtgatggtagtgttttcacttctgacttgatgtctgactggagcatctcttcgttttcaacgttcacttctcgtgatgaacaagacttcagaaatggccttgcggcattagatgccaacatagctagactccagaagtctttaaggactggtcttctggagaaatgaattcagaagaaaactcatcaggtgcttctttttaaaactagaacttggctatattgaatgtgtatttttctttagtgaaatgatgttttatgttattatgtgtgaagtaatatattgtacaagtaataaatgtattgttgagatatattgacactgaggagcttataaaaacaagtcatcttaagttcacaattgctacaagaagaaagttgtggataactaggaaattattgtaagtaatgttttatttcagtacttagcaattagagttcttttattaagatgtatctgctggattaagggtacaggttgaaatagttctgtggctgtcctaagaaataatgggaaaagaatctctggatgtaagtttttctgttgaaactagagggttttttttttctgtttacatatacttttttttaatagcaatgtgtttttattaaacatgctgtgtgccacaggccagtgttgttggtgaaatatataaacatttatttaaagagaaaagttaccagtatctacacctcttaaaaaacattgattggtctaaaaaatatatagataacatcctaagttaacatatggcttcttaaaacttgggcacttttatttgtttttatcccaaattcatgttttaaggcctttaaagaatagtcagactgataaagaagtgctaacagataagctatagttggggaaatttgtgggttttttttaaataagaaatgtttatttttgtccttatatttaaacatgatggaatttgtaaatcttggcattgattgtaattctgcctttttggaagaattttttctcccagcatgttagctgagaatattctctattttataaataatatgaagtaggttggtctctctgcttctctataccaggacttcttagctcagtatcatctcccttcatgtaagcagcacgttttaactcttaggaagctgaatgttgtgttatcactaatactttgtacaggtcacctgcctactctaattgtccttagtacttggacaggctttatcattaaagagtgttctcctaatcccagaacctcctcgtgttttttgtttttttggtggttttttttttttttttaggtgttagtgctacagcgtttgaaggagccagctgtagtctctttgatatgttcagattttccagatagagatttaagtctaaaaatttattaagtgaattctaaactatttcacacaagagtccattagcatctttaattttatttagtattcatgaattaatttattggcatcttatttggaggtaataggccacaactctttaacaaataagttcagaaataaaaaataataaaaaaggaaaaaaa

SEQ ID NO: 5117 - DNA, 2752 bp, Homo Sapiens
  NM_022759
acagtgtcatggaggccgcggcggtgacggtcacccggtcggctacacggcggcggcggcggcagctgcaggggctggcggccccggaggcggggacgcaggaggagcaggaggatcaggagccgcggccgcggcggcggcggccgggaaggagcatcaaagatgaagaagaagagacagtctttcgagaggtggtcagtttttccccggaccccctgccagttagatattatgacaaggacaccaccaaacctatcagcttttacttgtcttcgctggaggagctcttggcgtggaagccccgcttggaggatggctttaatgtggccctggagcccctggcgtgtcgccagccccctctgagcagccagaggccccggactttgttgtgtcatgacatgatgggcgggtacctggacgacaggttcattcagggctcggtggtgcagactccctatgctctctaccactggcagtgcatcgacgtctttgtgtacttcagccaccacaccgtcaccattcccccagtgggctggaccaacactgcccacaggcatggggtctgcgtgctggggactttcatcacagagtggaatgaagggggaaggctctgtgaagccttcctggccggggatgagcgctcgtaccaggcagtggctgaccggctggtccagatcactcagttttttcgttttgatggctggctgatcaacatcgagaactcgctgagtctggccgctgtggggaacatgcctcctttcctgcggtacctcaccacacagctgcaccggcaggtcccagggggcctggtgctctggtatgacagcgtggtgcaaagtgggcagctcaaatggcaagacgaactcaaccagcacaacagggtcttctttgattcctgcgacggcttcttcactaactataactggcgggaggagcacttggagcggatgctggggcaggctggggagcgccgggctgatgtgtacgtgggcgtggatgtgtttgctcgggggaacgtggtcggaggccgattcgacacagacaagtcgttggagctgatccgaaagcatggcttctccgtggctttgtttgcccccagctgctccgtgtttcctggcgttggcaatttactgtgctgctgagtgtgaggtcatctccggagcgttttcagcagcccctggctctgcggcgtctcttccgggctgtgggcatgcagggaagtggctgtgaggcagtctgcgctgtggccctgcctctgcccagcgagaggccgtgggctctggacaagccgcccttcaggctggggtagcaggtcagtccaggcaggaagcagcacctgccccccgcgccagcccagccccagcctgagtgcaggagctgcaggacccgcgggggcttttccagctactctgttccttcacgtcctcccttctcagcctcgtccaagcaccgggaagacctccaggctgaccccttgagcagcagtcagcacaggtgcgtgggggcgtgagggaggcagggtcttcaccacaggcgccttcctctgtccttcctgctctttcttctctgcccaggccgctgcagctgcacagcctctgctacacctgggctgcctgggaggcttcctggtgtggtgtctggaccccacggccttgggtcatcctgcggctggtctggggtggggtctgttgtggtccttccacggtgtcagtggcctgaagtccctcgcttttggggggggggtctctcacccccaggccacatagggccagtggtaggggttccctctatgtcgggcagtgctgagggctgggatgctctgtgaccccagctggagcccacacctaagggctggcatccacatcatttcaccctgcagtgagggaagaggccaccaggtggcagcacagccacacccgttcccacgtcagaggagggcaaggctgggtactcagcagccactctgagccggggctccttccaggagctgaaatccacctgtctccatcttccttgcctgcctgggtactcatgccaagcagagactgggattaggggttctgtgctcttgcctaattaggaacattctcccatgtctcttgtgtggtcccagaaggagaagtgagtttgccaaggatatggggcaggaggctccctctgctgaccccctgcagcctggagccagcccggggactgtcctgggtggagggcaggtgaacacaagctgctgccggggactgtcctgggtggacggcaggtgaacacaagcggctgccgcatgtagccactcactcgactttttttcagctgtgaccattcccgggagctctttgagcctttctgtctcatttggaaccagggggaaccaggaaggggctcctggcctctctgtgtcctctgcagtgggggttgtggggggcgcagcatccacgccttgctgcccttctttcatgaagtctgttttttaagtgctggttcccccgaatattttatgcagaggagggaaaatttatagtggcaattattttctcacagtctggtgagcaggcaattaattaggagtaagggggcctagtagagcgtggcgtgtggcagaatcgcaccgccccggctccccagcccaccgccatgcagggctcgcgtgcgggaaaactaatatgccggcgtttaagcctgtgcccctctgctgggtgtaactgctctgaaataaatgatctgacattgtgaaaaaaaaaaaaaaaaaaaaaaaaaa

SEQ ID NO: 5118 - DNA, 1999 bp, Homo Sapiens
  NM_022760
gtcacgtggcgaggccgccgccgcggccatcaccactgtgggcagcctcacttggctgccgccccgagaccccagcccgtacctgggcttcgcgcccgccaagtgggcccagccctggctcctgcgccctgtggcggccacctccatcgccttgctttcccttcgggcactgggggtcgctcagggcgggacatgggtgaacggaagtggaagctgtgagcgtcgcagcccgaggcgccgaggcctgaggcgccgtcggggccaccgcgacgctcgcatggagagcgctgggcgctgggctgtgcaccgacggctaacctggacccacggtctctgcggggcgggagctttgcagaaccgactggccgactggggcgcgggaacatgaggcttggctaggagcccgctgcgggccaggcgcgcggtgcgcaggcatacccgggtcgcgggtgaacaccgcggagccccgggacttgcctgtcgttgctggtggcggcatggtcttctgtctgtcgagcgaggagccgcgccgcccgctgcgaagcgacatggtccacttccaggcctcggaagtccagcagctgctacacaacaagttcgtggtcatcttgggggactccattcagagggctgtgtacaaggacctggtgctcttgctccagaaagactcactgctcacagctgcccagctgaaagccaagggggagctgagctttgaacaggaccagctggtggctgggggccagctgggcgagctgcacaacgggacacagtatcgtgaggtccgccagttctgctcgggctctggccaccaccttgtgcgcttctacttcctcactcgtgtttactccgagtaccttgaggatgttctggaagagctgacatatggacctgccccggacctggtgatcatcaactcctgcctctgggatctctccagatatggtcgctgctcaatggagagctaccgggagaacctggagcgggtgtttgtgcgcatggaccaagtattgccagactcctgcctgctggtgtggaacatggcgatgcccctcggggaacgtatcactgggggtttcctcctgccagagctccagcccctggcaggctccctgcggcgggatgtggttgaagggaacttctacagtgctacgctggccggggaccactgctttgatgtcctagacctccactttcacttccggcatgcagtacagcaccgtcatcgggatggtgtccactgggaccagcatgcacaccgccacctctcacacctgcttctgacccatgtggctgacgcctggggcgtggagctgcccaagcgtggctatccccctgacccgtggattgaggactgggcagagatgaatcatccattccagggaagccataggcagaccccagacttcggggagcacctggccttgctcccacccccaccttcttctttgcctcctcccatgccttttccctacccgcttcctcagccctcgccacctcccctcttcccacccctgccccaggataccccttttttcccaggccagcccttcccaccccatgaattcttcaactataatccagtggaggacttctcgatgccaccccacttaggatgtggccctggagtgaactttgtgcctggccctctgccacctccaatccctggccctaatccccatggtcagcactggggcccagtggtccaccgggggatgccacgctatgttcctaacagcccctaccatgtgcggagaatgggggggccctgcaggcagcggctcagacactcagagagactgatccacacatacaaactggacagacggcctcctgcccattcggggacatggcctgggtagactggatcttgggctgggactggatgtgccaatggcccttcagggcctgcctggcacctcaggtactgggctagggtgtctgctatgcctggtattgttcttgtccattgctgtcaccaataaaggcatggaagaac

SEQ ID NO: 5119 - DNA, 984 bp, Homo Sapiens
  NM_022761
actagttgatgacgcacccatggcgcctggttgtctagacgagccggtgtaccgactccccggtggatgataactatgagtgcaaaagcaagacgcgcactttcctgtcacctcgccctttcaccccctcgggaagatcaaagtgtctttagcccaagcatggccttgagcgacttcatcacacctgcatgaggtcacaagcagtcactagcgcaggggggtgaggcgagttctgggtgaaagaaacggggcggggctgaggccaaggaagaggttggactgtgtctcgcatgctcctgacgcagaaggttttgaaccttttttcacctcgtctgaaatggctgcctcccagtgtctctgctgctcaaaatttctcttccagagacagaacctcgcctgtttcctcacaaacccacactgtggcagccttgttaatgcagatggccatggtgaagtgtggacagattggaataatatgtccaagtttttccagtatggatggcgatgcaccactaatgagaatacctattcaaaccgtaccctgatgggcaactggaaccaggaaagatatgacctgaggaatatcgtgcagcccaaacccttgccttcccagtttggacactactttgaaacaacatatgatacaagctacaacaacaaaatgccactttcaacacatagatttaagcgagagcctcactggttcccaggacatcaacctgaactggatcctccccgatacaaatgcacagaaaagtcaacttacatgaatagctattcaaagccttaaattgggcatcactcaggatgtgtataagatcttaatattgactagtttcacatccaggtttctaagaaatgataagatacttcacttttccagagtgaaatgtaggagggagcacattctaagtacagctaaaaatttagctcactgtaacacagtttcactctctgaataaataaagcaaaaaacacagtaaa

SEQ ID NO: 5120 - DNA, 3661 bp, Homo Sapiens
  NM_022765
cccaagactgtccccgctggaggcggtagagggatccagaagtaatgagatgctaatgagtcgcgaataaagcccgggcggcgccccgcgcccctcgcggaagcccacactccgcgcgactccaggcgcacgccccgggccgccccgcatcccagcatccccgcccgatctcggcgtttccgcccccgcccccgcccccgccctcccacccgctcagacctggttgccagcccaacaggaagcggcccctcccggcttcggagccgccgccactcatctctgcccagctgctgccctccccaggaggcctccatggcttcacctacctccaccaacccagcgcatgcccactttgagagcttcctgcaggcccagctgtgccaggacgtgctgagcagcttccaggagctgtgtggggccctggggctggaacccggtggggggctgccccagtaccacaagatcaaggaccagctcaactactggagcgccaagtcactgtggaccaagctggacaagcgagcaggccagcctgtctaccagcagggccgggcctgcaccagcaccaagtgcctggtggtgggtgctggaccttgcgggctgcgggtcgctgtggagctggcgctgctgggggcccgagtggtgctggtggaaaagcgcaccaagttctctcgccacaacgtgctccacctctggcccttcaccatccacgacctgcgggcactcggtgctaagaagttctacgggcgcttctgcaccggcaccctggaccacatcagcatcaggcagctccagctgcttctgctgaaggtagcattgctgctgggggtggaaattcactggggtgtcactttcactggcctccagccccctcctaggaaggggagtggctggcgtgcccagctccaacccaacccccctgcccagctggccaactatgaatttgacgtccttatctcggctgcaggaggtaaattcgtccctgaaggcttcaaagttcgagaaatgcgaggcaaactggccattggcatcacagccaactttgtgaatggacgcaccgtggaggagacacaggtgccggagatcagtggtgtagccaggatctacaaccagagcttcttccagagccttctcaaagccacaggcattgatctggagaacattgtgtactacaaggacgacacccactactttgtgatgacagccaagaagcagtgcctgctgcggctgggggtgctgcgccaggactggccagacaccaatcggctgctgggcagtgccaatgtggtgcccgaggctctgcagcgctttacccgggcagctgctgactttgccacccatggcaagctcgggaaactagagtttgcccaggatgcccatgggcagcctgatgtctctgcctttgacttcacgagcatgatgcgggcagagagttctgctcgtgtgcaagagaagcatggcgcccgcctgctgctgggactggtgggggactgcctggtggagcccttctggcccctgggcactggagtggcacggggcttcctggcagcctttgatgcagcctggatggtgaagcggtgggcagagggcgctgagtccctagaggtgttggctgagcgtgagagcctgtaccagcttctgtcacagacatccccagaaaacatgcatcgcaatgtggcccagtatgggctggacccagccacccgctaccccaacctgaacctccgggcagtgacccccaatcaggtacgagacctgtatgatgtgctagccaaggagcctgtgcagaggaacaacgacaagacagatacagggatgccagccaccgggtcggcaggcacccaggaggagctgctacgctggtgccaggagcagacagctgggtacccgggagtccacgtctccgatttgtcttcctcctgggctgatgggctagctctgtgtgccctggtgtaccggctgcagcctggcctgctggaaccctcagagctgcaggggctgggagctctggaagcaactgcttgggcactaaaggtggcagagaatgagctgggcatcacaccggtggtgtctgcacaggccgtggtagcagggagtgacccactgggcctcattgcctacctcagccacttccacagtgccttcaagagcatggcccacagcccaggccctgtcagccaggcctccccagggacctccagtgctgtattattccttagtaaacttcagaggaccctgcagcgatcccgggccaaggaaaatgcagaggatgctggtggcaagaagctgcgcttggagatggaggccgagaccccaagtactgaggtgccacctgacccagagcctggtgtacccctgacacccccatcccaacaccaggaggccggtgctggggacctgtgtgcactttgtggggaacacctctatgtcctggaacgcctctgtgtcaacggccatttcttccaccggagctgcttccgctgccatacctgtgaggccacactgtggccaggtggctacgagcagcacccaggagatggacatttctactgcctccagcacctgccccagacagaccacaaagcggaaggcagcgatagaggccctgagagtccggagctccccacaccaagtgagaatagcatgccaccaggcctctcaactcccacagcctcgcaggagggggccggtcctgttccagatcccagccagcccacccgtcggcagatccgcctctccagcccggagcgccagcggttgtcctcccttaaccttacccctgacccggaaatggagcctccacccaagcctccccgcagctgctccgccttggcccgccacgccctggagagcagctttgtgggctggggcctgccagtccagagccctcaagctcttgtggccatggagaaggaggaaaaagagagtcccttctccagtgaagaggaagaagaagatgtgcctttggactcagatgtggaacaggccctgcagacctttgccaagacctcaggcaccatgaataactacccaacatggcgtcggactctgctgcgccgtgcgaaggaggaggagatgaagaggttctgcaaggcccagaccatccaacggcgactaaatgagattgaggctgccttgagggagctagaggccgagggcgtgaagctggagctggccttgaggcgccagagcagttccccagaacagcaaaagaaactatgggtaggacagctgctacagctcgttgacaagaaaaacagcctggtggctgaggaggccgagctcatgatcacggtgcaggaattgaatctggaggagaaacagtggcagctggaccaggagctacgaggctacatgaaccgggaagaaaacctaaagacagctgctgatcggcaggctgaggaccaggtcctgaggaagctggtggatttggtcaaccagagagatgccctcatccgcttccaggaggagcgcaggctcagcgagctggccttggggacaggggcccagggctagacgagggtgggccgtctgctttcgttcccacaaagaaagcacctcaccccagcacagtgccacccctgttcatctgggctgcctggcagagagccttgctgtttacaattaaaatgtttctgccacaaaaaaaaaaaaaaaaaaa

SEQ ID NO: 5121 - DNA, 3134 bp, Homo Sapiens
  NM_022767
agtcggagccgggcttgcccgggcatgtgggagctgccggctttccggacgccacgtgcagaccggaagagacacgcggggcttcaggctgctgccccattggaagattactccccaggcttcccttgccccaagcagtgagctgactggaatggtaccccgggaggcccctgagtctgctcagtgcctgtgcccttccctcaccatcccaaatgccaaggatgtgcttcggaagaggcacaagagaaggagccgacagcaccagcggttcatggcccggaaggccttgctgcaggagcaggggctgctgagcatgcctccagaaccagggtcctccccactgcccacccctttcggggcagcgacagcaactgaagctgccagcagtgggaagcagtgtctgagggctggatctggcagtgccccatgcagcagaaggcctgctcccgggaaagcctcagggcccttgcccagcaagtgtgtggctatcgactgtgagatggtgggcacgggaccccgagggcgggtaagcgagctggcccgctgttccattgtgagctaccatggcaatgtcctctatgacaagtacatcaggcctgagatgcccatcgctgactaccgtacccgctggagtggcatcactcggcagcacatgcgcaaggctgtccccttccaggtggcccagaaagagatccttaagctcctgaagggcaaggtggtggtggggcacgcgctgcacaacgacttccaggcgctcaagtatgtccaccctcggagccagacccgggatacgacctatgtcccaaacttcctcagcgagcccggcctccacacccgggcccgggtctctctaaaggacctggccctgcagctgctgcacaagaagatccaggtgggccagcacgggcactcatcagtagaagatgccacgacagccatggagctctaccggctggtggaggtgcagtgggaacagcaggaggcccgcagcctctggacctgccccgaggacagagaacctgacagcagcacagacatggaacagtacatggaggaccagtactggcccgatgacctggcccacggcagcagaggaggagccagggaggcacaggacagaaggaattgagaagggggcggggctccctggctgggcttccggtgtggccggtaggaagtgggggccaggagagcagcgggcactccttcctgggcagggtggggcaggatgcagtgagccagccccagggccagaggagtaggggtcatctgttaccttgacaccctctgcacacagcatagccctctctctctccagggctgttggttctttctcctgactcctgtggttttgctaatggcactttacagactccatggagatgtcaggtggaccatcttctagggcccagcaggagtagggaatgtgccaacagactgcccaggttgccgtggccttccccaccccccagatctcctgagtcatcatgctgtgctaatgaaagggatcatatcatcctctctggggatggtgggtgggggtgtcaatatcctggagctcccttaccccaactcaatgacttgggggtaaagttctcttccttttgttgcctacctcttcctccactcatttgggttcagaataaacatgccctgaagttaaagaggagttaagtcctaaaggaggcatttcttccccacctccctgacctggaactctggctacagccattgtaggaactccgtgcctggcctgtcagctccctgctaggctacagtggaatagcagagcccacaggcttctcgtggggagttggctccttaacatttcttggcaacagaaagccccaggcacagctcagggaggagggaaggcaggtaagctttggacgagaactggcatatttattttgacccaaatcagggatttccccagtccacccagtactgggctcttaagcaaaagtctgagaaacaagacagtggtttgaattctggggcctttgtgtaggattgtgcctgacctttatttatttattaacagcagggccactcgtctagggcagtggagtctgcgtgtctcctggggctggggcagggcattggcagttacgcagtggccctgaacctggtctggtgcccccgaacctggtctgatgccccctcagctctttgacaatcactgtggctgttgggttttctcctatttctaaaaatgttctcttctttcctaagtgacagttttgaagtattggataaccaagagctcaggtcacacagaccttggagccccatctttgcttgcagcttagctttgagatactaagcaagcgagggacttcactcttgaggctgttttttcctcatctgtaaagtggggatagtggtacggcctacctcatagggttgtaatgagcactaaatgtgaagtgcttggcacagtgcctggcacatggtgagccacagctactgtgagtttctgtttatcccccttttttttttttaagcccattgtttattctttgagaatttgttgtaacttcttcaggataacacctgagtccacaggctgagcagctgtggcccagacagaactgctccggcttggctgttccagcaggtggggcgctggcctcggtgagggcacagcagcaaggttcacggatatccgtgtgtcttgtctgtggccaccaggcacaggtttggcttccggtcagtgtcccgacactgtgcgggaggtgacaacagagcaaagcagcgcaggggtcagggaggtacagacactgctgaaatcacactaccccaccctcagctgaagccccacgttccacaaacttggggtcatagattgtccagtcactggctccctccctgtcagcacagcacagaggaaggggctaactgaatcttttaccacttctggcctggctccagaactttgttctagattccttaaaagtcggtagctgatgtcaaactcaattgagcagtagctttgatcccttggtctgggggtcgaaggaagatggtgctgttatcagcggggaaatgtactatttaagatcagctttgttgtaaaaccatttgttctagaataaaactcaattggaaacgtgaaaaaaaaaaaaaaaaaa

SEQ ID NO: 5122 - DNA, 3450 bp, Homo Sapiens
  NM_022768
ggcgccttcctggagcgcggggagatgtaaagatagacaaataattttcccaatgagactgtagaagagagagcaattggccaatgaggactgcggggcgggaccctgtgccgcggcggagtccaagatggcggcgtgcggttccgctgtgtgaaacgagcgcggggcggcgggttactcagctccgcggagacgacctccgacgacccgcaacaatgaagggaaaagagcgctcgccagtgaaggccaaacgctcccgtggtggtgaggactcgacttcccgcggtgagcggagcaagaagttagggggctctggtggcagcaatgggagcagcagcggaaagaccgatagcggcggtgggtcgcggcggagtctccacctggacaagtccagcagtcgaggtggcagccgcgagtatgataccggtgggggcagctccagtagccgcttgcatagttatagctccccgagcaccaaaaattcttcgggcgggggcgagtcgcgcagcagctcccggggtggaggcggggagtcacgttcctctggggccgcctcctcagctcccggcggcggggacggcgcggaatacaagactctgaagataagcgagttggggtcccagcttagtgacgaagcggtggaggacggcctgtttcatgagttcaaacgcttcggtgatgtaagtgtgaaaatcagtcatctgtcgggttctggcagcggggatgagcgggtagcctttgtgaacttccggcggccagaggacgcgcgggcggccaagcatgccagaggccgcctggtgctctatgaccggcctctgaagatagaagctgtgtatgtgagccggcgccgcagccgctcccctttagacaaagatacttatcctccatcagccagtgtggtcggggcctctgtaggtggtcaccggcacccccctggaggtggtggaggccagagatcactttcccctggtggcgctgctttgggatacagagactaccggctgcagcagttggctcttggccgcctgccccctccacctccgccaccattgcctcgagacctggagagagaaagagactacccgttctatgagagagtgcgccctgcatacagtcttgagccaagggtgggagctggagcaggtgctgctcctttcagagaagtggatgagatttcacccgaggatgatcagcgagctaaccggacgctcttcttgggcaacctagacatcactgtaacggagagtgatttaagaagggcgtttgatcgctttggagtcatcacagaagtagatatcaagaggccttctcgcggccagactagtacttacggctttctcaaatttgagaacttagatatgtctcaccgggccaaattagcaatgtctggcaaaattataattcggaatcctatcaaaattggttatggtaaagctacacccaccacccgcctctgggtgggaggcctgggaccttgggttcctcttgctgccctggcacgagaatttgatcgatttggcaccatacgcaccatagactaccgaaaaggtgatagttgggcatatatccagtatgaaagcctggatgcagcgcatgctgcctggacccatatgcggggcttcccacttggtggcccagatcgacgccttagagtagactttgccgacaccgaacatcgttaccagcagcagtatctgcagcctctgcccttgactcattatgagctggtgacagatgcttttggacatcgggcaccagaccctttgaggggtgctcgggataggacaccacccttactatacagagatcgtgatagggacctttatcctgactctgattgggtgccacccccacccccagtccgagaacgcagcactcggactgcagctacttctgtgcctgcttacgagccactggatagcctagatcgcaggcgggatggttggtccttggaccgggacagaggtgatcgagatctgcccagcagcagagaccagcctaggaagcgaaggctgcctgaggagagtggaggacgtcatctggataggtctcctgagagtgaccgcccacgaaaacgtcactgcgctccttctcctgaccgcagtccagaattgagcagtagccgggatcgttacaacagcgacaatgatcgatcttcccgtcttctcttggaaaggccctctccaatcagagacagacgaggtagtttggagaagagccagggtgacaagcgagaccgtaaaaactctgcatcagctgaacgagataggaagcaccggacaactgctcccactgagggaaaaagccctctgaaaaaagaagaccgctctgatgggagtgcacctagcaccagcactgcttcctccaagctgaagtccccgtcccagaaacaggatggggggacagcccctgtggcatcagcctctcccaaactctgtttggcctggcagggcatgcttctactgaagaacagcaactttccttccaacatgcatctgttgcagggtgacctccaagtggctagtagtcttcttgtggagggttcaactggaggcaaagtggcccagctcaagatcactcagcgtctccgtttggaccagcccaagttggatgaagtaactcgacgcatcaaagtagcagggcccaatggttatgccattcttttggctgtgcctggaagttctgacagccggtcctcctcttcctcagctgcatcagacactgccacttctactcagaggccacttaggaaccttgtgtcctatttaaagcaaaagcaggcagccggggtgatcagcctccctgtggggggcaacaaagacaaggaaaacaccggggtccttcatgccttcccaccttgtgagttctcccagcagttcctggattcccctgccaaggcactggccaaatctgaagaagattacctggtcatgatcattgtccgtgggtttggttttcagataggagttaggtatgagaacaagaagagagaaaacttggcgctgaccctgttatagtggttatagtggtgtccctaaagggaggaaatgatttcagcaaaactggttgaacagcggatgaagatatggaattcaaagctctaatggacctttttgaagagaagttgtggcttatgtggagtttacatgggcctctgatggaagaaagctaatctgtttagtatttgtgcattttactaaaatggcagcttaaagttgtgtatctgctattgtgatgccaatgccggtgttttaagtggaaaaaaaatgacctctttgatttgtgctgtgtacacaagatttctggaaaagtaaagaaaaaccctttttatggctcacacagcttaagagtagctgtctctcaaacgtgcgctcacagttgagctgcttttgttttattctaaataaattgtttcttttgaggaaaatgttaaaaaaaaaaaaaaaaaaa

SEQ ID NO: 5123 - DNA, 5811 bp, Homo Sapiens
  NM_022771
ttttgccggatgttgttgtatgtccgagagacacgtgaggttctgctacgtcattaccaggcacgcgcaggaaacatggcggcggcgggtgttgtgagcgggaagattatatatgaacaagaaggagtatatattcactcatcttgtggaaagaccaatgaccaagacggcttgatttcaggaatattacgtgttttagaaaaggatgccgaagtaatagtggactggagaccattggatgatgcattagattcctctagtattctctatgctagaaaggactccagttcagttgtagaatggactcaggccccaaaagaaagaggtcatcgaggatcagaacatctgaacagttacgaagcagaatgggacatggttaatacagtttcatttaaaaggaaaccacataccaatggagatgctccaagtcatagaaatgggaaaagcaaatggtcattcctgttcagtttgacagacctgaaatcaatcaagcaaaacaaagagggtatgggctggtcctatttggtattctgtctaaaggatgacgtcgttctccctgctctacactttcatcaaggagatagcaaactactgattgaatctcttgaaaaatatgtggtattgtgtgaatctccacaggataaaagaacacttcttgtgaattgtcagaataagagtctttcacagtcttttgaaaatcttcttgatgagccagcatatggtttaatacaagcaggactgctagacagaagaaagctgttgtgggccattcaccactggaaaaaaattaaaaaggacccttatacggcaactatgataggattttccaaagtcacaaactacatttttgacagtttgagaggcagcgatccctctacacatcaacgaccaccttcagaaatggcagattttcttagtgatgctattccaggtctaaagataaatcaacaagaagaaccaggatttgaagtcatcacaagaattgatttgggggaacgccctgttgttcaaaggagagaaccggtatcactggaagaatggactaagaacattgattctgaaggaagaattttaaatgtagataatatgaagcagatgatatttagagggggacttagtcatgcattgagaaagcaagcatggaaatttcttctgggttattttccctgggacagtaccaaggaggaaagaacccaattacaaaagcaaaaaactgatgaatacttcagaatgaaactgcagtggaaatccatcagccaggaacaagagaaaagaaattcgaggttaagagattatagaagtcttatcgaaaaagatgttaacagaacagatcgaacaaacaagttttatgaaggccaagataatccagggttgattttacttcatgacattttgatgacctactgtatgtatgattttgatttaggatatgttcaaggaatgagtgatttactttcccctcttttatatgtgatggaaaatgaagtggatgccttttggtgctttgcctcttacatggaccaaatgcatcagaattttgaagaacaaatgcaaggcatgaagacccagctaattcagctgagtaccttacttcgattgttagacagtggattttgcagttacttagaatctcaggactctggatacctttatttttgcttcaggtggcttttaatcagattcaaaagggaatttagttttctagatattcttcgattatgggaggtaatgtggaccgaactaccatgtacaaatttccatcttcttctctgttgtgctattctggaatcagaaaagcagcaaataatggaaaagcattatggcttcaatgaaatacttaagcatatcaatgaattgtccatgaaaattgatgtggaagatatactctgcaaggcagaagcaatttctctacagatggtaaaatgcaaggaattgccacaagcagtctgtgagatccttgggcttcaaggcagtgaagttacaacaccagattcagacgttggtgaagacgaaaatgttgtcatgactccttgtcctacatctgcatttcaaagtaatgccttgcctacactctctgccagtggagccagaaatgacagcccaacacagataccagtgtcctcagatgtctgcagattaacacctgcatgatcactgttcttgcttttttgggaagagacactttgttgcaaccctttttcaagtacttgaaagttgaaaatttgaaatcttggtattgatcatgctttaaggtttatgtaaagaaagtgtactgatgttcttacattaaagctttacaaagatttaaactaattatttttgtagttacttctaccaaatagcctttccttttcgataacattcctcagtatttttatagccaagtacattttattttcttgctgatgaactggaattggataaatattgcaagtggatgagttggaaattatgcactttgaaaaacattcactttgtttaagcttattgggtttcagatttgattaaattaaatgtggaggctttctatagcattctaagctgagaagtagattgttacccagtaatgaaataaaaaataaaaataaaaggatttttttctctattgtttacgacagtactcagcttaaatatttatgctggtcaaatgtgatttaaattggacattttcatcaatgcagtctaatgtgtagataaatatttcaaccataataagtggattggcagtatattttttacattgaacttttcttcacttgtatataaagattatatataagtacttatttatgagtataagaaaggttaggcatattttcattaactgaataaacgacttgatttatataacctggtttatcaaaatttaacatggcttcagtatgagatctttttcaaaactattttcttaaacatttatttcatgagattatgttcaaccctgtacctggtgtaattttaaaattaattgcttgtaacctcactttactaataatgtttattatctttcctaataatgcattaactgattaatcaggtgtttaaatttttataaaatactcttgcaaaaagtttatttgaaaaatttctagatggtctcatgagtttcaaaataataatttttgtgtatgaacaaagctgttgtttttaccatgcagtattgcatgattttaagttatgtggaattaacataactgattttgttttaattgtaagttgttaactcctgtatatatcattaaaataaatctgaagttgaagtagtgtttttagttaaattatacttagaaatagtctgcttttttaaaattttttttcttgagaaagagtcttgctctgttgcccaggctggagtgcagtggcgcagtcctggctcactgcagcctccgccttctgggttcaagcgattctcctgtctcagcctcccgagcagctgggactacaggcttgtgccatcgcgcctgactaatttttgtattttgagtagagatggggtttcaccatgttggccaggctggtctcgaactcttgacctcaagtgatccactcgcttcagcctcccaaagtgctgagattacaggtgtgagccactgtgcccggctaattctttaatagaagaaaaaacatccaagatggacctcaattcatctcttatttttatatgattaaaatgataatctggccgggcgcggtggctcacgcctgtaatcccagcactttgggaggccgaggcgggcggatcacgaggtcaggagatcgagaccatcccggctaaaacggtgaaaccccgtctctactaaaaatacaaaaaattagccgggcgtagtggcgggcgcctgtagtcccagctacttgggaggctgaggcaggagaatggcgtgaacccgggaggcggagcttgcagtgagccgagatcccgccactgcactccagcctgggcgacagagcgagactccgtctcaaaaaaaaaaaaaaaaaaatgataatctgaataagttatggaaatgaaaaccatcctttttataactgaaaaaaaattttcattagcatggaaatgggcacagtgttgccttgaaagatacagttatttgactcagtaaagcagcttattacaactgatgctaatagtatagagaaaaaagttgtgcagttctaaaatggtcctagagattgacttttttcccccaagaaagttagggaacaaaacgaacttttttcctggttgagcattaactgacaatcacgacagtagaaccgttagagtttagtttttaatattatgtgtgttatctttcatcagttaataatgagtaagcctattcagaaaaagaacataaactgatcaaaaactcagcatctccagcctttcatttcctgctattcaggaaattgcttagaacatcttgatgtcctccttgttcttcctggacagtgactttttgggagtttgttcctgctgcgtaatgtgatacccacttcagattttttttttatcaatacatttagtaagttgaacttctgtcaagttttattacaaaattacttgttaaaacaatttttactaaactgcatttctatctagcatatttttgatatggaagtgatagtatagtatagttccaggagaagtcttaaatcagtccacagagtccagttagcaaatactctgtgccattaagattgctaaaatacacagttcaggtaaatttactagtgttttttaaaggtttatttgttttcacaagatgctctgtccacacccttataacatgtaaaatattgtgtgctgtattatgtggtaaagttgttaaaattcagtttctaacattaacttaaaagtacagacaatctaacatgatgatttgacttacaaactttcaactaaatttatgatggctttaaagcagtgcactgaatagaaaccatactttgagtacccatacagccatttttcacttttactacaatattctataaatcacatgagatatttaacactttattataaaataggctttgtgttagatgattttgcccaaatgtaaactaatgtagtgttctgagcatgtttaagttagggtaggctaaactatgtttggtaggttagatgtattaaaagcatttttgattaatgatgtcttcaatttatgatgtgtttattggaacataacctcaatataagttgaaaagcatatgtattttcaattctggcatgaacctatgggaatcttttgcatttaagaacctccccattttaataatttcatgggtctaagattcttcatctgtttataaggaactttagtcttagtgattagagactaaatttttttttgagcagtaagaaaacagccttttgggacagatagtgagtgattcttaggaacttgacattgccaagaaattttatagatgccgaagaattcttatgtgaaattcacataagcatgcccattactaaagacagtttgtataaagtaaccctaaatgtttattgaggaacctacagcttcaactgacttacgtgcagatatgtaccaggagaacatcattttagcttgggcgtctttacttggggttttcagaggatccaggaacctcactgtatgcaaagtcttgtggatgtacctgaatgtttttggaggcaggtcacatagtttctgaaagtgttctcttattttcctcaaatgtaggtaaccattgttacaagttatttaacaggagaatagtaacaatgtctaacttatgctaatgattttgtgtgctgagctcccattaattaaaatgtcttcagaaaaaaaaaaaaaaaaa

SEQ ID NO: 5124 - DNA, 2620 bp, Homo Sapiens
  NM_022773
gcacatgcgccctgacagcccaacaatggcggcgcccgcggagtcgctgaggaggcggaagactgggtactcggatccggagcctgagtcgccgcccgcgccggggcgtggccccgcaggctctccggcccatctccacacgggcaccttctggctgacccggatcgtgctcctgaaggccctagccttcgtgtacttcgtggcattcctggtggctttccatcagaacaagcagctcatcggtgacagggggctgcttccctgcagagtgttcctgaagaacttccagcagtacttccaggacaggacgagctgggaagtcttcagctacatgcccaccatcctctggctgatggactggtcagacatgaactccaacctggacttgctggctcttctcggactgggcatctcgtctttcgtactgatcacgggctgcgccaacatgcttctcatggctgccctgtggggcctctacatgtccctggttaatgtgggccatgtctggtactctttcggatgggagtcccagcttctggagacggggttcctggggatcttcctgtgccctctgtggacgctgtcaaggctgccccagcatacccccacatcccggattgtcctgtggggcttccggtggctgatcttcaggatcatgcttggagcaggcctgatcaagatccggggggaccggtgctggcgagacctcacctgcatggacttccactatgagacccagccgatgcccaatcctgtggcgtactacctgcaccactcaccctggtggttccatcgcttcgagacgctcagcaaccacttcatcgagctcctggtgcccttcttcctcttcctcggccggcgggcgtgcatcatccacggggtgctgcagatcctgttccaggccgtcctcatcgtcagcgggaacctcagcttcctgaactggctgactatggtgcccagcctggcctgctttgatgacgccaccctgggattcttgttcccctctgggccaggcagcctgaaggaccgagttctgcagatgcagagggacatccgaggggcccggcccgagcccagattcggctccgtggtgcggcgtgcagccaacgtctcgctgggcgtcctgctggcctggctcagcgtgcccgtggtcctcaacttgctgagctccaggcaggtcatgaacacccacttcaactctcttcacatcgtcaacacttacggggccttcggaagcatcaccaaggagcgggcggaggtgatcctgcagggcacagccagctccaacgccagcgcccccgatgccatgtgggaggactacgagttcaagtgcaagccaggtgaccccagcagacggccctgcctcatctccccgtaccactaccgcctggactggctgatgtggttcgcggccttccagacctacgagcacaacgactggatcatccacctggctggcaagctcctggccagcgacgccgaggccttgtccctgctggcacacaaccccttcgcgggcaggcccccgcccaggtgggtccgaggagagcactacaggtacaagttcagccgtcctgggggcaggcacgccgccgagggcaagtggtgggtgcggaagaggatcggagcctacttccctccgctcagcctggaggagctgaggccctacttcagggaccgtgggtggcctctgcccgggcccctctagacgtgcaccagaaataaaggcgaagacccagcccctcggcggctcagcaacgtttgcccttccctgcgcccagcccaagctgggcatcgccaagagagacgtggagaggagagcggtgggacccagcccccagcacgggggtccagggtggggtctgttgtcacatactgtggcggctcccaggccctgcccacctggggccccacatccaggccaacccttgtcccaggcgccaggggctctgatctcccatccatcccaccctcctcccagaggcccagcctggggctgtgccgcccacaggagttgagacaatggccatcctgacaccttcctccactacagccctgaccatagacccagccaggtagctcttggggtctctagcgtcccagggcctggtttctgttccctcttcaatggtgtgttcccagccaggtcctgaccctcagagccaagtccctgtcacgtctggggcagccaaaccctcgccccacagggacctggacacgcccggccaggatgtggggttggatgggccattttctgtcctatccctcatctccacccccgccacagcctacacgcatcccacacatgcaggcacacacagcctgtgcacacatgtgttcttggcccggtttcatccccccatgactggtgtctgtgaggtgcagatggacacagcgcacacccagaccctccaccaggctgtgacctcgctgcctctgaggccttgacaaggcccctcaatcggaggacagccggccgtgcacactttcatcatcgtcggacaaacagcgtctactgcacatttttcttattcctattcttgagccatagctatggcatattcttctactattcctattataccacttaccagcttactcgaaaaaaaaaaaaaaaaaa

SEQ ID NO: 5125 - DNA, 3285 bp, Homo Sapiens
  NM_022779
aaaaaggacagcgagcggggagccccgaggacccccttttccctgcccagggattgagctccagagcctgttagggagctacccagacaggctttagttcctaaagtgctgaggaaacgcacggggcggtaaaggggaggctcgtcggtgagatggcgccggatctcgcttctcagaggcattcagagagcttccccagcgtgaactctcggccgaatgtaattttgccaggccgcgagggacgcagagaggggctgccaccaggcgggggcacgcgcggtagtcttgtccctacccgcccggtgccgccgtccccggctcccctcgggacgagtccgtacagctggagccgttccggacccggaaggggcggtggcgcagggtcctcgcgcgtcccacgtggggtcccgggcccagcagtctgcgcaccgggctcgctgctgcaccacgcgtcacccacgcagaccatggcagccgccgacggttcgctcttcgacaaccccaggacgttctccagacgtcccccagcccaggcgagtcggcaagcaaaggctacgaaaagaaaataccaagcgtccagtgaggctcccccagcgaaacggaggaacgaaacttcatttctcccagccaagaaaactagtgttaaagaaactcagaggacttttaaggggaacgcacaaaaaatgttttctccaaagaagcattcggttagcacaagtgatagaaaccaggaggagagacagtgcattaagacttcatcactgtttaaaaacaaccctgacattccagaactccacagacctgtggtaaagcaggtgcaagaaaaagtgtttacttcagctgcttttcatgagctgggcctccacccacatttaatttccacaataaatacggtcttaaaaatgtctagtatgaccagtgttcagaagcaaagtattcctgtgttgctggaaggcagagatgctctcgtgagatcccagacgggctcaggtaaaactcttgcctattgcatccctgtggtccagtcccttcaagcaatggagtcaaaaatacagcgcagtgatggcccctatgccctggtgctcgtgccaacgagagagctagctctacaaagctttgacactgtccagaaactgcttaagcctttcacctggattgtgcctggagtgttaatgggaggagagaagagaaaatcagaaaaggccagactccgcaaaggaataaatatccttatctcaactcctggacgcctggtggatcatataaaatccacaaagaacattcattttagtcggctgcggtggttggtgtttgatgaagcagacagaatcttggatttgggttttgaaaaggacatcacagtgatacttaatgctgtaaatgctgaatgccaaaaacgacagaatgtcttgctatcagcgacactcacagaaggtgtaacgcggctagctgatatcagtttgcatgatccagtcagtatttctgtcctggacaagagccatgaccagttgaacccaaaggacaaagcggtccaggaggtctgtcctccaccagctggcgacaagctggacagctttgcaataccagagagtctcaagcagcatgtgactgtggttcccagcaaactgaggcttgtctgcctagcggccttcatccttcagaaatgcaagtttgaggaagaccagaagatggttgtctttttctcaagttgcgagctggtggagttccactacagcctcttcctacagaccctgctgagcagctcaggggcgccggcatcagggcagttgccatctgcctccatgcgattaaaattcctacggctgcatggcggcatggagcaggaggaaagaacagcagtgtttcaggaattttcacattccagaagaggcgtccttctttgcacggatgttgcagctcggggcttagatctccctcaagtcacgtggattgttcagtacaacgctccatcttcacctgcagaatacatccaccggattggaagaaccgcccggattggctgccatgggagcagcctgctcattttggctccttcggaggcagaatatgtcaactcgttggcttctcacaaaatcaacgtttctgagattaagatggaagatattttgtgtgttctgacaagagatgattgttttaaagggaaacgatggggagcccagaaatcccatgctgttggcccccaggaaatccgagagcgagccacagtcttgcagacggtatttgaagattacgtgcactccagtgagaggagggtctcctgggcaaagaaagctctgcagtccttcatccaagcctacgccacctaccccagggagctgaagcacatcttccacgtccgatccctccaccttgggcatgtggcgaagagcttcggactaagagatgcccccaggaatcttagtgccttgactagaaagaagaggaaagcacacgtgaaaaggcctgaccttcataagaagacccagagtaaacacagcctcgctgaaatcctacgttcggaatactcaagcggcatggaggccgacatcgccaaggtcaaaaagcaaaacgcacctggagagcctggtggccggcccctgcagcacagtctgcagccgacaccctgctttggccgtgggaaaacattaaaatggagaaaaacccaaaaaggtgtacagcgggacagcaagacttcccagaaagtttaaaatctctctgggtcttcgagtggaacctggaagccccgggtggcagtggattgatgtccagttcttgtcagaggaggcttgtgaaaaataactgcgcctttgcctgaataccacgtccccaagaatcagaggggccacagcccttctcctccatgggaggccctggagcctgatagaaatcagtggtgtggggcactgtagagactagccagctcccgacggaaggggtctgtgtcttgtattgatcccatcagtgcccggcactcccttcacccaggtgctgacgtgccggggttgagctggcaccccgggatgtgatgtaagaacgccctgcgcgtcagcctggaacgggcttgattgctgcccttaactgtgttctgaagtttcacagcttggcttcagcctatcagcgcatacattggcatgaattttgtgaattagggtgttaaaaactggaattgaatttgtacaaaaagagaatatatttatcactaattattttcttaatgtaggaatgtaccgttaaaaaggaccaaaagtttttggtctgggtcaaaaaatacgaatgtgttctcag

SEQ ID NO: 5126 - DNA, 6201 bp, Homo Sapiens
  NM_022780
ctccccccagtcggcggcgcttggtgccgcccgggagaaccaggtcatcggtcggttcccgtgaaaacaaaaacaatcggccgcgccgtcgcaggcacccgaacgtcgcgagcggggcctggggacgcggagccgagtgcagcgagcgaacgggagcagcggcgactcgccggggggctagggcgccatggggcaggcgggctccggctgcgcggggctcccccggcgccgcggctagtgcgcccgccgcctcggccgcctcagcctcccgcgccgcccgcttggggaacgaggagcaggacgcggcctcggtggggcccgggccgaacggctgcggacacctgggcgccgaggagccgagcgccgccgcctccggcatggatcagtgcgtgacggtggagcgcgagctggagaaggtgctgcacaagttctcaggctacgggcagctgtgcgagcgcggcctggaggagctcatcgactacaccggcggcctcaagcacgagatcctgcagagccacggccaagatgctgaattatcagggacactttcacttgttttgacacagtgctgtaaaagaataaaggatactgttcaaaaattggcctccgaccacaaagacatccacagcagtgtttctcgggttggaaaagccattgataagaattttgattctgacattagcagtgtgggaatagatggctgctggcaggcagacagccaaaggcttctcaatgaggtgatggtggagcacttctttcgacaaggaatgctggatgtggctgaggagctctgtcaggaatctggtctttctgtagacccaagtcagaaggaaccatttgtggagttaaatagaatattagaggcattaaaggtcagagttctgagacctgctctggagtgggcagtgtcaaaccgggaaatgcttatagctcaaaacagctccttggaatttaagctacacagactgtattttattagcttgttaatgggtggaaccacaaatcagcgagaggcattacaatatgctaaaaattttcagccatttgccctaaatcatcaaaaagacattcaggttttgatgggaagccttgtgtacctgagacaagggattgagaactcaccatatgttcacctacttgatgcaaaccagtgggctgatatctgtgacatctttacacgggatgcttgtgccctcctggggctctccgtggagtcccctctcagtgtcagtttctcagcaggttgtgtggcgctgccagctttaattaacatcaaagccgtgattgaacagaggcagtgtactggagtttggaaccagaaagatgaattacctattgaagtggaccttggtaaaaagtgctggtatcactctatatttgcctgccccattcttcgtcagcaaacaacagataacaatccacccatgaaattggtctgtggtcatattatatcaagagatgccctgaataaaatgtttaatggtagcaaattaaaatgtccctactgtccaatggaacaaagtccaggagatgccaaacagatatttttctgaagagataactttagtttgcaatttgtaagtgaaactgaatcgtgggtgcatttcagaagagaacgttccatataatgcagctaaccaaggactcctgtgtttctataagctaatgctccagaaactttgccaacctgttagtgtacacacactgaggggagtgctcccggtgaatattatcatagggctttattatattcttggtcttcatttctgatcaagtaaatacaccagcagttgtcattcaatgcaggtttttgtacttaattatatggtgatttttttactttttaagagcagaaacggaaattgacctccccgccatgtgtttaatattcctcctgcttttacttttgtcattttcttgataatcgtaagccttgagagtgtttgtgaaaaagttttatttcctgttatgtatacataattaaatgaaaattcttcagaaaaagtttgataaattgaattgtggttatgaaactaatttgcatttttatttgcttaagaaagaaagctgtgatagattccagatatgctttttgatgttttcctctgctccagctccaagaagtcagcacacctgcattttagctctgcatgcagccccagcaggctgcgtgtttaagaatttcattgtttaactggctggtgtgagaagtcttccgttagcatagagtggaaggagtactattgtttggttgggtttttgtttgtttgttttttgtttttgcttttattgccaagaggtgcttgttttaaaagtatgtttaataaaatgaaattctaaagttagaagtgttcttaagttgatatttactctcttggtcttggtagccctattatatcattgcagacacagtgttgtgcatgtgtgtattgtatatgtgcaccagcatcaaacattgtgtatctggaaggaaagcagcatgttccagttctaaaatgcagttaccagacccatcactttaaatccttaaagttagaagctagcaaattttctgtagtgcagaacgtttattgctgtttttgtgtttgaatagtataatgtttgatgcctctcttctgcaaagcgtatcatctcattgactgtgaatctgtatattattctgatggatacagataatgatcttttctcttgtgaggtatcttcatttatgcactgtccaaaaatagccatgtgtaagagtctttctgtatgacgaactacatggaaaagacttctgtggacataattctgaccgaaacccatgaagttacttcagtataagaagaacgttacacggaaatcaccaaatattttgcaactttatttcttctgacatggagtgaacatcaataggaatactttcaaagaaaatgaaaacacagaagcaaagagaaatgtggcacttcacattttaaactacagatggacttggtttgagggagggggaatcacagatttggtgctaagttaattagaaactggcagcgttttacagtagtacaccagcctggatgttttttctaaaatgtttacctgggagagctggggtttgtttgtgaggagaaagagtactgtggaaaacctctgcttgagtaccatgtggccaggcctatgtggatggctactccgtgctgtgcggcttcaccagcggttgggattggcccagcttggagtgcttgtgtggtccaacctcagtctggccccatagcgacttttgccccatgattctgcttcactgttggaatcctctttgaagttccccctctctttgctaaagcagtgaaggaagagaacagagacaaactctttggactgtgaaagagaaggtagagaattccaggcaacagtctgaccaagggtgtaaaccagtttattatatatatatttttcctttgaattaaaacctagagtgttgtatttttctttctttctttttttttttttttttttttaccctttttctccttaggccaagtttagcttattcttatctttccacccaaacacctacacaacgtttaggcttcctgtaaggtttgaatgagacagatgtactctgaaggctggtggtaaatgtgtttgatgaccagactcttcatacagtcggcttgggccactttaaaggacaaaagccagagctcagctttatccctctcccagtgctgggagccaaaaaactgttgacggttttttgtgcagctcaagaaaactttgaaaagaacatgctttaactgaagcattggactctgcagctttctgtgtaaggcccgtgtactcccactgggcagggtgaggaccaaaaatctgaaactcttatgaatctgacatattatatggaaattatatcttgtgaccgtcttcaagtgcatggacttaaaattcatgagagactaaatgtgagggagaggtggatttaaagaggccagaccttaaccaaagatgctgagatacagcattctgtcccccctgccctagaaactccataaatgctgtcacaaccctatcatcgctgatgctttctgcatgtcagcagtccaggaggatgctttttgtctctctttgcctccactttacaaaagataatatgatagaggcaacgtttataacagtcacatttaattataatgtacatcaaaggcagaatttcagaatggtttcttaaatttccttgggaaccgtttccacatatcagttatagacaaaggccatgggactatgctaaaccaataaaaccttattagcaaatctttagattctgacttagccagagcatctgagtgttcaagtacagttttacagtggctaaggttgtctcttgatcttttttctccgttgtgtgatcacagatgctatttctgttttattggtgattatacgagacttctaatacataaatgaacgggtattggtgcctctttattttaaaaaatttgaagaaaagagccacctcatattcatagggtgtgtattttttgagtgtgagcatttaattgaaaataagaaagctatgaagtaaatgttaacttctctgtagcagctaatgcatagagacactaaaacccacaccacattttgtgggaaatgaggatcctgatcctcttttgtcctctccaggtagtctcgcaggttatgcagcttaagttcagtcttctttatgctgcgattgatttccacctcagtggcttagcctttgggacagtggatactgcaacagccaagaactcttggttatccgcacaagctgctggtagactacattagccctctggttttccagctcaacctctgataaagtggactgagagccacgctgctcagtctgtttcgtcagccgactcaggttattttcagggaaggcatggaggcatagtttggttagtttcatcactaggatgtataaggtgacgacacaaaccaaatacctttctttcatcacttaactatacgtactttatctctggtaacactagaatgctgtggtcttgagggaatgttagcaaggaacacatagaagatttggtgtttcataagcctgtctaggtgtggcaggttttgtgtggtacactgatgtttaccataagcaggtacaagcttcatgaaccgttcttaatgaactataattgaatagataccaaaaatagaatgacaaatgtattttaatagcagatgaggcagttttaggatgaattttccactgttgattttacttcaagacatagcaagagaaacaaaattttgttttcaagacatttccactgcagtttcaagctgtagtgggcatatgcttcatttacttccaaagaggcaaaagcagctggaattggcttacagcacatgctttgtttcatgttatgggtgaggacctacatacactcttactttagcagtcacttaaccttctccagcaaggcagttgtggggttcactaggatttagtgcctgatcttttttttgggaaggggcgggaatgaatgtgttggggctgggagggaagcagaagaaaatgggagtgtgagtgagtgtgcatgtgtctgaagttcaccattgcccccacctgcacctagcaaggaacaggtgtttgatgtattttgctcatgactgcagtatgcatgtatttttttccttctctgtgttttctaaacttacactaaaggattcatcaaatcatcttgttcagatggctcaggattgtatttattttgcttaccccgtgctcttgggttctatagtatttctataattatgtaacgagaatagtgttgcactgtaatctatcatatagagctatatgtatggaaaattttgatcaattttttaagaaatgtatcctgtttgcaaaggcacagtaaagttgcatcttatagactataggcaataaagctaacaataaaccttatttaacacaaaccacatccatatcctctgttcatttgattttggaaaaagtagcatatccagtagtttcagggaattcattttaactttaagaattctgatatatttaatttataaatttcggactgatataatagagttttggaaaactataagaaatgctttgttaatgtgtgtattcctatgtaaaacacatggcttttcctgtgtatatttttaaaaattaaagaaatgcacatttaaaaagtgaaaaaaaaaaaaaaaaaa

SEQ ID NO: 5127 - DNA, 3624 bp, Homo Sapiens
  NM_022782
atatacaggaggagataaaaaatttagtcaaattacagactagtagtgcttccttagcttcctgtgaaggaaattcttcaaacaaacaagtatcttcggaaagtcaaatgggttttttttctctaagcagtgagagaaatgaatctgttatccattatcctgaatccacagaacctgaaatacagcaagaaatgtccacgtcacaaccagactgcaatgtggatagttgctcagtaagcagtggatatggcaccttttgtatctcagaattaaatctgtacaaatctaaagaccctaaggagttcatggagcacatagatgttcccaaaggacagtatgtagcacctgcggtgccggctgagtcacttgtagatggtgtgaaaaatgagaatttttatatacagactcctgaagagtgtcatgtgtctttaaaggaagatgtatccatttctcctggtgaatttgaacataattttcttggtgaaaataaggtttctgaagtatacagtgggaaaacaaatagtaatgctataacatcatgggcacaaaaactgaagcagaaccaaccaaagagagcacatgtagaagatggaggttcaagatctaaacaaggaaatgagcaaagtaagaagacaccaattgagaaatctgattttgctgctgctacacatcctcgtgctttttacctcagtaaaccagatgaaactccaaatgcttggatgtctgattcaggaacaggattgacttactggaaactagaggaaaaggatatgcaccactctttgcctgaaactttagagaagacgttcatatcattgtcttccacagatgtgtcaccaaaccagtctaatactagtaatgagatgaagctaccgtcactgaaggatatttattataaaaaacaaagggaaaacaagcagttacctgagaggaatctcacttctgcttccaacccaaatcatccaccagaggtcctgactctagatcctacgttacacatgaagccaaagcagcagatttcagggattcaacctcacggccttccgaatgcccttgatgacagaatatccttttccccggactctgttctagagcctagtatgtctagtccctctgacatagactcattttcacaagcaagtaatgtcacttctcagttacctggatttccaaaatatccctcacacacaaaagcttctccggtggactcttggaaaaatcagacattccaaaacgaaagtaggaccagttccacgtttccgtcagtatataccattactagtaatgatatctcggtcaacactgtagatgaagaaaacactgtcatggttgcttcggcctcagtcagtcagtcccagcttccaggtacagccaacagtgtcccagaatgcatttcattgacttccttggaagatcctgtgatattgtctaagattaggcagaatctgaaggaaaagcatgctcgacacatagcagatcttcgagcttattatgaatcagaaataaatagtttgaaacagaagctggaggcaaaagaaatctctggagttgaagattggaagataaccaatcaaattcttgtagacagatgtggccaattagatagtgctttgcatgaagctactagtcgcgtgagaacacttgaaaataagaataacttactggaaattgaagtgaatgatttgagagaacgcttcagtgcagccagcagtgcttccaaaattttgcaggaacgaattgaagaaatgagaacaagcagtaaagaaaaagacaataccatcattcgactaaaatctagactgcaagatttagaagaagcatttgagaatgcttacaaactctcagatgataaagaagctcaactaaaacaagagaacaaaatgtttcaagatcttttaggagagtatgagtcccttggaaaagaacacaggagagtaaaggatgcattaaatacaactgagaacaaattgcttgatgcatatactcagatttctgatttgaaaagaatgatttcaaaacttgaagctcaggtcaagcaagtagaacatgaaaatatgttaagccttcgtcataattctagaattcacgtgagaccctcgcgtgccaacacactagcaacttcagacgtcagcaggcggaaatggctgattccaggtgcagagtattccatctttactggccagcctctggacacccaggacagtaacgtggataaccagctggaggaaacctgtagcctagggcaccgttcacctctggaaaaggattcttcacctggaagttcatcaacaagcttgttgataaaaaagcaaagagagacttcagacacgccgatcatgagagctttaaaagaacttgatgagggaaaaatatttaaaaattgggggacacagacagagaaagaggacacctcaaatataaatcctcggcaaactgaaacttcagttaatgcaagtcgttctccagaaaagtgtgcccaacagagacaaaagagacttaattcggcctcacagagatcatcatctttaccaccttcaaatcgtaaatcaagtactccaacaaaaagagagattatgctaacaccagtgactgtggcttatagtccaaagcgatcccctaaagaaaacttgtccccaggatttagtcatctgcttagcaaaaatgagagcagtccaattcgatttgatatacttttggatgatttagatactgttcctgtgtctacattacaacgtaccaatccaagaaagcaactccagtttcttcctctagatgactcggaagaaaaaacttattctgagaaagccaccgataaccatgttaatcatagctcttgccctgaaccggtgccaaatggagtgaagaaagtatctgtgagaacagcctgggagaagaataaatcagttagctacgaacagtgtaagccggtttcagtcactccacaggggaatgattttgaatatacagcaaaaattcggaccctagctgaaacagaacgattttttgatgaacttacaaaagaaaaggaccagattgaggcagcactaagcaggatgccttctcctggaggacgaatcactttacagacaagattaaatcaggaagccttggaagatcgtttggaaaggattaatcgagaactgggttcagttcgcatgacgctaaagaaattccatgttttgcgcacctctgcaaatctttgagatttgtagccattaaattttgagacatttttgtttgcactaatgtataattatgcagtcagaaaaggcaaactattttgtactgtttataagccttcaaacagtagttttacaatcatgctattcttacacttgctattttatacttcaaatggccacatattttcaagatatttttgttatgctcaggaatctcttgtatattttactatttaaaaagcattatttttaaatagtatctgtctccaatttatatcaagaataaggaaatataaacagaggaagcagcttgtttctaaacaaatagtgttatccttttacaattaactgcacatcaattttatagacttgttctacattgtaaatacaattcagtttttaaaaaataaagcttaatagcttccataaaaaaaaaaaaaaa

SEQ ID NO: 5128 - DNA, 2631 bp, Homo Sapiens
  NM_022783
tctggggccggactagcccagcgcgtctgcctacccatagggattccctctccagccaatccagtcagagcagcggagctgccccgaacaaagatggcgcgggaagcgtctgtgagggcagactgatccgagcacccaaaccctcggcggacagcggagccagtggtagccgcacggccctaaaaccatggaggagggcggcagcactggcagtgctggcagtgacagcagcaccagcgggagtggcggggcgcagcaaagggagctggagcgcatggctgaggtcttggtcaccggggaacagctacggctcaggctgcacgaagaaaaggttattaaagatagacgtcatcatctcaagacctacccaaactgttttgtcgcaaaagaactgattgactggctgattgaacacaaagaggcttctgacagagagacggcaattaaactcatgcagaaattagcagaccggggcattattcaccatgtgtgtgatgagcataaggaattcaaggatgtcaaactcttctaccgctttagaaaggatgacggcaccttcccattggataatgaagtgaaggcctttatgagaggacagaggctatatgaaaagctgatgagccctgaaaacacactcctgcagcccagggaggaggaaggggtcaagtatgagcgcaccttcatggcatctgaattcctggactggctggttcaggaaggtgaggccaccacgaggaaagaggcagagcagctttgccaccggcttatggagcatggcatcatccagcatgtgtccaacaagcacccatttgtggacagcaatcttctctaccagttcagaatgaacttccggcggaggcgaagactgatggagctgctcaatgaaaagtccccctcctcccaggaaactcatgacagtcccttctgcctgaggaagcagagccatgacaatcggaaatctaccagctttatgtcagtgagccccagcaaggagatcaagatcgtgtctgcagtgaggagaagcagcatgagcagctgtggcagcagcggctacttcagcagcagccccaccctcagcagcagcccccctgtgctctgcaaccccaagtccgtgctgaagagacctgtcacctctgaggaactccttactcccggggctccgtatgcaaggaagacattcacgattgttggtgacgcggttggctggggttttgtggtgcgaggaagtaagccatgccacatccaggctgtagaccccagtggccctgcagccgcagcaggaatgaaggtctgtcagtttgtcgtctctgtcaacgggctcaatgtcctgcatgtagactaccggaccgtgagcaatctgattctgacgggcccacggacgattgtcatggaagtcatggaggagttagagtgctgagctcctgggcctcccagccctccagtggcctgtgggtgagggaagccagaatgacacaaagcaatgcaaagacaagattgccatgcaaatggatggttttggacatacgagtcttctccgcacatacatgtctaaagttgagttttatacactgaatgtggaagaaccgggtatcatatcttttttaaaaaatgtcagtgtagaaaacatttgggaaaccattttcctacatgatagaactgccttactagatttctatttgtagctctcattcattgttttttatcttagtttgcagaaaggtgttgaaatgcttctctagcccaaacagcgacatgctaaagtccccttcttcagagtcaatagagtagttgttaaaggttttaaattgtactttctccaaaattagcatgcagctatttaatagggaatctagatttcaccaagattcaaatcaaagcaacatttaaaggaataagacctgttcactagcattttcaagggggttctaaagcattcaagtgcttaaaagccataaaaaatgacttcttaattcctgcctttagtgtcaacttttaagttaatacaggtttcaattgtggcattaggaaaaaaaaaaaccttgtgatgctatggttgggggtagttagggagagactacatgaaattgtgtgcccctattttctttctgatcctaaatcattttgttttataaatcagctatagcatctttctagaattaatcctgaatatgttgaatgttaaaatagagaagtttgtatatacacataattaaaaatcaacccttctggcaagatttcactttgaaggtgtctgtttttaagggaaggctaaaactttgctgatatgtgataaaacttgaactctaaattgcctccttagcctgaatttttactagctttctagtgtaacatattctaaggacatgacatgctgcttatttggggggattatttttcaccaaaatgatcatcttgtgttgtaacttttcagctcacttgtatatacgcacgttttcatttttggtctagaaaatagtgcattttggggctcagcgtgcagaggaaattcctcaaagtgccaaattaggcagtcaggaaatactaaattcttcattccaaataatggatctgaatgatgacgttaattttttatcatgcattaacaaaataaaatatgagaattgtaccaca

SEQ ID NO: 5129 - DNA, 1605 bp, Homo Sapiens
  NM_022805
agctgagctcagagccttctgtggggtctgcagtggcaaggccagccgccccctgtcttccctctggagctgtttgaggaatgcagttcttttgcataagaaaggcttttctctccagtcattctgcttgctgatcaagaacacttaacagcttcaggctttcctgatactttgacgaaggtaattgggactcccatcaagtctccacacagctagcagccacgtggggcacttctccagcatatgtaagtggaactcagaaggcaacattccctgaacatactcttccaccagaatctcctctacagatttttgctgccccttttaccagtggctgaatctactttctcttatggatcgcttacacctgagacgaactacagaacagcacgtaccagaggtggaagtccaagtcaaacgcagaaggactgcctcactgagcaaccaagagtgtcagttgtacccgaggcgttctcagcagcagcaagtacctgtggtggatttccaggctgaactgaggcaggcattcttagctgagacaccaagaggtggttaaagccatattggagtagcgaggaatctgattccaagcaaaaaccaggctccatctactctttgaagcttctgcccagcttgcattgtttctaggagaacctgcgtcatacctttatctatagccttcccctaggtcttcagaagcatcaagttttaactgtggacattggatttggtggaacagcaatcatgactgttggcaagagtagcaagatgctgcagcacattgactatagaatgagatgtatcctgcaagatggccgaatcttcattggcacctttaaggcttttgacaagcatatgaatttgatcctctgtgattgtgatgagttcagaaagatcaagccaaagaatgcgaagcaaccagagcgtgaagaaaagcgggttttgggtctggtgttgctgcgtggggagaacttggtatccatgactgtggaggggccaccccccaaagatactggcattgctcgggtaccacttgctggagctgctggaggccctggggttggtagggcagctggtagaggagtaccagctggtgtgccaattccccaggcccctgctggattggcaggccctgtccgaggagttgggggaccatcccagcaggtaatgactccacagggaagaggcactgtagcagctgctgctgttgctgcgactgccagtattgctggagccccaacacagtacccaccaggacggggcactccgcccccacccgtcggcagagcaaccccacctccaggcattatggctcctccacctggtatgagaccacccatgggcccaccaattgggcttccccctgctcgagggacgccaataggcatgccgcctccgggaatgagaccccctccaccaggcattagaggtccacctcccccaggaatgcgtccaccaagaccttagcatactgttgatccatctcagtcactttttcccctgcaatgcgtcttgtgaaattgtgtagagtgtttgtgagctttttgttccctcattctgcattaataatagctaataataaatgcatagagcaattaaactgtg

SEQ ID NO: 5130 - DNA, 1616 bp, Homo Sapiens
  NM_022806
caccaagggctggccgcagccactgtagctgagctcagagccttctgtgtggtttgcgggggcaaggtcagctgccccctgccctctctctggggctatttgaggaatgcggcctttttgcataagaaaggcttttctctacagtaactgtggtcgctgatcaatgacaccttcctgatactttgacgaaggtaattgggactcccatcaagtctccacacagctagcagccacgtggggcacttctccagcatatgtaagtggaactcagaaggcaacattccctgaacatactcttccaccagaatctcctctacagatttttgctgccccttttaccagtggctgaatctactttctcttatggatcgcttacacctgagacgaactacagaacagcacgtaccagaggtggaagtccaagtcaaacgcagaaggactgcctcactgagcaaccaagagtgtcagttgtacccgaggcgttctcagcagcagcaagtacctgtggtggatttccaggctgaactgaggcaggcattcttagctgagacaccaagaggtggttaaagccatattggagtagcgaggaatctgattccaagcaaaaaccaggctccatctactctttgaagcttctgcccagcttgcattgtttctaggagaacctgcgtcatacctttatctatagccttcccctaggtcttcagaagcatcaagttttaactgtggacattggatttggtggaacagcaatcatgactgttggcaagagtagcaagatgctgcagcacattgactatagaatgagatgtatcctgcaagatggccgaatcttcattggcacctttaaggcttttgacaagcatatgaatttgatcctctgtgattgtgatgagttcagaaagatcaagccaaagaatgcgaagcaaccagagcgtgaagaaaagcgggttttgggtctggtgttgctgcgtggggagaacttggtatccatgactgtggaggggccaccccccaaagatactggcattgctcgggtaccacttgctggagctgctggaggccctggggttggtagggcagctggtagaggagtaccagctggtgtgccaattccccaggcccctgctggattggcaggccctgtccgaggagttgggggaccatcccagcaggtaatgactccacagggaagaggcactgtagcagctgctgctgttgctgcgactgccagtattgctggagccccaacacagtacccaccaggacggggcactccgcccccacccgtcggcagagcaaccccacctccaggcattatggctcctccacctggtatgagaccacccatgggcccaccaattgggcttccccctgctcgagggacgccaataggcatgccgcctccgggaatgagaccccctccaccaggcattagaggtccacctcccccaggaatgcgtccaccaagaccttagcatactgttgatccatctcagtcactttttcccctgcaatgcgtcttgtgaaattgtgtagagtgtttgtgagctttttgttccctcattctgcattaataatagctaataataaatgcatagagcaattaaactgtg

SEQ ID NO: 5131 - DNA, 2304 bp, Homo Sapiens
  NM_022818
acgctgcgtgccgctgctgggttccgccacgcccgtcatggcggcggccccggccggctctggccccgcccctcggtgacgcgtcgcgagtcacctgaccaggctgcgggctgaggagatacaagggaagtggctatcgccagagtcggattcgccgccgcagcagccgccgcccccgggagccgccgggaccctcgcgtcgtcgccgccgccgccgcccagatccctgcaccatgccgtcggagaagaccttcaagcagcgccgcaccttcgaacaaagagtagaagatgtccgacttattcgagagcagcatccaaccaaaatcccggtgataatagaacgatacaagggtgagaagcagcttcctgttctggataaaacaaagttccttgtacctgaccatgtcaacatgagtgagctcatcaagataattagaaggcgcttacagctcaatgctaatcaggccttcttcctgttggtgaacggacacagcatggtcagcgtctccacaccaatctcagaggtgtatgagagtgagaaagatgaagatggattcctgtacatggtctatgcctcccaggagacgttcgggatgaaattgtcagtgtaaaaccagaaaaaatgcagctcttctagaattgtttaaacccttaccaaggaaaaaaaagggatgttaccaactgagatcgatcagttcatccaatcacagatcatgaaacagtagtgttcccacctaggagtgttaggaagttgtgtttgtgtttcaagcagaaaaactgagctccaagtgagcacattcagctttggaaactatattatttaatgtaggctagcttgttttcaaattttaaaagtttaaaaataaaatactttgcattctaagttgccaataaaatagaccttcaagttattttaatgctcttttctcactaataggaacttgtaattccagcagtaatttaaaggctttcagagagaccctgagtcttctcttcaggttcacagaacccgccgcctttttgggtagaagttttctactcagctagagagatctccctaagaggatctttaggcctgagttgtgaagcgcaacccccgcaaaacgcatttgccatcacagttggcacaaacgcagggtaaacgggctgtgtgagaaaacggccctgactgtaaactgctgaaggtccctgactcctaagagaaccacacccaaagtcctcactcttgcaggggtagacatttctggtttggtttgttctctagatagttacacacataaagacaccactcaaaaggaaacttgaataatttataattttgatcgagtttcttaaaagaccctggagaaagagtggcatttcttctgtttcaggttttgtctgagttcaaactagtgcctgtgttgttacggaaagcagcagtgtaccagtgtcactctggagtacagcgggagaaacacaaaatagtataactgaaaacattaacattcagacacactcccttctgccttccggcttaaagctgtggatgatccacgtttttgtttttttaatgttaaatgtgtaactcagtattactgaaaaggtacccacattttgaatagtagttatcactcttaggtcagacagccatcagaattctcccacaccaagtgcatgtcagttgtggagaaaacatagcaaaaagagccgtacgctctttacagatactaatgtcaagagttaaacctcctcaggttcaacctgtgataaaagactagtgcttcccagtacttgcatggggttcactatttatagttttcttgggagtatcacaggaaaatcacaattacaccactttagaccctatgtgtagcaggtcacaacttacccttgtgtgtttagatgtgtatgaaatacctgtatacgttagtgaaagctgtttactgtaacggggaaaaccagattctttgcatctgggccctctactgattgttaaaggagttcctgtcacctgctccccccacccccgcatgcgtctgtccacttggctaacttttaatatgtgtatttttacattatgtatattcttaactggactgtctcgtttagactgtatacatcatatctgacattattgtaactaccgtgtgatcagtaagattcctgtaagaaatactgctttttaagaaaaaaaataacatgctgaggggtgacctatatcccatgtgagtggtcactttatttataggatctttaaaacatttttaatgaactaagttgaataaaggcacaattaaaaactgtcaaaaaaaaaaaaaaaaa

SEQ ID NO: 5132 - DNA, 1849 bp, Homo Sapiens
  NM_022825
cgccgctctgggagccgctgctggtcccggccttgcggcctgcgggggaggctgcccggaggaggcagcggcggcggcagcgcgtcctcggtccccaggaccacggcttctttcctgccagatctatccatctggccatccatccgtgggggtctgcaatggccacctttagccgccaggaatttttccagcagctactgcaaggctgtctcctgcctactgcccagcagggccttgaccagatctggctgctccttgccatctgcctcgcctgccgcctcctctggaggctcgggttgccatcctacctgaagcatgcaagcaccgtggcaggcgggttcttcagcctctaccacttcttccagctgcacatggtttgggtcgtgctgctcagcctcctgtgctacctcgtgctgttcctctgccgacattcctcccatcgaggcgtcttcctatccgtcaccatcctcatctacctactcatgggtgagatgcacatggtagacaccgtgacatggcacaagatgcgaggggcacagatgattgtggccatgaaggcagtgtctctgggcttcgacctggaccggggcgaggtgggtacggtgccctcgccagtggagttcatgggctacctctacttcgtgggcaccatcgtcttcgggccctggatatccttccacagctacctacaagctgtccaaggccgcccactgagctgccggtggctgcagaaggtggcccggagcctggcactggccctgctgtgccttgtgctgtccacttgcgtgggcccctacctcttcccgtacttcatccccctcaacggtgaccgcctccttcgcaagtggctgcgagcctacgagagtgctgtctccttccacttcagcaactattttgtgggctttctttccgaggccacggccacgttggcgggggctggctttaccgaggagaaggatcacctggaatgggacctgacggtgtccaagccactgaatgtggagctgcctcggtcaatggtggaagttgtcacaagctggaacctgcccatgtcttattggctaaataactatgttttcaagaatgctctccgcctggggaccttctcggctgtgctggtcacctatgcagccagcgccctcctacatggcttcagtttccacctggctgcggtcctgctgtccctggcttttatcacttacgtggagcatgtcctccggaagcgcctggctcggatcctcagtgcctgtgtcttgtcaaagcggtgcccgccagactgttcgcaccagcatcgcttgggcctgggggtgcgagccttaaacttgctctttggagctctggccatcttccacctggcctacctgggctccctgtttgatgtcgatgtggatgacaccacagaggagcagggctacggcatggcatacactgtccacaagtggtcagagctcagctgggccagtcactgggtcacttttggatgctggatcttctaccgtctcataggctgaggcacatctgtggaccctcataaccctcttaagacccctctcagggtgccactgatgggggatgagggaaggccctctctctactccttgaccccctccatccttgacccccaacacctcaacacacacacacacacacacacacaaaatcacaccattttcatgcctgtcaatccccaccccaccacaaggcaggaagggggtggtgcctgctggggcctagagggggatgcttggggaaacagagaaggggagatccagggcctccccgccttccttcttcctttttatatacaatttgttattgtcaaataaaagtaggaaatattcaataggct

SEQ ID NO: 5133 - DNA, 2640 bp, Homo Sapiens
  NM_022827
gagcagccatgctgggcgcgcgggcctggttgggccgcgtccttctgctgccccgcgccggtgcaggcctcgccgcgagccgcaggtgtcctggagtctggcccaggacctggccccacaggagtcccagcaggggtagctcctcccgggacaaggaccgaagtgcgacggtcagtagttcagtgcccatgcctgctggagggaaaggaagccatccttcatctacaccccagagggtccccaaccgcctgatccacgagaagtcaccatacctcctacaacatgcctacaatcctgtggactggtacccctggggacaggaagccttcgacaaggccaggaaggaaaacaagccgattttcctctcagtcgggtactccacctgccactggtgccacatgatggaagaggagtccttccagaatgaggagattggccgcctgctcagtgaggactttgtgagtgtgaaggtagaccgtgaggagcggcctgacgtggacaaggtgtacatgacgttcgtgcaggccaccagcagcggcgggggctggcccatgaatgtgtggctgactcccaacctccagccctttgtcgggggcacctatttccctcctgaggatggcttgacccgagtcggcttccgcacagtgttgctgagaatacgagaacagtggaaacagaacaagaacaccctgctagaaaatagccagcgtgtcaccactgccctgctggcccgatcagagatcagcgtgggtgaccgccagctgccgccctctgccgccaccgtgaacaatcgctgcttccagcagctggatgagggctatgatgaggaatacggtggcttcgctgaggcccccaagtttcccacgccggtgatcctgagcttcctgttctcctactggctcagccatcgactgactcaggatggctctcgggcccagcagatggccttgcataccctgaaaatgatggctaacgggggcatccgggaccatgtggggcagggctttcaccgctactccacagaccgccagtggcacgtccctcactttgagaagatgctctatgaccaggcacagctcgctgtggcctattcgcaggccttccagctctctggtgatgaattctactctgacgtggccaaaggcatcctgcagtacgtggctcggagcctgagccaccggtccggaggcttctatagcgcagaagatgcagactcgcccccagagcggggccagcggcccaaagagggcgcctactatgtgtggacggtcaaagaggttcagcagctcctcccggagcctgtgttgggtgccaccgagccgctgacctcaggccagctcctcatgaagcactacggcctcacagaggctggtaacatcagccccagtcaggaccccaagggggagctgcagggccagaatgtgctgaccgtccggtactcgctggagctgactgctgcccgctttggcttggatgtggaggccgtgcggaccttgctcaattcagggctggagaagctcttccaggcccggaagcatcggcccaagccgcacctggacagcaagatgctggctgcctggaatggcttgatggtgtcaggctatgctgtgactggggctgtcctgggccaagacaggctgatcaactatgccaccaatggtgccaagttcctgaagcggcacatgtttgatgtggccagtggccgcctgatgcggacctgctacaccggccctggggggactgtggagcacagcaacccaccctgctggggcttcctggaggactacgccttcgtggtgcggggcctgctggacctgtatgaggcctcacaggagagtgcgtggctcgagtgggctctgcggctgcaggacacacaggacaagctcttttgggactcccagggtggcggctacttctgcagtgaggctgagctgggggctggcctgcccctgcgtctgaaggacgaccaggatggagcagagcccagcgccaattccgtgtcagcccacaacctgctccggctgcatggcttcacgggccacaaggactggatggacaagtgtgtgtgcctattgaccgccttttccgagcgcatgcgtcgtgtcccggtggcgttgcccgagatggtccgcgccctctcagcccagcagcagaccctcaagcagatcgtgatctgtggagaccgtcaggccaaggacaccaaggccctggtgcagtgcgtccactctgtctacattcctaacaaggtgctgattctggctgatggggacccctcgagcttcctgtcccgccagctgcctttcctgagtaccctccgacggttggaagaccaggccactgcatatgtgtgtgagaatcaagcctgctcagtgcccatcactgatccctgcgaattacgaaaactactacatccatgactgccccaacccccttggggtggggcagaaggtgaagcatcccaactgactagagactcaggccctgcagggccctatagaacctgtggccatccctgagcaccctgccaccaggtgacctcggccatactcactgccccccttgggcacccactcaccctagaataaacttaacagtgtcccgtggtaaaaaaaaaaaaaaaaaaaaaaaaaaaaaaaaaaa

SEQ ID NO: 5134 - DNA, 2844 bp, Homo Sapiens
  NM_022830
gtttccggaggagtgtgtccgcgcaattgaacgactttatgtcacttcctatcggatcggcggaagttgcttccgagcgcgttgagctttggcgaagtgggttccggtggtggcagaggtgcttgtgtttttgtcggtacaggagagtcgctatggcggcggtggattcggatgtcgaatcgctgccgcgtggggggttccgctgctgcctctgccacgttactacagccaaccgacccagccttgatgcccacttgggaggcagaaagcaccggcacctggtagaactacgagctgcgagaaaggcccagggacttcgaagtgtgtttgtcagtggctttcccagggatgtggattctgctcagctctctgagtacttcctagcatttggacctgtggccagtgttgtcatggacaaggacaagggagtgtttgccattgtggagatgggggacgtgggtgctcgagaggctgtcttgtcacagtcccagcacagcctgggaggacatcgcctgcgtgtccgcccacgggagcagaaggagttccagagcccggcctccaaatcccccaaaggagcggcccccgacagtcaccagctggccaaagcgctagctgaggctgcagacgtgggggcacaaatgataaagcttgtggggctgagggagttgtccgaggccgagcggcagcttcgcagcctagtggtggccctgatgcaggaggtcttcacagagttcttccctggctgtgtggtccacccttttggctcttccataaatagcttcgatgtccatggctgtgatcttgacctcttcttggatctgggtgacttggaagagccccagccagtcccaaaggctccagaatctccatcgctggactcggccctggcttccccactggaccctcaagccctggcctgcaccccagcttcccctccagattcacaacctcctgcttctccccaggattctgaagccctggactttgaaaccccttcctcctccctggcgccccaaactccggactctgccttggcctccgagacccttgcttctccccagtctctgcctccagcttcaccactgctagaggacagggaagagggggacctggggaaggcctcggaactagcagagaccccaaaggaggagaaagcagagggggcagcaatgctggagctggtgggatccattctccggggctgtgtccctggggtgtatcgagtccaaactgtgccctctgcccggcgccctgtggtcaagttctgtcatcggccttcaggtctccacggtgatgtctccctcagtaaccggctggccctgcataactcccgtttcctgagtctctgctctgagctggatggtcgagtccggcccctcgtgtacaccctccgctgctgggctcagggtcgggggctgtcagggagtggcccccttctcagtaactacgccctgaccttgctggtgatctattttcttcagaccagggaccctcctgtgttgcccactgtgtcccagctcacccagaaagcaggagagggggaacaggtggaagtcgatggctgggactgcagtttccccagggatgcctcaagactggagcccagcataaatgtggagcccctcagttccctgctagcccagttcttctcctgtgtatcttgttgggatcttcgtggctccctgctgtccctgcgggagggtcaggcactgcctgtggcagggggcctgccttctaatctctgggagggtctgcgccttggccccctgaatctccaggacccttttgacctgagtcacaatgtcgcagccaatgtgaccagccgggtggctgggcgcctacagaactgctgccgagcagcagccaattactgccgaagcctccagtaccagcgccgttcctcccggggtcgggactgggggctgctccctcttctgcagcccagctcccccagctccctgctctctgctacgccgatccctttaccccttgcacccttcacccagctcactgctgccctggtgcaggtattcagggaagcactggggtgccatatagaacaggcaaccaagagaacgcggtcagaaggaggtggaactggggagtcctctcagggagggacaagcaaaagactcaaagtagatggacagaaaaactgctgtgaggaggggaaagaggagcagcagggatgtgcaggggacggtggggaagacagggtagaagagatggttatagaggttggagagatggtgcaggactgggccatgcagagccctgggcagccaggggacctgcccctgaccactggaaagcatggagcccctggagaagaggggcagcccagccacgcagccctggcagagcgggggcccaagggacatgaggcagcccaagaatggtctcagggtgaggcagggaagggggcatccctgccctcctcagcgagctggcgctgtgccttgtggcaccgagtgtggcaagggcggcggcgagcccgtagacgcttgcagcagcaaaccaaggagggagctggaggtggcgctggcacaagagcagggtggctggcgactgaggctcaggtcacccaggagctgaaaggactgagtggtggcgaagagaggccagaaactgagcccctgctgagctttgtggcgtctgtctccccggctgaccgaatgctcactgtgaccccgctccaggatccccaaggcctgttccctgatctccatcatttcttacaggttttcctccctcaagcaattcgacatctcaagtgaagacatggcccctgaagggcaataaagctgctagtttattaatacagtcaaaaaaaaaaaaaaaaaa

SEQ ID NO: 5135 - DNA, 2695 bp, Homo Sapiens
  NM_022838
aaactacgctctagctcctcccactgccgttgtgggtaacgcggacgtggaagaacctcgtctgcggaggaaaaggtagatgttaaatggtaactacgcgcgaggttctgaggagccctgggaacaggaaggagaaaagaataccaaaagtgacaacagtttgccaatcgcagtctttaatctgataaagcggttatctcgtcttgagtcccaggtgccgagtcaatccccatacacagccgccgccattgcctcgagtccttgtgtctgactgtctgttcctgctgctgtatgacacagcacctcgaggcaaggaaataagaaaactgcctctgatccaagcagagaaggtctgcctgtagatctgctgtagggcttgtcaccattggaagcaaggtcctacttcagtggcagatctggtggccttggagtggctgaagaccaccaccctccacagggctgggcccatgcacagccatccttccctaccttgagtgagcttcctctgcatgttttctatatcactggcagagcctgtagttggaaaggggacagagtgactactggactttgtgtgaaaacaccaaccgggacaaaacttcagtcaaggctgagacgggtgggggtatataacttgtccttacgttaaacttggaacatggttgactctgggacagaagcaagggctagaggaaaggctgaggctggcctgcaagatggaatcagtggtcctgccactgctagagtgaatggtaaaacccaggccgaggcagtggctgaggcagaactgaaaacagaatcagtgacccaggccaaagctggtgatggagcaatgaccaggacacatacagtgacctacagggaggctatggctgtgacaagggaagtgatcaaggtggaagatacaactaagactagagtcatggttgagactaagacaaaacccctggcagaacgcagtatagtgccacaaaccaagtcaaaggccatgcctatgtctagggtcagtactgtaaccaagtctgaagtcaaggttgttgctgtcattgaggcaaatattaggtcctatgccaagtcacatgataaggccaatactgggtccagacctgacagaagggaagagaccagcattgggatgaaatccagtgatgaggatgaagaaaatatatgctcctggttctggactggagaagagcctagtgtagggtcctggttctggcctgaagaagagacctctcttcaagtttataagcccctacctaagatccaggaaaagcccaagcccacacacaaacccacacttactataaaacaaaaggtaatagcatggtcaagggccaggtatattgtcctagttccagttgaaggaggggagcaatccttgcctccagaaggaaactggaccctggttgagaccttgattgaaactcctctggggattcgacctttgaccaagatcccaccttatcatgggccttattaccagaccttagctgagatcaaaaaacagattaggcaaagggaaaagtatgggcctaatccgaaggcctgccactgcaaatcacgtggctttagtttagagcctaaagagtttgataaacttgttgccctccttaagttaactaaggatcctttcattcatgaaatagctacaatgataatgggcatcagtcctgcttatccatttactcaagatataattcatgatgtaggtattactgttatgattgaaaacttggtcaataatcccaatgttaaagaacaccctggagctttaagtatggtggatgacagctctgagtcttccgaagaaccaaaatcaggggagtcatatatacatcaagtttgtaaaggcataatctcttgccccttgaactcccctgtgcagctggctggactgaaattactagggcacttgagtataaaatttgaagatcactatgtgattaccagttatattccagatttcctcaccttgttaaacaagggaagtgtcaaaaccaagttttatgttttaaaagtgttttcgtgtttgtctaaaaatcacgccaatacaagagaattgatcagtgccaaagtactgtcatcattggttgcaccctttaacaagaatgagtcaaaggccaatattcttaatattattgaaatatttgagaatataaattttcagttcaaaacaaaggcaaagctatttaccaaggaaaagttcactaaatctgagcttatttcaatattccaggaagcaaaacagtttggtcagaaactccaagacttagcagagcacagtgatcccgaagtgagagataaagtcatacgattaatactaaaactctgaatacccctctgttctcataaagcctcaaacagttttttggagttgcaatatgaaaccaatgcatattgtaattataaattcaatacttatgttttccatgttgattgagggaggcaattttatggataccaattaatcttgagatcctgaacatgtgctgatttttattgtgctatatagtatataaattgagatatttttggtatttctgcaacgtgacctgataatgaatctattcatcctgagtaagctatacttctgtgctttatattgatatgtgtattcttttgagattttatttacatgttgttaataaagttgcatgctaaaactggtgaaaaaaaaaaaaaaaaaaaaaaa

SEQ ID NO: 5136 - DNA, 3691 bp, Homo Sapiens
  NM_022840
gtcgctggaaggctgcgtgctggtcgcgcccagctgcgtcaccccaggaactggggtctgtgggccagtgtggccgtctctacgaagactggcacgacccctaaagttaggtcggaagacctgtgggcagcttgagcgccgaggagtgccctgaacgctcaactcgccctggaaacgtttttccgtacagcaacatggcggcgcccatggactcttagaaaaggagaaagctttttctctgtggactggaaggggcatttttcatgatcactatttagatgggtgctgttttcatgaggagagtctgggaaggcggcgtccgcttttctgacaagggaagaggctactttgtccttttaaggattcaatgacttcctgacttggaggatgtggacctagtggctagacccaaggaccaaagcaagaagtcgtggggggcccaggaagacaggaggatcacattgggattccagacataagatcaggttttaaccccctttggccaaattttggctgaaaatgttgaattatcaactctgaaattaaaaagaaagtttatattaaaacattgcaattttccttagaatttctgtatatattaacatcatgaatgataaattctcttcaatgtgcatgtcaggtttttgtacttgtatatcaaatctatctgtgtgtatgaagtgtatgtttattgaaatacaagatatttaagaagctgatctggaaagttggattttcattctagttcctaattcccagaggcttttttaaaggaagggaatgtctgtggtacaccagttgtcagctgggtggttactggatcatctttcttttatcaacaagataaactatcaacttcaccagcatcatgaaccttgttgccgtaaaaaggagttcactacttctgttcactttgagtctcttcaaatggattctgtgtcctcctctggagtctgtgctgcatttattgcttctgactcttccactaagccagagaatgatgatggaggaaattatgaaatgttcacacgaaaatttgtttttcgacctgaactgtttgatgtcaccaaaccttatataactccagctgttcataaagaatgccagcaaagtaatgaaaaggaagatctgatgaatggtgttaaaaaagaaatctccatttctattattgggaagaagcgtaaaagatgtgttgttttcaatcaaggtgaattggatgctatggaataccatacaaagatcagggagctgattttggatggatctttacagttgatccaggaaggtctcaaaagtggttttctttatccactttttgaaaaacaggacaagggtagtaagcccattactttaccacttgacgcctgcagtttgtcagaattatgtgaaatggcaaagcatttgccttctctgaatgaaatggaacatcagacattacaattggtggaagaggatacatctgttacagaacaggatttatttttgcgagttgttgaaaacaactctagctttacaaaagtgattactttaatgggacagaaatacctgctaccaccgaaaagcagttttcttttatctgacatttcttgtatgcaaccacttctaaactataggaaaacatttgatgtaattgtgatagatccaccatggcagaacaaatcagttaaaagaagtaataggtacagttatttgtcacccctgcaaatacagcaaatacctatccctaaattggctgctccaaactgtcttcttgttacttgggtgaccaatagacagaagcacctacgttttataaaggaagaactttatccctcttggtctgtggaggtagttgctgagtggcactgggtaaaaataaccaattcaggagaatttgtgttcccattagattctccacacaaaaagccctacgaaggtcttatactggggagggttcaagaaaaaactgctctaccattgaggaatgcagatgtaaacgtgctccccattccagaccacaaattaattgtcagcgtgccctgtactcttcactcacataagccaccgcttgctgaggttttaaaagactacatcaagccagatggggaatatttggagttgtttgctcgaaatttacagccaggttggactagttggggcaatgaagttctcaaatttcagcatgtggattattttattgctgtggagtctggaagctgactatgatcttgattaaagtagtggtttcttcattgtttcctcaccacttttcccttaattctaagtcatttttttattttgttaccaacccatattcttagaatataaacaggacttgtttttttcagtaagggaccagaagtgactagccttcatgtaattttaagatgaattttacttgagttgcactaacattctatgttattctagactatacaaattaagtggtaagcagttataaagacggcaagaccatgctattgaaaaagttcagaaaacatacaccgtggaccagaggtcttaatcctatctatggatgtgttttgtgtgacccatacagtgttgtaaaaaacacttagaaccattattctaaaaaatggggctatttcacattaaagtccagatttctgcttctttttaaacatcagaggctctggctacacagaggcctttgttctttcctggcatcagtctgcaggaccaagcggtggtggctcacttgggaagagccttgtgctctccactttgccacagtaccactgccaccatgctgctcacttatgtcatccacttggcccttgtatgacctgaatttgcaacctctggtatactgttatgttctggagaaaatattcaaagatctgccaaatactgcattagtatactgagtttatacagcatttttgtagggttttaaattgcattcaaggtcactttccaagcactttctggttttgcttgtttttctagaagaaaatgaaaagctattccttataataaacatggcagcaagtaaacagtgtgattgtgaaaaaaatattatttatagattttctacaaataaatatttgtctaccaagtaaaatattttgactgaaatgattctttgaaatgcatattgatttattatgtattgactttttaaaaattgaggtataattttcacaaaattctccaattttcagtgtcaaattcagtgaattttgaaaacatatatacagttgtctgtctgccacagtgatcatgatacagaacactttctttaccctgaaaacttctcatttttccttttgcagtcaatcccctgctcctatccttggcccctggcaaacactggtttgctttctatcattagttctgctgtttgagaatttcatataaatggaatcatgcaatgtgtaatctattgtgcctggcttctttcacgtagcattttgagaaaagcatttatactatttacagattgttgacaaatatttatccactaagtaaaatgttagactgaaatgattctttgacaagcttgccaatttactgattttgtcaaagaaaaatatgttatttttgaagtttgttcatcctttgagtgtgtgagtatagtatcagaggcttaattttgtatttatggagctattctaacttgttatttaaaaggaaaaaggtattaaacttgaagcaaacttctcatgatctcaaaaaaaaaaaaaaaaaa

SEQ ID NO: 5137 - DNA, 7203 bp, Homo Sapiens
  NM_022841
atggcagaggaacaacaacagccgccaccacagcagcctgatgcccatcagcagcttccccccagcgcccccaactcgggggtggccctgccagcccttgtgcccgggctgccagggacagaggccagcgcgctgcaacacaagatcaagaactccatctgcaaaactgtacaatctaaagtggactgcattttgcaagaagttgagaagtttacagacctagagaaactctacctctaccttcagctgccttctggtctcagcaatggagagaaaagtgatcagaatgccatgtcatctagtcgggcacaacaaatgcatgccttttcctggattcggaataccctagaggaacatccggagacttcactgcccaaacaggaagtctatgatgagtacaagagctattgtgacaatcttggttaccatccattaagtgctgctgattttggaaagatcatgaaaaacgtctttccaaacatgaaggcacgtcgtttgggcacaagaggcaaatctaaatattgctacagtggactaagaaaaaaagcttttgttcatatgccaacactgcccaaccttgactttcacaaaactggagatgggttggaaggagctgaaccttctgggcagcttcaaaatattgatgaagaagttatctcttctgcttgccgtcttgtgtgtgagtgggcccagaaagtgttaagccaaccatttgacaccgtcttggaattagcccgcttccttgtaaaaagtcactatataggcaccaagtcaatggcagctctaactgtaatggcagcagcaccagcaggaatgaaaggaattacccagccttctgcttttatacctacagctgaaagtaattcctttcagcctcaggtgaagactttgccatctccaattgatgctaaacagcagttgcaacggaaaatccagaagaagcagcaagaacagaaactacaatcccctttgccaggagaatctgcagcaaaaaagtcagaaagtgctacaagcaatggagtgactaatcttcctaatggaaatccttcaatcctttctcctcaacctattggtatcgttgtggcagctgtccctagtcccattccggtccagcggactaggcaattggtaacttcaccgagtccaatgagttcttctgacggcaaagttcttcccctcaatgtacaggtggtcactcagcacatgcagtctgtgaaacaggcaccaaagactccccagaacgttccagccagtcctggtggggatcgttctgcccggcaccgttaccctcagatcttacccaaaccagcgaacaccagtgcactcaccattcgctctccaactactgtcctctttactagtagtcccatcaaaactgctgttgtacccgcttcacacatgagttctctaaatgtggtgaaaatgacaacaatatccctcacacccagcaacagtaacacccctcttaaacattctgcctcagtcagcagtgctacaggaacaacagaagaatcaaggagtgttccacagatcaagaatggttctgtcgtgtcgcttcagtctcctgggtccaggagcagcagtgcggggggaacatctgctgtggaagtcaaagtggaacccgaaacatcatcagatgagcatcctgtacagtgccaagagaactctgatgaggctaaagctccccagacacctagtgcccttttggggcagaaaagtaatacagacggagcactgcagaaaccttcaaatgaaggtgtcattgaaataaaagcaactaaggtctgtgaccagaggaccaaatgtaaaagtcgctgtaatgaaatgctgccaggcacgtcaacaggcaataatcaaagcactatcactctatcagttgcttctcagaacttaactttcaccagcagcagctcaccacctaatggtgactcaatcaataaagaccctaaattatgcactaaaagcccaagaaaacgactgtcttctacattgcaagagacccaggtgcctcctgtaaagaaaccaattgtggaacagctttcagcagctaccatagaagggcagaaacaaggcagtgttaagaaggaccaaaaggttccacattcagggaaaacagaaggttcaacagcaggtgctcagattcctagcaaggtatcagtaaatgtcagttcacacataggagcaaatcaacccttgaattcctctgcccttgttatcagtgattcagctttggaacagcaaacaaccccatcatcatctccagatataaaagtaaaacttgaaggaagtgtctttctcttggacagtgattcaaagtcagttggcagctttaatccaaatggatggcaacaaatcactaaagattctgagtttatatctgccagttgtgaacaacagcaagatatcagtgttatgacaattcctgagcactctgatatcaatgacttagagaaatctgtttgggaattagaaggaatgccacaggacacatatagccagcagctacatagccagatacaggaatcttctttaaatcaaatacaagcacattcttcagatcagttacctctgcaatctgaactgaaggagtttgagccttctgtttcccagacaaatgaaagctactttccttttgatgatgaacttacacaagatagtattgtggaagagctggtgcttatggagcagcaaatgtcaatgaacaattctcattcttacggcaactgtttgggaatgacccttcagagtcagtcagtaactccaggagctccaatgtcatctcacacttccagcacccacttctatcatccaatccacagcaatggcactccaatccacacacccacacccacacccacacccactcctactccaaccccaaccccaaccccgacatctgaaatgattgctggatctcagagtctgtcacgggagagcccttgctccaggctagcccagactacacctgtggatagtgctttaggaagtagccgacatacacccattggtactccacattctaactgcagcagtagtgtcccccccagccctgttgaatgcaggaatccgtttgcattcactccaataagctccagtatggcatatcatgacgccagcattgtctcaagtagtcctgtgaaaccgatgcaaagacccatggccacacaccctgacaaaaccaagcttgaatggatgaataatgggtatagtggggttggtaattcatcagtttctggccatggtattctcccaagctatcaggaactagtggaagaccgtttcaggaaacctcatgcttttgctgtgcctggacagtcttatcagtctcaatccagacatcatgacactaattttggtcgtttgactcctgtctctcctgtgcagcatcaaggtgccactgtaaataacaccaacaaacaggagggttttgcagtccctgcccctcttgataataaaggaactaattcatctgccagcagcaacttcagatgccggagtgtgagccctgctgttcatcgccaacgtaatcttagtggaagcaccctctatccagtatctaatatcccacgatctaatgtgaccccctttggaagtccagttaccccagaagttcatgttttcacaaatgttcacacagacgcatgtgccaacaacatagctcaaagaagccaatcagttccattgacagtcatgatgcagacagccttcccaaacgctcttcagaagcaagcaaacagtaaaaaaataaccaatgttttgttgagtaaacttgattccgacaatgatgatgcagtgagaggtttgggaatgaacaacctgccctctaattatacagcccggatgaatctcactcagattttggaaccttccactgtttttcctagtgccaacccacaaaatatgatcgattccagcacttctgtttatgagttccaaacaccatcttacctcaccaaaagtaatagcaccggtcagatcaatttttctcctggagataatcaagcacaatcagaaattggagagcaacaattagatttcaatagcactgttaaagacctgttgagtggagacagcttgcaaaccaaccagcagctggtaggtcagggagcatctgatctcactaatactgcatctgatttctctagcgatatcaggttgtcttctgagctctcaggcagcatcaatgatttgaacactttagacccaaatctactgtttgatccaggtcgtcagcagggacaagatgatgaagctacactggaagaattaaagaatgacccattatttcaacaaatttgcagtgaatccatgaattctatgacttcatcaggttttgaatggatagaaagcaaggaccatcctactgttgaaatgttgggttaaattgtgttttataacatgtagcacactgtatctaaagacatatgtattgtatttgtcttaatggaagtgcctcccgcagcagaaatactattaattgtgacattttaaaagcgtttgctgcagaagtggtttcttcagtaggaaatggttagacttgcctcagttcttaacaagtgtctaaagacagtaggctgtagaagaacaagtattaggttttaaattttataatgtgccccatttattcacattgattgactatccagctgttacaagagcagtcgatctttattttgtgtaagttagtttcatttcatcagatgatctgcacagaactcagaataaaccatcaattttaggtataggctgttttgttgttggcattatcttttagatataaaatcatagctagggtgaactgtagacaagaaagtcttccttgaaacagggataatattcaggttattataaatatttaggcttgaagcatagagctactgtagggtgaaaaatctctgtaggactttctggggcttcagtaccatttacacccacgatgaagggcttaaatagaaaataatggaaaattaaatattactttaaggaaagcaaagctgcactaaaatttttaagggaaaaaaaacaagtagccatttatatttgtgaccttgcattaatatttaaatgttgattttaatatggagctagcacacatagatgcgcaggcacgcacacacaaaacaagcaaatgtaactccaggcatttgtaatttaatataataaatacaagcatgttagaaaaatgctttatgtcttattatttgttaagttaggggaatgagaaggaaaacaaaagcattctcttagtttcatcacaatggctgcatgtacatattgagattctaactgagatttactttgaaatttttcattaaaatattccacaataatcagtttttttcctcttcaattgagtgactgactccctcactcctcctgaatatagtaatgtagtttgatcataggatccctttgaaaaacaggaaggaggataacataaaaaacaacaaaaaacatttcaccacctaaggtctgaagccacaaatctttatatctctgatgaaacaaaggggatatcaatagtacttgaagaagaagagcattttattacttgcttaatttatttattgtgataaccacaattgcaaaagaagaactcaggatttgttttaaaatgtttctctctatggctcccattttgttttgtgaataattatttatgagttgcatgttgacacaaacctactcactggttgaaagctccatttaagtgagtttcaagatcactttcaaagagatttttaaattgccattgtttttaaagctaacataaaaccatttgctatgctaccttgaacctagctaagctttcctttaccttagtaagccaatcagaagactacaatcaatgaatatttagcaaatgtgctgaagggtttaataaggttttgttgttcaataaatttgcaaggtagggtattaacatattttgataaataaatggtgctagagttggcgcagaggtttatatattgatatgtcttagttattggcatttgtgtgtgtttgctgttatcttgatttcatgatttgttaggtatttttttcttgatgctagttatttcttcactgtacattgagacacagcactactgcacaccaaagtatgcaatacccaaaggaaactgtgtgatttctcctgacaaatgatgggagcctttctttatgagatactctgaaaaggagattttgaggccattctaatcccttgtttacattattagcttcctactaatataaaaataatggaaatcttttttgataaaaatattaagactggaggatttttaaccccttgtacagtattgcagcaaactctttaaatttggttgaattcgtccagcaaactttctggggttcatatattgcactaaatttgttgaacctgtggtaggcacatctcttaggataaatgcaaccaatacagtccacagattaaactttttaaatgtgtttcattatgaaaagacaaaatgtcatcaaagtgacagataaaattgtcttatgtagcaatgtgcattgatctcaatgagatatttctattattctcttacatgagaatattacagcaggaagaattaagtttagtttgcttcaccatgttaatacatgatcacaaaatgtgcatgagtgttattgacttatcttgtacagtactaggattcctgtaaccactcttttttttcttcgctgtattgaaactggttcagtgttaaccaggcaagcatagttattcacaggttatttactttatgtttactaattctgcttagttattgttgaatatgttctgttccagattatttttattgttttgatgtttaaaacattttgcatactgtttatcataaaacttcatgaagtaaataattttgcatataattgcaataagcactgacttttgaactgaaaagaaggaaagtgtttttttgtgcagtgcttctgaggttcatataatagtcttgtactataatgtgctttactacacgataaatgacaaaaacaagccctgtttcatgtttcatttagtgcaaaaagtcagatttccccagtgttttgttgtctgttgtacctgctgaaactacagtagttgaatattgcggtagcatttcagttctctttttttattaaagtgctcaaaaattgttttttaaatgttttcaaaaacaattaaaaacattttatattaaactgaaaaaaaaa

SEQ ID NO: 5138 - DNA, 5946 bp, Homo Sapiens
  NM_022893
ttttttttttttttttgcttaaaaaaaagccatgacggctctcccacaattcatcttccctgcgccatctttgtattatttctaatttattttggatgtcaaaaggcactgatgaagatattttctctggagtctccttctttctaacccggctctcccgatgtgaaccgagccgtcgtccgcccgccgccgccgccgccgccgccgccgcccgccccgcagcccaccatgtctcgccgcaagcaaggcaaaccccagcacttaagcaaacgggaattctcgcccgagcctcttgaagccattcttacagatgatgaaccagaccacggcccgttgggagctccagaaggggatcatgacctcctcacctgtgggcagtgccagatgaacttcccattgggggacattcttatttttatcgagcacaaacggaaacaatgcaatggcagcctctgcttagaaaaagctgtggataagccaccttccccttcaccaatcgagatgaaaaaagcatccaatcccgtggaggttggcatccaggtcacgccagaggatgacgattgtttatcaacgtcatctagaggaatttgccccaaacaggaacacatagcagataaacttctgcactggaggggcctctcctcccctcgttctgcacatggagctctaatccccacgcctgggatgagtgcagaatatgccccgcagggtatttgtaaagatgagcccagcagctacacatgtacaacttgcaaacagccattcaccagtgcatggtttctcttgcaacacgcacagaacactcatggattaagaatctacttagaaagcgaacacggaagtcccctgaccccgcgggttggtatcccttcaggactaggtgcagaatgtccttcccagccacctctccatgggattcatattgcagacaataacccctttaacctgctaagaataccaggatcagtatcgagagaggcttccggcctggcagaagggcgctttccacccactccccccctgtttagtccaccaccgagacatcacttggacccccaccgcatagagcgcctgggggcggaagagatggccctggccacccatcacccgagtgcctttgacagggtgctgcggttgaatccaatggctatggagcctcccgccatggatttctctaggagacttagagagctggcagggaacacgtctagcccaccgctgtccccaggccggcccagccctatgcaaaggttactgcaaccattccagccaggtagcaagccgcccttcctggcgacgccccccctccctcctctgcaatccgcccctcctccctcccagcccccggtcaagtccaagtcatgcgagttctgcggcaagacgttcaaatttcagagcaacctggtggtgcaccggcgcagccacacgggcgagaagccctacaagtgcaacctgtgcgaccacgcgtgcacccaggccagcaagctgaagcgccacatgaagacgcacatgcacaaatcgtcccccatgacggtcaagtccgacgacggtctctccaccgccagctccccggaacccggcaccagcgacttggtgggcagcgccagcagcgcgctcaagtccgtggtggccaagttcaagagcgagaacgaccccaacctgatcccggagaacggggacgaggaggaagaggaggacgacgaggaagaggaagaagaggaggaagaggaggaggaggagctgacggagagcgagagggtggactacggcttcgggctgagcctggaggcggcgcgccaccacgagaacagctcgcggggcgcggtcgtgggcgtgggcgacgagagccgcgccctgcccgacgtcatgcagggcatggtgctcagctccatgcagcacttcagcgaggccttccaccaggtcctgggcgagaagcataagcgcggccacctggccgaggccgagggccacagggacacttgcgacgaagactcggtggccggcgagtcggaccgcatagacgatggcactgttaatggccgcggctgctccccgggcgagtcggcctcggggggcctgtccaaaaagctgctgctgggcagccccagctcgctgagccccttctctaagcgcatcaagctcgagaaggagttcgacctgcccccggccgcgatgcccaacacggagaacgtgtactcgcagtggctcgccggctacgcggcctccaggcagctcaaagatcccttccttagcttcggagactccagacaatcgccttttgcctcctcgtcggagcactcctcggagaacgggagtttgcgcttctccacaccgcccggggagctggacggagggatctcggggcgcagcggcacgggaagtggagggagcacgccccatattagtggtccgggcccgggcaggcccagctcaaaagagggcagacgcagcgacacttgtgagtactgtgggaaagtcttcaagaactgtagcaatctcactgtccacaggagaagccacacgggcgaaaggccttataaatgcgagctgtgcaactatgcctgtgcccagagtagcaagctcaccaggcacatgaaaacgcatggccaggtggggaaggacgtttacaaatgtgaaatttgtaagatgccttttagcgtgtacagtaccctggagaaacacatgaaaaaatggcacagtgatcgagtgttgaataatgatataaaaactgaatagaggtatattaatacccctccctcactcccacctgacaccccctttttcaccactccccttccccatcgccctccagccccactccctgtaggatttttttctagtcccatgtgatttaaacaaacaaacaaacaaacagaagtaacgaagctaagaatatgagagtgcttgtcaccagcacacctgttttttttctttttctttttcttttttctttttccttttttttttttttcctttatgttctcaccgtttgaatgcatgatctgtatggggcaatactattgcattttacgcaaactttgagcctttctcttgtgcaataatttacatgttgtgtatgtttttttttaaacttagacagcatgtatggtatgttatggctattttaaattgtccctaattcgttgctgagcaaacatgttgctgtttccagttccgttctgagagaaaaagagagagagagagaaaaagaccatgctgcatacattctgtaatacatatcatgtacagttttattttataacgtgaggaggaaaaacagtctttggattaaccctctatagacagaatagatagcactgaaaaaaaatctctatgagctaaatgtctgtctctaaagggttaaatgtatcaattggaaaggaagaaaaaaggccttgaattgacaaattaacagaaaaacagaacaagtttattctatcatttggttttaaaatatgagtgccttggatctattaaaaccacatcgatggttctttctacttgttataaacttgtagcttaattcagcattgggtgaggtaataaaccttaggaactagcatataattctatattgtatttctcacaacaatggctacctaaaaagatgacccattatgtcctagttaatcatcatttttcctttagtttaattttataaacaaaactgattataccagtataaaagctactttgctcctggtgagagcttaaaagaaatgggctgttttgcccaaagttttattttttttaaacaatgattaaattgaatgtgtaatgtgcaaaagccctggaacgcaattaaatacactagtaaggagttcattttatgaagatatttgctttaataatgtctttttaaaaatactggcaccaaaagaaatagatccagatctacttggttgtcaagtggacaatcaaatgataaactttaagaccttgtataccatattgaaaggaagaggctgacaataaggtttgacagaggggaacagaagaaaataatatgatttattagcacaacgtggtactatttgccatttaaaactagaacaggtatataagctaatattgatacaatgatgattaactatgaattcttaagacttgcatttaaatgtgacattcttaaaaaaagaagagaaagaattttaagagtagcagtatatatgtctgtgctccctaaaagttgtacttcatttcttttccatacactgtgtgctatttgtgttaacatggaagaggattcattgtttttatttttatttttttaattttttcttttttattaagctagcatctgccccagttggtgttcaaatagcacttgactctgcctgtgatatctgtatcttttctctaatcagagatacagaggttgagtataaaataaacctgctcagataggacaattaagtgcactgtacaattttcccagtttacaggtctatacttaagggaaaagttgcaagaatgctgaaaaaaaattgaacacaatctcattgaggagcattttttaaaaactaaaaaaaaaaaaactttgccagccatttacttgactattgagcttacttacttggacgcaacattgcaagcgctgtgaatggaaacagaatacacttaacatagaaatgaatgattgctttcgcttctacagtgcaaggatttttttgtacaaaacttttttaaatataaatgttaagaaaaattttttttaaaaaacacttcattatgtttaggggggaactgcattttagggttccattgtcttggtggtgttacaagacttgttatccatttaaaaatggtagtggaaattctatgccttggatacacaccgctcttcaggttgtaaaaaaaaaaaacatacattggggaaaggtttaagattatatagtacttaaatataggaaaatgcacactcatgttgattcctatgctaaaatacatttatggtcttttttctgtatttctagaatggtatttgaattaaatgttcatctagtgttaggcactatagtatttatattgaagcttgtatttttaactgttgcttgttctcttaaaaggtatcaatgtaccttttttggtagtggaaaaaaaaaagacaggctgccacagtatatttttttaatttggcaggataatatagtgcaaattatttgtatgcttcaaaaaaaaaaaaaagagagaaacaaaaaagtgtgacattacagatgagaagccatataatggcggtttgggggagcctgctagaatgtcacatggatggctgtcataggggttgtacatatccttttttgttcctttttcctgctgccatactgtatgcagtactgcaagctaataacgttggtttgttatgtagtgtgctttttgtccctttccttctatcaccctacattccagcatcttaccttcatatgcagtaaaagaaagaaagaaaaaaaaaggaaaaaaaaaaaaaaaccaatgttttgcagtttttttcattgccaaaaactaaatggtgctttatatttagattggaaagaatttcatatgcaaagcatattaaagagaaagcccgctttagtcaatacttttttgtaaatggcaatgcagaatattttgttattggccttttctattcctgtaatgaaagctgtttgtcgtaacttgaaattttatcttttactatgggagtcactatttattattgcttatgtgccctgttcaaaacagaggcacttaatttgatcttttatttttctttgtttttatttttttttttatttagatgaccaaaggtcattacaacctggctttttattgtatttgtttctggtctttgttaagttctattggaaaaaccactgtctgtgtttttttggcagttgtctgcattaacctgttcatacacccattttgtccctttattgaaaaaataaaaaaaattaaagtaca

SEQ ID NO: 5139 - DNA, 1920 bp, Homo Sapiens
  NM_022895
acaatcctttgcggtggttcaagatggcggcgcccagtggcactgtgagcgattcggaaagtagtaacagcagtagcgatgcggaggagctggagcggtgccgcgaggcggcaatgccggcttggggcttggagcaacgcccgcacgtggcagggaagccaagagccggtgctgcaaatagccagttgtcaacctcccaaccgagcctcaggcataaggtgaatgagcatgaacaagatggcaacgagcttcagaccacccctgaattccgagcccacgtagccaagaagctgggagccctgctggacagcttcattaccatctcagaagcagcaaaggagccagcaaaagctaaggtacagaaagtcgctttggaggatgatggtttccgccttttcttcacatctgtccctggaggccgtgagaaggaagagtctccccaaccccgccgaaagcgacagccctccagctccagtgaggacagtgacgaggagtggcggcggtgccgggaggcagctgtgtcggcgtccgacatcctacaggagtcagccatccacagccctggaactgtggagaaggaggcaaagaagaaaaggaagttgaaaaagaaagccaagaaggtggccagtgtcgactcggctgtcgctgccaccacccccaccagcatggccacagtccagaagcagaagtcaggtgagctcaacggggaccaggtgtcgcttgggaccaaaaagaagaaaaaggcaaagaaggccagcgagacctctccattcccaccagcaaagagtgctacagctatacctgcaaactgaacccagccatgggcacagggctcagccagctccaaggacaaggtgtcccccccaccctggggacaaggcatttccaagccccacctccctctccaagttcaaggactgggctggcaaacccagactgcccatgagaccctgatggtgatgaaggcttgctcgagagttgggccaaaaaagtggctgtagggtgagaagaccaatcaaggcctgcccctctgtgctcccacggagggctggcgggggcgctgtggttccagaacatttcatgacctcaggaaaaaaggaaccttccagttatttgagactagtggccaagtggtgaaacctccatctccctagaactgtctgaggtgggcaggggaagggagaccttccccaccacctccttagcctggtgtgagaaacagtttttagaaaatgagagaagggatccccaagaggccaaggcccagagaaacttttgttcttctctccttggcccacatagacttcacagaatcgtctgagaaaggagagctttttcacccctggctttctagaattttctttgtctgcatttgtgaatataccacacatgatggtgtctctgagccgaccagattatggaaactcaattgtcagaggacccaaaacaaaacttagagtgatttggatattgcctctctgtcaatgctgaaccttaagacattttaagtaaacatcctcctcctctctacacccccaggatttgtgcgttcaccccacccaagacttcaggaagtgtcatagcactcgtggactaggtttcatgggacaaaggcattctgcaagaagtagaagcttgtggccgggtgcagtggctcatgcctgtaatccaagcattttgagaggccaaggaggtggatcaattgaggccaggagtttgagaccagcctggccaacatggcgagaccccatctctactaaaaatacaaaaattagctgagcatgttgacacacgcccgtaatcccagctactcaggaggctgaggtgggagaatcgcttgaacccaggaggtgcaggttgcagtgagccgagattgcgccactgcactctagcctaagcaatggagcaagaccctatctc

SEQ ID NO: 5140 - DNA, 3629 bp, Homo Sapiens
  NM_022899
gactgtgggcagccggccgtgcgcctgcgcggtggcccttccatcccggcagtcgtggctgcagcgctgaggcgagaggttggtgggtgtctccggccataatgacccaggctgagaagggtgatacggagaacggaaaggagaagggcggcgagaaggagaaggagcagcgcggcgtgaagcggcccatcgtgcccgcgctggtgccggagtcgctgcaagagcaaatccagagcaacttcatcattgtcatacatccaggttcaacaactttaaggattggtcgagccacagacactcttcctgccagcattcctcacgtcattgcccgaagacacaaacaacaagggcagcccctatacaaggacagttggctcctaagggagggactaaataaaccagaaagtaatgaacaaagacaaaatggccttaaaatggtggatcaagcaatatggtctaaaaagatgtccaatggtacaagacgcattcctgtgtcccctgaacaggcacgctcctacaataagcagatgcgacctgcaattttagatcactgttcgggaaataagtggacaaacacatctcatcaccctgagtatttagtaggagaagaggccttgtatgttaatccactggactgttacaatattcactggcctatcagaagaggtcagttaaatattcacccaggccctgggggctctcttacagctgttctggcagatattgaagtaatatggtctcatgcgatacaaaaatacttggaaatcccactgaaagatttaaagtattatagatgtatcttgttaattcctgatatctataataagcagcatgtgaaagaactagtgaatatgatactaatgaagatgggtttttcagggattgtggtccatcaggagtctgtgtgtgccacctatggaagtggcttaagcagcacgtgtattgtagacgttggggaccagaagacaagtgtatgctgtgtggaggatggggtgtctcatcggaatactcggctttgtctggcatacggaggatctgatgtgtcaagatgtttttactggctaatgcagcgagctgggttcccttacagagaatgccagttaacaaataaaatggattgtcttcttctgcaacaccttaaagaaactttttgtcatttagatcaggacatctctgggcttcaggaccatgagtttcagattcgacatcctgattctcctgccctgctttaccagtttcgattaggagatgaaaaactgcaggctccaatggctttgttttaccccgcaacttttggaatcgttggacagaaaatgacgactttgcagcacagatctcagggcgatcctgaggatcctcacgatgaacattacctgctggccacacagagcaaacaagaacagtctgcaaaagctactgctgaccgaaagtctgcatccaaacctattggatttgaaggggatcttcgtggccagtcctctgatcttccagaaagactccattcccaggaggtagatttggggtctgcacagggagatggcctgatggccggcaacgattccgaggaggccctcactgcactgatgtccaggaagactgccatctcgctgtttgaaggaaaagccctgggcctggataaagccatcctccatagcatagactgctgttcatctgacgacaccaaaaagaagatgtacagctccatcctagtggtgggaggtggtttgatgtttcataaagctcaagaatttctgcagcacagaattctcaacaaaatgccaccatccttcaggcgaattattgaaaatgtggatgtgatcacaaggcctaaggacatggacccccggctgattgcatggaaaggaggggcagtgttggcttgtttggatacaacacaggaactgtggatttatcagcgagagtggcagcgctttggtgtccgcatgttacgagagcgggctgcgtttgtgtggtgaatggggaggaaatgtcactgccgaagaccaaaaacaagcttcttggtataaaagactcttacagaatatgtgtattgtaatttattgatctggatgcttaagtgtcatggacagtaaatgaatttgaactttatgttgaggacatgacattggtttgaaaatataaactgcttttgagcagtttagtcagggcatttgagaataaataggaactttctcttcagttgtaaactctcttgccctctctcagggtctcataaactccccagtgatgtaaacgttgctattgaaggttctcatgtggtgaagcccttcatttaagttggcttgaatctcatcagcaggcagcctcatgcaaccatgagggatagtatgtgacgagggagaactgtccactcatgccattttctctcttgtctagtatttcattaggatctaaagttgtctgagttaaatgcacttatgtgactcatgtgtcctcttagaatcccaaatagggggaaaaagttttggtggtttttgttttttttttcattttctgttggattacagaaaaagaatgggacccattcaggtctcgatttccaaaggtaaagatggaaggctgggcagactggcttttgttacctgacatgccgtagggtgagcttagaggaagaaagaaaacaatttttatttggccaaaacagaacaaatgctgaaaaggaaatcttgtttttttcctaaagccaaatagaaatgatttgggtataatttaagagtccttgtgttgtacagatatggtgactgatgtagttattaatactaccaacttagtcatcaagcctcaattttcctttacctgaaggattaagtgaaagcttttggagttcatgatgttcagtatgatcagttaaccttaacctctgagcatcctgaagcaaaatctaaataatgcagctattaccactggtggtccaggctctggtgaagccctctgagcccaggaggaagagaaagcattgtccagaggtaggaacacagtctgggagcccagagctctgggaggagtgggaaaatgctgcttcctgctgcttgcttctaggcacctgcttccgccatctcacttaccatggctagagatgggggtgagactggggaaggacaaaagcagggaacagataagtgatggaaatcagaagggaatatagaaagaactctggatgtggagaaatgccggtacctgagcattttgtatcaatgggagtaccctctgtaactgctcagtaggttacaaatgaagagtccaccagtattagaaacaatttaaacttgccagtaccaactgggatgtgtgccttcaatttgaaaattgtatgttttattttttaaatttgttaacagcattaatttatagagtattgatgtcatttatgtttctgaggtgtttcaacacaattttggatcagctgcctgtttgcaaaaacataatatatttctgttaaacagttcttcacctaacagcatattgctcttataactggtagagctgtttcaaaggaagttggtttctggtccaagttttgacctaaaccatgtccatcttctattaccagcacttacaagcactgtgaaaactgatcatgacaaataagtaaaatttgctacattaaa

SEQ ID NO: 5141 - DNA, 2952 bp, Homo Sapiens
  NM_022902
aactgatcgcggcctagtcccgacgcgtgtgtgctagtgagccggagccggcgacggcggcagtggcggcccggcctgcaggagcccgacggggtctctgccatgggggagtgacgcgcctgcacccgctgttccgcggcagcggcgagacatgaggagaccccgcgacaggggcagcggcggcggctcgtgagccccgggatggaggagaaatacggcggggacgtgctggccggccccggcggcggcggcggccttgggccggtggacgtacccagcgctcgattaacaaaatatattgtgttactatgtttcactaaatttttgaaggctgtgggacttttcgaatcatatgatctcctaaaagctgttcacattgttcagttcatttttatattaaaacttgggactgcattttttatggttttgtttcaaaagccattttcttctgggaaaactattaccaaacaccagtggatcaaaatatttaaacatgcagttgctgggtgtattatttcactcttgtggttttttggcctcactctttgtggaccactaaggactttgctgctatttgagcacagtgatattgttgtcatttcactactcagtgttttgttcaccagttctggaggaggaccagcaaagacaaggggagctgcttttttcattattgctgtgatctgtttattgctttttgacaatgatgatctcatggctaaaatggctgaacaccctgaaggacatcatgacagtgctctaactcatatgctttacacagccattgccttcttaggtgtggcagatcacaagggtggagtattattgctagtactggctttgtgttgtaaagttggttttcatacagcttccagaaagctctctgtcgacgttggtggagctaaacgtcttcaagctttatctcatcttgtttctgtgcttctcttgtgcccatgggtcattgttctttctgtgacaactgagagtaaagtggagtcttggttttctctcattatgccttttgcaacggttatcttttttgtcatgatcctggatttctacgtggattccatttgttcagtcaaaatggaagtttccaaatgtgctcgttatggatcctttcccatttttattagtgctctcctttttggaaatttttggacacatccaataacagaccagcttcgggctatgaacaaagcagcacaccaggagagcactgaacacgtcctgtctggaggagtggtagtgagtgctatattcttcattttgtctgccaatatcttatcatctccctctaagagaggacaaaaaggtacccttattggatattctcctgaaggaacacctctttataacttcatgggtgatgcttttcagcatagctctcaatcgatccctaggtttattaaggaatcactaaaacaaattcttgaggagagtgactctaggcagatcttttacttcttgtgcttgaatctgctttttacctttgtggaattattctatggcgtgctgaccaatagtctgggcctgatctcggatggattccacatgctttttgactgctctgctttagtcatgggactttttgctgccctgatgagtaggtggaaagccactcggattttctcctatgggtacggccgaatagaaattctgtctggatttattaatggactttttctaatagtaatagcgttttttgtgtttatggagtcagtggctagattgattgatcctccagaattagacactcacatgttaacaccagtctcagttggagggctgatagtaaaccttattggtatctgtgcctttagccatgcccatagccatgcccatggagcttctcaaggaagctgtcactcatctgatcacagccattcacaccatatgcatggacacagtgaccatgggcatggtcacagccacggatctgcgggtggaggcatgaatgctaacatgaggggtgtatttctacatgttttggcagatactcttggcagcattggtgtgatcgtatccacagttcttatagagcagtttggatggttcatcgctgacccactctgttctctttttattgctatattaatatttctcagtgttgttccactgattaaagatgcctgccaggttctactcctgagattgccaccagaatatgaaaaagaactacatattgctttagaaaagatacagaaaattgaaggattaatatcataccgagaccctcatttttggcgtcattctgctagtattgtggcaggaacaattcatatacaggtgacatctgatgtgctagaacaaagaatagtacagcaggttacaggaatacttaaagatgctggagtaaacaatttaacaattcaagtggaaaaggaggcatactttcaacatatgtctggcctaagtactggatttcatgatgttctggctatgacaaaacaaatggaatccatgaaatactgcaaagatggtacttacatcatgtgagataactcaagaattacccctggagaataaacaatgaagattaaatgactcagtatttgtaatattgccagaaggataaaaattacacattaactgtacagaaacagagttccctactactggatcaaggaatctttcttgaaggaaatttaaatacagaatgaaacattaatggtaaaagtggagtaattatttaaattatgtgtataaaaggaatcaaattttgagtaaacatgatgtattacatcatcttcgaaaatagatatgatggattctagtgaagaccaaaattacttctgtttactttctatcaggaagcatctccattgtaaatatgtatttacatgtttattacaaagacccaaatgaaaaatttttagtccattttttgcatagcctaaagataaaataggaataaaagttctatatttatggaaaaaaaaaaaaaaaaaa

SEQ ID NO: 5142 - DNA, 3290 bp, Homo Sapiens
  NM_022904
gttccgagggaggaagccaggcggggtgcagacggctgctgattctggggctggtcaggaaaccaaggagacccccccccccaaccatggacccaccgtcgccaagccggacctcccaaacccagcccacagccacctctccgctgacttcctaccgctggcacacagggggcggtggggagaaggcggctggagggttccgctggggccgctttgctggctggggcagggccctgagccaccaggagcccatggtcagcacccagccagcccctcgctcgatattccgtcgggtcctatctgcgcctcccaaggagtcacggaccagtcgccttcgactctccaaggccctctgggggaggcataagaacccaccgccggagccagacccggagccggagcaggaggccccagagctggagccggagccagagctggagccccctaccccacagatccctgaggcccccacacccaacgtgcctgtctgggacattgggggcttcaccctgcttgatgggaagctggtgctgcttggaggagaggaggagggtcctcgaaggccccgggtgggaagtgctagctccgagggcagcatccacgtggccatggggaacttcagggatccagatcggatgcctggaaaaacagaaccggagactgctggtcccaaccaggtccacaacgttcgggggttgctcaagaggctgaaagagaagaaaaaggccaggttggagccccgggatggaccccccagtgctctgggctctagggagtcgctggccacactctctgaactggacctgggtgccgagcgggatgtgcggatctggccactgcaccccagcctcctgggggagccccactgctttcaggtaacctggacgggtggaagccgctgcttctcttgtcgctcggccgctgagagagaccgctggatcgaggaccttcgtcgccaattccagcccacccaggacaacgtggagcgggaagagacatggctgagcgtgtgggtgcacgaagcgaaggggcttccccgagcagcggcgggggcacccggcgtgcgcgccgagctgtggctggatggcgcgctgctggcacgcacggcgcctcgggccggcccaggccagctcttctgggccgagcgcttccacttcgaggcgctgccaccggcacgtcgcctgtcgctgcggctgcgcggcttgggcccgggaagcgcggtgctgggccgcgtggccctggcgctggaggagctggacgccccacgcgcgcctgccgccggtctggagcgctggttcccgctgctcggggcgccggcgggcgcagcgctgcgggcgcggattcgggcgcgtcgcctgcgcgtgctgccgtccgagcgctacaaggagctggcggagttcctcaccttccactatgcgcgcctctgcggggccctggagcccgcgctgcctgcgcaggccaaggaggagctggcggcagccatggtgcgcgtgctgcgggccaccggccgggcgcaggcgctggtgactgacctgggcactgcggagctggcgcgctgtggaggccgtgaggcgctgctgttccgggaaaacacattggccaccaaggctatcgatgagtacatgaagctcgtggcacaggattacctccaggagaccctgggacaggttgtgcggcgtctctgtgcttctactgaggactgtgaagtggaccccagcaaatgtccagcctcggagctgccagagcaccaggccagacttcggaacagctgcgaggaggtcttcgaaaccattatccattcctacgactggttccctgcggagctgggcatcgtgttctcaagctggcgagaagcatgtaaagaacgtggctctgaggtgctgggcccccgactggtgtgcgcctccctcttcctgcggctcctgtgccctgccatcctggcacccagcctctttggtttggcaccagaccatccagcacccggcccagcccgcaccctcacactgattgccaaggtcatccagaacctcgccaaccgtgccccgttcggtgagaaggaggcctacatgggcttcatgaatagcttcctggaggaacatggaccagccatgcaatgcttcctggaccaggtagccatggtggatgtggatgctgcccccagtggttaccagggcagtggtgatctggccctccagttagctgtcctgcatgcccagctctgtacaatttttgctgagcttgaccagacaacccgagacaccctggaaccactgcccaccatcctgcgagccattgaggagggccagcctgtgcttgtgtcagtgccaatgcgtctcccactgcccccggcccaggtccactccagcctctccgcaggggagaagcccggcttcctggccccccgggacctccccaagcacacccctctcatctccaagagccagtctctgcgcagcgttcgccgctcagagagttgggcccggccacggccggacgaagagcggcccctgcggcggccccggccggtgcagcgcacgcagagtgtcccggtccggcgtcctgcccgccgccgccaatctgcggggccctggccgcgacccaaaggctccctgagcatgggaccagcgccccgcgcccggccttggacccgggactccgcctcgctgcctcggaagccgtcggtaccctggcagcgccaaatggaccagccgcaagaccgaaaccaggcactgggcacgcaccgacctgtgaacaagttggcagagctgcagtgcgaggtggccgctctgcgtgaggagcagaaagtgctgtcccgcctcgtggagtcgctgagcacccaaatccgggccttgacggagcagcaggagcagctgcggggccagctgcaggatctggactccaggctccgtgctgggagctcagagtttgattcagagcacaacctaacaagcaatgaagggcacagtctgaaaaacctggagcaccgcctaaatgagatggagagaactcaggctcagctgagggatgctgtccagagcctgcagctttctccaaggacgcgggggtcttggagtcaaccccagcccctcaaagcaccctgcctcaatggagacaccacctgagctgcccatcctgcctcatcacacgtggtctgggagcagagagatagccatcttagggggggtgtctgactttgccttagccctacttggcctacagtggggagtggagctgctggtcccaaccactctggcagtatgaagttgcccagtaaaatcttgatttcagtg

SEQ ID NO: 5143 - DNA, 2135 bp, Homo Sapiens
  NM_022906
ttttttttcccgaacgaccgcagcagggtcacaagggagatgtccgcccccagtcgtagcctcggacggtttctgagcgttggtgtttggcacgcgccaccctctcttgctttggttccgccatgccgatgtaccaggtaaaaccttatcacgggcgcggcgcgcctctccgtgtggagcttcccacctgcatgtaccggctctctaacgtgcaaggcaggagcggcggcccagcgcccggcgttggccacctacagtctttggtagatgagtggctggatagctacaagcaagaccaggatgcaggatttctggagcttgttaactttttcatctgatcttgtggatgtaaaggactcgggggactatcctctgacagctccaggtctatcctggaagaagttccagggcagcttctgtgagtttgtggggacattggtctgtcggtgccagtacatcctcctccatgatgacttccctatggacaacctcatctccctgctcactggcttctcagactcacaagtctgcgccttctgtcacactagcaccctggctgctatgaaactgatgacctccctggtaagagttgccctccaactgagtctgcacgaagatatcaatcagcgtcagtatgaggctgaaagaaacaaggggccagggcagagggcacctgagcggctggagagcctgttggagaaacacaaagagctgcattaatactacattgtcaaagacaaagacgaacatgagacatgcgatatgagttttaaaaggagagaagagcaaaaaaacaatacagctatccaaggagcaagtgctgagcttgtgaaaaaacagcttctattttattaaataatagtgttcctgcagggatgtctgaagtactctgcaaggctaattaggacagatcaatgtacacttacctctccagaaggctgaaaggtgtgtagtgactatgtgtcattaaaaatttacttgaccatgggcaacagatgtccatgaaagaatgaccctggtgagtgctctaagttttcattttactcatgtcatcctcaatgcatcataaatgccatagacaccattactatcacgtaggctcatagcagctgatgtgctgtatatgcttgagagggtggtatcaattaactatattatctataaagccatacttgcaattactaccacttcacaatttatcattaacgcatttggcagatttttttttctccaaagtaacatttatttaaaggtttatcaaaattcttagaacagcatttattataatgtgatttttgataattgactaaatcagtggctcttaaaaacaccctcatctcagtcccgctcagtatacaccacagtgccatttggggaaaagaaatacatattagaaatgttcatttcagacctcgtcatggaagatcatatattaatgtaatcaggtggtacgtttacatgctcattagtaatccatcattagtccaaatgctcactattaggaataaatgtacaacgagttattcagaatacccagaaagagtatttcttatttaaacattcaggacaagctgactgaaataagtgcacaccttgaatttgaactttcaaggcacatcactaaagtcaatcagttatgtcaggacactcttctataataatctcaattataaaattcctgcctctccctaacacaggagttggagggagttccaatatctgaatctttctaattcactgtaactgcaaaaaaatcttgatgaagtgtgtatttaaatttcatgccttaatacatagcatgccactaaaaccacattagttatgctttatgctgcttaatcatacgtcaaaatctgtaaaatctgctcttgcatgctaaggtaatttaactgcaattaatcaattaagaaaaataaaatgtaataaatgccaaataatgtaacttcttttaaacagaccactatctacacatttattccccaaatacttattagctgacaccatataaggaaaacataataaaaagtagacttcactgagcctttctcccattagtagcttgctctaaacttacaaatgttttagagaattctttggcatgatctgactttccaactaaaatgtgagcaacttga

SEQ ID NO: 5144 - DNA, 2105 bp, Homo Sapiens
  NM_022908
agactccgcccaagcatgcacacacacaggcttgatgctcgctcccgtttctacaggaggttttgacggctggatgctgcagggcatcccctcgcctggaggaggttcacttgtggccaggttcccagcacacccacttgctcactggggccctggggacaccgccacactcgagcccatcctacggcctcaatccttaccagtccccaggccatggactgccacactgtaggtcttcaatcaaggttcagtggagtttcgaatgtacacacaccctgaaagacagcgcggccacctcagaaaacaacgcgcgcccagctggctcccctccgacagggcccacggctactgggtcggcctcctccggaccctgagcacagcctggtatgcgtgcgggctcggaatacggatctgagcagaagaaatgcgagtggagagcggttctgcgcaggaaagaggaattttgttggaaagcctgtcgacgttgctagaaaagaccacagcatctcacgaggggcgtgcgccgggaaaccgggagttgacggacctcctgccccccgaggtctgcagtctcctgaacccagcagccatctacgccaacaacgagatcagcctgcgtgacgttgaggtctacggctttgactacgactacaccctggcccagtatgcagacgcactgcaccccgagatcttcagtaccgcccgtgacatcctgatcgagcactacaagtacccagaagggattcggaagtatgactacaaccccagctttgccatccgtggcctccactatgacattcagaagagccttctgatgaagattgacgccttccactacgtgcagctggggacagcctacaggggcctccagcctgtgccagacgaggaggtgattgagctgtatgggggtacccagcacatcccactataccagatgagtggcttctatggcaagggtccctccattaagcagttcatggacatcttctcgctaccggagatggctctgctgtcctgtgtggtggactactttctgggccacagcctggagtttgaccaagcacatctctacaaggacgtgacggacgccatccgagacgtgcatgtgaagggcctcatgtaccagtggatcgagcaggacatggagaagtacatcctgagaggggatgagacgtttgctgtcctgagccgcctggtggcccatgggaaacagctgttcctcatcaccaacagtcctttcagcttcgtagacaaggggatgcggcacatggtgggtcccgattggcgccagctcttcgatgtggtcattgtccaggcagacaagcccagcttcttcactgaccggcgcaagcctttcagaaaactcgatgagaagggctcacttcagtgggaccggatcacccgcttggaaaagggcaagatctatcggcagggaaacctgtttgacttcttacgcttgacggaatggcgtggcccccgcgtgctctacttcggggaccacctctatagtgatctggcggatctcatgctgcggcacggctggcgcacaggcgccatcatccccgagctggagcgtgagatccgcatcatcaacacggagcagtacatgcactcgctgacgtggcagcaggcgctcacggggctgctggagcgcatgcagacctatcaggacgcggagtcgaggcaggtgctggctgcctggatgaaagagcggcaggagctgaggtgcatcaccaaggccctgttcaatgcgcagttcggcagcatcttccgcaccttccacaaccccacctacttctcaaggcgcctcgtgcgcttctctgacctctacatggcctccctcagctgcctgctcaactaccgcgtggacttcaccttctacccacgccgtacgccgctgcagcacgaggcacccctctggatggaccagctctgcaccggctgcatgaagacccccttccttggtgacatggcccacatccgctgagggcacctttattgtctgggacaggccctcagcccctcctgccccatccacccagacaagcaataaaagtggtctcctccctgtgcatgcttctgctttcaaaaaaaaaaaaaaaaaa

SEQ ID NO: 5145 - DNA, 2086 bp, Homo Sapiens
  NM_022914
gcgtcatcacgctgaggtccgcgcgcccccggagtctggggagcagggctccgccaatccgaggggagggcgaaggaagtaccatttatttagcgctgtgtgtgtgctcttatttccactggccttacaagaccgtgcactgtgtagatgaggaaactgagtcataataaatatgtgctgaaccgttcgggggtcacacggtgctgaaatggtttcgagtcaactcgctcggacggcactcggcctcagcctccggccctggaaccctctccagggacgggaccagcccttgttctgttccctaccggtaccacaggaatcttgacgaacggcccaaatgcctggccgctgtcagagtgacgccgcgatgagagtaaacgggccagcatcccgtgcaccagcggggtggaccagcgggagtctgcacacaggcccccgagcaggacgccctcgtgcgcaggcgcggggtgtacgtgggcggggcctcctcctccggccccgcccagcgaaggagcttcctcttccgaggaaaggcggggcctgggcgcccgcgggaaacccgggcccgttgcatccgctgggtgtagccgtggggatggcaggttcggggaggctggtcctacggccctggattcgggagctgattctggggtcagagacaccctccagtccacgagccgggcagctgcttgaggacgccgaggccgcggtcgcgggcccatcccacgcccctgatacgtccgacgtcggggccacgctgcttgtgtctgacgggacccacagtgtccgatgcctggtgacgcgggaggccctggacacctcggactgggaggagaaggagttcggcttccgcgggacagagggccggctgctgctgctgcaggactgcggggttcatgtccaggtcgctgagggcggcgcgcccgcagagttctatctccaggtggaccgcttcagcctgctgcccacggagcagccccggctacgggtgcctggttgcaaccaagacttagatgttcagaaaaagctctatgactgccttgaggagcacctttcagagtccacctcgtccaatgcaggcctatcactgtcccagcttctggatgaaatgcgggaggaccaggagcatcagggggcactcgtgtgcctggctgaaagctgcctgacactggagggcccttgcacagcaccccctgtcacccactgggctgcctcacgatgcaaggccacgggagaagctgtgtacactgtccccagctcaatgctgtgcatctctgagaatgaccagctaattctgagctctctaggcccctgtcagaggacacagggccctgagctgcccccaccagacccggctctgcaggacctatctctgaccctcatagcctctcctccttcctcacccagttcctcaggaaccccggccttacccggccacatgtcatccgaggaaagtggtaccagcatcagccttctgcctgccctgtccttggctgctccagacccagggcagagaagcagctcccagccctcaccagccatctgctcagcccctgccaccctgacccccaggtccccacacgccagccgtacccccagctccccactccagagctgcactcccagtctctcaccccgtagccatgtccccagtccacaccaggctcttgtgaccaggccccagaaacctagcctggagttcaaggagtttgtagggttgccctgcaagaatcggccgccttttcccaggaccggagctaccaggggagcccaggagccctgctctgtctgggaacccccaaagaggcatcgtgatggttctgccttccagtatgagtatgagccaccctgcacgtccctctgtgctcgggtccaagctgtcaggcttcctccccagctcatggcctgggccttgcactttctgatggatgcacagccagggtctgagccaactccgatgtgagacgtcacgcaggacagataccgctccacactctgcttcctttgagttttttaataaaataatctcatgcggcaggagaggagaggatcagggaaaaaaaaaaaaaaaaaaaaaaaaaaaaaa

SEQ ID NO: 5146 - DNA, 2628 bp, Homo Sapiens
  NM_022916
gtgcgctgccgtaccggtcacgtggacgtttggtcacgtgactgcgtccgtggtcctcccgtaggaaccggcggactcggttggcgttgtggggcagggggtggtggagcaagatggcggctcatctgtcctacggccgagtgaacctaaacgtgttgcgcgaggcggtgcgtcgcgagctgcgcgagttcctggacaagtgcgcaggaagcaaggcaatagtttgggatgaatacctaactggaccctttggcctgattgcacagtattcactattgaaggaacatgaagtggaaaaaatgttcacacttaaaggaaatcgtttgccggcagctgatgtgaagaatataattttttttgtcagacccaggctagagttgatggatataatcgctgaaaacgtgctcagtgaagatagacgaggcccaacgagagattttcatattctgtttgtgccacgccgtagcctgttgtgcgaacagcggttgaaggatctgggtgtcttgggatcctttattcacagggaggagtacagcttagatctcattccattcgatggggatctcttatccatggaatcagagggtgcattcaaagagtgctacctggagggtgaccagacgagcctgtaccacgcagccaaggggctgatgaccctgcaagctctgtatggaacgatcccccagatctttgggaaaggagaatgcgctcggcaagtggccaatatgatgatcaggatgaagagagagtttacaggaagccagaattcaatatttcctgtttttgataatctcttgttgcttgatcggaatgtggatttattaacacctcttgccactcagctgacatatgaaggactcattgatgaaatttatggcattcagaacagttatgtgaaattacctccagagaaatttgcacctaagaaacagggcgatggtggtaaggacctccccacggaagcaaagaagctgcagctgaattctgcagaggagctctatgctgagatccgagataagaacttcaacgcagttggctctgtgctcagcaagaaagcaaagatcatctctgcagcattcgaggaaagacacaatgctaagaccgtgggggagatcaagcagtttgtttcccagttgccccacatgcaggcagcaaggggctcgcttgcaaaccatacctcaattgcagaattgatcaaagatgtcactacttctgaagacttttttgataaattaaccgtggaacaggagtttatgtctggaatagacactgataaggtcaacaattacattgaggattgtatcgcccaaaagcactcgttgatcaaggtgttaagactagtttgcctccaatccgtgtgtaatagtgggctcaaacaaaaagttttggattattacaaaagagagattctccagacatacggctatgagcacatattgaccttacacaacctggagaaggccggcctgctgaaaccgcagacggggggcagaaacaattacccaactatacggaaaacattacgcctctggatggatgatgttaatgagcaaaaccccacggacatatcgtatgtgtacagtgggtatgccccgctcagtgtgcggctggcccagctgctttcccggcctggctggcggagcatcgaggaggtcctccgcatcctcccagggccccactttgaggagcggcagccactgcccacaggactgcagaagaaacgtcaaccgggagaaaaccgagtgactctgatatttttccttgggggcgtaaccttcgctgaaattgctgccctgcgatttctctcccagttggaagatggaggtacagaatatgtcattgccaccactaaactaatgaatggaaccagttggatagaggctctgatggaaaaacctttctaggatgttcagaggagacttaacaagtgtactgcagaataaactacctctttgaagaaattgctgaaaggaagtaaaaccccatagaagaaacatgggaatacagaatatattctggggtcagcttcttaaattatactactgtttactgctttctccgtctcttttgtattccctttttttttttcctttgagacggagtcttgctctgtcacccagactagagtgcagtggcacggtctcacctcactgcaacctccacctcctaggttcaagcaattctcctgcctcagcctcctgagtagctgggactacaggcatgcaccaccacacccggctaatttttgtatttttagtagccatggtgtttcaccatgttggccaggctggtctcaaactcctgacctcaggtgatccacctgcctcggcctcccacagtgctgggattacaggcctgagccaccgtgcctggcccctaatctgctgaagaaagaagaatagaagaaaatcaacctgagtaaaagcagcactggttttgagttttctaagctcagggtcttcattagagacctctggaaatacattaaggatggtgggggtagataatccattcagccagacaaacggggccagctcttaaaataagaaagctgagactgaggaggtgaaactgaaaataaaaagagaaagttcatcctctaaaaaaaaaaaaaaaaaaaaaaaaaaa

SEQ ID NO: 5147 - DNA, 3968 bp, Homo Sapiens
  NM_022965
gtcgcgggcagctggcgccgcgcggtcctgctctgccggtcgcacggacgcaccggcgggccgccggccggagggacggggcgggagctgggcccgcggacagcgagccggagcgggagccgcgcgtagcgagccgggctccggcgctcgccagtctcccgagcggcgcccgcctcccgccggtgcccgcgccgggccgtggggggcagcatgcccgcgcgcgctgcctgaggacgccgcggcccccgcccccgccatgggcgcccctgcctgcgccctcgcgctctgcgtggccgtggccatcgtggccggcgcctcctcggagtccttggggacggagcagcgcgtcgtggggcgagcggcagaagtcccgggcccagagcccggccagcaggagcagttggtcttcggcagcggggatgctgtggagctgagctgtcccccgcccgggggtggtcccatggggcccactgtctgggtcaaggatggcacagggctggtgccctcggagcgtgtcctggtggggccccagcggctgcaggtgctgaatgcctcccacgaggactccggggcctacagctgccggcagcggctcacgcagcgcgtactgtgccacttcagtgtgcgggtgacagacgctccatcctcgggagatgacgaagacggggaggacgaggctgaggacacaggtgtggacacaggggccccttactggacacggcccgagcggatggacaagaagctgctggccgtgccggccgccaacaccgtccgcttccgctgcccagccgctggcaaccccactccctccatctcctggctgaagaacggcagggagttccgcggcgagcaccgcattggaggcatcaagctgcggcatcagcagtggagcctggtcatggaaagcgtggtgccctcggaccgcggcaactacacctgcgtcgtggagaacaagtttggcagcatccggcagacgtacacgctggacgtgctggagcgctccccgcaccggcccatcctgcaggcggggctgccggccaaccagacggcggtgctgggcagcgacgtggagttccactgcaaggtgtacagtgacgcacagccccacatccagtggctcaagcacgtggaggtgaatggcagcaaggtgggcccggacggcacaccctacgttaccgtgctcaaggtgtccctggagtccaacgcgtccatgagctccaacacaccactggtgcgcatcgcaaggctgtcctcaggggagggccccacgctggccaatgtctccgagctcgagctgcctgccgaccccaaatgggagctgtctcgggcccggctgaccctgggcaagccccttggggagggctgcttcggccaggtggtcatggcggaggccatcggcattgacaaggaccgggccgccaagcctgtcaccgtagccgtgaagatgctgaaagacgatgccactgacaaggacctgtcggacctggtgtctgagatggagatgatgaagatgatcgggaaacacaaaaacatcatcaacctgctgggcgcctgcacgcagggcgggcccctgtacgtgctggtggagtacgcggccaagggtaacctgcgggagtttctgcgggcgcggcggcccccgggcctggactactccttcgacacctgcaagccgcccgaggagcagctcaccttcaaggacctggtgtcctgtgcctaccaggtggcccggggcatggagtacttggcctcccagaagtgcatccacagggacctggctgcccgcaatgtgctggtgaccgaggacaacgtgatgaagatcgcagacttcgggctggcccgggacgtgcacaacctcgactactacaagaagacaaccaacggccggctgcccgtgaagtggatggcgcctgaggccttgtttgaccgagtctacactcaccagagtgacgtctggtcctttggggtcctgctctgggagatcttcacgctggggggctccccgtaccccggcatccctgtggaggagctcttcaagctgctgaaggagggccaccgcatggacaagcccgccaactgcacacacgacctgtacatgatcatgcgggagtgctggcatgccgcgccctcccagaggcccaccttcaagcagctggtggaggacctggaccgtgtccttaccgtgacgtccaccgacgagtacctggacctgtcggcgcctttcgagcagtactccccgggtggccaggacacccccagctccagctcctcaggggacgactccgtgtttgcccacgacctgctgcccccggccccacccagcagtgggggctcgcggacgtgaagggccactggtccccaacaatgtgaggggtccctagcagcccaccctgctgctggtgcacagccactccccggcatgagactcagtgcagatggagagacagctacacagagctttggtctgtgtgtgtgtgtgtgcgtgtgtgtgtgtgtgtgtgcacatccgcgtgtgcctgtgtgcgtgcgcatcttgcctccaggtgcagaggtaccctgggtgtccccgctgctgtgcaacggtctcctgactggtgctgcagcaccgaggggcctttgttctggggggacccagtgcagaatgtaagtgggcccacccggtgggacccccgtggggcagggagctgggcccgacatggctccggcctctgcctttgcaccacgggacatcacagggtgggcctcggcccctcccacacccaaagctgagcctgcagggaagccccacatgtccagcaccttgtgcctggggtgttagtggcaccgcctccccacctccaggctttcccacttcccaccctgcccctcagagactgaaattacgggtacctgaagatgggagcctttaccttttatgcaaaaggtttattccggaaactagtgtacatttctataaatagatgctgtgtatatggtatatatacatatatatatataacatatatggaagaggaaaaggctggtacaacggaggcctgcgaccctgggggcacaggaggcaggcatggccctgggcggggcgtgggggggcgtggagggaggccccagggggtctcacccatgcaagcagaggaccagggccttttctggcaccgcagttttgttttaaaactggacctgtatatttgtaaagctatttatgggcccctggcactcttgttcccacaccccaacacttccagcatttagctggccacatggcggagagttttaatttttaacttattgacaaccgagaaggtttatcccgccgatagagggacggccaagaatgtacgtccagcctgccccggagctggaggatcccctccaagcctaaaaggttgttaatagttggaggtgattccagtgaagatattttatttcctttgtcctttttcaggagaattagatttctataggatttttctttaggagatttattttttggacttcaaagcaagctggtattttcatacaaattcttctaattgctgtgtgtcccaggcagggagacggtttccagggaggggccggccctgtgtgcaggttccgatgttattagatgttacaagtttatatatatctatatatataatttattgagtttttacaagatgtatttgttgtagacttaacacttcttacgcaatgcttctagagttttatagcctggactgctacctttcaaagcttggagggaagccgtgaattcagttggttcgttctgtactgttactgggccctgagtctgggcagctgtcccttgcttgcctgcagggccatggctcagggtggtctcttcttggggcccagtgcatggtggccagaggtgtcacccaaaccggcaggtgcgattttgttaacccagcgacgaactttccgaaaaataaagacacctggttgctaacctggaaaaaaaaaaaaaaaaa

SEQ ID NO: 5148 - DNA, 5351 bp, Homo Sapiens
  NM_022977
gcgattcggctggctctgccacaccaccgcgcgcccccgctccgcccgcccctccgggcgcgtcttttccgggctcgcgctgagtcccgcctccgccggctgtccgggtgcgcgcgcgccgctgcggctttttctctggcctccgccgcgcgctcctcctcgtcccagcgctagcgggcacgcggttcctttttgcgagctttccgagtgccaggcgccggccggctgcgaagacgcggtgggccgcccctccgattgaaatcacagaagatattcgtgttcttcttaagagaaaaagaggacattttagctttctcagttgaaggcgtactttattgtcggcttccaaagattactaacttttatctgtatcactaagattgaactgccttggctgtactgctattcttactgctgcttctattattgccttcttcagcacaataaggctttcaaaagccaaagaataacaagaaataagcaccattttagaagcctttccactatgaaacttaagctaaatgtgctcaccattattttgctgcctgtccacttgttaataacaatatacagtgcccttatatttattccatggtattttcttaccaatgccaagaagaaaaacgctatggcaaagagaataaaagctaagcccacttcagacaaacctggaagtccatatcgctctgtcacacacttcgactcactagctgtaatagacatccctggagcagatactctggataaattatttgaccatgctgtatccaagtttgggaagaaggacagccttgggaccagggaaatcctaagtgaagaaaatgaaatgcagccaaatggaaaagtttttaagaagttaattcttgggaattataaatggatgaactatcttgaagtgaatcgcagagtgaataactttggtagtggactcactgcactgggactaaaaccaaagaacaccattgccatcttctgtgagaccagggccgaatggatgattgcagcacagacctgctttaagtacaactttcctcttgtgactttatatgccacacttggcaaagaagcagtagttcatgggctaaatgaatctgaggcttcctatctgattaccagtgttgaacttctggaaagtaaacttaagactgcattgttagatatcagttgtgttaaacatatcatttatgtggacaataaggctatcaataaagcagagtaccctgaaggatttgagattcacagcatgcaatcagtagaagagttgggatctaacccagaaaacttgggcattcctccaagtagaccaacgccttcagacatggccattgttatgtatactagtggttctactggccgacctaagggagtgatgatgcatcatagcaatttgatagctggaatgacaggccagtgtgaaagaatacctggactgggaccgaaggacacatatattggctacttgcctttggctcatgtgctagaactgacagcagagatatcttgctttacctatggctgcaggattggatattcttctccgcttacactctctgaccagtccagcaaaattaaaaaaggaagcaaaggagactgtactgtactgaagcccacacttatggctgctgttccggaaatcatggatagaatttataagaatgttatgagcaaagtccaagagatgaattatattcagaaaactctgttcaagatagggtatgattacaaattggaacagatcaaaaagggatatgatgcacctctttgcaatctgttactgtttaaaaaggtcaaggccctgctgggagggaatgtccgcatgatgctgtctggaggggccccgctatctcctcagacacaccgattcatgaatgtctgcttctgctgcccaattggccagggttatggactgacagaatcatgtggtgctgggacagttactgaagtaactgactatactactggcagagttggagcacctcttatttgctgtgaaattaagctaaaagactggcaagaaggcggttatacaattaatgacaagccaaaccccagaggtgaaatcgtaattggtggacagaacatctccatgggatattttaaaaatgaagagaaaacagcagaagattattctgtggatgaaaatggacaaaggtggttttgcactggtgatattggagaattccatcccgatggatgtttacagattatagatcgtaagaaagatctagtgaagttacaagcaggagagtatgtatctcttgggaaagtagaagctgcactgaagaattgtccacttattgacaacatctgtgcttttgccaaaagtgatcagtcctatgtgatcagttttgtggttcctaaccagaaaaggttgacacttttggcacaacagaaaggggtagaaggaacttgggttgatatctgcaataatcctgctatggaagctgaaatactgaaagaaattcgagaagctgcaaatgccatgaaattggagcgatttgaaattccaatcaaggttcgattaagcccagagccatggacccctgaaactggtttggtaactgatgctttcaaactgaaaaggaaggagctgaggaaccattacctcaaagacattgaacgaatgtatgggggcaaataaaatgttgttgtcttattgacagttgtgcaggaggtagcctggtggttttcaacctctagaattttaagcctttgttgaactgttagaatgtaaggtatatcattctaaagatagagtaaaaagaaaacaaaaccaaaagttattaaaattgttgtccggtttactttaacttagttttgcatagttctagtgcagctgaaattgaaaagttatttccctttagctgtgttattatagagcagaaattctgtttttaaaaattagcctaagatatacttgtttttgtaaagaaaaatatttaatgttgaacaaaataaattggagttggagtagaatgtagtttgaggaaatttgcagcttccaatgcctcttgtcttcctatttcagaagtttaaatattaagcatgacagaaaatatgtattaacactactcaaagcaaaagtgctgcagggctttaaaattctcttccaaccatttatcttgaaggaaaaattcaatagtaatataatacacaaaatcaaataataccttagaaggtattaagattataattgttgcataggttagatatagagtcattgtaatgttgtgaataattacagtgcctaaaataagaatagaacaacatatacaacaccaaaaaatatctagtaatatatttaaagggaaattgagctgctttttttgaaactttgagatctaaaaataactgtaattatttgaatgactaagaggaaagtacattttttgaaatgctgaaaattgcctttctgtgtttattcaaactgaaaagctgagaccaagagcaaggaaggtaaaaagttaacaggcaaacattttctcttagaaaaggtgataaaatcataagtatttggaattagaacccttgcacagcactgaacctgggaaagagatttaaactctgaatttatctttgataacagggattgattttaaaatgtacatgtattaaattacatttgtaatttaaggtctgtttgctgttgctgattttattcttgatcagtagtttgcatttcagaaagcctttcattttgctttaattttagcaaagcgggttataatgaatgacttccccaatatcttgcttgaacttacaggtgattaacttggatgagttttgggaagttaaagggaagaaaacactgttatcattttttcctgtttgggaagagcttagaaactggaaatactagatttgggagaagggcagagttacttgataagggactgatgtttgtgcagtaacttgggagtgtggtttctttttgaatctttaattaaaacctgggattatatatccctgataaatattcacacttgaaccatagttactgtaaaatgcaaaaaatcttaatactgttattctttgcactttttcttaatcattttttatatatatgcatatatatatgtgtgtgtgtgtgttgcttatgttgttttgtacagatgtgggccaccattgcaacaaaatacattctttttgctctaaaatatttatgaagaaaatacttaaatgttatgtatatggtggtaataagggaaaaatcaagtattataaacaagaatgaaggtttttgtaaagatttctgttcagcgttttgcaaggtaaaattttaggcaagttttccctgaagttatgtgtatgtgagtattctcattcttcccaacttgcctttgaagagtgaaataccattattatcaagtagactactgttcagcttttattcctgccctgctgtttatcccttaagaatgagtttcttagacttttccaatatgtgattttttttcccatttagaatggtgattttaaatgtgtgagtgcatgtactatcttatctcagatatttgcacccccaatctgcccccaactcccaaaagctagaacactgccaactgatctgttataggtcctttagaaacacataattaacacttaaggttgggtgctgctaattctttgcaaaaatccaaatattgttaagggaccagggagatgccactaccccttgattttccatctaaaaatatacatgtttatgtaaacaaatctttccatatccatagtgacttttcaagtatttaagcctaaagattttgatctcacatttttatacctgtttaaattgctcacagttattacatacacatcagccatcaactaaagttgtactttaaaaatttactacaatatgtacatttctaagtcaaacacttgtgacttttgctttaattccatgaatgttcctgcctccttgatatttgtatttattctttttttctctagagtagaggtataattgtgtgatatttcagaaatacagataaatgattcaaaaagtcacagttaaggagaatcatgtttctttgatcatgaataactgattagtaagtcttgcctatattttcctgatagcatatgacaaatgtttctaaggtaacaagatgagaacagataaagattgtgtggtgttttggatttggagagaaatattttaatttttaaatgcagttacaaattataatgtattcatatttgtactttctgttaaaatgcatgattgcagaattgtttagattttgtgtttattcttgatgaaaagctttgtttgttcttgtttttaagtttgcactcaaatcttaagaaataaatccacccatgttatcaaaaaaaaaaaaaaaaaa

SEQ ID NO: 5149 - DNA, 1909 bp, Homo Sapiens
  NM_023003
cggctgaggcgcctcgaagggcaagcgccaagggggcgcgggcgccgccggaagctggggcggggcgcccagcgggatgcggtgaagggcgagcggcgcggcggctgcgatgagtgcctctgcggccaccggggtcttcgtgctgtccctctcggccatcccggtcacctatgtcttcaaccacctggcggcccagcatgattcctggactattgtaggggttgctgccctcatcctgttcctggtagcactgctggctcgtgtcctcgtcaaaagaaaaccaccccgggacccactgttctatgtgtatgcagtttttggatttaccagcgtggtgaacctcatcataggactggagcaagatggaatcattgacgggttcatgacacactacttgagagagggtgaaccgtatctgaacaccgcatatgggcacatgatctgctactgggatggctctgctcattatctgatgtacctggtgatggtggcagccatagcatgggaggaaacttatagaaccattggcctatattgggttggatctattattatgagtgttgttgtttttgtgccaggaaacattgtagggaagtatggaacacgaatttgccctgcttttttcttaagcataccatatacttgtcttcctgtctgggctggtttcagaatctataatcagccatcagaaaattataattacccctcaaaggttattcaagaagcccaagcgaaagacctgctgagaagaccatttgatttaatgttggttgtgtgtctcctcctggcaactggattttgcctgttcagaggtttgattgctttggattgcccatctgagctctgccgattatatacgcaatttcaagagccctatctaaaggatcctgctgcttatcctaaaattcagatgctggcatatatgttctattctgttccttactttgtgactgcactgtatggcttagtggttcctggatgttcctggatgcctgacatcacattgatacatgctggaggtctggctcaggctcagttttctcacattggtgcatctcttcatgctagaactgcttatgtctacagagtccctgaagaagcaaaaatcctttttttagcattaaacatagcatatggagttcttcctcagctcttggcctatcgttgtatctacaaaccagagttcttcataaaaacaaaggcagaagaaaaagtggaataaaaatattacttcatgttcctcctttctaaattactaacttttgttatactggtactgatattttgtcccatttcactctcttctcatacgtgagtacttaagaatatgtacattcttgctctgcactgtatgtgtgagctatatggtattgtgtaaattttttttgaaggaaaatggaaattcttgagaaacagtttgtttaaagaaatatattcaaaatcatttgtgaataaacttgatcatccatctcaatattgtttgacatataaaataattataagtgtaaaaaattacaatttagtgccaacagtagtgagcatgaaatgaaactattcaaaagagaatatggcctgtgcatattaaaaaattcaaaacagtgaatgcagactggaggagtaacttttgcaaataagatgaatatgcttcattattaaactcaatataaaaggcaaatcatcagaatatttttaaatgttgtttgaaaaatgttttcccaaggaaagtttattatttgctgctgtttcaagaaaattacttttactaaatttttttgtgtgaatttaaacagctaaatagggatcagtaactttatctctatccttaatgaacatttgttttattggtggctggaaatatttctattgtatttctgtgtatatttttaataaaattatttttggcctctta

SEQ ID NO: 5150 - DNA, 6079 bp, Homo Sapiens
  NM_023005
cgttggccgggcccgggggaggaggggaatctcccgccatttttcaataatttcctccggtgctgctgaggagagtcgtgactgccggccgccgggacccgaagcggaggtcggcggggggctgctgggaggcgcggcggtgtgcgcgggagctctgcgccggtggcgttccgctccatgactgtcgcgcggccgcgccggcggtgagggagccggagttcgcgccgccctctcacccctcccttcacccaccccacccccgggcgcctggcgctcgctccgggccgcggggcctagtgctgcgccgcggggccggccccagcagccgccagtccccaccgccgccgccgcgatggcgccgctcctgggccgcaagcccttcccgctggtgaagccgttgcccggagaggagccgctcttcaccatcccgcacactcaggaggccttccgcacccgggaagagtatgaagcccgcttggaaaggtacagtgagcgcatttggacgtgcaagagtactggaagcagtcagctaacacacaaggaagcctgggaggaagaacaggaagttgctgagcttttgaaggaggagtttcctgcctggtatgagaagcttgttctggaaatggttcaccataacacagcctccttagagaagttagtagatactgcttggttggagatcatgaccaaatatgctgtgggagaagagtgtgacttcgaggttgggaaggagaaaatgctcaaggtgaagattgtgaagattcatcctttggagaaagtggatgaagaggccactgagaagaaatctgatggtgcctgtgattctccatcaagtgacaaagagaactccagtcagattgctcaggaccatcagaagaaggagacagttgtgaaagaggatgaaggaaggagagagagtattaatgacagagcacgtagatcgccacgaaaacttcctacttcattaaaaaaaggagaaaggaaatgggctcctccaaaatttctgcctcacaaatatgatgtgaaactacaaaatgaagataagatcatcagtaacgtgccagcagacagcttgattcgtacagagcgcccaccaaataaggagatagttcgatactttatacggcataatgcattacgagctggtactggtgaaaatgcaccttgggtcgtagaagatgaattggtgaagaaatactctctgcccagcaagttcagtgactttttacttgatccatacaagtatatgactctcaacccttctactaagaggaagaatactggatccccagacaggaagccctcaaagaaatccaagacagacaactcttctcttagttcaccactaaatcctaagttatggtgtcacgtacacttgaagaagtcattgagtggctcgccactcaaagtgaagaactcaaagaattccaaatctcctgaagaacatctagaagaaatgatgaagatgatgtcgcccaataagctgcacactaactttcacattcctaaaaaaggcccacctgccaagaaaccagggaagcacagtgacaagcctttgaaggcaaagggcagaagcaaaggcatcctgaatggacagaaatccacagggaattccaaatctcccaaaaaaggactgaagactcctaaaaccaaaatgaagcagatgactttgttggatatggccaaaggcacgcagaagatgacacgagccccacggaattctgggggtacacctaggacctctagtaaacctcataaacatctgcctcctgcagccctacacctcattgcatactacaaagaaaacaaagacagggaggacaagaggagcgccctgtcctgtgttatctccaaaacagctcgtcttctctctagtgaagatagagctcgtctcccagaagaattgcgaagtcttgttcaaaaacgctatgaacttctagagcacaaaaagaggtgggcttctatgtctgaagaacaacggaaagaatatttgaaaaagaaacgggaggagctgaaaaagaagttgaaggaaaaagccaaagaacgaagagagaaagaaatgcttgagagattagaaaaacagaagcggtatgaggaccaagagttaactggcaaaaaccttccagcattcagattggtggatacccctgaagggctgcccaacacgctgtttggggatgtggccatggtggtggaattcttgagctgttattctgggctacttttaccagatgctcagtatcctattactgctgtgtcccttatggaagccttgagtgcagataagggtggctttttataccttaacagggtgttggtcatcctcttacagaccctcctacaagatgagatagcagaagactatggtgaattgggaatgaagctgtcggaaatccccttgactctgcattctgtttcagagctggtgcggctctgcttgcgcagatctgatgttcaggaggaaagcgagggctcagacacagatgacaataaagattcagctgcatttgaggataatgaggtacaagatgagttcctagaaaagctggagacctctgaattttttgagctgacgtcagaggagaagctacagatcttgacagcactgtgccaccggatcctcatgacatactcagtgcaagaccacatggagaccagacagcagatgtctgcagagttgtggaaggaacggcttgctgtgttgaaggaagaaaatgataagaagagagcagagaaacagaaacggaaagaaatggaagccaaaaataaagaaaatggaaaagttgagaatgggttaggcaaaactgataggaaaaaagaaattgtgaagtttgagccccaagtagatacagaagctgaagacatgattagtgctgtgaagagcagaaggttgcttgccattcaagctaagaaggaacgggaaatccaggaaagagaaatgaaagtgaaactggaacgccaagctgaagaagaacgaatacggaagcacaaagcagctgctgagaaagctttccaggaagggattgccaaggccaaactagtcatgcgcaggactcctattggcacagatcgaaaccataatagatactggctcttctcagatgaagttccaggattattcattgaaaaaggctgggtacatgacagcattgactaccgattcaaccatcactgcaaagaccacacagtctctggtgatgaggattactgtcctcgcagtaagaaagcaaacttaggtaaaaatgcaagcatgaacacacaacatggaacagcaacagaagttgctgtagagacaaccacacccaaacaaggacagaacctatggtttttatgtgatagtcaaaaggagctggatgagttgctaaactgtcttcaccctcagggaataagagaaagtcaacttaaagagagactagagaagaggtaccaggacattattcactctattcatctagcacggaagccaaatttgggtctaaaatcttgtgatggcaaccaggagcttttaaacttccttcgtagtgatctcattgaagttgcaacaaggttacaaaaaggaggacttggatatgtggaagaaacatcagaatttgaagcccgggtcatttcattagagaaattgaaggattttggtgagtgtgtgattgcccttcaggccagtgtcataaagaaatttctccaaggcttcatggctcccaagcaaaagagaagaaaactccaaagtgaagattcagcaaaaactgaggaagtggatgaagagaagaaaatggtagaggaagcaaaggttgcatctgcactggagaaatggaagacagcaatccgggaagctcagactttctccaggatgcacgtgctgcttgggatgcttgatgcctgtatcaagtgggatatgtccgcagaaaatgctaggtgcaaagtttgtcgaaagaaaggtgaggatgacaaattgatcttgtgtgatgagtgtaataaagccttccacctgttttgtctgaggccggccctctatgaagtaccagatggtgagtggcagtgcccagcttgccagcccgctactgccaggcgcaactcccgtggcaggaactatactgaagagtctgcttctgaggacagtgaagatgatgagagtgatgaagaggaggaggaggaagaagaggaggaggaggaagaagattatgaggtggctggtttgcgattgagacctcgaaagaccatccggggcaagcacagcgtcatcccccctgcagcaaggtcaggccggcgcccgggtaagaagccacactctaccaggaggtctcagcccaaggcaccacctgtggatgatgctgaggtggatgagctggtgcttcagaccaagcggagctcccggaggcaaagcctggagctgcagaagtgtgaagagatcctccacatgatcgtgaagtaccgcttcagctggcccttcagggagcctgtgaccagagatgaggccgaggactactatgatgtgatcacgcaccccatggactttcagacagtgcagaacaaatgttcctgtgggagctaccgctctgtgcaggagtttcttactgacatgaagcaagtgtttaccaatgctgaggtttacaactgccgtggcagccatgtgctaagctgcatggtgaagacagaacagtgtctagtggctctgttgcataaacaccttcctggccacccatatgtccgcaggaagcgcaagaagtttcctgataggcttgctgaagatgaaggggacagtgagccagaggccgttggacagtccaggggacgaagacagaagaagtagagaggcagggccgtggtgacagtatcagtgagtgccatacagaattgtgtattcaccagcatcatgaaacagttgtggtcttttgagttgatcttggcagagtaaagggacgtgtcctggagccattcctgaatctccccttctttgtgacagctcctcccacccccccaaaaaataaaaaaaccacaaaaaacaaaaaaacaaaactaaggcacttcacttagagactggagtcctgcttataatcatgcatataacctttactttgatggatctggccagaggggtgttggagcccagcccacccacataccagtcaagctcttaggggagcagaagaaaagcaggaagaatttaaatgtttaattttttttttaaattgacttttctagttattaaaagttgcttgtttcagcagtgatattgtataaagaacatcttgtaagatactcctgacatcttgctttagcacatgtacagtacagtttctatgataatgtgtttgctctaacttccctggcttctccttcagcccatccactctcctctagagcagttgggttggaggctcattgaggcaagcagcaacattggagggggagcagggcagtgctgtgtctgctgcctcccatgcccgttctgacctcagccttggaactcctcaagaacctgaagattgagagcggcagagaagctctgagagccccttcccccacaacaaatctagctctagttgttatatttaggcaaaactttgtagtcttctttcccttttatgatggattttgataaaagtacaaaacagggtttttcttttttatcacctttgaatttggaaattttgagcacccaagctcttctgtacctatttaaagtccaccaaggggactgcagctcctagaacatgagaatcaagcctcttaattttaaactgcggaatgtggcctctgcttcctccgtcctcctgcccaaggacgacgaggattgctccagggctgctgggtagtttaccgtcccttctataggcatggagttggcactgacatcacagcttcataaccccaccaccgccagcttcccctgcctcctacatccagtctgttcttgttcatagtgagaatcctgtgttcccacttcagtgacacctgaattgtttgttgttgttttttttttttattgtcttcaaagaggaagggccccattaaagggtgaacttgtaataaattggaatttcaaataaacctcatgtacttgtgtttataaagaagaaaccaa

SEQ ID NO: 5151 - DNA, 2612 bp, Homo Sapiens
  NM_023007
atgcgtgcaggcccggagccccaggcgctggcggggcagaaacgcggcgccctgcgtcttctggttccgaggctggtcctcaccgtttccgctccggcggaagtgaggaggagggtccttcgacccgtgctgagctggatggaccgcgagacgcgcgccctcgccgacagccacttccgaggcctgggggtcgatgtccccggcgtcggccaggctccgggccgggtagccttcgtctcggagccgggcgccttctcctacgccgactttgtgcggggcttcttgctgcccaacctgccctgcgtgttttccagcgccttcacgcagggctggggcagccggcggcgctgggtgacgcccgcggggaggcccgacttcgaccacctgctacggacctacggagacgtggttgtaccagttgcaaactgtggggtccaggaatacaactcgaaccccaaagagcacatgactctcagagactacatcacctactggaaagagtacatacaggcgggctactcctctcccaggggctgtctctacctcaaagactggcacttgtgcagggactttccggtggaggacgttttcaccctgcctgtgtacttctcgtccgactggctgaatgagttctgggatgcactggatgtggatgactaccgctttgtctacgcggggcctgcgggcagctggtccccgttccatgctgacatcttccgctccttcagctggtctgtcaatgtctgtgggaggaagaagtggctcctcttccccccagggcaggaagaggccctgcgggaccgccacggcaacctgccctacgacgtgacctccccagcactctgcgacacacacctgcacccacggaaccagcttgctggcccacccttggagatcacgcaggaagcgggcgagatggtgtttgtgcccagtggctggcaccaccaggtgcacaacctggatgacaccatctccatcaaccacaactgggtcaatggcttcaacctggccaacatgtggcgcttcttgcagcaggagctatgcgccgtgcaggaggaggtcagcgagtggagggactccatgcccgactggcaccaccactgccaggtcatcatgaggtcctgctcgggcatcaactttgaagagttttaccacttcctcaaggtcatcgctgagaagaggctcctggtcctgagggaggcagccgctgaggacggtgctgggttgggtttcgaacaggcagcctttgatgttgggcgcatcacagaggtgctggcctccttggttgcgcaccccgacttccagagagtggacaccagcgcgttctcaccacagcccaaagagctgctgcagcagctgagagaggctgttgatgctgctgcggccccatagcacctgtcgtgaggatagaaggacgggtggaagagaggcagcctcctgctccggggcccttccagaaataaagaccgccctccctgtgacctggggcccacccctgtcgaggcttgtggcctggctgttcatggccactgcctgggtgcctgttttcaggtgaggcccaatgaggtcagggacccaagatgggatgtggcccttctgacctgcagcaggcctgctgggagctcggagatggtgccaggacctggctcttttgggggccctgcctccttaggccaggacgcctgagctgacaggagtctgtgtctggtgtgccttctctggtggctcctcttaataggccagccctgtcccctcgtctcaggccattggaccacccctggctctgccctgtgggttcagggaggggttggagcagtgctgggcaagctcaccagggcctccaggcagggctggggttggcctccatcacctccaggtgatgggctgtggaaccagcggcctgcgccttcctctgggtacccagagtggagggctgggttgggctggcctttgccacctccctgcctttgcagggcctgtggacagctggagaggccacagatggggtggaatcccatctgctgctgaatcctcacctgggcctgagggactgtgcctgctgtgcactcacagctgggtcttcccaaggatgctgttctcaggagtggtgggtccccagcccctcttcacactgggtatgatggaggtgtgggcgggctcgtccaggccgatcaaggcacagcagtgagcagcggaggcctgtggtggggaatggactctcgtgggatcctcttgcagaggatgccccaggcctgaaccctctagtggatccacagtttgtggagactggcactctcccagccctgtccttgaccgagagtccagcattttttcagttggcccctggttggctgcctcaccccagcaggggaggaggcatccgaatccacagggacggcacgtgccatggctatgcacattgcctgcccgtggcatcaactggggccgctggcacttgtctaggatggaagcccccaagaagggcaggggtttctgtctgctctgttcagtgaatcatgtgaagtgcttgcaaaggcagctttacacagtaggtgcttcatatgtgtctgtcgaatgaatgcgctccagccaacaaaaaaaaaaaaaaaaaa

SEQ ID NO: 5152 - DNA, 3023 bp, Homo Sapiens
  NM_023008
gcgtgcgcaatgggccacagaaccgccatgccggaaccgcgcgggtcgtcgcagctgcgggtgaacgcggcgtttgccgcgcggtacaaccgctaccgggagcgcgaggaactgcagcggctgaaggatcgctacggggaccgagacagcagcagcgactccagctccgagtcggactcaagcgacgagcgcgtggaatttgatccccagcaggagcgggacttttacaaaacgctctccttgttgaagaagaaggacccccgcatttatcagaaagatgccaccttctataacagaacagcatcgtcatcagacagtgaggaggacccagaagccttggagaagcagaagaaagtgcggcccatgtacctgaaggactacgagaggaaggttatcttggagaaggcaggcaaatatgttgatgaggagaactcagacggggagacttccaatcacagactccaggagacatcgtcgcaaagttatgtggaggaacagaaacagctcaaggaaagcttccgggcatttgtggaggacagtgaggacgaggacggcgctggggagggcggctccagtttgctgcagaaacgtgccaaaaccaggcaggagaaggcccaggaggaggccgactacatcgagtggctgaagggacagaaagagattcggaacccagattccctgaaggaactgacgcatctcaaggaatactggaacgaccctgagttggatgaaggggagcggttcctgcgggattacatcctcaacaaacgctatgaggaggaggaagaggaggaggaagatgaagaggaaatggaggaagaggagggggtccacggtcccccagtccagctggctgtggacgactcctcagacgaaggggagctgtttctgaagaaacaggaggactttgaacagaagtacaatttccgtttcgaggagccggactcagcatcggtcaagacctacccacgcagcatcgcgtcctccgtgcgccgtaaggatgagcgcagaaaggagaagagggaagagactcgggagcgaaagaagagggagaaagcaaagaagcaggaagagctcaagcagctgaagaacctgaagaggaaggagattctggccaagctggagaagctgcggaaagtaacaggcaacgagatgctgggcctcgaggagggggaccttgaagacgacttcgaccctgcccagcacgaccagctcatgcagaagtgctttggggacgagtactacggggccgtggaggaggagaagccacaatttgaggaagaagaagggcttgaagacgactggaactgggacacgtgggacgggcctgagcaggagggagactggagccagcaggagctgcactgtgaggaccccaacttcaacatggacgccgactacgaccccagccagccgaggaagaaaaagcgcgaggcccccttgacgggcaagaagaagcgcaagtcgcccttcgccgcggccgtggggcaggagaagcccgtgtttgaacccggggacaagacgttcgaggagtacctggatgagtattaccggctggactacgaggacatcatcgacgacctgccctgtcgcttcaagtaccgcacagtggtgccctgtgactttggcctcagcactgaggagatcctcgctgctgacgataaggagctgaaccggtggtgctccctaaagaagacctgcatgtacaggtcagagcaggaggagctgcgggacaagcgggcgtacagccagaaggcccagaactcatggaaaaagcggcaggtcttcaagtcactctgccgagaagaggcagagacacctgcggaagccacagggaagccacagagagatgaagccggcccacagaggcagctgccagcccttgatggcagcttgatggggccggagagtcccccagcacaggaagaggaagcccctgtatcaccccacaagaagccagccccccagaagcggaggagggccaagaaggcacggctgctgggccccactgtgatgcttggtggatgcgagttcagccgccagagactgcaggcctttggcctcaaccccaaacggctgcacttccgccagctgggccggcagcggaggaaacaacaggggcccaagaacagctcctgagcaccagggagcaggcaggggcctcaggctcctctcctcaaatcaagccctggacaggtctcgcacccacaagtactatctgctgcagagatcctctcatctgtggccaggcacgcctgtaatcccagcactttgggaggccgaggtgaaaggatcacttgagcccaggaattggagaccagcgtgggcaacttagcgagactccatctctacaaaatgtggtgacacatgcctgtagtcccagctactcaggaggctggggaaggaagatcacttaaggccatgagtttgaggctacagagagctatgattgcaccactgcactccagcctgggcaacaaagcaagaccctgtctcttgaaaaaaaaaaaaaaattaaaaaacacgtgtagctgtgggtaaggaagtcgtcccattttatggatgtggaaactgaggctgacttaaacttcccgtgacttggagctctcacctcgagacacctcccagaccccacatcccctcagaacgctgcgcccagccacacccacgatcaagttacacagctttattggcccccagcagccacagttcccccaagggggctttgggacagggagggcccgggcgtccagtgcaaactacagtacgtgagtcaggccctgaggggggtgcccggggtcctccttccctaccctgccaggagggccccgctggtgggagacaggtgtatgggctctgtgggctctgtccctggctgaatggccccagactggttgcagctgggcttgaggggctgacaacaggaagtaccatcatcactgccagagctcaagatcccacacccgacatgacataaataaaaaaataaatagtgttgtatctttaaaaaaaaaaaaaaaaaa

SEQ ID NO: 5153 - DNA, 1584 bp, Homo Sapiens
  NM_023009
ggcattctggcgcggagcggagcggcggcgggcgcagctagcgggtcggccgcggagcggaggtgcagctcggcttcccccggcacccctccccctcgggcgccagccccacccctccgccggccgggccgaccccgccgtactatcccctgcggcgcgagcccggggcggctccaagcgccccccagcagacccccatcatgggcagccagagctccaaggctccccggggcgacgtgaccgccgaggaggcagcaggcgcttcccccgcgaaggccaacggccaggagaatggccacgtgaaaagcaatggagacttatcccccaagggtgaaggggagtcgccccctgtgaacggaacagatgaggcagccggggccactggcgatgccatcgagccagcaccccctagccagggtgctgaggccaagggggaggtcccccccaaggagacccccaagaagaagaagaaattctctttcaagaagcctttcaaattgagcggcctgtccttcaagagaaatcggaaggagggtgggggtgattcttctgcctcctcacccacagaggaagagcaggagcagggggagatcggtgcctgcagcgacgagggcactgctcaggaagggaaggccgcagccacccctgagagccaggaaccccaggccaagggggcagaggctagtgcagcctcagaagaagaggcagggccccaggctacagagccatccactccctcggggccggagagtggccctacaccagccagcgctgagcagaatgagtagctaggtaggggcaggtgggtgatctctaagctgcaaaaactgtgctgtccttgtgaggtcactgcctggacctggtgccctggctgccttcctgtgcccagaaaggaaggggctattgcctcctcccagccacgttccctttcctcctctccctcctgtggattctcccatcagccatctggttctcctcttaaggccagttgaagatggtcccttacagcttcccaagttaggttagtgatgtgaaatgctcctgtccctggccctacctccttccctgtccccacccctgcataaggcagttgttggttttcttccccaattcttttccaagtaggttttgtttaccctactccccaaatccctgagccagaagtggggtgcttatactcccaaaccttgagtgtccagccttcccctgttgtttttagtctcttgtgctgtgcctagtggcacctgggctggggaggacactgccccgtctaggtttttataaatgtcttactcaagttcaaacctccagcctgtgaatcaactgtgtctcttttttgacttggtaagcaagtattaggctttggggtggggggaggtctgtaatgtgaaacaacttcttgtctttttttctcccactgttgtaaataacttttaatggccaaaccccagatttgtactttttttttttttctaactgctaaaaccattctcttccacctggttttactgtaacatttggaaaaggaataaatgtcgtccctttaaaaaaaaaaaaaaaaaaaaaagaaaaaaaaaaaaaaaa

SEQ ID NO: 5154 - DNA, 2365 bp, Homo Sapiens
  NM_023010
gcatttgttgggggcggagctttgacgggagcttcccgggagccgtttgtgcccggggtaaccccgttccggccaagccgcttcagcgggggacgtagccatgaaggaagagaaggagcacaggcctaaggagaagcgagtaaccctgttaacccccgccggggccacaggcagcggtggtgggacctcgggggacagctccaagggggaagataagcaggatcgcaacaaggagaagaaagaagcgctgagcaaggtggtaattcgaagattacctcccactttgaccaaggagcagcttcaggaacatcttcaacctatgcctgagcatgattattttgagtttttttctaatgatacgagtttgtatcctcatatgtatgccagagcatacatcaactttaaaaaccaagaggacattattttgttcagggatcgctttgatggttatgtattccttgacaataaaggtcaggaatatcccgctatagtagaatttgcaccttttcaaaaagctgcaaaaaagaagactaagaaaagagataccaaagtcgggactatcgatgatgatccagaatatagaaagtttttggaaagttatgccacagataatgagaaaatgacatctactccagagacactgctagaggaaatagaagcaaaaaatagagaattaatagctaaaaagacaaccccacttttgagcttcctgaaaaacaagcagagaatgagagaagaaaagagagaagaaaggaggaggagagaaatagaaagaaaaagacaaagagaagaagagaggaggaaatggaaagaagaagagaaacgaaaaaggaaagatatagaaaagctaaagaagatagacagaattccagaaagggacaaattaaaggatgaaccaaagattaagctgctcaagaagccagaaaaaggagatgaaaaagaattggacaaaagagaaaaagccaagaaattggacaaagagaatctcagtgatgaaagagccagtgggcaaagttgtacattgcccaagcgttctgatagcgaacttaaagatgaaaaaccaaagagacctgaagatgagagcggcagagactatagggagagggaacgggaatatgaacgagatcaggagcgcatacttcgagaaagagagaggctgaagcggcaagaagaagagcgccgtaggcagaaggagcgctatgagaaagagaagacttttaagagaaaagaagaagaaatgaaaaaagagaaagacacacttcgggataaaggaaagaaggctgaaagtacagaatcaataggcagctcagaaaaaactgaaaagaaagaagaagtggtcaagagagatcgaataagaaacaaggatcgtccagcgatgcagctttaccaaccaggagctcgaagccgaaatcgactctgtccccctgatgacagcaccaagtctggagattcagcagcagaaaggaagcaggaaagtggtattagccatagaaaagaaggaggagaggagtgataagtccagatggccttaggtgtcctgactgtctaggcagccaaagagcacacgttaagcaatccagaggtgccttcagggcaaagaatagagagaaagggagccgctgtgctggtggggtacactgcagaggagtaagtcttgtgtcaaagcaggaatctgatcagaggttcagaattggaagtacaatttcattgcttttgcaatttctacaaattaattttaaagtgtcagaaaaaggtgacggcaaggacatgcattgcaatttgcagggggaattgtcaagtgaggacttcatcacatatgacacgagagaaaagtaagagctggttctaaaatcaaaagctgttgttcatcctgaattgaattttctgaatttgggtggagcagagtcgctttgaagccttgttccgatctaattctattgtattgttgatgataagtgttgacattgggtagtgtagaagcaacaagcatgtccttgtagtacaggtacagtgaaggatagaacacactttcgttgatacaaaaatttaaatagttatgttacttctgtatccagtgtcctaaagttttaggattagttttagttttttgtttgcttatatgagcttagcgtaaagaatatttttaaacttcgtgttttgtcatcagcatcttttctattaagaggtaaaatgtagtccttgtttgactcttgacaatccagtgtgtttgatcttaggtctcatgatctgagtgcataccctctccaggaaggaaactgcaccagtgtctattcctgttaaatagcaacttttagtctcagcttgtttcgttttgatgtcaataaatagtaacagcattcaagtg

SEQ ID NO: 5155 - DNA, 2381 bp, Homo Sapiens
  NM_023011
cgggggctggcggctgcggctcggcggagagtgcggcatgcgctcggaaaaggagggggccggaggccttcgggcggccgttgccgcgcggggcccgagcgggagggagaagctgtcggccctagaagtgcagttccaccgcgactcgcagcagcaggaggctgagacgccgccaacttcgtcctccggttgcgggggcggtgcgggcaaacctcgcgaggagaagaggacggccctgagcaaggtggtcatccgccgcctgcctccgggcctcaccaaggagcagctggaggagcagctgcgcccgctgccagcacacgactacttcgagttcttcgccgccgacctgagtctttatcctcatctctactcaagagcatacattaattttaggaatcctgatgacatccttctttttagagatcgttttgatggatatatcttccttgacagcaaaggcctagaatatcctgcagtggtagagtttgctccattccagaagatagccaaaaagaagctgagaaaaaaagatgccaagactggaagcatcgaagatgatccagaatataagaagtttttagaaacctactgtgtggaggaagagaagaccagtgccaaccctgagactctgctgggggagatggaggcgaagacaagagagctcattgctagaagaaccacacctcttttggaatatattaaaaatagaaaattagaaaagcagagaattcgagaagagaagcgagaagaacggaggaggagagagttagaaaagaaacgtttgcgggaagaggaaaaaagaagaagaagagaagaagaaagatgcaaaaaaaaagagacagataaacagaagaaaattgcagagaaagaagtaaggattaagcttcttaagaaaccagaaaagggagaggaaccaaccacagagaaaccaaaagaaagaggagaggagattgatactggaggtggcaagcaggaatcctgtgcccccggtgcagtcgtaaaagccaggcccatggaaggctcgctggaggagccccaggagacgtcacacagcggcagtgataaagagcacagggatgtggagagatctcaagaacaagaatctgaagcacaaagataccatgtggatgacggcaggaggcacagagctcaccacgagcctgaacggctttccagaaggagtgaggatgagcagagatgggggaaaggacctggccaagacagagggaagaaggggagccaggacagcggggctccgggggaggccatggagagactgggaagagcgcagaggtgtgacgacagtccagcacccagaaaagagcgactggcaaacaaggaccggccagccttgcagctgtatgatccaggagctcgcttccgagcgcgagagtgtggcggaaacaggaggatctgcaaggcagaaggttcggggactggtcctgagaagagggaagaggcagagtgagtcactgcacgcacctggcctccatggacgagcaagggcatcccagaaacgtgtaaatgaccccgagtgtgactgggaaggagaacttattccttaccaggaaactggaagctaaaaatacagagggtgacgtagaaacacgcagaaaccattctaaagaaagtagtgatcttgtattaaattgagcagaattctcacagattttaccattcctgttataaactagtatttgttgtttagccaaaacagaaaatgatttccactggacagtagaaaaatatgtgtaaaatagggaagaaagttagtattggatcagtgtgagtcctgaagcactttcagtgctgtgagaacgacatccactttgggtttcattcgtttgtaagcagaggagctgtcagtcactcgtgcttctcggtggcctctgagccatggtgtcgagtgaagagtagttcttgtttgttacaacctttgtgagtcagccatgcccgcaaagcgtgctgtgttttagtcctggtaggaatatttatcagagttcacactatataaaacccaacagcttcaactattgccctttcaacagttttgccactgaccggatagaaacggtttcagtctctggatggatgtgtttgtggtttgtaaccattacggtttaaaccatggtttaagaatttgcccaaataacagaaattttgttcgggaagggataaactagatatagcatacagagcctgtttttgagttttagatactttatttgtaaataacttaaaatagctttctgaaaccgtgcattctgtagtttcttcctttcagtgaaattgctaaatgtcaatgtatttttggcactgcgattttaaccatttattaaataaaaattttgttaaagaaaaaaaaaaaaaaaaaaaaaaaa

SEQ ID NO: 5156 - DNA, 4681 bp, Homo Sapiens
  NM_023016
agtgaggcggtggccgagtcctctggcctcagacgcgtaggctggcagcccgctgagcccgccagactccgccgccgtcgggagccggccgctgggagcccgtcgctatgggaccgcgctgagccgcccgctggcgggggagcagcgcggtcgaggatggaggggccggcagagtggggccccgaggcggcgctgggccccgaggcggtgctgcgcttcctggcggagcgcgggggccgggccctgcacgccgagctggtgcagcacttcaggggcgccctaggcggcgaaccggagcagcgcgcccgcgcccgcgcgcacttcaaggagctggtgaacgccgtggccactgtgcgcgtcgatcccgccgacggcgccaagtacgtgcacctcaagaagaggttctgtgaagggccgtccgagccctccggggacccgccgcgaatccaggtgaccgccgagcccgaggcccccgacggccctgccgggcccgaggcgcgcgatcggctccccgacgcggcggccccggagtcgctccctggacagggccgcgagctgggcgagggagagccccccgcccccgcgcactggccgcccctgagcgccggggctcgcaggaagaactcgcggcgcgacgtgcagcccctaccgcggactccagccccggggcccagcgaggacctggagctcccgccacatggctgcgaggaggcggacaggggcagctcccttgtgggggctaccgcacagaggccggcccgccagaacctccgtgacctggtgatgggcagctccccgcagctgaagaggagcgtgtgtcccgggggcagcagcccgggcagctcctccgggggaggacgcggcagaggcgggggcgactcagacagcgcatcggtggcctcgtcgtccgcggaggaggagagcagcggcggaggctccgtgacgctggaccccctggagcacgcgtggatgctctctgcctccgatggcaagtgggacagcctggagggcttgctcacctgcgagcccggcctgctggtcaagcgggacttcattaccggcttcacttgcctgcactgggccgccaagcacggcaggcaggagcttctggccatgctagtcaacttcgccaacaaacaccagctgccggtgaacatcgacgccaggacgagcgggggttacaccgccctgcacttggcagccatgcacggccacgtggaggtggtgaagctgctggtgggggcctacgacgccgatgtggacatcagggactacagtgggaaaaaggcctcccagtacctgagtcggagcatcgccgaggagatcaagaacctggtgggagccctggacgagggtgacggggaaagcgccgcgggtagcggcggcgggcgctggaggctttcaaaggtgcttccctcgcatctcatcacctacaaactctcacacgccctagaagatggaggggaccatcaccaccatcaccactcggctgaggggtgggtcggaggcaaagccaaggatccagggcgcaaagcctcgggcagctctagtggacgtataaaacccagactcaacaaaatccgattcagaacccagatcgtccacaccacaccctctttcagggacccagagcagccgctggagggcaggggggaggagggagtgggggaggaacgacctgttaaaggccactcgcccttcacattgagaccaaagtccaatgtatttgggtaaaaattgcttcttttagaaaatgcaaaggtttatttgtcttaataaattgaatactaggtgttgtaaggaagtgagaccagaaggacaagctaaattatgcattcttacttgagggatcggaatggatggggcggagttctcttcaggctagccttctgggaaaagtggatgtctttttcagagattcatcataccttgacctgtacctcttctctgccctccacttccctgccctggagtccgtttctggagactagaaatgtatctaaattgggggaacagaatgaatgaattaatgaatgagagttcctttgctttaaccattcctggatgcctgcaaagtaaggaataatgcagtttttatgtatctgattttataaggggttactctttcaagagtaacaaaaaaatgcaaactgtaatgaaactacattgtatttctaagtgtgaaaacgacaggctgccccgtttttactaattgcatttgcattttaaggtactactgaaggtcagatcaaagttgaaatgcaaaaatactaattagagaataatgtgaataaaatgggaatcttcttggtattttatgtgtattgtaagtagcagttaaattatttttttaaaagcaatttcagttttaatcactgaacaaaagaaacaggcaacattcacttctgtagtatggtttccacctatctctaacaccactattaaggtacaccagtgttaaggtacattaataactacacaaaattttatttaaagagaacacttagcagcctatgatagttttcaataaaatgttgcctctctttcggattctcactaacttttgttactattctaaaagtttgaatttgctggggtgtttattctgaggattatttaaccattgttctatttggcataaccctatttaatggtgcttagagctgaattacctacagaaactgtttctggtttaaataattagcacaaattggcctaagtattcatgagcccatgtttctgtgaagtaattattaaaccaacttaatgattcttatgtaaggtacactttttattttaatacattggtagtctctatgacttgtagcaatgttttacaaatgtttaaaatgctaaacttaattttccaagcttttcttgacaattagatacctatcctgtagttactgaaaatctgggtagtaaatctacccaattaaaatggcactttataaaagggaatagagaagagatgggactatttctatatttaaatgctgctggctattcctttgtatataaatgaaaaataccattcattaaaattaagtactcgtttaagtatggttcttaattacatttcattcatttatattagagtaaatggcttcataactactttaaaatttaacccacaagcatattaaatctgtttgttataagattggaaacaatttttgagagggactaatttaaacaagtcctcctttagtcttttgggtcgcgtagttgctgaaacctaagtacctgcagcctacaggataaggaagttcacagcctgcggggtgaatgaacccatgtgtgaactgcacagagcaattcatagaaaatgcatagaaatttgtaacactttggtcacatctgtctctagatggtcattgaatttgtttaaagatggatgaaaggccaggcatggtggctcatgcctgtaatcccagcactttgggaggccgaggcaggtggatcacttgaggccaggagtttgaaaccagcctggccaacatggtgaaaacctgtctctactaaaaatacaaaaattagccgagcgtggtggtgcgtgcctgtagtcccagctacttaggaggctgaggcatgagaatcacttaaacctgagaggtggaggttgcagttgagccaagatcacgacactgcactccagcctgggcaacggagactctgtctcaaaaaaaaaaaaaaaaaagatgaatgaaaatatgaaatatataaactagtatccatttatttgcatttattgtgggatttcagatatgaacggtgtaaatttgagaagcacttatgcatacatgtgggtgaaaaaccaatctaattttgtataaataaaaacaggctcctggaaggtgaaaagtagtcatttgttctaaatctatacatattacttgtatctagtgcagaataagctataacatcccattgaggaatcttaaatttcatagacatgtaaagctgaagtaactctaaagagcagatgcttcagaaccatcagaaggttctggtcaacagtcagtattatctcttaaatgtatatgttggtcactaattgcacaaaatctataatttgccagggctttagagattgagtcaatatgtcatttaccatggttttcccactgaaggctttaacttttctgataaaataatattttaaattttcaaaaacccattcctgaggagaactacttctagcattccttttcatgatgtgcttttgtgcagtaagtagcattttcggctacttaactttacattcctcttatttttcagtttccagtcaagattataaaaagcaaatgattgatataatttgatattcatagagttgtgcctacctttaatggaaaaatacatgtcagatacttagatgtttattgatatgagactatgtggttaaaaaacccaagtatgtccatgtgtttcttataaggtacacttgaaactagtgagtgtttgtcacatttcactttcatggtatataaaatgcagtttgcatatataacttgaatatctggtactagttttttcacgcctgcaatcttggagtctaggttgccttgtctctcctatttttaaataagtgaaatttgggagattgtaaaatctgtaaagtttgttttgtgaaaataaaatgttcacagtaaaaaaaaaaaaaaaaaaaaaaaaaaaa

SEQ ID NO: 5157 - DNA, 2198 bp, Homo Sapiens
  NM_023039
ggcggggcgatctggagtaggaggtgtgaccggagggcgaaattggggcttcctctgctctggtgacccagaaccgtcaactgaaatgaccctgtctgtgtagtactccggcaggatgggcctcggagcgtaaaggcggcaaaaacaaaaatattaaaaaaaaggagagagggacaaaaaaaagaaaacccgaaagtttcagctgcattgctgcggaacgttttttagccagaaggcgaaagaagaaatcggaagtgacgtcgcggccaaaacaagcccgggcttggaggcctgtactgaagctggcctcagatgggaaggcccgactcgctgtctgctgtcgtcggtggtcgcgagaccttgcactctcaccgggtcggcctccagcccctgtgcccgggatccgctcgccgcggatgagcgagagtttcttcctgggacttttcgggcacagctggccggtggcgacagaacggactttctttcctgcaagagtctcccctccagcgggagacagcgggctcctgtctcgggacgctgggacacctgtcgcctatttttaaatatccagattccaagaacacactggatactgctcttacaaaaccaagaggaaatcatgaagaaatgttttagttattgaaactacagttgaaatcatggatacatcaacaaatctggatattggagcccagcttatcgtggaagagtgtcccagcacttatagcctaactggcatgccagacattaaaatagaacatccactggacccaaattcagaagaagggtcagctcagggtgttgccatgggaatgaaattcatattgcctaaccgatttgatatgaatgtgtgttctcgatttgtgaagtccttaaatgaagaagatagtaaaaatattcaagatcaggttaactctgacctggaggtggcatctgtcctatttaaagctgaatgcaatatccatacatctccttctccgggaattcaagtaaggcatgtctacaccccctctacaacaaagcatttctcacccataaaacagtcaaccactttaaccaacaaacacagaggaaatgaggtctctaccacacctctgttagcaaattctttgtctgttcaccagttggctgctcagggagagatgctctatctggctactcgtatcgaacaagaaaatgttatcaatcacacggatgaagaaggatttactcctctgatgtgggctgcagcacacgggcaaatagctgtggtagagttcctacttcagaatggtgctgatccccaacttttaggaaaaggtcgagaaagtgcactgtcgttggcctgtagtaaaggctacacagatattgtcaaaatgctgcttgattgtggagttgatgtaaatgaatatgattggaatggaggaacacctctgctttatgctgtacatggaaatcatgtgaaatgtgtaaagatgctcttagaaagtggggctgatccaacaattgaaactgactctggatataattctatggatctagctgtagccctaggctatagaagtgttcaacaggttattgagtcacatttgttgaagctgcttcaaaatatcaaggagtagacacagtcatcagaaaatgtctgcccttttgtttacttcttggtccttataaatgatagttttgtttacttataaatttttacctcagttgcaatatttactggtttttagtaggttttaataaatatttctctgagtaattcactggtttataataaatgtaatactctttttataactatgttttactgtatatttaaaattataaattaatgttttcgtggcatgtaaatttttatggtacagatagttatcatcagtctttgtatcaagtgctgtaatttgacattttcagaaattattctaccctagtcatcttcactcgtgtattaagtcattcactttatatagggtttgctataaatccctagaaaaaaattgttcttattgttgaataaaaaagtgcacagtgtgattgtttacaaaatgatattataaataaataaaatacttcttctgtcagtttgcatactacttttttaagtatataagattattaaagatttctttcagatttttaatttcacccttctgtcctgccgtaacacttcattagatcaaacaatatatgtaattaaaataaactgaatctaagtc

SEQ ID NO: 5158 - DNA, 2806 bp, Homo Sapiens
  NM_023075
gcacttcgcggagggcgctaggggccgggacgcggccgccgagcgtaggttccggcctttactccgagttgcgcacggagccccagctgcggttgtccgctctggggatcacaggccgcggagacccgggagccacccgccgggccccttcagacgacccgcttccgcaaaccggccgtgggactccggcgccgggcggacgaagcggctccgggaagactcggtcttccccgcccgcctgaggtcgccggggcggggcttcagtgacaggcccgcgcgctaccgcggaaacaggaagttggctgggtgcgcgccggctccggctgcagttcccgggtccctcggccaccgaagccaccctgccctggtgaaagggctcccgcaccgcccggtgctccccatctgcctggcgttgtgcgcagagctggaaagcatggctgttataaatgaattctgattttggggagcagatgccaacttagagcctcgtaccaatctctctgtctttaaaagatgaggtgacttggtgattttcctggaaaattataggtgcccagctaagacctgaatgccatcaccctccccagggctctgcagttttctcgtggtgaacccttgatggatttgttgttgcttgagaaatggcgatgatcgaattggggtttggaagacagaattttcatccattaaagaggaagagttcattgctgttgaaactcatagctgttgtctttgctgtgcttctattttgtgaatttttaatctattacttagcgatctttcagtgtaattggcctgaagtgaaaaccacagcctctgatggtgaacagaccacacgtgagcctgtgctcaaagccatgtttttggctgacacccatttgcttggggaattcctaggccactggctggacaaattacgaagggaatggcagatggagagagcgttccagacagctctgtggttgctgcagccggaagtcgtcttcatcctgggggatatctttgatgaagggaagtggagcacccctgaggcctgggcggatgatgtggagcggtttcagaaaatgttcagacacccaagtcatgtacagctgaaggtagttgctggaaaccatgacattggcttccattatgagatgaacacatacaaagtagaacgctttgagaaagtgttcagctctgaaagactgttttcttggaaaggcattaactttgtgatggtcaacagcgtggcgctgaacggggatggctgtggcatctgctctgaaacagaagcagagctcattgaagtttctcacagactgaactgctcccgagaggcacgtggctccagccggtgtggacctgggcctctgctgcccacgtctgcccctgtcctcctgcagcattatcctctgtatcggagaagtgatgctaactgttctggggaagacgctgctcctgcagaggaaagggacatcccatttaaggagaactatgacgtgctttcacgggaggcatcacaaaagctgctgtggtggctccagccgcgcctggttctcagtggccacacgcacagcgcctgcgaggtgcaccacgggggccgagtccccgagctcagcgtcccatctttcagttggaggaacagaaacaaccccagtttcatcatgggtagcatcacgcccacagactacaccctctccaagtgctacctcccacgtgaggatgtggttttgatcatctactgtggagtggtgggcttccttgtggtcctcacactcactcactttgggcttctagcctcaccttttctttctggtttgaacttgctcggaaagcgtaagacaagatgaagagcaggcgccattataaatatcaaagcccaagaaatggaactttgggcagagatcatgttagaatcaagtggatgatgagaccaattacaggccgtctctctgcacagcacagaaattctcaatcactgaaatgagtaactgcaaaataaatagttgattgtactgttctcatgctataaaagtggacaggtactctacaacaaatctgttttctcatttttatcaaatatatgtatcatcaaaggttgcatctgtacagtatgtaaatgctattaatgtcgtcactcacatgcacgacagtccttgttcccccaggaagggcctggtggccccagcacacacttgggattatgtgtatacataaataaatattgggctgtttccctcttcctgtgaagtggttctcaaattcctatgtactgtaaagctgtacccttaaaagtacagatgtggccgggcacagtggctcacacctgtaatcccagcactttgggaggctgaggcgggtggatcacttgaggtcaggagttcaagaccagcctggccaacatggtgaaacctcgtctccgctagaaatacaaaaattagccaagcatggtagcaagtgcctataataccagctgaggctgaggcaggagaatcccttgagcccgggaggcggaggttgcagtgagccaagatcatgccactgcactccagcctgggcaacagagtgagactccgtctcaaaaaatatatttaaaaaaaaaaaagtacagatgtgatgtgcagaacatattgttttcgtagatttttatacttgatcaattaatggaatcagatttttagataagtgtaattttctctataggagaccacgttgctacatctgttaatgcctgtcagtgatcaaaagaaacttaaaaagtggaatgggatatggcttttggtacctgaaaataaatgctttaataattgtaagccagataaaa

SEQ ID NO: 5159 - DNA, 2114 bp, Homo Sapiens
  NM_023077
tccgccggctcacgtgaccgtctttgggccggcgcgaaccatggccggcatggtggacttccaggatgaggagcaggtcaagtcctttttggagaacatggaggtggagtgcaactaccactgctaccacgagaaggacccggacggttgctatcggctggtggactatttggaagggatccggaagaattttgatgaggctgccaaggtgttgaagtttaactgtgaagagaaccagcacagtgatagctgctacaaactgggggcctactatgtgactggaaaaggtggtctgacccaggacctgaaagctgccgccaggtgctttttgatggcgtgtgagaagcctggaaagaagtcaatagcagcatgtcacaacgttggcctcctggcacatgatggacaggttaatgaggatggccagcctgacttgggaaaggccagggactactacacaagggcctgtgatggtggctatacttccagttgcttcaacctcagtgccatgttcctgcagggtgccccaggctttcccaaggacatggacctggcatgtaaatactccatgaaagcctgtgacctgggtcatatctgggcctgtgccaatgccagtcgcatgtacaagctgggggatggtgttgataaggatgaggccaaggccgaggtgctaaaaaatcgagcccagcagctacacaaagaacagcagaaaggtgtccaacccttaacatttgggtaatgtggtccaccctccctcccaggcaacaaactgcttgaggctggcagctcctgtttctgaagactgatgcagcccttgaaggtcaacctgctggagcaaaaaaacttgggacttgaatttgtagctccatttacatggatccattgccccagctactggagtatagcctacaatgtttatttcagtcaatattcctttatctgggtgttctgtacaatgtttattacagtcaatattccttcatctggatgttctgtgaagatagccatgtttatgggggtcttagttttcaaactctggcaactctgtgaaaaataggagcaaactagagagccctggagattggtagtagggaagggaggatagcaggaagtttgaaaaattagcagccccggggcctaaaggaatcagctgtcatcattttcatcattattattttggttaggatggcttgaaaatcagaacgtatcttggtttacgtaattgaggtcttaaagaactaagaacagttaaatagtcacaactaccaccctctgacttacataatcattggtgtgggcttcgttttgcctttagagtcacatctttcagtaaattcacagagatcaagagggacgtgcaacatacagcttaaaggctgttatgcttcagggttgctgaagaagatgaaacatcagcctgccatcgtctagaagagacattggcagttaaaaattagcacctccagtgtagtcgcctggcactgcccatcatgctgagggagcagattcttcccaaggcagcttcagctaggagtttgtaagcaaggactttgtgacacatttgtcccctggaactgagcctttttaactgtccctgtgaatgaacaattttgagtgacctacggtttgtgttaattagtgttctttccagattccaggtaccgtagagagtatgttctttgtggtggttgtgccttttaagaacatttgtggccgggcacggtggctcacgcctgtaaccccagcactttgggtggccaaggcgggtggatcacgagatcaggagatcatgaccatcctggctaacacggggaaaccccatctctactaaaaaatacaaaaaattagccgggcgtggtggcaggcgcctgtagtcccagctactggggaggctgaggcaggagaattgcttgaacccgggaggcggagcttgcagtgagctgagattgcgccactgccctccagcctgggcgatagagtgagactccgtctcaaaaaaaaaaaaaaatttgctttttctgttgtctccccagcttgtcaccagggggcgagcttgccatttccctgctggtaacaataccattctgtcaccatctactgttttaggcttccgtttt

SEQ ID NO: 5160 - DNA, 3137 bp, Homo Sapiens
  NM_023079
agcaccgtctgggctgtggaagcggagggggtggggacactctggcccggttctcggtggtgcgggagcgggcgggagcagcggccgctctggtcggcggacgtgctgccgagtagtcccggaagcgaagcagcgatggcggagagtccgactgaggaggcggcaacggcgggcgccggggcggcgggccccggggcgagcagcgttgctggtgttgttggcgttagcggcagcggcggcgggttcgggccgcctttcctgccggatgtgtgggcggcggcggcggcagcgggcggggccgggggcccggggagcggcctggctccgctgcccgggctcccgccctcagccgctgcccacggggccgcgctgcttagccactgggaccccacgctcagctccgactgggacggcgagcgcaccgcgccgcagtgtctactccggatcaagcgggatatcatgtccatttataaggagcctcctccaggaatgttcgttgtacctgatactgttgacatgactaagattcatgcattgatcacaggcccatttgacactccttatgaagggggtttcttcctgttcgtgtttcggtgtccgcccgactatcccatccacccacctcgggtcaaactgatgacaacgggcaataacacagtgaggtttaaccccaacttctaccgcaatgggaaagtctgcttgagtattctaggtacatggactggacctgcctggagcccagcccagagcatctcctcagtgctcatctctatccagtccctgatgactgagaacccctatcacaatgagcccggctttgaacaggagagacatccaggagacagcaaaaactataatgaatgtatccggcacgagaccatcagagttgcagtctgtgacatgatggaaggaaagtgtccctgtcctgaacccctacgaggggtgatggagaagtcctttctggagtattacgacttctacgaggtggcctgcaaagatcgcctgcaccttcaaggccaaactatgcaggacccttttggagagaagcggggccactttgactaccagtccctcttgatgcgcctgggactgatacgtcagaaagtgctggagaggctccataatgagaatgcagaaatggactctgatagcagttcatctgggacagagacagaccttcatgggagcctgagggtttagaccctgctcccatctccccttcccccactcaagagtcccagcagaatcccttccccccaccccagggatggagaggcactgtgtatctccctccagactcgaagtcatcctgcaagatggcaagaaccaagcaagctccgatcccagggtgtgggagtgggggcctgttcccggtctgacctccttggcactggagcatctggggcttcgttcatccattcatcccgtatcaggggccaaggtacctttacaggagcacctagagcgagggcctttggcaaaaacaaaacaaccaacacacctctccacagggccagctccttagggataagtggaagatggaaattgcaattccaagagggagtgtgcccaaatgatttatggggatacctggaagggagcttggggtgggggctgtctgtgacacttaagcagtctgggtggttgtctatttgtctgtcttcagtcttgaagcagggcttcccaatgcccttttcctccctgccttccttcccccattatttcccacaggccagcataattttgtttttcctaatttatagtcactgttctagacagaccaaagagaaggaacagtggtggagtctaggctgctgatcagtaagctttacctagcacctgagcacctttctcccctcccctctttcctcacccttttctagatgtaagacagaaagtaaatgtgactgggacttaaccaaggtcttggtaaagcctgcatggcaccgtaagaagctgaaaatactgtttgttcccgcaatcactgatttgaaaagttcccaacacaggcagctgctgtgtatatgggattagagccactacatagaatagtctcttacagattttcataaatactagtcacaataagggtatttttcttgggggtggagtaagggggagactgatgctagtccttgttgtattttgttgggctgtccttgtgtattttcaccccagcctgtagtcctcctcacttcaaccccagggatttttggggagcaagggtagccaatggcagagggggttggggctgggactctggaggctcctccccttctttctcttccttccgcctcccccgtgcccccagctgctcttgtcactgtctctgatgggtatttgcctggctttgttgcttctctatctgtatttagctgcagtgatcctttagctggttggctcagaaaaaaaaaaatgtgctttaggtgccctgtaatcctgggcatcaagggaatccatccttcccctttttgatatgttctccccgtacttccagatttattgttatggctcccagtgggtattggcgattcttgtgatgcagggcctcagtcagtgtccagccatgcataagggagaggatagtgtgtacctgccctgccctctgctatgaaggtctctgccttgtggatcatgggactccccttggaggatctgtgcaaaggggggctgggcacaaaggagaatgtcctatttgggagggcaggaagcaaaggaactggacagggattggtgggcttggggaacggaagtttatcttggatacccttgaagaggctgggtctcttcacatgaagatcgaaaagggaccctgcttccaatttccctcttccattcctcgagctactccagggcttagaagaatgctcttggtctgtgggtccagtgttgtctgtcatccatttaagtgttcccactttcaagtgacaatcctctccttggccctgccatagggcagagcatgtctggcatagcagcctgacttttatgccctaatcttgagttgaggaaatatatgcacaggagtcaaagagatgtctttatatctgactgtatataaatgaagtttttttgttttttttgttttcctttttggtgcaataaagtttgttttggcagaaggagaaaaaaaaaaa

SEQ ID NO: 5161 - DNA, 2617 bp, Homo Sapiens
  NM_023080
ggaattcggcgtcggactctgcgccccgcgtagttccggtggcgactgcggcgcatggcggccctgggacatcttgctggggaggcagcggcggccccaggcccgggtactccctgcgcgtcccgcggagcccggcttcccggcccagtttccagcgcccggaatccttccactgtctgtctctgcccagagcaacctacgtgcagtaacgctgactccagagcgcacccgttgggcgatgaaggcggcacagcgtcgaaaaaacaaaagaataagaagaaaacgcggaacagggcctctgtggcaaatggaggcgagaaggcctcagagaaactcgccccagaagaagttcccctaagcgctgaggcccaggcacaacagttggcccaggaattggcttggtgtgtggagcaactggagctgggcctcaagaggcagaaacccaccccgaaacagaaagagcaggctattggagcaatccgaaccctgcgcagcaaaagaacgcccttgccccggaagaggcagctgatgcactccttgtttggagactatagggctcagatggaagccgaatggcgtgaggccctgcgggctctcagagctgctgcttattcagcccaggtgcaacctgtagatggagccaccagaaagaagagccaaagggtctgcaggcctcgctctatatggagagccaaagccactctggacatgcctgatgaagagtttaggttcaatttcttttagcgtctccccgaacctgaaacaatccccctcccttggggtggtgtaggggtttgttttgagtgcagagcctttccaggacttctgttgtcagagaaccctggagttggtctgtccctggctggtccaaggatttgtagctgttgtgaaggtgtgagaccatcagataggcaaaagaccccgttcgttttctgatgaaatgttctctctttcagaagagagagagaggtgcatttagaaaatatgcaataaattgaagtgagtgttcaaagtattgtagaaggaatattgtactcagtctttaggattagattaagtggctgttggtaacaaagattagtggagaagctgtataatcgtacactggttttcacttttgaaaggaatccctgtcaaatggtttagtgcttaatgctgttatgtcatattgccctaatctctatttttgataaaattggataaggagtgaaagagtatgctgaccacctatgttagaggaagtacagaagatgcaggggtgtggtatccctgggtccagtccctcacctggtacctttgtgcatgttgccttcattcctgagcaggtatcatcctcagggaaccagcatggcacctaccaggccaggctctgttcttaggagcaaggagcttcttgcgctaacagttctggcctgagacctggattgagccttggcagacttcttgtctaaatgttggccattcagtctcaggccctctgttccatggaattgggaatctccaggtgacctaatcctcattggtggcttgatgtttgctggtatcttccaaactcagttcccagactagattgatacctggagcccagctgcctactcagcatttccacttgggtgcttcataggcatttcaaacctgatgtgtttaaaacacttgattaggctccggttttcctttggcttctgcttttcagtgaatggcatgactgcctatgtgggtggcaagccacccaggtgccgaggaaagagactgagggcacgagctgttccagtataataaaatatataaaataagaagagttatactagatctagatcatagacatgattatatgtgagtatcattaatcattagtttatagcaattactctttattccaatattataataatcctcactctacaatcataacctaggaaaaaccaggccatacagagataggagccgaggggacatagtgcgaagtggccagaagacaagagtgtgagccttctcttatgcccggacagggccaccagagggcttggtctagcagtaacaccagtgtctgggaagatgcctgttgcaaagtggaccatggtctagcagtagcatcagtgtcaaggaaaaacacccactacttagcagactgggaaaaggagcctccctttccccgggggagtttagagaagactactcctccacctcttgtggagggcctgacatcagtcaggcccgcccgcagttatccagaggcctgtctccctgtgatgctgtgcttcagtggtcacgctcctagtccgctttcatgttccatcctgtatacctggctctgccttttagatagcaggagcaaattagtgaaagtactaaatgtctgatatgcagaaataatggcataagctgtctctctctcttctctctctctctgcctctgctgccaggcagggaagggccccctgtccagtggacacatgacccatgtgaccttacctattattggagatggttcacattccttaccctgcccctttgtcttatatccaataaatatcagtgcagcctggcatttggggccactactggtctccgcgtcttggtggtagtggtcccccaggcccaggtgtcttttctttta

SEQ ID NO: 5162 - DNA, 2662 bp, Homo Sapiens
  NM_023083
cgcctggttaccaatgggagactagcgggccggcgtactggcctggtccagcacctgcggggccctcgggcttggagggctgggccgggcggggaacgggcggggcgggccggaggcggcggcggctgactcgccttctctccggggctgcgaccccgaggcaaccggctgcagatgggagcccgcggagccgaggatgcgggcgggccggggcgcgacgccggcgagggagctgttccgggacgccgccttccccgccgcggactcctcgctcttctgcgacttgtctacgccgctggcccagttccgcgaggacatcacgtggaggcggccccaggagatttgtgccacaccccggctgtttccagatgacccacgggaagggcaggtgaagcaggggctgctgggggattgctggttcctgtgtgcctgcgccgcgctgcagaagagcaggcacctcctggaccaggtcattcctccgggacagccgagctgggccgaccaggagtaccggggctccttcacctgtcgcatttggcagtttggacgctgggtggaggtgaccacagatgaccgcctgccgtgccttgcagggagactctgtttctcccgctgccagagggaggatgtgttctggctccccttactggaaaaggtctacgccaaggtccatgggtcctacgagcacctgtgggccgggcaggtggcggatgccctggtggacctgaccggcggcctggcagaaagatggaacctgaagggcgtagcaggaagcggaggccagcaggacaggccaggccgctgggagcacaggacttgtcggcagctgctccacctgaaggaccagtgtctgatcagctgctgcgtgctcagccccagagcaggtgcccgggagctgggggagttccatgccttcattgtctcggacctgcgggagctccagggtcaggcgggccagtgcatcctgctgctgcggatccagaacccctggggccggcggtgctggcaggggctctggagagaggggggtgaagggtggagccaggtagatgcagcggtagcatctgagctcctgtcccagctccaggaaggggagttctgggtggaggaggaggagttcctcagggagtttgacgagctcaccgttggctacccggtcacggaggccggccacctgcagagcctctacacagagaggctgctctgccatacgcgggcgctgcctggggcctgggtcaagggccagtcagcaggaggctgccggaacaacagcggctttcccagcaaccccaaattctggctgcgggtctcagaaccgagtgaggtgtacattgccgtcctgcagagatccaggctgcacgcggcggactgggcaggccgggcccgggcactggtgggtgacagtcatacttcgtggagcccagcgagcatcccgggcaagcactaccaggctgtgggtctgcacctctggaaggtagagaagcggcgggtcaatctgcctagggtcctgtccatgccccccgtggctggcaccgcgtgccatgcatacgaccgggaggtccacctgcgttgtgagctctcaccgggctactacctggctgtccccagcaccttcctgaaggacgcgccaggggagttcctgctccgagtcttctctaccgggcgagtctcccttagcgccatcagggcagtggccaagaacaccacccccggggcagccctgcctgcgggggagtgggggaccgtgcagctacggggttcttggagagtcggccagacggcggggggcagcaggaactttgcctcataccccaccaacccctgcttccccttctcggtccccgagggccctggcccccgctgcgtccgcatcactctgcatcagcactgccggcccagtgacaccgagttccaccccatcggcttccatatcttccaggtcccagagggtggaaggagccaggacgcacccccactgctgctgcaggagccgctgctgagctgcgtgccacatcgctacgcccaggaggtgagccggctctgcctcctgcctgcgggcacctacaaggttgtgccctccacctacctgccggacacagagggggccttcacagtgaccatcgcaaccaggattgacaggccatccattcacagccaggagatgctgggccagttcctccaagaggtctccgtcatggcagtgatgaaaacctaacagggtggccccctgtgccagctcaggtgactggagcccgagggcctgacaggttcccagcagctgggccggccagccttgcactgtgggggctggtcctgagtcttggcctgcctcccagccctgccaggaggctgcggcctaggggtccacgggaagcctccgtcaggagagacgcagccctgggggccagctggtgctgcaaggaagggtgggaagcttgctggcttctgttgcgccactgagacggcagagaccccaggatcccagagcttcccaggatccctcccagatcctctgctgactccatatggaggcctcacacccagagggtagggcagcagatcttctttataactatttattgttcgaatcacttttaggatgtaactttataaataaacatgagcgctgatgatttgcagatcaaaaaaaaaaaaaaaaaaa

SEQ ID NO: 5163 - DNA, 924 bp, Homo Sapiens
  NM_023921
atgctacgtgtagtggaaggcatcttcatttttgttgtagttagtgagtcagtgtttggggttttggggaatggatttattggacttgtaaactgcattgactgtgccaagaataagttatctacgattggctttattctcaccggcttagctatttcaagaatttttctgatatggataataattacagatggatttatacagatattctctccaaatatatatgcctccggtaacctaattgaatatattagttacttttgggtaattggtaatcaatcaagtatgtggtttgccaccagcctcagcatcttctatttcctgaagatagcaaatttttccaactacatatttctctggttgaagagcagaacaaatatggttcttcccttcatgatagtattcttacttatttcatcgttacttaattttgcatacattgcgaagattcttaatgattataaaacgaagaatgacacagtctgggatctcaacatgtataaaagtgaatactttattaaacagattttgctaaatctgggagtcattttcttctttacactatccctaattacatgtatttttttaatcatttccctttggagacacaacaggcagatgcaatcgaatgtgacaggattgagagactccaacacagaagctcatgtgaaggcaatgaaagttttgatatctttcatcatcctctttatcttgtattttataggcatggccatagaaatatcatgttttactgtgcgagaaaacaaactgctgcttatgtttggaatgacaaccacagccatctatccctggggtcactcatttatcttaattctaggaaacagcaagctaaagcaagcctctttgagggtactgcagcaattgaagtgctgtgagaaaaggaaaaatctcagagtcacatag

SEQ ID NO: 5164 - DNA, 2699 bp, Homo Sapiens
  NM_023924
ctgccgcggccccgcctcgccccgtttccggcgcggcccagcgagctcggcaacctcggcgcagcgagcgcgggcggccagccagggccagggggcggtggcggccaaggtccgaccgggtgccagctgttcccagcccccgcctcgggcccgccgccggcgccgccatgggcaagaagcacaagaagcacaaggccgagtggcgctcgtcctacgaggattatgccgacaagcccctggagaagcctctaaagctagtcctgaaggtcggaggaagtgaagtgactgaactctcaggatccggccacgactccagttactatgatgacaggtcagaccatgagcgagagaggcacaaagaaaagaaaaagaagaagaagaagaagtccgagaaggagaagcatctggacgatgaggaaagaaggaagcgaaaggaagagaagaagcggaagcgagagagggagcactgtgacacggagggagaggctgacgactttgatcctgggaagaaggtggaggtggagccgcccccagatcggccagtccgagcgtgccggacacagccagccgaaaatgagagcacacctattcagcaactcctggaacacttcctccgccagcttcagagaaaagatccccatggattttttgcttttcctgtcacggatgcaattgctcctggatattcaatgataataaaacatcccatggattttggcaccatgaaagacaaaattgtagctaatgaatacaagtcagttacggaatttaaggcagatttcaagctgatgtgtgataatgcaatgacatacaataggccagataccgtgtactacaagttggcgaagaagatccttcacgcaggctttaagatgatgagcaaacaggcagctcttttgggcaatgaagatacagctgttgaggaacctgtccctgaagttgtaccagtacaagtagaaactgccaagaaatccaaaaagccgagtagagaagttatcagctgcatgtttgagcctgaagggaatgcctgcagcttgacggacagtaccgcagaggagcacgtgctggcgctggtggagcacgcagctgacgaagctcgggacaggatcaaccggttcctcccaggcggcaagatgggctatctgaagaggaacggggacgggagcctgctctacagcgtggtcaacacggccgagccggacgctgatgaggaggagacccacccggtggacttgagctcgctctccagtaagctactcccaggcttcaccacgctgggcttcaaagacgagagaagaaacaaagtcacctttctctccagtgccactactgcgctttcgatgcagaataattcagtatttggcgacttgaagtcggacgagatggagctgctctactcagcctacggagatgagacaggcgtgcagtgtgcgctgagcctgcaggagtttgtgaaggatgctgggagctacagcaagaaagtggtggacgacctcctggaccagatcacaggcggagaccactctaggacgctcttccagctgaagcagagaagaaatgttcccatgaagcctccagatgaagccaaggttggggacaccctaggagacagcagcagctctgttctggagttcatgtcgatgaagtcctatcccgacgtttctgtggatatctccatgctcagctctctggggaaggtgaagaaggagctggaccctgacgacagccatttgaacttggatgagacgacgaagctcctgcaggacctgcacgaagcacaggcggagcgcggcggctctcggccgtcgtccaacctcagctccctgtccaacgcctccgagagggaccagcaccacctgggaagcccttctcgcctgagtgtcggggagcagccagacgtcacccacgacccctatgagtttcttcagtctccagagcctgcggcctctgccaagacctaactctagaccaccttcagctcttttattttatttttttagttttattttgcacgtgtagagtttttgtcatcagacaaggactttgatcctgtcccctttggcatgcgggaagcagccgcggggaggtaatgaattgtctgtggtatcatgtcagcagagtctccaagccccacgaaccctgaggagtggagtcatacgcgaaggccatatggccatcgtgtcagcagagagagtctctgtacacagccccgtgaaccctgaggagtggagtcatacacgaagggcgtgtggccatcgtgtcagcagagagagtctctgtacacagccccgtgaaccctgaggagtggagtcatacgcgaagggtgtgtggccaggctgcagagctgcgtgccgtttgtgtccgagcatcacgtgtggctccagcccttgtttctgccagtgtagacacctctgtctgccccactgtcctggggtcgctcttgggaggcacaggcatgggtgtgtctggcctcattctgtatcagtccagtgtgttcctgtcatagtttgtgtctcccaggcaggccatggtaggggcctcgcaggggccattggggagcacagggccaggctggggtgaggagagctcccctgttttctgtttaattgatgagcctgggaaaggagtgtgttctgcctgcccgttacagtggagcgttccgtgtccataaaacgttttctaactgggtgtttaaaaaa

SEQ ID NO: 5165 - DNA, 4351 bp, Homo Sapiens
  NM_023925
gtcggtgcctgcagggctctccgtggccgctcgggagaggtgctcttcgctcaggctcccccggagacttgagggggtgcgcgctggcgtgcatggggcctgttctgtccttggtttggggatgctcctaaggggggagaaagggatacctcgggtgcttggaggtcgagagacggatacgtaagtgcgcaagggccactgattagggcacgggaagggctcgctagaatgagctcttaaactggttgggtgtaagcggttttgggctagtctaaaccaaacaactgagaataaacgcggggttcctgcaggttgagagagtacctgtctgcaaatgtccagtagtgatggattgccttgtaggccccagagcaatcggggaagttagcattcttgttcaagaagctgctggttcacttagagctataaaagaatgttgtgagtttggattttcttccaaacgttcaggattgaggttagggctggtggtgagggatcatgtaaagaggtttgagtggctcagccttaggtcccggtgtggaaagcttattcttttggtgtcatcacgtggccgtgggaattatttagaatgtgatctgccctcatgagaagaaaggagctctgaagccgttgcagttcttcctccctatgtggaaaatcgaatttctggaaacatcctccgtattgggagattttgcctatgtaaaggctatccttattggctagcggcactaattactttaaaagtaggatggaagtacaagtatctcaagcatcattgggtttcgagctcacttctgtggaaaagagtttaagggagtggtctagactttccagggaagttattgcctggctgtgtccctctagtcctaattttatacttaactttcccccacctccttcagcctcatctgtttcaatggtgcaactcttttcatccccttttggttaccagtcaccttcaggccattcagaggaggaaagagaggggaatatgaagtcagccaagccccaagtgaaccacagtcagcatggggaaagccagcgggccttgagccccctgcagtctactctgagttctgctgcatctccttcccaagcgtatgagacctatattgaaaatggactcatatgccttaaacacaaaattagaaacatcgagaaaaagaagctcaaactggaggattataaggatcgcctgaaaagtggagagcatcttaatccagaccagttggaagctgtagagaaatatgaagaagtgctacataatttggaatttgccaaggagcttcaaaaaaccttttctgggttgagcctagatctactaaaagcgcaaaagaaggcccagagaagggagcacatgctaaaacttgaggctgagaagaaaaagcttcgaactatacttcaagttcagtatgtattgcagaacttgacacaggagcacgtacaaaaagacttcaaagggggtttgaatggtgcagtgtatttgccttcaaaagaacttgactacctcattaagttttcaaaactgacctgccctgaaagaaatgaaagtctgagtgttgaagaccagatggagcagtcatccttgtacttttgggaccttttggaaggtagtgagaaagcagtggtaggaacgacatacaaacacttgaaggatctactgtctaaattgctgaactcaggctattttgaaagtatcccagttcccaaaaatgccaaggaaaaggaagtaccactggaggaagaaatgctaatacaatcagagaaaaaaacacaattatcgaagactgaatctgtcaaagagtcagagtctctaatggaatttgcccagccagagatacaaccacaagagtttcttaacagacgctatatgacagaagtagattattcaaacaaacaaggcgaagagcaaccttgggaagcagattatgctagaaaaccaaatctcccaaaacgttgggatatgcttactgaaccagatggtcaagagaagaaacaggagtcctttaagtcctgggaggcttctggtaagcaccaggaggtatccaagcctgcagtttccttagaacagaggaaacaagacacctcaaaactcaggtctactctgccggaagagcagaagaagcaggagatctccaaatccaagccatctcctagccagtggaagcaagatacacctaaatccaaagcagggtatgttcaagaggaacaaaagaaacaggagacaccaaagctgtggccagttcagctgcagaaagaacaagatccaaagaagcaaactccaaagtcttggacaccttccatgcagagcgaacagaacaccaccaagtcatggaccactcccatgtgtgaagaacaggattcaaaacagccagagactccaaaatcctgggaaaacaatgttgagagtcaaaaacactctttaacatcacagtcacagatttctccaaagtcctggggagtagctacagcaagcctcataccaaatgaccagctgctgcccaggaagttgaacacagaacccaaagatgtgcctaagcctgtgcatcagcctgtaggttcttcctctacccttccgaaggatccagtattgaggaaagaaaaactgcaggatctgatgactcagattcaaggaacttgtaactttatgcaagagtctgttcttgactttgacaaaccttcaagtgcaattccaacgtcacaaccgccttcagctactccaggtagccccgtagcatctaaagaacaaaatctgtccagtcaaagtgattttcttcaagagccgttacaggctacttcttctccagttacttgtagctcaaatgcttgcttggttactaccgatcaggcttcttctggatctgaaacagagtttatgacctcagagactcctgaggtatttaacgttaatgcacctctgcctccacgaaaagaacaagaaataaaagaatccccttattcacctggctacaatcaaagttttaccacagcaagtacacaaacaccaccccagtgccaactgccatctatacatgtagaacaaactgtccattctcaagagactgcaaattatcatcctgatggaactattcaagtaagcaatggtagccttgccttttacccagcacagacgaatgtgtttcccagacctactcagccatttgtcaatagccggggatctgttagaggatgtactcgtggtgggagattaataaccaattcctatcggtcccctggtggttataaaggttttgatacttatagaggactcccttcaatttccaatggaaattatagccagctgcagttccaagctagagagtattctggagcaccttattcccaaagggataatttccagcagtgttataagcgaggagggacatctggtggtccacgagcaaattcgagagcagggtggagtgattcttctcaggtgagcagcccagaaagagacaacgaaacctttaacagtggtgactctggacaaggagactcccgtagcatgacccctgtggatgtgccagtgacaaatccagcagccaccatactgccagtacacgtctaccctctgcctcagcagatgcgagttgccttctcagcagccagaacctctaatctggcccctggaactttagaccaacctattgtgtttgatcttcttctgaacaacttaggagaaacttttgatcttcagcttggtagatttaattgcccagtgaatggcacttacgttttcatttttcacatgctaaagctggcagtgaatgtgccactgtatgtcaacctcatgaagaatgaagaggtcttggtatcagcctatgccaatgatggtgctccagaccatgaaactgctagcaatcatgcaattcttcagctcttccagggagaccagatatggttacgtctgcacaggggagcaatttatggaagtagctggaaatattctacgttttcaggctatcttctttatcaagattgaaagtcagtacagtattgacaataaaaggatggtgttctaattagtgggattgaaggaaaagtagtctttgccctcatgactgattggtttaggaaaatgtttttgttcctagagggaggaggtccttacttttttgttttccttcctgaggtgaaaaatcaagctgaatgacaattagcactaatctggcactttataaattgtgatgtagcctcgctagtcaagctgtgaatgtatattgtttgcacttaatccttaactgtattaacgttcagcttactaaactgactgcctcaagtccaggcaagttacaatgccttgttgtgcctcaataaaaaagttacatgcacaaaaaaaaaaaaaaaa

SEQ ID NO: 5166 - DNA, 2960 bp, Homo Sapiens
  NM_023926
gcgtctgattggccatgcgcactgtcacctgtcacggctcccttgctcgccccggtgcgcggcacagcctcgcggcattgtgggagtcgtagtccgcggtgaggcccagtgcgcaggcgcagtttgccggccgccatcgcgcactggggctccgggcggctgggaccggcctggggtagctgcgcagcaggtgggtcggtcccggggatgcagcgcgggggtcagagagcgaccccaacagggtagacggtgaggacgcctcagtgggcagcgttagggaaaggggccagggtgttcccggggttggggtgcgagcccccgctgtgcgtccaggaggccgagggtctggcatcccttcgcgtggagtgcggggcaggggccgggtccccccggaggtggctgagatccagatcggtgaggggccctgcaggcaggtctgtgggttctggcaccacctgagcccactgggcatctggtcatccctggcacctctcctttggagccaccttgtccctggctagacagtcacattttccagtgccgttttggaaagatgttgcctttggagaaggcgtttgcctcccccaggagctccccagccccgccggatctgcccacgccggggtcagcagccggagtccagcaggaagaacccgagaccatccctgagaggacccctgctgacctggagttctcccgcctgcgtttccgggaatttgtctaccaggaggctgccgggccccaccagaccctggcccggctgcatgagctgtgccgccagtggctgatgcctgaggcgcgctccaaggagcagatgctggagctgctggtgctggagcagttcctgggcatcctgcctgataaggtccggccctgggtggtggcacagtaccctgagagctgcaagaaggcagcctccctggtggagggcctcgctgatgtcctggaagagccagggatgctgctgggctcccctgcgggctcatcctcaattcttagcgatggagtgtacgagaggcacatggaccctctgctgctaccaggcgagctcgcgagccccagccaggcccttggagctggggagatcccggcaccttctgagacaccctggctttctccggaccccctgtttctggaacagaggagggtcagagaagcaaagaccgaagaggacggccctgccaacaccgagcagaagctgaagtcctttccagaggaccctcagcacctgggggagtggggccacctggaccctgccgaggagaacctgaagagctaccggaagctgctcctgtgggggtatcagctttcccagcctgacgctgcctccaggctggacactgaggaactccggttggtggaaagagatccacaaggaagcagcctcccagaaggcgggaggcggcaggagagcgctgggtgcgcctgcgaggaggccgcccccgcgggggtgctgcctgagctgcctacggaggcgccccctggggacgcccttgccgatcccccgtcgggcaccactgaggaggaggaagagcagcctgggaaggccccggacccgcaggacccccaggacgcggagtccgactctgccaccggatcgcagaggcagtccgtcatccagcagcctgccccggacaggggcacggcgaaactgggaaccaagaggccgcaccccgaggatggggacgggcagagcctcgagggcgtctctagctccggcgacagcgcagggctggaggccgggcagggccctggggctgacgagccgggcttgtcccgcgggaagccctatgcctgcggcgagtgcggggaggccttcgcgtggctctcgcacctgatggagcaccacagcagccatggcggccggaagcgctacgcctgtcagggctgctggaagaccttccacttcagcctggccctagccgagcaccagaagacccacgagaaggagaaaagctacgcgctggggggcgcccggggcccccaaccgtccacccgcgaagcccaggcgggggctagggcgggcggtcccccagagagcgtggagggcgaggctccccccgcacccccagaggcgcagaggtgagccgctgtgctgtcccgttccggaggggccgctttgccggccgtgaatcccagacgaggcattgggcctttccacgcccctgggtggcggcttcctgtggtgtttgtggacgtcctctgcctgtgccctgaatccgctcctgaggctaagcgctcccaacgagaagggtccacgggaagccctcacctctgtaaacacaccctgggccagcgctcgcatccgaggggagccgccggatgtggaagaagactcggctttcctgcagccatttagtgccgccccatgctaggttatttgacattgtgcagtgtagagttgccttaaagtgcgtgatctgccagtgctttcttcaagtcacccttgccccgattcctcctgtttgcgctccccagggttgctcaagtggaaattttgtcagctgtttagccttttcgtacttggcgtgatgtcaacttcacttctaatctgcaaaagcagaagctgtttcctagtttacctcgcgtgtgtttacctatatggagtagctcgcagagatcacagaaatgcttgcagcctaaggcagggttttcagaccgtgggtcccagcccatttagtaaaatgggaaatcaattagcaagtggtcaccagcattacacagcaatgaagcagaataaagtaggccagaatgcatcatgtagtaaaggcaaatactgttttgtgaaacttttcacccatacatctaaatgtgagaactggttgcaatgtaagacatttcttgctgggaagttgtgagcaaaataagttgaaaacactaataaagatctgtctgtctgagcaaaggagactaaactccttgggctacaaaaaaaaaaaaaaaaaaaaaaaaaaaaaaaa

SEQ ID NO: 5167 - DNA, 2934 bp, Homo Sapiens
  NM_023927
ctgttacagtcgggatagaaaacaaaaagcttaatttaccaggaggctaaacagattgtgccttcttaggcaaatgttccacctgcttggccaattagcttcctctcccgaaagactcgttcaacaggtttcctttttctcttctctgcctcctgggttggggaaagaggctgtcacttcgcttcgaccctccccttccctccctctcggcttttccacagtgggtcggaccaatcgcgcccgctccgacgtgtccaggtccgcggccccgggagcttggcgcggcccggcctggatgcgctgggcggagggtgcaggggagggcacggcgccgcttgcttggcctgcgcacccggacctagaagccgggacgagccggggcagagccaggcgcgcggaagtctgaaggtgccctccagacacggccccgatgactgaactacagcaagatgtggaagacacaaagcctgcgaaagtgctcgggaagagggagagcaaacttggctcagcccactcagaggctgagaatggtgtggaggagaaaaagaaagcctgcaggtcgccaacagcccaatcccctaccccatctgtggaggcggactccccagaccagaagaaaatcattagcctatggtcaaaatccagttttgatggtgcctctttagcaagtgataagaacgactgtaaaacagaaagcaaaaatgaccctaagactgaaagaaaaaagtcttcatcttccagccagtacaaggccaatatgcactttcacaagttgtttcttagtgtcccaacggaggaaccactgaagcaaagctttacctgtgctctacagaaagaaatactataccaaggaaagctctttgtatcagaaaactggatttgttttcattccaaagtctttggaaaagacacaaagatctctattccagctttctcggtaaccctaataaagaaaaccaaaactgctcttctagtgccaaacgccctgatcatagcaacagtcacagacaggtacatatttgtctccttactctccagagattcaacttacaaactactaaaatctgtgtgtggacacttagaaaatacaagtgttggtaacagtcccaatccatcttctgctgaaaacagtttccgagcagaccgcccttcatctctgcctctggatttcaatgatgaattctcagatctggatggagtggttcaacaaagaaggcaagacatggaaggatatagcagttctggttctcaaactcctgaatctgagaactctcgagatttccatgcgacagaatcccaaacagttctgaatgtctccaagggagaagcaaagccaactcgggcagatgcccatgtgaacagagtacctgaaggaaaagccaagagtctccctgtacagggtctgtcagaaactgttggaatcttacataaagtcaagtctcagaaatgtccgatgcttcaccatattcttatattctatgcaattgttgtctgtgcactaatcatctcgaccttctacatgagatacagaattaatactctggaggagcagctggggttactaacctccattgtggacacccataatactgaacaggcagcaccatctggcctgaggtcacaagtacaattcaatgtggaggttctctgtcaagagcttacagctaacatagtgaaattagaaaagatacaaaataacttacagaagttgcttgagaatggtgactgatcgaccagattgcttgggccatcggaatacctcatgtttccctttgaagaaggtgcttcctgaggcgttttgtttgagtgcaccctgctggtcagaggtgcaagcagatgagaatccagacattgcatgtggaggtctccagctcaggaaagtgaggagggaaataattttggttcttgtgcaataaaagttgaccttgactctctgaggaagattttgctgcttttgcctgaagaaaacagacccatctctggaggtctcaggaagggcccagcgaacacactctcttggataattaccacgatggcgtcagcaaacactccaccctgtgcctttttagtccttcccgccctcctgcctctcccttacacccctcttaacgactttcaaactaaaggatacatcatatactgacaaactcaatgtggtcctttcaagaattagccatgagtctcaaaaaggcaataaatggctctaagtggacaggtttgcttcaaacaagtaacatctacattttgtcttttttttttcagttctcctgttatgttctggttgaaatcacctgtgtgtcttaatttctcaattcctttttggcaagaatatcaagcaaggtgaatttaacattatgtttatgttttgttttgttgctgtaactaatagttaattggactgattcttacccagccctggtcaagaatctgtgaggcatgtgactgaagtactaaattaaacttattttgaaaccaaacctaatttttaagccaaaaggtgtaatagtgatttaatacaggatgaaaaacactgaatttttaagactgtaggtggactatgttagtagttttcaagcaggatgtctgtattcagcattcaataatgctaaaatccctttcagcatgaaatttgtatgtttttatcctttgctgactaaaataaaataactggtggtttgctaactatttaccatatgggttggctggtttttattaataattgtttagggtatcataagatctgtaagtacaaaggatattctgtttctatctgcaatgcatttgataatcatttctatgaaatgtattttatttaatcagataagctaataagcgaattggttacatcgtttgtatctgttggcctagtggacagctgtgcctggtgcacctctggcttttaataaatactcattggttgaaacaccctgctaa

SEQ ID NO: 5168 - DNA, 3341 bp, Homo Sapiens
  NM_023928
ggcctgcggggcggggcctgggccaagcggcccgcaggaggcggcggcggccgttcagtcccttgttccccgccgccgccgtcgctgacccagcccgccaggcgctcctgaccgtcgcttcctccggtcccaggtccccggccctcgcctcagccccggcccctggtccccagccctcgtcgcagccccggccgcccgccgccgccatgtccaaggaggagcgccccggtcgggaggagatcctggagtgccaggtgatgtgggagcctgacagtaagaagaacacgcagatggaccgcttccgggcggctgtgggcgccgcctgcggcctggcgctggagagttatgatgacttgtaccattggtccgttgagtcatattcagacttctgggcagagttctggaaattcagtggaattgtcttctcacgtgtgtatgatgaggttgtggacacatcgaaaggaatcgcagatgtccccgagtggttcaaaggcagtcggctcaactatgcagaaaacctcctgcggcacaaagagaatgacagagttgccctttacattgcaagggaaggcaaagaggaaattgtgaaggtgacttttgaagagctgaggcaagaagtggctttgtttgcagcagcaatgaggaaaatgggtgtgaagaaaggagatcgggttgttggttatttacccaacagtgagcacgctgtcgaggcgatgctggctgcggcaagcattggtgccatctggagctccacgtccccggacttcggtgtgaatggtgtgctggaccggttttctcaaattcagccaaagctcatcttctctgtggaggctgttgtctataatggcaaagagcacaaccacatggaaaagctgcagcaggtggttaaaggcctaccagacttgaagaaagtggtggtgattccttatgtgtcctccagagagaacatagacctttcaaagattccaaacagtgtgtttctggatgactttcttgccaccggcaccagtgagcaggccccgcagctggagttcgagcagctgcccttcagccacccactgttcatcatgttctcatcgggcaccacgggcgcacccaagtgcatggtgcattccgctgggggcaccctcatccagcatctgaaggagcacctgctgcacggcaacatgaccagcagtgacatcctcctgtgctacaccacggtcggctggatgatgtggaactggatggtgtcccttctggccacaggagcggccatggtcttgtacgatggctcccccctggtgcccacgcccaatgtgctctgggacctggttgacaggataggcatcactgtcctggtaactggggccaagtggctgtcagtgctggaagagaaggccatgaagccggtggaaacccacagtctccagatgctccacacgatcctgtccactggctccccactgaaagcccagagctacgagtatgtctacaggtgcatcaagagcagcatcctcctgggctccatctcaggaggcaccgacatcatctcctgcttcatgggccacaatttttctcttcctgtgtataaaggggagattcaggcccggaacctgggcatggccgtggaagcgtggaacgaggaaggaaaggcggtctggggagagagcggcgagctggtgtgtactaagccgatcccttgccagcccacacacttctggaacgatgagaacggcaacaagtacaggaaggcgtatttctccaaattcccaggtatctgggctcatggcgactactgcagaatcaaccccaagaccgggggcatcgtcatgcttggccggagtgacggcaccctcaaccccaacggggtgcggttcggcagctcggaaatctataacattgtggaatccttcgaggaggtggaggacagcctgtgtgtcccccagtataacaagtacagggaggagagggtgatcctcttcctgaagatggcctccgggcacgccttccagcctgacttggttaagaggatccgtgacgccatccgcatgggcttgtctgcgcgacacgtgcccagcctcatcctggaaaccaagggcatcccgtatacgctcaacggcaagaaagtggaagttgccgtcaaacagatcatcgctggaaaagccgtggagcaaggaggtgctttctcgaaccccgagaccctggatctgtaccgggacatccctgagctgcagggcttctgagtcagactggctggcgtgtcactcagccgcacccgtgtgcactgtaacttttgtgtgctcaagaaattatacagaaacctacagctgttgtaaaaggatgctcgcaccaagtgttctgtaggcttggggagggatcgtttctctgttttgttaaatctggtgggtacctggatcttccacacgagtgggattctggccttcagagaccaggagggagtgtctgggccgcaggtgtggcactgtggtgagagtgtgtgtctttgcacacacagtgcagcgggaacggtggggctggctggtgctgaagacagacacactcctgagccaaggtcttgtcttcaacctccccgtcccgttgtcccattttgctctgtgaaggtgcaaatccctttcttcccttcccatctcaggctctcctgttttccctcagggtccagtatgcctttgagctttagctgttagaaaggaacccccgtgacttgacacagctttcacagctggctgctaggaccggcgggctgggtgttcacgtgtgtctgtgtcatggatgcaatgcaggccctggaggactgtgcgtcacccgtcaaccagagcgtgcctccgggccagcttccctccaaggaatgagtggatttcatacaggatctctttattgcacagactgaatggctttacatgtttctaatgtgaattaggcatgtgaagcagtgggtgtccacccgtgtccctcatgggtgagccctccagctgtgagcccaggcagtgtggtcaccgagtgaggaccctcctcaccaggaaccgcatccctgtgctgcctccacctgagagttgctagggggttcttgtcgagatcatgtcatcagcacccctaagtcaagtcacgggtttccatagccaggcagttggtatgtacaattcagttcagcgtatgaacttgtatctctaatctgatgtccatttttatattttttgaaactgagcacaatgaaatcctttcttgaatcattttccttttggattataaaaatatgggggaaagtgctatgatgaattttatgcaataaatgtatacatgtgtgcacatgcacccatgctgaaaaaaaaaaaaaaaaaaaa

SEQ ID NO: 5169 - DNA, 876 bp, Homo Sapiens
  NM_023933
gcgcggcggctcccggcaggagggagagggcacaccgccagccccaggccaggctgcgagggccgcggacccgagctgggaaggaccttgggcggacgagccgcgcgtcccgcagccatggagcaggatgacccggtcgaggcgctgacggagctgcgcgagcggcggctgggcgcgctggagctgctgcaggcggcggccggctcgggcttggcagcctacgcggtgtgggcgctgctgctccagcccggcttccggcgcgtgccgctgcggctgcaggtgccctacgtcggcgcgagcgcgcggcaggtggagcacgtgttgtcgctgctgcgaggacgccccggaaaaacggtggatctgggctctggcgacggcaggatcgtgctggcggcccacaggtgcggcctccgcccggccgtgggctacgagctgaacccctggctggtggcgctggcgcggctgcacgcctggagggccggctgtgccggcagcgtctgctatcgccgcaaggatctctggaaggtgagcctgagggactgccgcaacgtgtctgtgttcctggcccctagcgtgctcccgctgctggaggacaagctgcggacagagctgcctgctggggcccgcgtggtgtctgggcgcttcccactccccacctggcagcctgtgaccgcggttggcgagggcctggaccgagtatgggcttatgatgttcctgagggtgggcaggctggggaggccgcctcctcgcggatacccatccaggctgcccccggacctagttctgcccccatcccggggggccttatttctcaggccagctgagtattagacacgataaagactctgtgggttctaaaaaaaaaaaaaaaaaaa

SEQ ID NO: 5170 - DNA, 1020 bp, Homo Sapiens
  NM_023936
gctgaggacgcggacccgccatggcgcggaagaaggtgcgtccgcggctgatcgcggagctggcccgccgcgtgcgcgccctgcgggagcaactgaacaggccgcgcgactcccagctctacgcggtggactacgagaccttgacgcggccgttctctggacgccggctgccggtccgggcctgggccgacgtgcgccgcgagagccgcctcttgcagctgctcggccgcctcccgctcttcggcctgggccgcctggtcacgcgcaagtcctggctgtggcagcacgacgagccgtgctactggcgcctcacgcgggtgcggcccgactacacggcgcagaacttggaccacgggaaggcctggggcatcctgaccttcaaagggaagactgagagcgaggcgcgggagatcgaacacgtcatgtaccatgactggcggctggtgcccaagcacgaggaggaggccttcaccgcgttcacgccggcgccggaagacagcctggcctccgtgccgtacccgcctctcctccgggccatgattatcgcagaacgacagaaaaatggagacacaagcaccgaggagcccatgctgaatgtgcagaggatacgcatggaaccctgggattaccctgcaaaacaggaagacaaaggaagggccaagggcacccccgtctagaatgccagaaccagcgggtggccttaggggctgtgaggcagtggggaccttattgatgaaagaaaccgtctttgcgttacacccgagtctgcctctcggagcagggagctcaccttccgcgacgtgttctgagggtctgcatcttaggggggagggctggggcaaatcgccacctgtgcctttcctctggccctgctgcccccacacccaactccgagggcccacgctggggaaagcgggaagcgctcgctccctttcccccattagtgctctctctgcctggatcccggcagaagctatgaaagggaataaagagaaaagaagtaaaaaaaaaaaaaaaaaa

SEQ ID NO: 5171 - DNA, 968 bp, Homo Sapiens
  NM_023937
ccggctacctgttggtgtgtatgcagagcatccctgtgccccgcggatatagactggcgcgcctctgttgcgcaggcgcagaactacaacttcagggttttccccaacggcctcttttttgcacgttaggagaaactacatttcccataatcctttgttccagggctggagcggctctgggctccggaatcgcccgcagccggtactgcgggacccactgcggatatggctgtcttggctggatccctgttgggccccacgagtaggtcggcagcgttgctgggtggcaggtggctccagccccgggcctggctggggttcccagacgcctggggcctccccaccccgcagcaggcccggggcaaggctcgcgggaatgagtatcagccgagcaacatcaaacgcaagaacaagcacggctgggtccggcgcctgagcacgccggccggcgtgcaggtcatccttcgccgaatgctcaagggccgcaagtcgctgagccattgaggatcgcgacgcagtcggcgggaccctcatggaagcatcgccctcgcctcggaccttgcctggcgctatttttgcagggagctggggagcaggaacgcctcggacctgagtgctctccatattgtggggttgaagtctggatgggagcttgccaagtccctttttaggctttttaattaggaagcatttcgaacctgcgcaacagaccaaagaacagtacaaagaacatccgtgtacccagtaccctgactaccgactacctacaacccgtccctgccccatcctgagttcttttgaagctgatctcaggcatcggattatttcttctgtaaatatttcagaatgtatctctccaagatgagagctcattaaaagacaattacaaagcttatcacatccaaaagaattatcaataattttgaaatattattaaacgtgtaataaatgttcaaagttccacttgc

SEQ ID NO: 5172 - DNA, 5502 bp, Homo Sapiens
  NM_023938
agtggcagggtgggggccaggcagcacagatgaagcatttacctatctaggtaagtcaggaggagctcaaaaggagaagaaaacagtaggaggcaggggaagcagcctctgtctccatctctgccctttgaaacaaaagggtatttcttttctctcttcagcccccaacccagtggaggcccggcttgggacattgttcacttcccctcgcttcccctctagaagccccctttgccatccctgcaccttgtttcgggtgatgcccgagagggagctgtggccagcggggactggctcagaacccgtgacccgtgtcggcagctgtgacagcatgatgagcagcacctccacccgctctggatctagtgatagcagctacgacttcctgtccactgaagagaaggagtgtctgctcttcctggaggagaccattggctcactggacacggaggctgacagcggactgtccactgacgagtctgagccagccacaactcccagaggtttccgagcactgcccataacccaacccactccccggggaggtccagaggagaccatcactcagcaaggacgaacgccaaggacagtaactgagtccagctcatcccaccctcctgagccccagggcctaggcctcaggtctggctcctacagcctccctaggaatatccacattgccagaagccagaacttcaggaaaagcaccacccaggctagcagtcacaaccctggagaaccggggaggcttgcgccagagcctgagaaagaacaggtcagccagagcagccaacccaggcaggcacctgccagcccccaggaggctgcccttgacttggacgtggtgctcatccctccgccagaagctttccgggacacccagccagagcagtgtagggaagccagcctgcccgaggggccaggacagcagggccacacaccccagctccacacaccatccagctcccaggaaagagagcagactccttcagaagccatgtcccaaaaagccaaggaaacagtctcaaccaggtacacacaaccccagcctcctcctgcagggttgcctcagaatgcaagagctgaagatgctcccctctcatcaggggaggacccaaacagccgactagctcccctcacaacccctaagccccggaagctgccacctaatattgttctgaagagcagccgaagcagtttccacagtgacccccagcactggctgtcccgccacactgaggctgcccctggagattctggcctgatctcctgttcactgcaagagcagagaaaagcacgtaaagaagctctagagaagctggggctaccccaggatcaagatgagcctggactccacttaagtaagcccaccagctccatcagacccaaggagacacgggcccagcatctgtccccagctccaggtctggctcagcctgcagctccagcccaggcctcagcagctattcctgctgctgggaaggctctggctcaagctccggctccagctccaggtccagctcagggacctttgccaatgaagtctccagctccaggcaatgttgcagctagcaaatctatgccaatttctatccctaaggccccaagggcaaacagtgccctgactccaccgaagccagagtcagggctgactctccaggagagcaacacccctggcctgagacagatgaacttcaagtccaacactctggagcgctcaggcgtgggactgagcagctacctttcaactgagaaagatgccagccccaaaaccagcacttctctgggaaagggctccttcttggacaagatctcgcccagtgtcttacgtaattctcggccccgcccggcctccctgggcacggggaaagattttgcaggtatccaggtaggcaagctggctgacctggagcaggagcagagctccaagcgcctgtcctaccaaggacagagccgtgacaagcttcctcgccccccctgtgtcagtgtcaagatctccccaaagggtgtccccaatgaacacagaagggaggccctgaagaagctgggactgttgaaggagtagactctgcgaccagtacagaccctgtcctggctgaacaagaagagacacatgctccacttgggagcctttgccaccacgcaactcagggctcaagatgaatgggagggagagatttgagtccaagcatacatttatattcagtgttgtgccattgagttcccatgtggatcattctgaaggtgatctccacaagagggtgtgtgtgtgtgtgtttggtgtgtgtgtggagggggggccgctggatacatcactgaagctattgatataacacaatgagtcactgttcagaattttgctcttgttagatgttttcttacattgggtagagtccagcctagtgagagctgagtgaaggggctggccatgcctgagacaaaaagtcaaatgagacaatggacgtgtcaatgacttgaaaaaaagtcacatccagcaaatgcagggtcacatgaaatatgggcctcctggaatccctacagtggatggagactggctcataccttgccagatccctctctcagttccagccttctggacaaggcctgggctaagaggagctgattcgttatctcttcacccactgccctctcagtatcaccagtcccaaagacaggatacgtccctgtaacccaatctctcggttgattgatagcagaacagctcttgttggtctgagaaggcaggataagtgaccacatatttatgccactacctccaccagggagagtccttctccacaggcttgataaattcaatcaccaactgtgctgtcgtccctgactctgctactcccgttcttcctgctttcctgctccgtatctcagtctgcactgaccccagggctgggctgacatcaagatgggagcccagcccacgggctttataaacacccaagaaccgtttcagatcttctctgtgctgatgcaggtagttttaaatttttctcagttccagtgatagaaaacccacacaatacatcctctgccagtcttaatagaatatcagaggtaagaggggcctcagagaagctctgacgcagtgctgctggggaagggaagtgactaaccccgggtcagcctgccatttagggaaagagctgaggttcttacccttgttgcatgctgccacctctccttagccagtgctcttgtacatccacacagcaccctaaggagccatagtcaccatcaaagactcaaccctaaggcccttcaagatctcaaagtgccttctgaagcatcagagattaaatattgttcaaactaatagttattgctgtggcttttaattttatctttggaagatagctatatggtaactcatcattaaccagaacacctctcccctcaaattccgtgaccaagttgtgcagcttgagcaaatgccgaaagagggtattatgggtgggtggtgtgggcttgcaaatacaagcttggaggtgagacatggccagacatgactcctgcttccccttaggaagtaaatcttacttatggttgtgaactgcttggagtccaggatgcccagatgtgaggggcagatgaagggaatgttgctggaaaggtgccttttaaggctgctgagaatttctggactgtgtcctgatggacgcagcaccatcaaagcccagaatttctgaaaacggtgacaaggttaacataaggacaacaaatactccaccctgtcatggtatgtgaggtgtgggtgtggcggtttctgtgtacgtttgctcatacacgcacatccaaaagcctgtgcctcattcctggccatgggtgaggacttggtctgtcacggctgatgaggactcccacaaccggccaagttatgtcttattatacacccccagaaagagagaaagctgccttctggaggactgattccacatgctatattcagctgagttgatttctgtgtctatttcaacccataacctgaagaatgatcaccttattccttattcattaattttcttgattaatagggaaacttgggaatagctataaagtaaaacttgggtggaacctggggccctggcatcacacaagtgtgattaggatggtcaaggtcatcaggagtacagcctattatattcccacatcctgagaaaggtcatttctcccacacacgacaaagtcacagacatcctgcacctgccactaggcatcctcatcctactgacatgcccatttctccagttttcttaatctgagactcccttcccttgttttttaaagataccgtgcttctccacatcctcatccttcaaggagcatattttgctcttaggatggtctttgggattcaagaatagaataataaatccaaacttggtcattcccattttgaagagatgcaagagggcccagtgaggacatccgcctccctgaaagtggtgctagacagagctgaggtcattgtatctgtgtatccacataggatttctcttaattcagcttgaattgatggggagggaggtaagagtagggtcagagttactcatcccttttcaaagaattgtgggtggaagtttgtaaaggccattcatttgattttcaaaatcaaagcgacagctctacttccacttggccttagatctctgctataccctgccatagccttgatgccactgggcacaagccacctgccaaatacaggagtggcctctcccagcctggcatgataggggggtctgtgccctcagatgtgttgacagctgctcttctgaattgccacacctgtgctacacttggaattctgtgctctgactctgcagggtaggaccacgtgccatctcacacagaggtcaaccgatgagcccactcactcgtacatgccttcttccacagtgggaagcatgatctggcaggggccgccctgtaggctggggatgggctgctgtgtgaatgttgacgttcgtttcatggagaaaggggaggtgaaagattgaagagcaggttcctgtcaatgttctgagttcgagctggaggtgtagattgaatagtctacatggtctgtgagtgtgtgagatgaacccttccatcctttgacacctggttgtatgtgtaggctaagaaggaaggaccctcctgtcagtgtgcaaagctgtaatctcatggactagaggagagggggccaaggggatggacaggagaagtcatgcagaatctaagcaggaatgcagatagaacacatctaggctcttttccccaggagagtgatgatggagcatatagatctggctcaaattcagcctccatcacttaccagtcaggaaccctggcgatatcactttaactttctgaacctcagagtcttcacctataagacggggaaaataataccaccctttcaagattgttgagataaataagtgatataaaacatgtaaagcttagttctggccacagtgtagctactcaataaatgataatactacc

SEQ ID NO: 5173 - DNA, 1725 bp, Homo Sapiens
  NM_023944
aaagacctcccagcagaagaggagaagaggttgtgtgggacaagctgctcccgacagaaggatgtcgctgctgagcctgccctggctgggcctcagaccggtggcaatgtccccatggctactcctgctgctggttgtgggctcctggctactcgcccgcatcctggcttggacctatgccttctataacaactgccgccggctccagtgtttcccacagcccccaaaacggaactggttttggggtcacctgggcctgatcactcctacagaggagggcttgaaggactcgacccagatgtcggccacctattcccagggctttacggtatggctgggtcccatcatccccttcatcgttttatgccaccctgacaccatccggtctatcaccaatgcctcagctgccattgcacccaaggataatctcttcatcaggttcctgaagccctggctgggagaagggatactgctgagtggcggtgacaagtggagccgccaccgtcggatgctgacgcccgccttccatttcaacatcctgaagtcctatataacgatcttcaacaagagtgcaaacatcatgcttgacaagtggcagcacctggcctcagagggcagcagtcgtctggacatgtttgagcacatcagcctcatgaccttggacagtctacagaaatgcatcttcagctttgacagccattgtcaggagaggcccagtgaatatattgccaccatcttggagctcagtgcccttgtagagaaaagaagccagcatatcctccagcacatggactttctgtattacctctcccatgacgggcggcgcttccacagggcctgccgcctggtgcatgacttcacagacgctgtcatccgggagcggcgtcgcaccctccccactcagggtattgatgattttttcaaagacaaagccaagtccaagactttggatttcattgatgtgcttctgctgagcaaggatgaagatgggaaggcattgtcagatgaggatataagagcagaggctgacaccttcatgtttggaggccatgacaccacggccagtggcctctcctgggtcctgtacaaccttgcgaggcacccagaataccaggagcgctgccgacaggaggtgcaagagcttctgaaggaccgcgatcctaaagagattgaatgggacgacctggcccagctgcccttcctgaccatgtgcgtgaaggagagcctgaggttacatcccccagctcccttcatctcccgatgctgcacccaggacattgttctcccagatggccgagtcatccccaaaggcattacctgcctcatcgatattataggggtccatcacaacccaactgtgtggccggatcctgaggtctacgaccccttccgctttgacccagagaacagcaaggggaggtcacctctggcttttattcctttctccgcagggcccaggaactgcatcgggcaggcgttcgccatggcggagatgaaagtggtcctggcgttgatgctgctgcacttccggttcctgccagaccacactgagccccgcaggaagctggaattgatcatgcgcgccgagggcgggctttggctgcgggtggagcccctgaatgtaggcttgcagtgactttctgacccatccacctgtttttttgcagattgtcatgaataaaacggtgctgtcacctctgcctgggcctcactgacagcctgcag

SEQ ID NO: 5174 - DNA, 1213 bp, Homo Sapiens
  NM_023948
gagaaggccgggttgggagctgcgaggggccgggtttagcggggtgggcgtggccgtcgaggtggggctcggcgggtccgaaggaacctggggcagagctggaagaggaaaggtcttgggggccctgggcctgggtctgcgggagccccatctagcggggttccaaggcggcggcggcatcagtcgaggccctgctccgggagctcatcttgtcccctttcgcccctcacgccccccagctctgactccaggccctgtcccctgagctctgccctcggatgtccgaccgcccagagcctgcatgcgccgtggggcgccccaggaccaggagctggtgggtccggggccccctgggcgggggtcccggggcgcccctcctcccttgggacccgttgtcccggtcctggtctttcccccggatctagtattcagggcggaccagcggagcggaccccgacagctgctgaccctctataaccccacaggaactgcgcttcgcttccgagtcctgtgcacagcacctgccaaatacacggtgtttgacgcagagggatatgtgaagccccagtcttgcattgacattgtgattcgccatgtggcacccattcccagccactatgatgtccaggaccgcttccgcattgagctgtctgaggaaggagctgagggccgagtggtgggacgcaaggacattacctccattctgagagccccagcgtacccccttgagcttcagggacagccagatccagcgcctcgcccagggcctcctgctgggacaccaccacccacggccagacacttccaggagcacccccgccagcaactggccaccagctccttcctcctcttcttgctgacggggattgtgtctgtggccttcctgctgctcccactcccggacgaactcggcagccagctgcctcaagtcctgcacgtctccctgggacaaaagttggtggccgcctacgtcttgggcctcctcaccatggtgttcctccggacctgagctccgtgctcaacccccagcccaccccaccctccctgggcagggtcttgaggcagccactgtgatgctcataccttaccttgcctcctaccctcttctctttcctgcctactccccactcctccctgacaaaaaacacccagggatttgtactcattttccaagttgaataaaatacatttttaaaatgataaaaaaaaaaaa

SEQ ID NO: 5175 - DNA, 5288 bp, Homo Sapiens
  NM_024007
aaccaaacaacccccaacagccaagcatacatctctaattttattattttggtcttttcgttggattttccctttcttctttttttcgggttatcgctcagttttgagcagaggtttacattttttaaaaatttgctttccagcccgccttgatcttctaagtgcgagttcatcgtctgagaaaaaaaaaaatctctggttggcgtttttgtttcttttcttttctttcttttctttcctttttttttttttttaatttttttcaagggggaggagattttccacaagaaaaggttgttttcatgtttgggattcaggaaagcatccaacggagtggaagcagcatgaaggaagagccgctgggcagcggcatgaacgcggtgcggacgtggatgcagggcgccggggtgctggacgccaacacggcggcgcagagcggggtgggtctggcccgggctcactttgagaagcagccgccttccaatctgcggaaatccaacttcttccacttcgtcctggccctctacgacagacagggccagcccgtggagatcgagaggacagcgtttgtggggttcgtggagaaggaaaaagaagccaacagcgaaaagaccaataacggaattcactaccggcttcagcttctctacagcaatgggataaggacggagcaggatttctacgtgcgcctcattgactccatgacaaaacaagccatagtgtatgaaggccaagacaagaacccagaaatgtgccgagtcttgctcacacatgagatcatgtgcagccgctgttgtgacaagaaaagctgtggcaaccgaaatgagactccctcagatccagtgataattgacaggttcttcttgaaatttttcctcaaatgtaaccaaaattgcctaaagaatgcgggaaacccacgtgacatgcggagattccaggtcgtggtgtctacgacagtcaatgtggatggccatgtcctggcagtctctgataacatgtttgtccataataattccaagcatgggcggagggctcggaggcttgacccctcggaaggtacgccctcttatctggaacatgctactccctgtatcaaagccatcagcccgagtgaaggatggacgacgggaggtgcgactgtgatcatcataggggacaatttctttgatgggttacaggtcatattcggtaccatgctggtctggagtgagttgatcactcctcatgccatccgtgtgcagacccctcctcggcacatccctggtgttgtggaagtcacactgtcctacaaatctaagcagttctgcaaaggaacaccaggcagattcatttatacagcgctcaacgaacccaccatcgattatggtttccagaggttacagaaggtcattcctcggcaccctggtgaccctgagcgtttgccaaaggaagtaatactcaaaagggctgcggatctggtagaagcactgtatgggatgccacacaacaaccaggaaatcattctgaagagagcggccgacattgccgaggccctgtacagtgttccccgcaaccacaaccaactcccggcccttgctaacacctcggtccacgcagggatgatgggcgtgaattcgttcagtggacaactggccgtgaatgtctccgaggcatcacaagccaccaatcagggtttcacccgcaactcaagcagcgtatcaccacacgggtacgtgccgagcaccactccccagcagaccaactataactccgtcaccacgagcatgaacggatacggctctgccgcaatgtccaatttgggcggctcccccaccttcctcaacggctcagctgccaactccccctatgccatagtgccatccagccccaccatggcctcctccacaagcctcccctccaactgcagcagctcctcgggcatcttctccttctcaccagccaacatggtctcagccgtgaaacagaagagtgctttcgcaccagtcgtcagaccccagacctccccacctcccacctgcaccagcaccaacgggaacagcctgcaagcgatatctggcatgattgttcctcctatgtgaaagaattgccttgaagaattgtattaatgaagaggttggattctgctacagagagtaatctgatacaagtcccagagtggaacttttaactcaggcctttttaagaggaatcacaataactgcagatttttaaacaaacaaaatcaccgaccttgcaaatactgaaattggaagagggatctgcaagtgcagggtgttggttaaagttgtacctcccaagtatttgggggatatatttattctgtattgacaaaagcaaatccactttttctttttcttttttttttttaagcttaattctgcaatcatttgtcttttataaaccgtaaagctctatacaagggacactataaataagactccatgttttaatttatgatgtttttaaagctgtgtaaaggaagaatgaagtggtgatatttacaaaaaagtaaaaaaaaaaaaaaagaaaaaaaggaaaaaaaaaaaagcttgtatgggacagaataggaatgccagttagattttttagaaaaactaagggtcggcttttgcgccttaaagcatatcaaatggtagttagctcagacagtgcattttcaatatctaacttaacatgccaccccttagcagtgcaagcttatttatctcttttgtattgttgtcttaagcaactgtgtaaataaatgcagcctggaaagttaaaacgcgatgtaagtgatcacatttttccctctactcgaaaatccagtgcctctagacagattgttaaaactgcatatttaaatctgatctcattctctccttttacttaagtcagtttcttctgaagccgatggcctctcgagagcttggtggcacacatactgtgtgagaatctcctttgagacttcatggaacagggtccaggcacagaattccacactctgccctccagttaacaagccaaaacctcacgtacgctcccccatttgcaagtttaaagtttactcgtcctaaatgcagacttcatacctatcttccaaaagttgataaaagcaacgtggcaggtattttcgattttcccattccagatactgcctctatcagtcgacccttaccatttgtaacataatagattgaaacaacaggttaagtgctttggaattaagagttaaagggaaccgggggtggagaaaggaaaagaaggttgagacctccaaaacatagttttctgttctatgggaatttttgctctcattatctgggaagtgttcttaaaaataagaattaatagcaaagatgcagcaaagctctgaggatgcatttgcctgatatttttttctttgctcttgtgtttttgtatgtagttataaatactgtagattttttttttgtgattttttgccaaagttgttgttctatttatacattttaatgtcttaagacattttttcaatatcacaaaaagattttactgcgtattttgcaaagaaaaaaagctcactacctttagcttgcacatacttgcaaagttaattaaaaggctttttgttttaaaggggattttgtaaaatatccatataaataatgtatttatctttcgaatttgtacattgcttttcccttcttcctcttccttccacccccaatttattttattgtgtatgtttgctacgtgaaaagtgcgtatttgtttggtcacctacacttgtattagctgtttcaatgtgatttttaaacatttcatttatagttatttttagtattgttataaaccatgcttcagtttttttaatttccacccaaaagtcattgtctatttttgtattatttgtaagttaagaagttttttccaatatatggcaaaaaaaaaaaaatagtagcatattattcttgtagtatttagttcagtagatttaaaaaaaaatgtatcctttgctttggaagcttacaaaacaaccctaatgctgttttactctattaatatgcatggaatctctccctttggagtgacgcattttgtgcattaaattctagggagaaacttcatagaaatcaatgaacatactttctttcttaagtctgcttgtatatttcctctgtctttcacataaatataaaccagcagattggatgccttaacaatgcaaatcatattcatttcacttgtacattgtaactgtgcaccagaactgtcagtcatcactaacattctaagaaaaaagaaaaagaaaaaaagaaaaaaaaaaaaacaaagaaatcgaaaagcacaaaagaactgttttgttaccttaagacaatgtaactttttctagtagagcaagaaatcatttacaacaatgctgcaactgtgcatgcccccatatggattttgcaatggttttcactaggctgtcaagagtgcgatttttatgggttggggtgggtgggggaggggagttgtgggagggtaggggagggaggaaagctgtttttcatggtgagaaataataatgatgactaataataataaaaaaaactggaaaatgtaagcaaggtggacgcattgcttctcggtactcagaaaggttatctgaatttgcgtggtaagcgctggcctgaagatgtacacaagttaaagccatattttatctggtgagccccttaactgtttctgaaggaatgaacggtcagccgggaaggtgtccggcttagaccttgacaacagacactacccatctgtcagccatgtgcagtggttagaactcttcttgaaagtccaaagagcctttaaaatgtgtataatttgtgttttgttgcttctatttctattgattagatgaaaagacattctggccctctgatcctctttcttctccacaaaagttttacaaataaaagatgttcccctaaatacagaatatggctttaagaagaaaatgaaatgaagaattaaattaagatttcagtgttgggggaaaaaatacagcttctggatgactggattgcataacattgccctggcctcacattgtactaggatgcagcttaaatgaagtcatctctaaatctactaacctttcaccttcttatcaaaactttttgaatagacacacactgtacagttcaattgttagagaacctaactactgtagagattgttaaattttttttttttttttgcaaaaattcaagctgtaaaaacttttcaactttcacaatatttaattaaagttacttcctgtctgtgatggcaaaaaaaaaaaaaaa

SEQ ID NO: 5176 - DNA, 1619 bp, Homo Sapiens
  NM_024021
aacattcctgcaaatggtttcaatatatgcagatgtctcgatataggaatgaaattacgtctttggaacaacttaaataagtcaaatatacttggagctttaaaaattaaaaggagagagattcgagcaccttttctgctgccatgacaaccatgcaaggaatggaacaggccatgccaggggctggccctggtgtgccccagctgggaaacatggctgtcatacattcacatctgtggaaaggattgcaagagaagttcttgaagggagaacccaaagtccttggggttgtgcagattctgactgccctgatgagccttagcatgggaataacaatgatgtgtatggcatctaatacttatggaagtaaccctatttccgtgtatatcgggtacacaatttgggggtcagtaatgtttattatttcaggatccttgtcaattgcagcaggaattagaactacaaaaggcctggtccgaggtagtctaggaatgaatatcaccagctctgtactggctgcatcagggatcttaatcaacacatttagcttggcgttttattcattccatcacccttactgtaactactatggcaactcaaataattgtcatgggactatgtccatcttaatgggtctggatggcatggtgctcctcttaagtgtgctggaattctgcattgctgtgtccctctctgcctttggatgtaaagtgctctgttgtacccctggtggggttgtgttaattctgccatcacattctcacatggcagaaacagcatctcccacaccacttaatgaggtttgaggccaccaaaagatcaacagacaaatgctccagaaatctatgctgactgtgacacaagagcctcacatgagaaattaccagtatccaacttcgatactgatagacttgttgatattattattatatgtaatccaattatgaactgtgtgtgtatagagagataataaattcaaaattatgttctcatttttttccctggaactcaataactcatttcactggctctttatcgagagtactagaagttaaattaataaataatgcatttaatgaggcaacagcacttgaaagtttttcattcatcataagaactttatataaaggcattacattggcaaataaggtttggaagcagaagagcaaaaaaaagatattgttaaaatgaggcctccatgcaaaacacatacttccctcccatttatttaactttttttttctcctacctatggggaccaaagtgctttttccttcaggaagtggagatgcatggccatctccccctccctttttccttctcctgcttttctttccccatagaaagtaccttgaagtagcacagtccgtccttgcatgtgcacgagctatcatttgagtaaaagtatacatggagtaaaaatcatattaagcatcagattcaacttatattttctatttcatcttcttcctttcccttctcccaccttctactgggcataattatatcttaatcatatatggaaatgtgcaacatatggtatttgttaaatacgtttgtttttattgcagagcaaaaataaatcaaattagaagcaataaaaaaaaaaaaaaaaaaaa

SEQ ID NO: 5177 - DNA, 1665 bp, Homo Sapiens
  NM_024025
gttggctggggagcccacgctgcctggcgactcgggccaccgaatgtgagaccgagtccctttatgtcaccagcgcacacgctgatttgaaccctgcttcgacgtgtgtgtcatggcttaaaaatagctgctaatctgtcaacctgtcttgggcagaaacagcggcggcgacagcagcaggagcgtcatggccgtggcgctgtctgcgccggcgatccgcctttcggactgaggcccagcgcagcgcttgcaaagagcagcagctacctggcaactgaacccatcatcaccacagccactcctgcagctgccacggtttctgccacctctaagatgtgccctggtaactggctttgggcttctatgacttttatggcccgcttctcccggagtagctcaaggtctcctgttcgaactcgagggaccctggaggagatgccaaccgttcaacatcctttcctcaatgtcttcgagttggagcggctcctctacacaggcaagacagcctgtaaccatgccgacgaggtctggccaggcctctatctcggagaccaggacatggctaacaaccgccgggagcttcgccgcctgggcatcacgcacgtcctcaatgcctcacacagccggtggcgaggcacgcccgaggcctatgaggggctgggcatccgctacctgggtgttgaggcccacgactcgccagcctttgacatgagcatccacttccagacggctgccgacttcatccaccgggcgctgagccagccaggagggaagatcctggtgcattgtgctgtgggcgtgagccgatccgccaccctggtactggcctacctcatgctgtaccaccaccttaccctcgtggaggccatcaagaaagtcaaagaccaccgaggcatcatccccaaccggggcttcctgaggcagctcctggccctggaccgcaggctgcggcagggtctggaagcatgaggggagggggagagaggtcaggccaggcccgtgggtaggtccctggctcccagctggagataggaggcccaggtggcaggtagcaggaggcccagatcacccatcctcccctggggtcaggagaggccgagccccaggccactgtcactctttgtgggaggggacggggagtgaggttgggcagtgtggtggatgggcacccaggaagggttgaccagggaaggaggcagctaggctgtagatggaagatggtcctgggattcgaacaccgctgggatctggccagggtgctccctgggattcacagtcccttcccctctttgtgcccaagtgtttccctctctccctcaccaaaacaaaagggccatctctgccctgcacttgtgcagaaagtcagggatacggcaagcatgaatgcaatggtgtagagttgtgtgaaacccctagcatagagacagacagcgaagagatggtgtgaaaagcttgcagaaccagacagagaaccccacagactttccactccaagcacaggaggaggtagctagcgtgtgagggttggcactaggcccacggctgctgcttgggccaaaaacatacagaggtgcatggctggcagtcttgaaattgtcactcgcttactggatccaagcgtctcgaggataaataaagatcatgaaaaaaaaaaaaaaaaaaaaa

SEQ ID NO: 5178 - DNA, 2671 bp, Homo Sapiens
  NM_024026
gcagcacccgccctgcgcctcggtggcagccgtccacgccgtcagtgcctggcggttcccgtgggacataccgtccactcgccacgcccctccgcccgcggcgcaccccacgcaccgtgccctggccgcccgcctcacgcaccgctttcctctccgtccagcgctcgctgcagccgggccgtctcgcagtccagcgtgctggccagagaccgcagcttcccgcagaagctccggatagggtccatgctgagcacagcggggaaggactccaggcgtacgcagaccccaccgctcagctcacagcctcccgccactagtttgaatctcggcgccggacgcgtcctcggctctgcgcaggcgcagtcctctctcgcgagagccgaagtctctcgccgaggccccaggagaccccgcgagacgggtgcgcttacgccacggcgtctgctggcggccgcggagacgcagagtcttgagcagcgcggcaggcaccatgttcctgactgcgctcctctggcgcggccgcattcccggccgtcagtggatcgggaagcaccggcggccgcggttcgtgtcgttgcgcgccaagcagaacatgatccgccgcctggagatcgaggcggagaaccattactggctgagcatgccctacatgacccgggagcaggagcgcggccacgccgcggtgcgcaggagggaggccttcgaggccataaaggcggccgccacttccaagttccccccgcatagattcattgcggaccagctcgaccatctcaatgtcaccaagaaatggtcctaatcctgagtcgtcacccttggattttatggatcacggagctgaccatctttacctggtcctggaactgaaaaactgtagcttgtgtgaaaatgagcctttggaccagtctttattaaaacaaacaaacatgagtagtctgcatatcgaatatctagagctctaaacccccaatacttaaaagtctaattgctgtcctgtggtttcattagtctgataggaagatagggatttcctcagtcacagatgatattttgaaggaaagctgcaataaagccacaatgatttgaggtctttgcttaagtatgagatacttgatgggggctttatcatgcaacattagtttgcttaccttaagaattgcccaaaaatgaaagaaaatatgagcttttcagttaaacatactcctaaaaacattttccgggattttactactaaaattggacatttaagcgaagtaaaagaggccgggtgcggtggctcacgcctgtaatcccaacactttaggagtccaaggcgggcggatcacttgaggtcaggagttcaagaccagcttggccaaggtgataaaacccgtctctactaatacaaaaaaaattagctgggtatgttggtgcaggcttgcaatcccagctacttgggacgctgaggtgggaggatcgcctgaacctcagaggcagaggttgcaatgaagcggaggttgcagtgagccgagagcatgccgctgcactccagcctgggagactgcatctcaaaaaagaaaaataaacgaagtaaaagatatttatcagaactgttacaggaaggtgtattttttagctattttggcagggtgctgtggtgcttgcatgtagtcccagctattcaggaatattgcttgagtccagcttgggcaacatagcgagaccctatctaaaataacaataatatatggccaggcgggatggctcacgcctgtaatcccagcactttgggaggctgaggcgggcagatcacttgaggccaggagttcaagaccagcccaaccaacatggtgaaaccctgtctccactgaaaatacataaaattagccgggtgcagtggtgaggcctgtaatcccagctactcaggaggctgaggcaggagaatcgcttgcacccaggaggtggaggctgcagtaagtcgagattgtgtcactgcactctagcctgggcgacagaaaaagaaaatttaggtggggaaaaaaatcagaattgcgtctgtgggaacaggaataaaggagaaaccactattgactgggaagacacacaaagaactttgtcaaagttgtatggctgaggcccacacggtggctcacttctgtaatcccatcactttgggaggcttaggcagaaggatcacctgagatcaggagttccagaccagcctggccaacatggcgaaaccccatctctactaaaaatacaaaaattagccgggcgtggtggcttacgcctgtaatcccagcactttgggaggccaaggtgggcggatcacaaggtcaggagttcgagaccagcctggccaatatggtgaaaccccatctctactaaaaatataaaaatcagcaaaaaaaatttagccaggcttggtcatgcatgcctgtaatcctagctactgggaaggctgaggaaggagaattgcttgaacccaggtggtggaggttgcagtgagctgagatcgtgccactgctctccagcctgcatgacgggagtgagacaccatctcaaaaaatacatataataatataaataaaaatatcttttttgaaaataatttaatataccatgtaatttaccagttgaagatgttcgctttcagaatataataaaaatagtcaaaaaaaaaaaaaaaaaa

SEQ ID NO: 5179 - DNA, 2509 bp, Homo Sapiens
  NM_024039
ctcgccgagatgacctgggcacctctgcgttgaatcggcaaatactgatcaagccgcatttattctgctctcaggaactctaagtctagcagagaagatgaggcggtagaagttcatcaatggcttggctggaggacaagcaaattgaggacattggcaacggagtgatcaaaatgatagatcatgaggcctaaaatgaataaggaaagaagagaagtggcagaggctgagaacagaaagagagggtggaggggctgtaaatcttgaagattagggtataatatgagtatatgggtaagaattggaagaattgtgtaggaggcagtagtcaaaaagtagaagcagtttggaagagtagttacaaatatcaagagccaggtggctaaaaggtggagctataggtcattgaagctcaagaaactgagtctctagggcattggttaagtcatctgtctagacttcaaagttgtctaggatgataattcagaagactgatctgtgccaaagtcacaggtttttcacgactgaaaacaacatagcaaaataagccaagatgtctgtggatccaatgacctacgaggcccagttctttggcttcacgccacaaacgtgcatgcttcggatctacattgcatttcaagactacctatttgaagtgatgcaggccgttgaacaggttattctgaagaagctggatggcatcccagactgtgacattagcccagtgcagattcgcaaatgcacagagaagtttctttgcttcatgaaaggacattttgataacctttttagcaaaatggagcaactgtttttgcagctgattttacgtattccctcaaacatcttgcttcctgaagataaatgtaaggagacaccttatagtgaggaagattttcagcatctccagaaagaaattgaacagttacaggagaagtacaagactgaattatgtactaagcaggcccttcttgcagaattagaagagcaaaaaattgttcaggccaaactcaaacagacgttgactttctttgatgagcttcataatgttggcagagatcatgggactagtgattttagggagagtttagtatccctggttcagaactccagaaaactacagaacattagagacaatgtggaaaaggaatcgaaacgactgaaaatatcttaattgctcagtagtcaaaaggaggagcctgtcaaaaagtagaatcataaggactgttcaaaccataaggactgttcaaatcataccagtgactgttcaaaccaaccatactttttattagatttgctttgtcaactctttcttgtattctgtgttttcctcttttttggtccactttgctgaggtatgaagtgtactactttgaactaggctgaagcatctgagtcttctaataagtgggaagggatccaacaaagaagccatgaccagttaaagatatttgcagagttacaccttggtcataagtcctttgtgaccttgattattttggcttactctttggatgagaccagacaagaaaaggattaaacgggtggctcctttaatattattattattgtttttgagacaaggtccctttctgtcacccaggttagagtagatttcagtggcacaatcttggctcactgcaacctctgtgtcctgggctcaagtgatcctcctgcctcagcctcccaagtagctaggaccacaggtgcgtgtcaccatgcttggctaatttttttgcagaaacgaggcctcactatattgtccaggctgagtggctcttttattaaccagtcattacactgcggaacagccaacatagagtacttgctctcgtcctgtgaattttctttcatgagggagtcaatatgtagtggaaagaagcatgtagcaaaaaagacaaccttgatctttaataaaaaagaagttggtttatttccaaaataaatcccctgacaaaaaacctggtgatgttaagcaattgactgtcttagagtccagcagaagaccttagacaaaaaaagcagaacccactggagtagaaaaggaagcatgtagcatatactcagtagtgaaatttaattttactgactgttaggtatctatgccaatttgttttcatacttcagttggttttggaatctgccttatacctaatatttatttattcacactcataagcatcaaatatttaatgccctcagtgggaaatttgtgtttaaactcaatggaatctaatatttctttatgtcgttagtccctgtaaaatgttaggtcacccaaggaaaggggagaaatagcaatggttgttcctaaggtattgcttgccctccatgtcttcctaaagagcagaacttggagtttctcctttatgtagagaagaagtaacttagggtgtatttgcaatgaaatattcatagatattgaaagcttgtgtttacatgaaatatgtttattatcaagaagtcctttttccaattctgtacattaaatatatgtgttttaaaaaaaaaa

SEQ ID NO: 5180 - DNA, 1203 bp, Homo Sapiens
  NM_024040
aacttgcccttctcaaacatggccgccacggcgcctctggaagggaaccgctctgggccccgcctttgatctcgttggtggggctgggggatgagagctgcaccgcgcgggacaagtcgccggcggcgcccgacggagcagaagagagagcatggagctggagaggatcgtcagtgcagccctccttgcctttgtccagacacacctcccggaggccgacctcagtggcttggatgaggtcatcttctcctatgtgcttggggtcctggaggacctgggcccctcgggcccatcagaggagaacttcgatatggaggctttcactgagatgatggaggcctatgtgcctggcttcgcccacatccccaggggcacaataggggacatgatgcagaagctctcagggcagctgagcgatgccaggaacaaagagaacctgcaaccgcagagctctggtgtccaaggtcaggtgcccatctccccagagcccctgcagcggcccgaaatgctcaaagaagagactaggtcttcggctgctgctgctgcagacacccaagatgaggcaactggcgctgaggaggagcttctgccaggggtggatgtactcctggaggtgttccctacctgttcggtggagcaggcccagtgggtgctggccaaagctcggggggacttggaagaagctgtgcagatgctggtagagggaaaggaagaggggcctgcagcctgggagggccccaaccaggacctgcccagacgcctcagaggcccccaaaaggatgagctgaagtccttcatcctgcagaagtacatgatggtggatagcgcagaggatcagaagattcaccggcccatggctcccaaggaggcccccaagaagctgatccgatacatcgacaaccaggtagtgagcaccaaaggggagcgattcaaagatgtgcggaaccctgaggccgaggagatgaaggccacatacatcaacctcaagccagccagaaagtaccgcttccattgaggcactcgccggactctgcccgagccttctaggctcagatcccagagggatgcaggagccctatacccctacacaggggccccctaactcctgtcccccttctctactcctttgctccatagtgttaacctactctcggagctgcctccatgggcacagtaaaggtggcccaaggaaggtgaaaaaaa

SEQ ID NO: 5181 - DNA, 2575 bp, Homo Sapiens
  NM_024045
gcatggccaaggccgggcggccgccttgcccccgcttcctttcacgctgtcgctgcccgtaggtggttgtggccactgtgcccggagggaggcggcggtggccagtaatgcctgggaaactcctctggggggacattatggagctggaagcacccttggaggagtccgagagccagaagaaggagaggcaaaagagtgacagaaggaagtcaaggcaccattatgactcggatgagaaatcagaaacaagagaaaatggtgttacagatgacctggatgctcccaaggccaaaaaatctaaaatgaaagagaagctaaatggagacactgaagaaggatttaatagactttcagatgaattctccaaatctcataagtcaagaagaaaagatctaccaaatggagatatagatgaatatgaaaaaaaatcaaagcgagtatcatctttagatacttctactcataaatcaagtgataataaactagaggagaccttaacacgtgaacagaaagaaggagccttctccaattttcctatttctgaagagactataaagcttctgaaaggtcgaggggtaacatatctctttcctattcaagttaagacctttggtcctgtatatgaaggaaaagatttaatagctcaagcacggacaggaacaggaaagacattctcttttgccatccccttaattgaaagactccaaagaaatcaagaaacaattaaaaaaagccgctcaccaaaggtacttgttttggctccaacaagggaactggcaaaccaagtagccaaagacttcaaagatataactaggaaactcagcgtggcgtgtttttatggtggaacatcatatcaaagccaaattaatcatattcgaaatggtattgacatcttggttggaacacctggtcgtatcaaagaccatctgcagagtggccgattggatctttctaaactgcgacatgttgtgcttgatgaagtggatcagatgttagatttaggtttcgctgaacaagttgaagatattattcatgaatcctacaaaactgattctgaagacaatcctcagactttacttttttctgcaacttgcccacagtgggtatacaaagttgcaaaaaaatacatgaaatccagatatgaacaggttgaccttgttggaaaaatgactcaaaaggctgcaactactgtggaacatttggccatccagtgtcattggtctcagaggccagcagttattggagatgtccttcaagtctacagtgggtctgaagggagggctattattttctgtgagaccaagaagaatgtaactgaaatggccatgaatccacacataaaacagaatgcccagtgtttacatggggacattgcacagtcacaaagagaaattacactaaaaggcttcagagaaggtagttttaaagttttggtggcaaccaatgtggctgcccgtggtttggacattcctgaagttgacctggtgattcaaagttctcctcctcaggatgttgagtcctatatccatcgctctggacgcacaggtagagctggacggacagggatttgtatatgtttttatcaaccaagagaaagaggtcaactaagatatgtggaacaaaaagcaggaattacttttaaacgtgtaggtgttccttctacaatggatttagttaaatctaaaagcatggatgccatcaggtctctggcttccgtttcttatgctgctgttgattttttccgaccatcagctcagagactgatagaagagaaaggtgcagtggatgcattggctgcagctttagcccacatttctggtgcatcaagctttgaaccacgatctttgatcacctctgataaggggtttgtgaccatgactctggaaagcctagaggaaatacaggatgtcagctgtgcttggaaagaacttaacagaaagctgagtagtaatgcagtgtctcagattaccagaatgtgcctcctgaaaggaaatatgggtgtttgctttgatgttcctacaactgagtcagaaaggttacaggcagagtggcatgattccgactggatactctcagtgccagccaaattacctgaaattgaagaatattatgatggaaacacatcttctaattccagacagaggagtggctggtcaagtggtcgatcaggccggtcaggccggtcaggtggtcgatctggcggccggtcaggtagacagagtcgacaaggaagtcgctcaggaagtcgacaagatggtagaagacgaagtgggaatagaaatcgatcaagaagtgggggccacaaacggagttttgactgagtatttgatagttaatctaccagtgtgagcttgcctatttctgcctaatcatgtacattatccaccaaaaattaggtcatcatagttgaggtatgtgtctgctatttgcaaagaagttggtcgtatttttttaaaaagtatttcacaagaatggaacaaatctacttatccagttatacctttgaataaaaaaacctccttttattgtctcttttcaaaaaaaaaaaaaaaaaaaaaaaaaaaaaaaaaaaaaa

SEQ ID NO: 5182 - DNA, 1792 bp, Homo Sapiens
  NM_024048
gcttccctgcttgatctgtgtaccctgctctttctccttcattccgcagcctcctttgccctgtgacctgcaggtactggacggtccctagagaggataccgggacgctcctgaagccgcgagatgatttcaagcagatgcagcctgaccattagggccaaggccaaattgcaaaaaaaaaaagaagtttgcctttattctactccatccacatctaaactttggaggtcaaggctgtggacagatcagaagacatagttccctccttctggggctccacatccttcattcactgatctctgggaaggaggatgggtggcaggatgggtcttccatgatactgaagggagagccacatgttgatgcccaggaccagctgcctccttggtctgaaaggcctgatcgaggccaggattggctatgagagctgggaaatgggaccatctttgaagccatgggagagggtgagagccaccatcactcatgttcttgaatgggaactgcctggagaccctgaagaagaaggagcctgaaggaggaaggaggaggctgagccatcccgggaacatgggctggatgaggccaagccaggagacgacaccaccagatagaagtcaccattcaggatttggacttttctgtggagatcctggccccgagatcgaacccttctccctgtgggtgttcccgcaggagatggtgctggagatccaccagctgttcatggaccatgaatacccatgtcaccacatcacttctcactgcacctgggtggcagcacactggaccacgtctcagagctgcgcagcatggcagggctgcaggcgggcttgctgctccacgtggtggaagagccctgcacaatgcacaaggcccacggtgatgagtgccacatttgagactgctcaggagcctggacccagctgatgcagctccttgtccttcctgagcgtcttcactgacagtggcctgagagacggcaggagcagaaagacttggagatggaccccaccgactgcacaccacccaagtacatcctgctagggaccctggaacagccactgtgtcccctgcaaccccagaacggtgactaaaagcccctgaaagtgctcaccgtgagcggctggtacctgtcccctgggaactgcaagatgcacaggaccttgtgtacctgtttgtgatcacagccgaggaccagcgaggtagcattaccacatccacacagggcttttaccataaccgccccagtactggaacgaggagctgcagatgatgagggacctacccaacaagaaccaacctgagcagctgcttcaagaaaaagccatgttcaaggtgcctgaatcccctggtaagtgagtgacagcctcacagcctcaggcccacctggctcctgctggaaggttttcttgtgctcgggagagaagtgagggaagccggcagtcccagccctgtcaggtgccctgaaggcccgtcaggtttgccctgcaaggccttctagcattctgcttcctgggagaccatcccccacctttctccggcctctgagactttgagtccttgggaggagaaggccctccttgctatctgggctgagtggccagggccatccagcttcccaccctccactgactgccatggggccctcccctgagcacatggtgcccaactgtagcccttctagggcaggggctcattggcagcacttgcagcttgctggcacttaaaagtcattagtgcggttactgagagaaatgaggaaaaaataattgttaaaaaaaaaaaaaaaaaa

SEQ ID NO: 5183 - DNA, 4078 bp, Homo Sapiens
  NM_024050
ggtggcgccatcagtgtgggctgtgccgtggctggaagttactgtgaggcggcggctaagaaggcggctctggtggcggcggtggaggctgaggcggcggccgaggcggcgacggaggaaacagaagatggcagattttttgaaaggactgcctgtctacaacaaaagcaattttagtcgatttcacgcggactccgtgtgcaaagcctcgaaccgacggccctcagtctacctgcctacccgcgagtacccgtctgaacagatcatcgtgacagaaaagacaaacatcctcctgcgctacctgcatcagcaatgggacaaaaagaacgctgccaagaagagagaccaggagcaagtggagctggaaggcgagagctccgcacctccccgcaaggtggcgcggaccgacagcccagacatgcacgaggacacttaagactctcaactccacaggcgcctcctgccaggtctgctcctcggtcgcccacccgcctgcccgccatgtgtaagcaccccgcccgcccgcctccctgccggcccatccacaccctgcgtccacaccacttccaacctcataggagccgatgtatttattttccttgagtttttatttatgctgtaacctgtatcaagcgttggttaaaggggacatcagacccagtagtgtgatgttggtagatgctttttaaaaaaaacaacattgtccccccgacccccgccttccatcgggccagttccccgattcctgcccccagttctccagagaaccagagtgtgtctgtgagagtctctagcgggggctttactgtggccgggcgacaggggcgggcccggggtggcctgacctaccaggacagccgagtggccttctcccccccaacaccggtccaggccattgagactcggtcttgtcccacgcttcgcccggaactttcccatgcccaggcctcactcagcgtgcacgcacgttggggagaagtcggcccttgggatctttctcttgagtcattttatttttatcatggactagtgcgtgctccgtgtccaccccaataaaagggtctttcctacttgacctcgcgtctttgctccacacaccttggctgcagaggacggagcccctgggagtcatccctgttgtcaccaagaggagtgagaagggccccccacgccaggggccccaggaccggctggattctctcgtgggcttgctgaggccaccatgttcaaggccaagacctgcctggaccatcccctctgcctctcctgtcaaggtgaccccaaggacaggtcattcctgagagacggtccatggtgccaaggatggagcggggtcagccccctgcctgggataccgccaagcagggcagcgcacctgtcagacaccgcagagatggccggcctcatccgggggcctggggtctctggcctctgctgctcccctgaggcatggtgacagtacagacggcatctggccggtcttgctgtcctaggtggtggcctcacccttgctgggtcatagaggagctgtacagaaggttggcacctggcagttggcatgtgccatggccgctcatggggacccctcttccgccagctgggctgggtttggggctgagcttgggtatgtaggggtgttcgggctctgggcagaaggtttgtggccctgaccactgagcctggggctgggggaacaccgcttctccccttattgcccccactggtggtggtggggatctcagttttcttttgttttgttttgtttgtttgtttgagttggggtcttgtactctttcccaggctggagtgcagtggcgtaatcacagctcactgcagcctcgacctcaagccttcctcccacctcagccttccaagccgctgggaccacaggcacccaccaccatgcctggctaatttttttttttttttgagatggagtctcgctgtgtctcccaggctggagtgcagtggcaagatctcagctcactacaacctctgcctcccaggttcaagtgattctcctacctcagcctcctgagtagctgggattacacgcgtgcgcccctacacccagctaatttttctatttttagtggagacggcgttttgtcatgttggccaggctggtctcgaactcctgacctcaggtgcttcgcctgcctcggcctcccaaagtgctgtgaccgcacctggctgcctggctaatattttaaaaattttttgtagagacagggtttcaccatgttgcccaggctggtctcaaactcctgggctcaagtcatccaccttcctcagcctcccaaagtgctggggttacagacgtgaaccaccgtgcctggcagaggtctctgttttgagagctgagtctgagggcgttgggatggtgtagggttgggccacagagctagcagacactccgggctatggagggtccgcctgccccagattccactgtggagggccctgcctgtgtcagaccctcgggcctaggcggcccatctctcccaaggacggagagtgccagggtgggctcccgtcctacacaaggagtggctgaccaggcccaggcacagcacagccaccctgctgtacctcccagctcccggcagtgtctacaccacagtgatggtgctacaggggccatgtggtcacaggacaggtggtcaggaaatgcacacttgactgcggtcgatggtgccgggtccggctgaatgccctggaggctcccaggccagctggggagtcccagtccccagggttggtgtgacctgggcaggcctgcggtgtccatctgtgaatgactgagatggtgggacttcagcttccaaggccaggggccagagtgggagcagggggcactcccgcctttcccctcggcctgtctagacctctctggctcccagtttctgctttgagtggctgggggctgtctcctgcctgtgctgtctgcccgtcgctctgcagggctgctgggcgggcacctccttcccctcccctacctcagctccctcctttggggtctgagggctgtgccccagcttgcctccctgtggcctccccctagaacccctgggtctgtcgggacatgccccacctggcacacacaccctgtgtagctcccactgcctgtgggaggacgctgggcccctgagccggcctctgtctacccctcctgcctttggggtcccctttaccccactgttcccccaaactgccttccaccttctccgcctttgcacaggctgttctcctgcctccagtgaactctgacttctccacagcctcccaaagggccccttgctcacactggcccagccctgcagcatggccatgttggtctctgagccttaagcctttggatgtggacacatttgtcctcttcctgaaaaatgtgagggtctgagaggccacgttcctgttcctgagtcatacgacagagtcccagtgacttgggtctgatgtctgtcccacagtgggacatccctgctgcatcccaatgccaccccgtgtcctggggacacccaaatgtgccattctctcagtatcacaagtcggggactgcaggaggctcaggtgccaggtgccttctgatgttcatgccacaagctcttcccactgtctctggctccccagacgatgttccaggaggcgggtgtgccagaaggggccacgtcttgcaaaccaccgcgctgtcctctttgagaaggagtcttactcaggactggggcctgtgcacacattgtcgcctcttttcagcacttagagattccttcctttgtctagtggctgaagccagggctgaagttggcctccaaatctgggccgtctcagaggcggcgcagcctggagttttccatctgtggccaagacccagtttttgggaggaggccctcatgggtcaagccagcctgtaccaggatggggggagggggttcccaacctaggccccagccacccagactcccccacccccactcccttttccactgctctgacctcgggcactgttgaaatatagtttttattgcatttctgccgttttacaaaaatatgacaaaataaattaaaaacaaataaa

SEQ ID NO: 5184 - DNA, 1197 bp, Homo Sapiens
  NM_024051
cttcccgccagtcccctaaccctgaggctgccgcgcggcggtcactgcgccggggtagtgggccccagtgttgcgctctctggccgttccttacactctgcttcaggctccagtgcaggggcgtagtgggatatggccaactcgggctgcaaggacgtcacgggtccagatgaggagagttttctgtactttgcctacggcagcaacctgctgacagagaggatccacctccgaaacccctcggcggcgttcttctgtgtggcccgcctgcaggattttaagcttgactttggcaattcccaaggcaaaacaagtcaaacttggcatggagggatagccaccatttttcagagtcctggcgatgaagtgtggggagtagtatggaaaatgaacaaaagcaatttaaattctctggatgagcaagaaggggttaaaagtggaatgtatgttgtaatagaagttaaagttgcaactcaagaaggaaaagaaataacctgtcgaagttatctgatgacaaattacgaaagtgctcccccatccccacagtataaaaagattatttgcatgggtgcaaaagaaaatggtttgccgctggagtatcaagagaagttaaaagcaatagaaccaaatgactatacaggaaaggtctcagaagaaattgaagacatcatcaaaaagggggaaacacaaactctttagaacataacagaatatatctaagggtattctatgtgctaatataaaatatttttaacacttgagaacagggatctgggggatctccacgtttgatccattttcagcagtgctctgaaggagtatcttacttgggtgattccttgtttttagactataaaaagaaactgggataggagttagacaatttaaaaggggtgtatgagggcctgaaatatgtgacaaatgaatgtgagtaccccttctgtgaacactgaaagctattctcttgaattgatcttaagtgtctccttgctctggtaaaagatagatttgtagctcacttgatgatggtgctggtgaattgctctgctctgtctgagatttttaaaaatcagcttaatgagagtaatctgcagacaattgataataacattttgaaaattggaaagatggtatactgtttttagaggaataaacgtatttgtggtttaaaaaaaaaaaaaaaaaaaaaaaaaaaaa

SEQ ID NO: 5185 - DNA, 947 bp, Homo Sapiens
  NM_024053
ggctggactcagggcggtttgaaagatcggcgcgcaccgcaggagcaacggttggtcctgcggctgtgatgtcggtgttgaggcccctggacaagctgcccggcctgaacacggccaccatcttgctggtgggcacggaggatgctcttctgcagcagctggcggactcgatgctcaaagaggactgcgcctccgagctgaaggtccacttggcaaagtccctccctttgccctccagtgtgaatcggccccgaattgacctgatcgtgtttgtggttaatcttcacagcaaatacagtctccagaacacagaggagtccctgcgccatgtggatgccagcttcttcttggggaaggtgtgtttcctcgccacaggtgctgggcgggagagccactgcagcattcaccggcacaccgtggtgaagctggcccacacctatcaaagccccctgctctactgtgacctggaggtggaaggctttagggccaccatggcgcagcgcctggtgcgcgtgctgcagatctgtgctggccacgtgcccggtgtctcagctctgaacctgctgtccctgctgagaagctctgagggcccctccctggaggacctgtgagggtggctggcccctgggctgccccttctcatggcttcgtgctgactccataaacattctctgttgaggatgtccagtcagggcttgacaggcccaggctcagcccgccgtggctgggaaggttccctgcagtgccagtgctgcagcagggagagctgggcagaagcagcgagggggcccagctggcgagactgtagccccctcccactcccacactcactcttgcagagcctgtgtctttaagcagctggcgtgttacatctccatttaaggtttcctttgaacaaaaggtctgtggctaaaaaaagtttaaaaatcaaaaaaaaaaaaaaaaaa

SEQ ID NO: 5186 - DNA, 1108 bp, Homo Sapiens
  NM_024060
agacccgcccgcccgagccggagttacaagagccgcctccgcgcacgggggcccggccactcggagctgctctgccgcggggactgcaccgcccgccctgccagacccgcccggaacggggctcgtcgccgccagtagccgcagcaccgcagccttgggcctcgcgccggctatggccgtgccctggggctgagccctcaggttgtgaccgagattcccgacgagagagactgaggggaagagaggaaggaggggcgggctcctggcaaggcattcgctcctgagcggaatcctgcaaagatggagaaggaggagacaacccgggagctgctgctgcccaactggcagggtagtggctcccacgggctgaccatcgcccagagggacgacggcgtctttgtgcaggaggtgacgcagaactcccctgcggcccgcactggggtggtcaaggagggggaccagattgtgggtgccaccatctactttgacaacctgcagtcgggtgaggtgacccagctgctgaacaccatggggcaccacacggtgggcctgaagctgcaccgcaagggggaccgctctcccgagcctggccagacctggacccgtgaagtcttcagctcctgcagctctgaagtggttctgaacacaccacagccatcagcactggaatgcaaagaccagaacaaacagaaggaagccagcagccaagccggggcagtttcagtctccaccccaaatgcaggactgtagaagcggccaggaagaaaaccaccccctcttaaggttgtttttgtgaccgttctttggagcattgttctaaaaatgggaaattacatattgctgtgccaagggcaacaaacacctgcagttaaaggaataccttccgcgaggcggcttttcggagcatgcatgtttatagctccagccaggccagaccgagggctgctgcataagccctgcttggtgcatttctttacttgcaaggggacagagtgtgggcttaggtttgggactagagggggctttggcaactatggtgctcaggtgattatccttcgctcgtttatccaataaacatttatcaagcatcaaaaaaaaaaaaaaaaaa

SEQ ID NO: 5187 - DNA, 2580 bp, Homo Sapiens
  NM_024063
ctagcgcatgcgcgcaatctgcttccggcctgcgagctcggtgttccgctttttgtgggccgggtgggtttcctaatctggtttcgtctgcctggttcatctgtgtgcgatggctccggactcggatcccttccctgaagggccgctcttaaagctgctacccttagacgctagagaccggggcacccagcgctgccgcctgggcccggccgccctccacgccctgggcgcgcgcttgggctcggcagtgaagatctcgctacccgacggcggctcctgcctctgcactgcctggcctcggcgggacggagcggacggctttgtgcagctggacccgctgtgcgcgagccccggggcggcggtcggggcgtcgagatcccggaggagtctcagcctgaatcgcctcctcctagtgccctgtccgcccctgcggcgcgtcgccgtgtggccggtgttgcgagagcgggcaggcgcgcccggtgcccggaatacagccgcggtgctggaggcggcacaggagctgctgagaaaccgaccgatctccctgggccacgtggtggtcgctccgccaggcgctcctggcctggtggctgccttgcacatcgtcggcgggacgcccagtcccgatcccgctgggctggtcacccctcgtacccgcgtcagccttggcggggagcctccgtcggaagcccagccgcagcccgaggtgcccctgggaggtctttcggaggcggccgactcgctgcgggagctcctccgcctcccgctccgctacccgcgcgccctgaccgcgctgggcttagcggtgcctcgcggggtgctcctggcggggccccccggagtgggcaagacccagctggtgcgggccgtggcgcgcgaggcgggcgcggagctgctggcagtcagcgccccggcgctgcagggttcccggcctggggagaccgaggagaacgtgcggcgggtcttccagcgcgcccgggaactggccagccgcggacccagcctcctcttcctggacgagatggacgccttgtgtccccagcggggcagtcgagcacccgagagccgcgtagtggcccaggtgttgacgctgctggacggcgccagtggggaccgcgaggtcgtggttgtgggagccactaaccggccggacgctctagacccagcgctgcgtaggcccgggagatttgaccgagaggtggtcattgggactcccacacttaaacaaagaaaggaaattctgcaagtgattacctcgaagatgcccatctccagtcatgttgatttgggccttcttgcagaaatgacagttggctatgttggtgccgacctgacagcactctgtagggaggctgccatgcatgccctccttcatagtgagaagaaccaggacaatcctgtgattgatgaaatagacttccttgaagcttttaaaaatattcagccctcatcgtttcgaagcgtcattggattaatggatatcaagcctgttgactgggaggagattggtggccttgaagatgtaaaactgaagttaaaacagagcattgagtggcctctgaaattcccttgggaatttgttagaatgggcctgacacaaccaaagggagttctcctctatgggccccctggatgtgctaaaaccactctggtgagggccctggccacaagctgtcactgctctttcgtttcagtgagtggagctgatctgttttcaccgtttgttggagattcagaaaaagtgttgtctcagatatttcgacaagcaagagcaagcactccagcaattttgtttttggatgaaattgattcaatcttgggagctcgctcagccagcaagacaggatgtgatgttcaagaacgagttctttctgttctcctgaatgaattagatggtgttggacttaagacaatagagagaagaggaagtaaatcaagtcaacaggagtttcaagaagtttttaaccgaagtgtcatgattattgcagcaacaaatagacctgatgtgttagatactgctttgttacgacctggaagattagataagatcatctatatcccacctccagatcacaagggcaggctttctattttaaaagtctgtacaaaaaccatgccaatagggcctgatgtctccttagaaaacctcgcagcagaaacctgttttttttctggagctgatcttagaaacctctgcacagaagctgctttgctggctctgcaagaaaatggactagacgcaactacagtgaaacaagagcactttctaaaatcacttaagactgtaaaaccgtcgttaagttgcaaggacttggctttatatgaaaacttatttaagaaagaaggattttctaacgtggaaggtatttaaaaatcaccttaaactcttgttcagttcacattaattgaaatgtgaacttgcctgtcgtttgcaacttcacacttttagaatttgtgtttatatttcctgtaagtgaataaataaaacaaaacaaaacaaaaaaaacttgtgcctgataagctaaggctcatttatttttaaaaggcatattaaataaaatactgtaatttaggaagaaa

SEQ ID NO: 5188 - DNA, 1086 bp, Homo Sapiens
  NM_024065
gaaggctgggctgggggaagaggcgtggcggcgctgtgcgcgtgcacaaaagagagctgaggggcgggggcgctgcggcacagctggtttgagcaactgaactggaaacaagatgcaggaccccaacgcagacactgaatggaatgacatcttacgcaaaaagggtatcttaccccccaaggaaagtctgaaagaattggaagaggaggcagaagaggagcagcgcatcctccagcagtcagtggtgaaaacatatgaagatatgactttggaagagctggaggatcatgaagacgagtttaatgaggaggatgaacgtgctattgaaatgtacagacggcggagactggctgagtggaaagcaactaaactgaagaataaattcggagaagttttggagatctcagggaaggattatgttcaagaagttaccaaagctggcgagggcttgtgggtcatcttgcacctttacaaacaaggaattcccctctgtgccctgataaatcagcacctcagtggacttgccaggaagtttcctgatgtcaaatttatcaaagccatttcaacaacctgcatacccaattatcctgataggaatctgcccacgatatttgtttacctggaaggagatatcaaggctcagtttattggtcctctggtgtttggcggcatgaacctgacaagagatgagttggaatggaaactgtctgaatctggagcaattatgacagacctggaggaaaaccctaagaagccgattgaagacgtgttgctgtcctcagtgcggcgctctgtcctcatgaagagggacagcgattccgagggtgactgaggctacagcttctatcacatgccgaactttcttgtgacaaattgtctggattttttaaaaaaggaaaaagcaagaatgaatccttgtggtttttagttttgtataaattatgtttcaaatctttacattttggaaataatcattgctggagattctgttaaatattttggaactctttttttttttaaattatagtatttcctctaaaaaaaattaaaaccagccatttgtatggcaaatgtcaaaaaaaaaaa

SEQ ID NO: 5189 - DNA, 1913 bp, Homo Sapiens
  NM_024067
atgagcgacatccgccactcgctgctgcgccgcgatgcgctgagcgccgccaaggaggtgttgtaccacctggacatctacttcagcagccagctgcagagcgcgccgctgcccatcgtggacaagggccccgtggagctgctggaggagttcgtgttccaggtgcccaaggagcgcagcgcgcagcccaagagactgaattcccttcaggagcttcaacttcttgaaatcatgtgcaattatttccaggagcaaaccaaggactctgttcggcagattattttttcatcccttttcagccctcaagggaacaaagccgatgacagccggatgagcttgttgggaaaactggtctccatggcggtggctgtgtgtcgaatcccggtgttggagtgtgctgcctcctggcttcagcggacgcccgtggtttactgtgtgaggttagccaaggcccttgtagatgactactgctgtttggtgccgggatccattcagacgctgaagcagatattcagtgccagcccgagattctgctgccagttcatcacctccgttaccgcgctctatgacctgtcatcagatgacctcattccacctatggacttgcttgaaatgattgtcacctggatttttgaggacccaaggttgattctcatcacttttttaaatactccgattgcggccaatctgccaataggattcttagagctcaccccgctcgttggattgatccgctggtgcgtgaaggcacccctggcttataaaaggaaaaagaagccccccttatccaatggccatgtcagcaacaaggtcacaaaggacccgggcgtggggatggacagagactcccacctcttgtactcaaaactccacctcagcgtcctgcaagtgctcatgacgctgcagctgcacctgaccgagaagaatctgtatgggcgcctggggctgatcctcttcgaccacatggtcccgctggtagaggagatcaacaggttggcggatgaactgaaccccctcaacgcctcccaggagattgagctctcgctggaccggctggcgcaggctctgcaggtggccatggcctcaggagctctgctgtgcacgagagatgacctgagaaccttgtgctccaggctgccccataataacctcctccagctggtgatctcgggtcccgtgcagcagtcgcctcacgccgcgctccccccggggttctacccccacatccacacgcccccgctgggctacggggctgtcccggcccaccccgccgcccaccccgccctgcccacgcaccccggccacaccttcatctccggcgtgacctttcccttcaggcccatccgctaggctggcccgtgtgtgccttctgcgctctcgctggacgaagcctttcgagatggaaggggtggccggactcccagaagagaacctcggggaaggggtcgggcagcccctccccgccggcagaaccgtcttggtgtcacggagtccaggtgcttcccacccggtcgcattctttgacatgcagattggatggtggagggaagagtccagcctctgccgagagcctgctgcgtgcatttttaaaagatgccgatcctgggagcctctgttctctgcgcatttcagacacagcctgtgtggcgaggagtgtgacggcaggagccacgggtgcaagcccgtgtgtctggcctctttcctcgtgaagacgatgtgtccccgccagaaaaagtgggcaccttctgcagccccgtgagctgagcccaggctgcgtagtgaccacaagcttatgtgcagcactgctcagggaggctgtcaggaattcccctcacctcggaaaggaacttctcagttttattgggggtgtctaaatttcctttcatatgttcaaataaatttttctaaacagt

SEQ ID NO: 5190 - DNA, 1587 bp, Homo Sapiens
  NM_024070
gggcagaggactgctgtttgctgacacaatcttggtgcgttggaagtgaaagggaagaggcactggtggctgtgctttgggcccgagcagccagaagccagttgccatcacctatgacgaggagacagcgcctggggcagagcccagtatggggcctagccagggctgggttctcacccacctgtgccgccctgccttgttacctggaagcacagccttggggactgagcaggccctcactgtcactttaagaagggaatcagccactttgtgctcaccacctctggggaaggtgtgagaggagagaaggaagtggctgtttggctgctgacaacatgaagacttcctgcgatgagaacagaggcacaggtgccggccctgcagcccccagaacctggactggagggggccatggggcaccggaccctggtcctgccctgggtgctgctgaccttgtgtgtcactgcggggaccccggaggtgtgggttcaagttcggatggaggccaccgagctctcgtccttcaccatccgttgtgggttcctggggtctggctccatctccctggtgactgtgagctgggggggccccaacggtgctggggggaccacgctggctgtgttgcacccagaacgtggcatccggcaatgggcccctgctcgccaggcccgctgggaaacccagagcagcatctctctcatcctggaaggctctggggccagcagcccctgcgccaacaccaccttctgctgcaagtttgcgtccttccctgagggctcctgggaggcctgtgggagcctcccgcccagctcagacccagggctctctgccccgccgactcctgcccccattctgcgggcagacctggccgggatcttgggggtctcaggagtcctcctctttggctgtgtctacctccttcatctgctgcgccgacataagcaccgccctgcccctaggctccagccgtcccgcaccagcccccaggcaccgagagcacgagcatgggcaccaagccaggcctcccaggctgctcttcacgtcccttatgccactatcaacaccagctgccgcccagctactttggacacagctcacccccatggggggccgtcctggtgggcgtcactccccacccacgctgcacaccggccccagggccctgccgcctgggcctccacacccatccctgcacgtggcagctttgtctctgttgagaatggactctacgctcaggcaggggagaggcctcctcacactggtcccggcctcactcttttccctgaccctcgggggcccagggccatggaaggacccttaggagttcgatgagagagaccatgaggccactgggctttccccctcccaggcctcctgggtgtcacccccttactttaattcttgggcctccaataagtgtcccataggtgtctggccaggcccacctgctgcggatgtggtctctgtgtgtgcgtgtgtgggcacaggtgtgagtgtgtgagtgacagttaccccatttcagtcatttcctgctgcaactaagtcagcaacacagtttctctgatgtcgaaaaaaaaaaaaaaaaaa

SEQ ID NO: 5191 - DNA, 4935 bp, Homo Sapiens
  NM_024076
gggggcgagagagaaagtaactccaggacgagaccggagcgacccgcgcagcgagcataggcggcgaagctgcgcccggcgcccgagaccggcagctgcgtggggcgggggctgcgcccgagcccgatctgccggctccgagcagtggtctcggaaagagggtcgtggtcccgcacggatgcgcttgttgggagaaaccttggagattcacggcaaggcgtaaagcctggggcttccaacgatactctgggcagggatggaagcctagatgcctcaccgcaaggagcggccgagcgggtcctcgcttcacacacacggcagcaccggcaccgcggagggaggaaacatgtcccggctgtctctcacccggtcgcctgtgtctcccctggctgcccagggcatccccctgccagcccagctcaccaagtccaatgcacctgtgcacatcgatgtgggcggccacatgtacaccagcagcctggccacgctcaccaagtaccctgactccaggataagccgcctcttcaatggcactgaacccatcgtcctggacagtttgaagcaacattatttcattgaccgggatggggagattttccgctacgtcctgagcttcctgcggacgtccaagctgctgcttccggatgactttaaggacttcagtctgctgtacgaggaggcgcgctactatcagctccagcccatggtgcgcgagctggagcgctggcagcaggagcaggagcagcggcgccgcagccgggcctgtgactgcctggtggtgcgcgtcacgcccgacttgggcgagcggatcgcactcagcggcgagaaggccctcatcgaggaggtcttccccgagaccggagacgtcatgtgcaactccgtcaacgccggctggaaccaggaccccacgcacgtcatccgcttcccgctcaatggctactgccggctcaactcggtacaggatgttctataaaaatggcccagagtattttcaacaaagcgtgcttcatttgacacccagagtctgactttggattcgaactaaacccaggcaacaggcgaggcaggacagaggctgagtggaaaggtggtctggagccccttccctctccctgctgacctgggagtcgcaggcacccaccagctgccaagagaatccctggaccggctcttcctggatgggtccaagaattggacagctcagatggagtgagggcctattttccaacagctcttcgcagacccaagagcttggcacatttccgggttagggtggaatgggctttgcagggaagagggccccctgtgcacgcattccacagcctgtcggtcagaacttgctagttgcaggagacgggtgttacacgcagtcatcagacctcaccctcacagaggcacaaacccacatagttgtggacgcctgcagagactcaaatattgagaggacttctcctttttctctccctccagagctcccacgagctgatgcacccccaggcttcaaaccacctggaatgcacagctcagggaagctggtggatgcctagaggctgaaggacagggaactctccattattggggcaggactcagggaggacacttggggccatgtgtctggagagagggcataggttacaccctacagaataaagaagggacccaaagcctctttttgcctcccggaatcaaggccctgagggcagcaggatggtggcctgggtggggtcgtccaactaggtttgctaacctgaggggtcactgggcctggccacttctgtccctctggtggtggaacccagcacgtggttctgtagggacctttgtcagtgagcaagactgagatcgtcacaggagaaggtgcccttgctggctgccccagcaggcacccacctccctgccaggccaagccaggtgtcctcttgcagcttggccttgatgacctctgtttcttcctgggcaggtcctggagcggctgttccagaggggtttcagcgtggctgcgtcctgtgggggcggtgtggactcctcccagttcagcgagtatgtgctttgccgggaggagcggcggccgcagcccacccccactgctgttcgaatcaagcaggaacccctggactaggccctgcttcagtgcccacctgggcccccccagggacctggaaacagtgctggggagttctgcctgtgtatacttggccgtgggcatgagaccgagggtgaggctggagggtccaaagctggcccagcgagcaccagggtcccaggtgtcatggcaacagaacgtgggatgctggaggcatgcctgcagaaggactgttgatgcgacccaaagatacagcggtgggatctctgctgccagctctcccagcccctcagcttcgcagcctggcgcagcatcctctgaggccccggggcctgttggggcggggttggaagagccgtctgcagctacttcagaggagctgtttatccctctccacgcggggcagactctggcgggtctcctagcgtccgagagatggcttattttctacagtatttaaaatggatgcagccctaactgcaaaagtcagagaggctgacaaggaccaatgcttctttatctggtgctcagttctcagtcagacgtgcagcatggctgcagggtggaccagctgcctggcattcaggcccagatgcctgcagggctggggctctcgggacagatgcagggatgtgtgctgcagggctgctgggaggagagtggtgggggcctgagggctgagtgattctgtaaccacctgagaccttcacgtttgctgccgttgggggctcaggctgcactccccgggtcacctgacctgctgcccaggggcttccagtcctgtctgtgtggactggcacctgggctgctggagaagtctcctcccgttcggaccagcctcagggctgcacgttacctcaggaatgggccccaccatgaaggggcccatctgtcagcagcgtcttctaggtccccagctcagggagccatccccagctccagttttctcatgcgaatatgcacagttttaattcacgttgttacactagcctgccgatgagacccagacacaggcagacctggcgctcttgacccctgattccagtgaggactggccctgaggagtccttgcagacctgctgcctcccccacgacaggcccaaagatggaccccccctggccttgtgacagctccccaagtgttctccggtggagaaactgcagaggactggtgggcggggctccccagccatcaccatcctgtgtacaatggctgtagacttgtatatggctcctttaatattgtaaagatgctgatgtacaattgtcgtgcatttgtgtgaacacattgcgttcccagtccatgccataaatgatgctctcaagcaaaagactggaggctctgtcctgtgcagaagcagcagccagactcccgcattcgatgttgtgcagggaggtttgggggcggaacggattcctcccttggatccttcagttcccatcgaggaataacccgcagcagtggtggaggaaggtcagtggctgggtcctgagcttggtgttatttattgcatttgggtgcctgtcccctcagggcagcacagattctgaattctgattcacagtccctagccagatgggaactgggaaagagacagaaggcgtctgggtgcttttgaaccctgtctcaaatgtttgggattttctctctcactattctttggttggggatgatgtcctctttagacccccacgtaatggtatgagaaggtggcaggcagtggctcagccagccagggggcaccaagtcatgcagccagcgtgagacctgcagttcacctaagcacagaacgagatctcagtatgcctccatgtaaacagattcacataggcctccaatttcaatgagaccttttgcattttttctcaaagcccttatgttctaacccatgagaaccattttacctgccctctaagggccaccagcttcgacctgcctcaggggacagcagcacagaccagtggctccctgtccaaggccgcagagcagacgccatcccactgtacaatcgaatttgctggacaaacttgataggtttctctgcttagcaacgagcctatagttagttggcacatctgcgttttggcatctgaggctcccatctgagtggaggagaaagtgttgtgtttattagcaggaagtcttgtgaaaacagctcgctgctgtgtatgtttatggatttttctgatataacagccagcatggttaccgagtggtagagattctcgaacattctcaaactctctttttgggtaaatgattgtgctaaaaataaaatttattaataaagaaggggaaaaaggagtaactctacctgactaaatgttactctaatttatttatttctttactaattaagtaaaaccaggaagtatgattttacatcaaccagagaatttctgaatttatagggaaacactatgtccccataatgatgctataattctaatatatctagtccccataaacagtaagtacaaattatcattcctttaaagcatttttacacttcctggaatgagtatattatcagcaatcttttgtcaaatgccagccgtataaatgttacttctgctctttgtaaacctcaaaactcattattcttgattataagcaactggacagaaccatgccaaagcttccccgtttcccaccaaacccctgccagtgagtgcagagaactcgcaaagccacagcaggcggtctcagccaccgtcccgctcacaggggcccaatgccaggtcacaacactaagaatatctttcaaaaaatgtgtcttttttttttttttttttaaagctactgcttgactgttccttagaataaataaaggatattttataaattaaaa

SEQ ID NO: 5192 - DNA, 3477 bp, Homo Sapiens
  NM_024077
ggcggaaacgctttgtctgtccggcaagccgacggcccgctgctggcctccgtgacgcggcctcctccgcgcctcgcggcatggcgtcggaggggccgcgggagcccgaaagcgagggcatcaagttatcagcagatgtcaaaccatttgtccccagatttgccgggctcaatgtggcatggttagagtcctcagaagcatgtgtcttccccagctctgcagccacatactatccgtttgttcaggaaccaccagtgacagagcagaaaatatatactgaagacatggcctttggagcttcaacttttccacctcagtatttatcttctgagataactcttcatccatatgcctattctccttatacccttgactccacacagaatgtttactcagtgcctggctcccagtatctttataaccaacccagttgttaccgaggttttcaaacagtgaagcatcgaaatgagaacacatgccctctcccacaagaaatgaaagctctgtttaagaagaaaacctatgatgagaaaaaaacgtatgatcagcaaaagtttgacagtgaaagggctgatggaactatatcatctgagataaaatcagctagaggttcacatcatttgtccatttacgctgagaatagtttgaaatcagatggttaccataagcgaacagacaggaaatccagaatcattgcaaaaaatgtatctacctccaaacctgagtttgaatttaccacactggactttcctgaactgcaaggtgcagagaacaatatgtcagagatacagaagcaacccaagtggggacctgtccactctgtctctaccgacatttctcttctaagagaagtagtaaaaccagctgcagtgttatcaaagggtgaaatagtggtgaaaaataacccaaatgaatctgtaactgctaatgccgctaccaattctccttcatgtacaagagagttatcttggacaccaatgggttatgttgttcgacagacattatctacagaactgtcagcagcccctaaaaatgttacttctatgataaacttaaagaccattgcttcatcagcagatcctaaaaatgttagtataccatcttctgaagctttatcttcggatccttcctacaacaaagaaaaacacattattcatcctacccaaaagtctaaagcatcacaaggtagtgaccttgaacaaaatgaagcctcaagaaagaataagaaaaagaaagaaaaatctacatcaaaatatgaagtcctgacagttcaagagcctccaaggattgaagatgccgaggaatttcccaacctggcagttgcatctgaaagaagagacagaatagagacaccgaaatttcaatctaagcagcagccacaggataattttaaaaataatgtaaagaagagccagcttccagtgcagttggacttggggggcatgctgacagccctggagaagaagcagcactctcagcatgcaaagcagtcctccaaaccagtggtagtctcagttggagcagtgccagtcctttccaaagaatgtgcatcaggggagagaggccgccgcatgagtcaaatgaagaccccgcacaatcccttggactccagcgccccactgatgaagaaagggaagcagagggagatccccaaggccaagaagccaacctcactgaagaagattattttgaaagaacggcaagagagaaagcagcgtctccaagaaaatgctgtgagtccagcttttaccagtgatgacacacaagatggagagagtggtggtgatgaccagtttcccgagcaggcagagctgtcagggccagaggggatggacgaactgatctccactccttcggttgaggacaagtctgaagagccaccaggcacagagctccagagggacacagaggcctcccaccttgctcccaatcacaccaccttccctaagatccacagccgcagattcagggattactgcagccagatgcttagtaaagaagtggatgcttgtgttaccgacctactcaaagaactggtccgtttccaagaccgtatgtaccagaaagatccagtcaaggccaagactaaacgtcgacttgtgttggggttgagggaggttctcaaacacctgaagctcaaaaaactgaaatgtgtcattatttctcccaactgtgagaagatacagtcaaaaggtgggctggatgacactttgcacacaattattgattatgcctgtgagcagaacattccctttgtgtttgctctcaaccgcaaagctctggggcgcagtttgaataaggcagttcctgtcagtgtggtggggatcttcagctatgatggggcccaggatcagttccacaagatggttgagctgacagtggcggcccgacaggcgtacaagaccatgctggagaatgtgcagcaggagctggtgggagagcccaggcctcaggcacctcccagcctacccacacagggccccagctgccctgcagaagatggccccccagccctgaaagaaaaagaagagccacactacattgaaatctggaaaaaacatctggaagcatacagtggatgtaccctggagctagaagaatccttggaggcttcaacctctcaaatgatgaatttgaatttatgagagttcttgcctgtgtgtctgtattttgggtaaggaggggaggtctgaaaaagactttggggctttttcttctgtttttcatgacaatgtaatttgtgtaactgttgaatctggaaattgatcagcattaaagggcacatgaagcagtgtctgcaggcgttcagtgctgcggagcctgttaaaggtcactcagatgtgcaggtgttaatcttctctaaaagcctggtgatacagctctggctttctgagcacactacggatctggaaaatactggaaaatgtgatacttagaatactttggctgctaaggaaacttcctctccattgcagaatagctgagccaagtgagtgagtttgcagaaagcaggtggtgagctcctgcctgctggaggttgccatggagggccattcctgcccggcaacagcaccgtcctgcagggagccacttggcagaagggtgcagggctgctggtgtcagagcaagagggctacagggaaagggccctttctcaggggatgtagcttttttaaaagatttgggaacacttggaggatttgctaaaatgagcctcagaaggaaaattggttttctaacctgtgactttttgaaatgaattattcctttcagtctttatttttcaaagaaacaatgtgtattgaagtacctagatttgtttgataatcaacaaatctttcctttttcaatgaacatattctgaatgtggtttctgtcttagaccaggaggacagagtttgctttcatattttccctgtaagtaagagggcttatttattttaaataaagagtaattattaaattttaaaaaaaaaa

SEQ ID NO: 5193 - DNA, 1682 bp, Homo Sapiens
  NM_024078
ccggcggctgagaatccgcgttgttccgtgttgggggcggcatggagcgggagccgggcgccgcgggagttcgccgggctctgggccgccggctggaggcggtgctggcgagccgcagtgaggccaacgccgtgttcgacatcctggccgtgctgcagtctgaggaccaggaggagatccaggaagcagtccgcacgtgcagccgtcttttcggggccttgctggagcggggagagctgtttgtgggccagctgccctctgaggagatggtcatgacagggtcccagggagccacacggaagtacaaggtgtggatgagacaccgctatcacagctgctgcaatcgcttgggagagctcctgggccacccctcctttcaggtcaaggagctggccctcagcgcactcctgaagtttgtgcagctggaaggagcgcaccccctggagaagtccaagtgggaaggcaactacctgttcccccgagagctcttcaagttggtggtgggaggcctgctgtctcctgaggaggaccagagcctgctcctgtcccagttccgggagtacctggactacgacgacacccgctaccacaccatgcaggcagccgtggatgccgtggcccgggtcactggccagcaccccgaggtgccccccgccttttggaacaatgccttcacgctgctgtctgccgtgagcctgccccgccgggagcccaccgtctccagcttctatgtgaagcgggcggagctgtgggacacctggaaggttgctcacctgaaggagcacaggagggttttccaggccatgtggctcagcttcctcaagcacaagctgcccctcagcctctacaagaaggtgctgctgattgtgcatgacgccatcctgccgcagctggcgcagcccacgctcatgatcgacttcctcacccgcgcctgcgacctcgggggggccctcagcctcttggccttgaacgggctgttcatcttgattcacaaacacaacctggagtaccctgacttctaccggaagctctacggcctcttggacccctctgtctttcacgtcaagtaccgcgcccgcttcttccacctggctgacctcttcctgtcctcctcccacctccccgcctacctggtggccgccttcgccaagcggctggcccgcctggccctgacggctccccctgaggccctgctcatggtcctgcctttcatctgtaacctgctgcgccggcaccctgcctgccgggtcctcgtgcaccgtccacacggccctgagttggacgccgacccctacgaccctggagaggaggacccagcccagagccgggccttggagagctccctgtgggagcttcaggccctccagcgccactaccaccctgaggtgtccaaagccgccagcgtcatcaaccaggccctgtccatgcctgaggtcagcatcgcgccactgctggagctcacggcctacgagatctttgagcgggacctgaagaagaaggggcccgagccggtgccactggagtttatcccagcccagggcctgctgggacggccgggtgaactctgtgcccagcacttcacgctcagctgaccctggcccacctgtgaataaatctcagctgaccccagccaaaaaaaaaaaaaaaaaaaaaaaaaaaaaaaaaaaaaaaaaaaaaaaaaa

SEQ ID NO: 5194 - DNA, 1668 bp, Homo Sapiens
  NM_024079
tttctccgcatgcgcgggatcccggatgtggatcaagttggtgggaagcgtgcggtgccgcagcaatggcggcgctcacaattgccacgggtactggcaattggttttcggctttggcgctcggggtgactcttctcaaatgccttctcatccccacataccattccacagattttgaagtacaccgaaactggcttgctatcactcacagtttgccaatatcacagtggtattatgaggcaacttcagagtggacgttggattacccccctttctttgcatggtttgagtatatcctgtcacatgttgccaaatattttgatcaagaaatgctgaatgtccataatttgaattactccagctcaaggaccttacttttccagagattttccgtcatctttatggatgtactctttgtgtatgctgtccgtgagtgctgtaaatgcattgatggaaaaaaagtgggtaaagaacttacagaaaagccaaaatttattctgtcggtattacttctgtggaacttcgggttattaattgtggaccatattcattttcagtacaatggctttttatttggattaatgctactctccattgcacgattatttcagaaaaggcatatggaaggagcatttctctttgctgttctcctacatttcaagcatatctacctctatgtagcaccagcttatggtgtatatctgctgcgatcctactgtttcactgcaaataaaccagatgggtctattcgatggaagagtttcagctttgttcgtgttatttccctgggactggttgttttcttagtttctgctctttcattgggtcctttcctggccttgaatcagctgcctcaagtcttttcccgactctttcctttcaagaggggcctctgtcatgcatattgggctccaaacttctgggctttgtacaatgctttggacaaagtgctgtctgtcatcggtttgaaattgaaatttcttgatcccaacaatattcccaaggcctcaatgacaagtggtttggttcagcagttccaacacacagtccttccctcagtgactcccttggcaaccctcatctgcacactgattgccatattgccctctattttctgtctttggtttaaaccccaagggcccagaggctttctccgatgtctaactctttgtgccttgagctcctttatgtttgggtggcatgttcatgaaaaagccatacttctagcaattctcccaatgagccttttgtctgtgggaaaagcaggagacgcttcgatttttctgattctgaccacaacaggacattattccctctttcctctgctcttcactgcaccagaacttcccattaaaatcttactcatgttactattcaccatatatagtatttcgtcactgaagactttattcagaaaagaaaaacctctttttaattggatggaaactttctacctgcttggcctggggcctctggaagtctgctgtgaatttgtattccctttcacctcctggaaggtgaagtaccccttcatccctttgttactaacctcagtgtattgtgcagtaggcatcacatatgcttggttcaaactgtatgtttcagtattgattgactctgctattggcaagacaaagaaacaatgaataaaggaactgcttagatatg

SEQ ID NO: 5195 - DNA, 1858 bp, Homo Sapiens
  NM_024083
gctgcggccccgccccctggccgcgtggctgcgcgtcctggctgttgccgataaagttgtttgacgccggcccggcggcgggtcacgtgagcggaaaatggcggccccggcaggcggcggaggctccgcggtgtcggtgctggccccgaacggccggcgccacacggtgaaggtgacgccgagcaccgtgctgcttcaggttctggaggacacgtgccggcggcaggacttcaacccctgtgaatatgatctgaagtttcagaggagcgtgctcgacctttctctccagtggagatttgccaacctgcccaacaatgccaagctggagatggtgcccgcttcccggagccgtgaggggcctgagaacatggttcgcatcgctttgcagctggacgatggctcgaggttgcaggactctttctgttcaggccagaccctctgggagcttctcagccattttccacagatcagggagtgcctgcagcaccccggcggggccaccccagtctgcgtgtacacgagggatgaggtgacgggtgaagctgccctgcggggcacgacgctgcagtcgctgggcctgaccgggggcagcgccaccatcaggtttgtcatgaagtgctacgaccccgtgggcaagaccccaggaagcctgggctcgtcagcgtcggctggccaggcagccgccagcgctccacttcccttggaatctggggagctcagccgcggcgacttgagccgtccggaggacgcggacacctcagggccctgctgcgagcacactcaggagaagcagagcacaagggcacccgcagctgccccctttgttcctttctcgggtgggggacagagactggggggccctcctgggcccacgaggcctctgacatcatcttcagctaagttgccgaagtccctctccagccctggaggcccctccaagccaaagaagtccaagtcgggccaggatccccagcaggagcaggagcaggagcgggagcgggatccccagcaggagcaggagcgggagcggcccgtggaccgggagcccgtggaccgggagccggtggtgtgccaccccgacctggaggagcggctgcaggcctggccagcggagctgcctgatgagttctttgagctgacggtggacgacgtgagaagacgcttggcccagctcaagagtgagcggaagcgcctggaagaagcccccttggtgaccaaggccttcagggaggcgcagataaaggagaagctggagcgctacccaaaggtggctctgagggtcctgttccccgaccgctacgtcctacagggcttcttccgccccagcgagacagtgggggacttgcgagacttcgtgaggagccacctggggaaccccgagctgtcattttacctgttcatcacccctccaaaaacagtcctggacgaccacacgcagaccctctttcaggcgaacctcttcccggccgctctggtgcacttgggagccgaggagccggcaggtgtctacctggagcctggcctgctggagcatgccatctccccatctgcggccgacgtgctggtggccaggtacatgtccagggccgccgggtccccttccccattgccagcccctgaccctgcacctaagtctgagccagctgctgaggagggggcgctggtcccccctgagcccatcccagggacggcccagcccgtgaagaggagcctgggcaaggtgcccaagtggctgaagctgccggccagcaagaggtgagagctgccagcctgaggtgcccactccgccagccacaggaccacctcctctgccagcaggaataaagacttgtgcatccctcaaaaaaaaaaaaaaaaa

SEQ ID NO: 5196 - DNA, 5758 bp, Homo Sapiens
  NM_024086
acgaggctagatggcttcacaagatggcggcgcgctgggagcgtatcatctgcgtttctaggagcttcgctatgcggctgctttaagattctagggttgtacaggcccacgccagacacgacgtctggcaggaacctcggcctcagagatggctctgagtaaatcaatgcatgcaagaaatagatacaaggacaaacctcctgactttgcatatctggcatccaaatatccagattttaagcagcatgttcagataaatctgaatggaagagtgagccttaattttaaagaccccgaagcagtcagagctctgacgtgtactctcctaagggaagattttggactttctattgatattccattggagagactaattcccacagttcccttgagactcaactatattcactgggtagaagatctgatcggtcaccaggattctgacaaaagtactctccgaagaggaattgacataggcacgggggcatcttgcatctaccccttacttggagcaaccttgaatggctggtatttcctcgcaacagaagtggatgatatgtgtttcaactatgcaaagaaaaatgtggaacagaataacttatctgatctcataaaagtggtgaaagtgccacagaagacactcctgatggatgctcttaaagaagaatctgagataatctatgacttttgcatgtgcaaccctcccttttttgccaatcaattggaagccaagggagtaaactcacgaaatcctcgaagacctccgcctagttctgttaatacaggaggcatcacagagatcatggcagaaggaggtgaattagagtttgttaaaaggatcatccatgacagtctacaacttaaaaaaagattaagatggtatagctgcatgctgggaaagaaatgcagcctggcgcctctgaaggaggagcttcgcatacaaggggttcccaaagtaacgtacactgaattctgtcaaggtcggacaatgagatgggccttagcttggagtttttatgatgatgtcacagtaccatcaccaccaagtaagcgaagaaaattagagaaaccgagaaaacccataacattcgtggtgctggcgtccgtgatgaaggaattatccctcaaagcatcacctctgcgctcggagacggcggaaggcatagtcgttgtcacgacatggattgaaaaaattctcactgatttgaaggtccagcataaacgagttccctgtggaaaagaggaagtcagccttttcctaacggccatagaaaactcctggattcatttaaggagaaagaaaagagagcgtgtgagacagctgagagaagttccccgagctcctgaggacgtcattcaggccttggaagagaaaaagcccacccccaaagagtctggcaatagccaagaactggccaggggcccccaggagaggaccccctgtgggcctgctctgcgggaaggcgaggctgccgctgtggagggcccgtgcccgagccaggagtccctgtcccaggaggaaaacccggaacccacggaggatgaaaggagtgaggaaaagggaggggtggaggttttggaaagttgtcaaggctctagcaacggagcccaggaccaagaggcttctgagcagttcggcagcccagtggctgaaagggggaaacgtctcccaggagtggccggacagtacctgtttaagtgtttgataaacgttaagaaggaggtggacgatgccttagtggagatgcactgggttgagggccagaacagggatctgatgaaccagctttgcacctacatacgtaaccaaattttcaggcttgttgcagttaactagaaacctcctgcacagttggaaacgtgttgatagtaacttgctttggagtggcctgtggggtggcaagaggaatcctaccagcggcccattagtagcacgatgtggaattatcttcgaaaacaaaaacctatgaatctgtcccccacctccccccgcctccttcccgctttttgagttacagggagtcgtagtgtggtcatttacaaggaggaattgtggtcatcagtaacaacagaaagccctcagtaaactcccgagggattgcaagctggctcaagctggcccctcagctctggactgcctctgcaaggtcagaagggttgtttgtggagtctgggctgggcagcactgcctagaatatcatgctgtctctgtcacccaagggtgtttcttgaggaggggtggctctctctgcctccagctggaggccctggtaccctgttctaggtcactcttcaagatggggcctaccttgcatcaatcccacaaagggagctgtatggtgggtggtggggaatctgggagagaaaccttagtaatgctgggaaggagcagcagagtctggggaccacccggtaaatggcacattcctgacacctggctgttttgatgttgcttatttcagaagcagaattaggtaagcaaaactccccggtgtgactgaggcacacagaaggcacccatacccccacctccagcctgttgacagtaccattttgtagcagttttactactgtgtgatttttgtttggacatctgaagtagagcttgttttgtttttaaataagaatattcacaaattaaaaaccagcggtcctatttgaatcctggggttagctgagtgagcggctgatgatagaaatgagaaatagaacaaaatagtatgtgccgtaggtagcttaagaaagtctcagatattttgttgctgatcaaatactgtttttttgtggcttcacttgtaatcccccctgtacttacctactcacattggagagttctgaggccggagtaactgtgtccttgaaacacgtttctaattggaatgccagggttcagtagccgtccccccggaaaggggtgaccttttgctgtgcttgatgttgcatcagcagcctagggttctgtttagactaaaatcttggccagagctccttgccatctgctaagaagactggggctgagtagttaagccagccttctgagaggtggctgttggtcaggacgggaagctggtgaccttggcatgtcttggcagcagctagatcaggccctcggcagagacacaggaagcggaactgctgtgccttaacttggctgtggagctggagctggagaaggcagcatactgaccagtggctttttgattgattgtttgttatgaggtggagttttactcttgttgtctaggctggagtgccgtggtgcgatcttagctcactgcaacccccgcctcccgggttcaagcgattctcctgcctcagcctcccaagtagctgggattacaggcacgcgccaccacgcctggctaattttgtgtttttggtagagatgggatttcaccatgttggccaggctaatctcgaactcatgatctcgggtgatccgcccaccttggcctcccaaagtgctgggattacagccgtgagccactactcccagcctctgaccagtgttcttaacctggtccgtggacctccagagagtccatgtacctcctagagttacttctaaaagctctgtgagcatgtgtgtgtgtgtgtgtgtgtgtgtgtattttttttcctggagagagggttcccagaaccctcagacacagacaaaggggtcaataacccactaaggattaagaatcattattctagtccaagcattcatgtgtcaggctgcaaaaaacaatacccagggtcacacagagccaagactcaattcaggaccgtggattcccctggtctagaaattttctgctgtgccagcccacaccaccccactgtccttacctcgagtgaatattacatttgagtcatttgctgggcccaaacctagtttccttggtataattttaggataattgtttaagtggcaactattcattcagtaagtagtaagtacttattgtttgcttgtttcattatgaaagagtggcacatgctcattaaagatttggaaaaatgaaagtcaaaacaacaaaatcaccccgagtcccaaccttctgtaacataaccactcttggcattggcgtgttcctttctagtctctctgtagacggggtgtgtgagtgtgtgggtttaactttggttgtcctcatgctgcgtattcagttttgtattctggtcctttgttcatttaacatcttacaagtatttgtccatgttgtaacagtagtgtattagcttacactccttgcctgttcaaaatgtctttcaggcacagcactggcctttaagcctgtgtcgtagggatttccagagaatgctctgtgtattgaagcacagaaggtgtttctgtgtctcagtgtgtttctgtccctaggtttaaggcttcatgtcatggaggagattttatagatgtcaagctaatgaccttagagttttaaaaaatccgtgaccgtggccaggcgcagtggctcacgcctgtaatcccagcactgtgaggctgagatgggcgcatcgcatgaggtcgggagtttgagaccagcctggccaacatggcgaaaccccgtctctactcaaaatacaaaaattagccgggcatgatagcacgtgcctgtaatcccagctactcgggaggctgaggcaggagactcgcttgaacctgggaggtggaggttgcagtgagccgagaatgccactgcactacagcctgggcgacaaagtgggactgtctcaaaaaaaaaaaaaaaaaaaaaaaaaaaggaacccatgagcaggccagctttcagtctggagccgagtgccttctgtgcatttggatgtttccatttccttccctgagaagattttcttaggctacctagtgagagaacattgaaaatatttttaaaggacatctaagcattgttttggtcatgcatatgctttataattgtgtgttgtttcatagcatatacctctggtacaggtgggcaagtttttctttgaagaaatgggttattgactcatatgtcataaccttgagtgttactctcccggtgtccagaggtcacattcatgttgcggggttggtatgaaattaaatcttggtgatgtgaccctacattctcttctggtccctagaatcggcttctggtctcctgataactgaagtggagacagaagttgagcctgttgcccaggcaaactaaagctgcttttgttcttcggaatctgctttgcctccgtcagcctgcttccttccccacacatgctggccgcactgtccccactccagacctctgctgtgtgtcctgggcagggccgcgttttggcagtaccctttcaactcatcctaagcttcgtgtagattactttagtatatattttttataaaacataaagcctttcctctcgatggaaatcaaagcttaccatgtgagcactcgaacttctaagttgtgacaggaataacaaaactgcaaggagtggaaaagatggaaaagcctgtgggaaatccgaggccttttgaaagaagggagctgatgacttcacgaccagctcctggagcccctcctttctgctgaagccgcggcatttccctccgtggccacacgagggcacccttggcccttttatcaaagcgccttcacttccccgtgggaatggagacaagtctgtccacggtgttttcttgaaatacccagttgctacccagatttgtatttttatgtaaacaaatacattttcacagaaataaaatttgaaaaataaaagtagaaagagaaaaaaa

SEQ ID NO: 5197 - DNA, 2451 bp, Homo Sapiens
  NM_024091
aggcccacgacgcccaggcgcttccgcgaccacccggagtgattgcccggcagagcgcgatactcgtttgtagtttcataaacattgatgttgggtcaatcatgttctcaatgtatttaaccatgtgtttttaaattttttaatttagttatcaaattgagaatctgatggtatggcattaatcaccttgaggaagaacctttatcgtttatctgattttcagatgcatagagctctggctgctttaaaaaataaacctctaaatcatgttcacaaggtagtcaaggagcgtctgtgcccttggttgtgttcacgacaacctgagcctttcggggtcaaattccatcatgcccattgtaaaaagtttcattcgaaaaatggaaatgaccttcatccactcggtggaccagtgttctctcaagtatctgactgcgacaggcttgaacaaaatgttaaaaatgaggagagtcagatgttttacaggagactgagcaacttgacttcatcagaagaagtgctaagttttataagcacgatggaaaccctgcctgacactatggcagcaggagctttacaacgaatttgtgaagtggaaaaaaaggatggtgatcaagggctgccaaaagaaatactggagaatagcatctttcaagctttatgctttcagtttgaaaaggagccctcacagctgtcaaacactagtttagtgactgctttgcaagctctgattctgttgcatgtggatcctcaaagtagcctgttgctgaacctggtggcagaatgccaaaatcgtctcagaaaaggtggcatggaagttcgcaatctttgtattcttggggaaagtctgattacactgcacagttcaggttgtgtgacactagaactcattataaatcaacttcaaggtgaaaaattggaaacatttaccccggaggatattgtggccctttatagaatcttgcaggcatgtactgaaaaagtggatgaacaccaaacatttttaaataagataaacaacttttccctatcaatagtttccaacctgagtcctaaattgattagccaaatgctcactgccctggtggttcttgatcaaagtcaagcatttcctctgattataaaattgggcaaatatgtcgtgaggcatgtcccacatttcactaacgaggagcttaggagagtcttggaggcgttcatatattttgggcaccatgacacattttttacaaaagccctagagcatcgtgtagctgcggtgtgcctcacgttggatcctgaagttgtctgcagggtcatggagtactgcagtagagaactgattctttcaaaacccatcctcaatgcagtggcagaaacttttgtttgccaaacagaaaaattttcacctcgtcagatttctgccttaatggaaccatttgggaaactcaattatttgccaccaaatgcctctgctttatttagaaagctggaaaacgtgctattcactcatttcaattattttccacccaaatcattattgaaacttcttcattcatgttcacttaatgaatgccatccagtcaactttctggcaaaaatattcaagcctcttttccttcaacggctgcaaggtaaagaatctcatttggacacattgagtcgggcacaactgacccaacttttcttagcctcagtcctggaatgccctttctataagggtccaaaactccttcctaaatatcaagtgaagtcatttcttaccccatgctgttccctggagacccctgtggattctcagctttatagatatgtgaagattgggctgactaaccttttaggagcaagattatattttgctccaaaagtgttgacaccctattgttatacaatagatgttgaaattaaattagatgaagaaggatttgtattgccatccacagctaatgaagatatccataaaaggatagcactgtgtattgatggtccaaaaaggttttgctccaatagcaaacacttactggggaaagaagctattaaacaaagacacctacagttactcggttatcaagttgttcagatcccctatcatgagattgggatgctaaaatcaagacgtgaattggtggaatatttacaaagaaaactgttttctcaaaacactgttcattggttgcaagaatgaatactgacttcagaactcaaacaatggaagaacttgcatttttatggaactcagtattaaaagaaaaatataatgtgaattagccactttgcagaatatgttctagactggtgatctgaaagcatctgtagttttccttatactatgtatacatttattgtggtaaaatttaaaattaattttaatttaatactagtgtcatagatactttttgtacatcaaacaattgatcatgtgctgtaaaggaattcaatgaataaatgttatttttaagtaaaaaaaaaaaaaaa

SEQ ID NO: 5198 - DNA, 2412 bp, Homo Sapiens
  NM_024092
aatgccgagtggtggcaagaggaggattagcttccactccgatttcaaagatccagtttacccactctacagcccagatatagtcacttatttcccctttccagccagagacttccgttccctgctggaacttccgatcccattcttctctcggtgggaatgcttgtggggggaaaaagaaacgcaatagataaagcggggcgcatgcgctcccggcacaggcttcgattgtgaggaaggccggctagtctccgagctcatcccgccttgcgcatgcggagaaggtaaaccagcgccccgagttgaggcgcgggtttggtggcgcgtttcagcgaagtcgcacgtgaaggatagcagtggcctgagaaagacccagtcatggcagcctccagcatcagttcaccatggggaaagcatgtgttcaaagccattctgatggtcctagtggcccttatcctcctccactcagcattggcccagtcccgtcgagactttgcaccaccaggccaacagaagagagaagccccagttgatgtcttgacccagataggtcgatctgtgcgagggacactggatgcctggattgggccagagaccatgcacctggtgtcagagtcttcgtcccaagtgttgtgggccatctcatcagccatttctgtggccttctttgctctgtctgggatcgccgcacagctgctgaatgccttgggactagctggtgattacctcgcccagggcctgaagctcagccctggccaggtccagaccttcctgctgtggggagcaggggccctggtcgtctactggctgctgtctctgctcctcggcttggtcttggccttgctggggcggatcctgtggggcctgaagcttgtcatcttcctggccggcttcgtggccctgatgaggtcggtgcctgacccttccacccgggccctgctactcctggccttgctgatcctctacgccctgctgagccggctcactggctcccgagcctctggggcccaactcgaggccaaggtgcgagggctggaacgccaggtggaggagctgcgctggcgccagaggcgagcggccaagggggcccgcagtgtggaggaggagtgagccggatgccccacacaccgccagtgtcataccaaagagctgagctgcttcggggccatgcagccctcctgccagccccctgcccttttcttgccctgtctctgaaccttcagaacattgatccttgccgcagccccactagccaagagaaacagagaaagaccattccccctgcctgtccttgcggccctgtcttctgaggttctctgtctggggttggctctcttaaccctttctctgctcccagcctgcctcaccagggaaggttggaggggcctccctctggcttctgcatctgcgccagcaaacatcactgccgttggtctctcatgacttaactggcttccctctgctgctgccttggcttcctcctaatgctcgtgctctcctgtccttctgaagttgctccttggccaaatctccagctcccttcttgttttcctcatcctcctaccctgtactcccaccaaaccatggtcctttaaggcacgctcctgtcctcctcattgcccagcagtagggaggggcaggggtaaggggacctgaggataaagggtggggaaacagggtcccctgaggcctgtgggggctgcaggggaggaggatgtaccttgtgtctctttcaagtgccttaatccgagccagcagggccttctgcttgcctgctgccatactgtatgtaggaaagtgttctgtggctgctttgtgtcaagaaaagagcagtcactctcagaatcttgattccccatcagccaaagcaaaagatggctgctgctttgtaggcatgtgcctgcaagtgggaccttgctgggcattatatgccctgtgggggtttcagagaccctgaaagaggagggaggacccgcctccttgtctgcacaactgcatgcacttctctccccatcgctccacaacctgaaaccgagaaggagttgctgaccagtgcccaccccggcagcccgggaggaacacaggcagctcctttcccttcacgtggtctgcagagagcagggtgagctgccagctgcccctctccaccagggtaccctgtcttggtggttaggggccacttttcctttgaggctctagtggaggtggatgtccttctctgccaggcttggcacatgatgtgaagaataaatgcccaattcttactgttcaggtttgatgtggaatcacagctgcagtgatatatattttttatcagtgcttggttggttttaaataaagtgcacgctattttattatcttgttctgaataaaatgtatttactccaaaaaaaaaaaaaaaaaaaaaaaaaa

SEQ ID NO: 5199 - DNA, 902 bp, Homo Sapiens
  NM_024093
gggtagccgactggggtctcctggcgacgaccatggcgggggatgtgggcggtcgcagctgcacggactcggaactgctgctgcacccggagctgctgtcccaggagttccttctcctcactctggagcagaagaacatagctgttgaaactgatgtaagagtaaacaaagacagtcttactgacctttatgtccaacatgcaataccattgcctcagagggatttgccgaagaatagatgggggaaaatgatggaaaagaaaagagaacaacatgagattaaaaatgagactaaaaggagtagcactgtagatgggttaaggaaaagacccctcatcgtatttgatggaagttcaacaagtacaagcataaaagtgaaaaagacagagaatggagataatgatcgactgaagcctcccccgcaggcaagctttaccagtaatgcctttagaaaattatcaaattcctcttcgagtgtttcacccctaattttgtcttccaatttgcctgtgaacaataaaacggaacacaataataatgacgctaaacagaaccatgacttaacgcataggaaaagtccttcaggccctgtgaagtcgccaccattgtcccctgttggaactactccagtgaagttaaagagagctgctcctaaagaagaggcagaggccatgaataacctgaagcccccacaagcaaaaaggaagatacaacatgttacttggccctgaagaaaagtttccaaaaatgtaaatatactgtaactgtagtttttcaaatatgttcatatatattgacaatatttacagaaatcctgattattgtggaattttcttaagaggtttcaaataggtttaaaaaaataaaggatttattttccttcccttaaaaaaaaaaaaaaa

SEQ ID NO: 5200 - DNA, 1143 bp, Homo Sapiens
  NM_024096
ggagctctggaggcggggcttcgagcgtggctcgtgggttttccgtgaagtcgcggtgcagcggtgggcggcatgtctgtggccggtggggagattcgtggggacacggggggagaggacactgctgctcccggccggttcagcttcagcccggagcccacgctcgaggacatccgccgcctccatgctgagtttgctgcggaacgagactgggaacagttccatcagcctcggaatctcctcctggccttggttggggaagtgggggagctggcagaactctttcagtggaaaaccgatggggaacctggcccccaaggctggtcccccagggaacgggcagcccttcaagaggagcttagtgacgtcctcatctacctggtggcattagcagcccgctgccgtgtggatctgccgctagcagtgctctccaaaatggacatcaaccggcgacgctacccagcccatctggcccgcagctcttcccgcaagtatacagaattgccccatggggccatctctgaagaccaggctgtggggcctgcggacattccctgtgactccacaggccagacctcaacctagaaagatggccacaggacttgcaactcagggtggtgtctgaagagcagagagtggcctggccctggagcctttttctagtcttttcagaatagatcatgggcctgaggcctccacttcttgaggtctgaggcccagcagcctctagaaggtagcctcctggtgtttgttctcccagtaaaatggttttgggcgataacttctagattattcctggatggccagggaggctctctgtctcagcaggtgatgacgggggtaccaggggtgcctctgagacccattctcgtgtttccctgttgtaccttttgcctgcagggcagagagatctggtttctagcaaattcccagtaggatgtcatgtaagttccttccccctcttagagattgaaggctgtaagagtccagatggtggagccaggctgtctgggttcaaatgccatctttgacacttgcaagctaaatgacattactcaaattaatcgttctgcacttcagcttccttgtctatcaaataaaaagaatagtacctgcccaaaaaaaaaaaaaaaaaaaaaaaaa

SEQ ID NO: 5201 - DNA, 2022 bp, Homo Sapiens
  NM_024098
actctccccaaccccggtcccgcctctccacccctcaccaacatggccgcctcagcaacagcccccctcctgtgcgtcacggacgcggcgactcctgacgtcataggaaggcgccggtttcggcgggggctgcacgtgcgcaggggtgtggaaacttaccggctgagccatggatacaccgttaaggcgcagccgacggctgggaggcctaaggcccgaatcccccgagagcctcacctcagtttcgcggacgagacgggcccttgtggagttcgagtcgaacccagaagaaacgagggagcccgggtctcctccgagtgtgcagcgggctggcctggggtcccccgaaaggccgccgaagacaagcccaggatcaccccgtctgcagcagggtgcaggcttggagtcaccccaagggcagccagagccaggcgcagcgtccccccagcgtcagcaagacctacacctggagtcgcctcaaagacagccagagtacagtcctgaatccccacgatgtcagccgaagccaagtgaggaggcaccaaagtgttctcaggaccagggagtactggcctcggagttggcccagaataaggaggagctgaccccgggggccccccagcatcagctaccgccggtcccaggatcaccagagccttaccccggtcagcaagctcccggtccggagccctctcagccactactggagctgacacccagggcacctggctccccccggggtcagcatgagccgagcaagccacctccagctggggagacggtgacaggcggcttcggggcaaagaagcgaaaaggttcttcatcccaggccccagcgtccaagaagttgaataaagaggagcttcctgtaatcccgaaggggaagcccaaatcggggcgagtgtggaaggaccgctccaagaaaagattctcccagatgcttcaggacaagcccctgcgcacatcgtggcagcggaagatgaaggaacgacaggagaggaagctggccaaggactttgcccgtcacctggaggaggagaaggagaggcgccgccaggagaagaaacagcgccgggctgagaacctgaaacgccgcctggagaatgagcggaaggcagaggtcgtccaagtgatccgaaaccccgccaagctcaagcgggcaaagaagaagcagctgcgctccattgagaagcgggacaccctggccctgctgcagaagcagccgccccagcagccggcagccaagatctgagctcaggacggcccgaggccttccatggccaacaaccatgtcagacacagcacctcaggccgctgctcagatgcctctgctggagctggcactccaaacccatggctccagaacagggacccccaccccgaccggggctcctcggcctttgaaggcttccaggcaggtctgtgtgggacagaagcccagagggggcctgggacctggcagagatgggggcgggaagagattcagctcccatccctccttcctctccttctccaagtgccttcaaaccaagaactgtacattcttctggttcctcagtgagctggtgactggcaggtgactccctcagcagtgtatgccctttctcagcatcctaggtccatcccaggcctggaggctgacagttgggaatccagcttcccccacaccttcccaaaggctgctctgagcacctccacaccccactgcctctgtccccagcaaactgaatccggttcctctccacttttcaatactgaaagattaaaatggggaggttgcagggagcagagcttttccctagcacccactttcccaaaccagtctctgcagaagccccagagaatctaactcatgcctgtccagtctacagcaaaaatatttattgagtgcctgttgcatacaggcacaatcctaggcaccggcaaatacagacaatagaccaaagtccctgccctcgaggagctttcattctgatggagagaaaacataataaacaagcaaaatgcaccacgtgaaaaaaa

SEQ ID NO: 5202 - DNA, 1357 bp, Homo Sapiens
  NM_024099
cagcattttccgcaaggaatccatggccgcctgcacagccagcggagcgcccacgggagctccccgcagccgcaagctgttgccgcgcggtctcactaccccttggcgcaggctagagcgccctatagcagaaaccatagataagcggccggctagagaggacctgctcgaggaaacgtttggaatccggagcgcttggatctcagaatcaccaccatggcccttgtgccagggagaagcaaggaggatgggctttggactagaaatagcccaggctcctcccagcatccagaaagtcccaggctgcccaaccctctctgggacagaggaaaaattggcaaggttgaaggtcaccagcacattcaggatttctctcaaaagtcccatctgccgtctattgtggtggaatccagtgaggtgaatgaagagagtggggatctccatttgccccatgaggagctgctgctgctcactgatggtgaggaagaggatgctgaggccttcttccaagaccaaagtgaagagccaggctgggcttggagcccacaggaccctagaagtcctttaagaacatttaacgctggactcagctgggggcaggaccaggatgaagaagatgcttgttggattcttgaggacacagcatgtctggaagccaccaaccactgtcccttctgggactcaacaggctcccgtgtttgtagaagtggctttgtggaatattcccatctcctgcctcctaatagctttgagggagctgaagaagaagctgttcaaacgccggcgggtgttgaatcgggagcggcgtctgaggcaccgggtggtcggggctgtgatagaccaagggctgatcacgcggcaccacctcaagaagcgggcgtccagtgcacgtgccaacattacactgtcagggaagaagcgcagaaaactcctccagcagatccggcttgcccagaaagagaagacagccatggaagtggaagccccttcaaagccagccaggactagtgaaccacagctcaaaaggcaaaagaagacaaaagccccccaggatgtagaaatgaaggaccttgaagatgagagctaaacctcttccactagaagattctcaactggagccagccttcagactcagtggttgtttcagaggactttgacaaaagcaaggccccttttcactctccagatttcctcctacctaatggcctactgacctcccctagagggatgtctttgggagggaagaaggtacagaagaaagattggagaagggcctctctagcagtcaactccatttgtaataaagccctagcactctgaaaaaaaaaaaaaaaaaaaaaaaaaaaaaaaaaaaaaa

SEQ ID NO: 5203 - DNA, 1551 bp, Homo Sapiens
  NM_024100
acgtccggggcggtggggaaggcaagatggcggcgcccatggaggtggccgtgtgtacggactcggcggccccgatgtggagctgcatcgtgtgggaacttcactcgggcgccaacctgctcacctaccgcggcggccaggcgggaccccgcggcctggcgctgctcaatggcgagtatctgctggcggcgcagctgggcaagaattacatcagcgcctgggagctccagcggaaggaccagctccagcagaagatcatgtgccccgggcctgtcacctgtctgactgcatcacccaatggtctctacgtcctggcaggagttgcagaaagcatccacctgtgggaggtctccaccgggaaccttctggtcatcctgagtcgacactaccaggacgtctcctgccttcagttcacaggggacagcagccacttcatctcagggggcaaggactgcctggtgctggtttggagcctctgcagcgtgctgcaggccgacccctccaggattccggcgcccaggcacgtctggtctcaccacgcgctccccatcacggacctgcactgcggctttgggggccccctggcccgggtggccacctcctcactggaccagacggtgaagctatgggaggtctcctcgggggagctgctgctctccgtcctctttgacgtgtccatcatggcagtgaccatggacctggctgagcaccatatgttctgcgggggcagtgagggctccatcttccaggtcgacctcttcacctggcccggacagagggagaggagcttccacccagagcaggacgccgggaaggtcttcaaagggcacaggaaccaggtgacttgcctgtcagtgtccactgacggcagcgtgctgctctcaggctcccacgacgagaccgtgcgcctctgggacgtgcagagcaagcagtgcatccggacggtggccctcaaaggcccagtcaccaatgccgccatcctgctggcgcccgtcagcatgctgagctcagacttcaggcccagcctgccgctgccccacttcaacaagcacctgctgggcgccgagcacggggacgagccgcgccacgggggcctcactctgcgcctgggcctccaccagcagggctcggagcccagctacctggaccgcacggagcagctgcaggccgtcctgtgcagcaccatggagaagagcgtgctcggcggccaggaccagctgcgcgtccgtgtgacggagctggaggacgaggtgcgcaacctgcgcaagatcaatcgggacctgttcgacttctccacgcgcttcatcacgcggccggccaagtgaggcccggagaccccggcccgaggcgcccaggcctgagccccatgcctcccagcaaccagggcccgcgggtgtggcccccaccagcccaggcctggactctcctcagttctgtgtcgtgttcgggtttttcctctgtgactgggccgtcttggtgtctcgtggcacgcgtcacagtggtgctagtctgtttttaacaaaagaggatgaaaagcccctcctctccggc

SEQ ID NO: 5204 - DNA, 2428 bp, Homo Sapiens
  NM_024102
cgtccagtttgagtctaggttggagttggaaccgtggagatgcggaaggaaaccccaccccccctagtgcccccggcggcccgggagtggaatcttcccccaaatgcgcccgcctgcatggaacggcagttggaggctgcgcggtaccggtccgatggggcgcttctcctcggggcctccagcctgagtgggcgctgctgggccggctccctctggctttttaaggacccctgtgccgcccccaacgaaggcttctgctccgccggagtccaaacggaggctggagtggctgacctcacttgggttggggagagaggtattctagtggcctccgattcaggtgctgttgaattgtgggaactagatgagaatgagacacttattgtcagcaagttctgcaagtatgagcatgatgacattgtgtctacagtcagtgtcttgagctctggcacacaagctgtcagtggtagcaaagacatctgcatcaaggtttgggaccttgctcagcaggtggtactgagttcataccgagctcatgctgctcaggtcacttgtgttgctgcctctcctcacaaggactctgtgtttctttcatgcagcgaggacaatagaattttactctgggatacccgctgtcccaagccagcatcacagattggctgcagtgcgcctggctaccttcctacctcgctggcttggcatcctcagcaaagtgaagtctttgtctttggtgatgagaatgggacagtctcccttgtggacaccaagagtacaagctgtgtcctgagctcagctgtacactcccagtgtgtcactgggctggtgttctccccacacagtgttcccttcctggcctctctcagtgaagactgctcacttgctgtgctggactcaagcctttctgagttgtttagaagccaagcccacagagactttgtgagagatgcgacttggtccccgctcaatcactccctgcttaccacagtgggctgggaccatcaggtcgtccaccacgttgtgcccacagaacctctcccagcccctggacctgcaagtgttactgagtagattggatttaagacaaaaagcaagtcccccatgagtgtccacttctttgccctgccctctcagcttgtgagacaacacaggagccttctatagtatgttgatatgctagatctgtgccgttaataggcatcgtctctcagcctgagggaggctggattctgggttcctgtagtcacagggaggaaaagctttcttaaaaatggacatgtatgtgcgtgtgagtgtgtgtgtagatttatagtttttggtagtggcaggaataaaaaaaatccatcctacatcttccctaagcactgcctctctctcaccccccaaaacaagttgacgaaagggttttatgtagctgtctatgaggaattggccgtgtctgggtgggttatgggatgtgggcatccctgggttcttggaagcagctcttatgctactcatagagatgggattgactttatttttttatagtgcttaattcaccattatgagaaatgcttccagtcacaaaaatgcagcccagctcactctgaggaagaagcaggacttggtacggttttacacaactccttaccattaaactgaatcagaaatccattttctggctgaataaaaagtttggcttgcctgtgtaatgcccactcccttccccctggctccctagtgatgggacatatatgagagagaagtgtttttctatcatagacaccataggggaaagtttggggatgaaggagagcttaaaggtgtttcaattaagttagaaaactgacacaggctgttgagaattctttgccacttttcccaccccaaaacagcatggggcctgacatcttctgccctggtcccctttctcttgatgtggaaagtctgaatgcagtatttatagacttctaaggttttaaaatccagtatcaagaagaaaatcagaaatactggttggtgaaataaagagtttaggcattgttggcctgtcttttttgaagcatgtgtgttatgtgtagttagatatatttcacttatgtgagtcatcatggtgttggtcttgtagcccattatttttcctgtgcttccccagcttcccaaagtagctagttagaacttaaggtaaatatttattcttgggttggtggagtggatattgccagttaggagtcatggatcaattactgattatattgaaagtaaatataatcaattatgtacttttgagctttgcaggttcaatttaggtaaaaatcacattatgaaactgggaaagtctgaaggaatatgggcaaaatatttctcagtaaagcttccatgcttcacccttgacatgattacccttgagtaaaacatgggaatttgtaaaaaaaaaaaaaaaaaaaaa

SEQ ID NO: 5205 - DNA, 2320 bp, Homo Sapiens
  NM_024106
gtgagcgcctgagagtctttttgcctttcagagttaaggcctcactggcctgggaaaataattgctgccttttgcatccgcgttggctccgtccccaggatcttcccggttcagggacctggcgatttctgagtgttccggaatcccaataaccctgtttaaagaggaatggagattgccactgtccatttagattaatgaggtgtcctgaagtgatggtgacatcaatgaaaggagggttctgacacgttctcacctcgcgggatggcagctgctgatttgtcccatggacattatctttctggggacccagtttgccttcatgaagaaaagacaccagcaggaagaatagtggctgactgcctaacagattgttatcaggattcagtgacctttgacgatgtggctgtggacttcacccaggaggagtggactttactggactcaactcagagaagcctctacagtgacgtgatgctggagaactacaagaacctggccacagtaggaggtcagatcatcaaacccagtctaatctcttggttggaacaagaagagtcaaggacagttcagggaggagttctccaaggatgggaaatgcgacttgaaacccagtggtctatacttcagcaggactttttgaggggtcagacatccattgggatacaattggaaggaaaacacaatggaagggaactctgtgactgtgagcaatgtggagaagtcttcagtgaacactcatgccttaagacgcacgtgagaactcaaagtacagggaacactcatgactgtaatcagtatggaaaagatttccttaccctgtgtgagaaaacctctactggtgagaaactttctgagtttaatcagagtgaaaaaatcttcagcctgacaccaaatattgtataccagagaactagcacacaagaaaagtcatttgaatgtagtcactgtggaaaatccttcattaatgagtcataccttcaggcacatatgagaactcacaatggagaaaaactctacgaatggaggaattatgggccaggttttattgactctacaagcctttctgtgcttatagaaaccctcaatgcaaaaaagccctacaaatgtaaggaatgtggaaaaggctatagatacccagcctacctcagtattcacatgcgaacccacactggggagaaaccatatgaatgtaaggaatgtgggaaagccttcaattattccaactcatttcagatacatggaagaactcacactggagagaaaccctatgtatgtaaggaatgtgggaaagccttcactcagtactcgggccttagtatgcatgtacgatctcacagtggagacaagccctatgaatgtaaggaatgtgggaaatccttccttacatcctcacgccttattcaacatataagaactcacactggagagaagccttttgtatgtgttgaatgtgggaaagcctttgcagtttcctcaaatcttagtggacatttgagaactcacactgaagagaaggcctgtgagtgtaagatatgtgggaaagtatttgggtatccctcatgtcttaataatcacatgcgaacgcacagtgcccagaaaccatacacctgtaaggaatgtgggaaggcttttaactattccacccaccttaaaattcacatgcgaatccacactggagaaaaaccctatgagtgtaaacaatgtggaaaggccttcagtcattccagttcatttcaaatacatgaaaggactcacactggagagaaaccctatgaatgcaaggagtgtgggaaagccttcacgtgttccagttcctttagaattcatgaaaaaactcacacagaagagaaaccctataaatgtcagcaatgcgggaaagcttacagtcatccccgttcacttcgaagacatgaacaaattcactagtgagaaactgtccatgtaataaatgtgggaaagctctcatttgttccagttcactttaaagacatgaatgaactcactctggagagaagaagctgcatgaaaattacttaattcctgtaatcccagcattttgagaggctgaggtgggtggatcacttgaggtcaggagtttgagaccaccctggccaacatggtgaaaccttgtctctactgaaaatacaaaaaatttagccaggtgtggtgggcacctgtaatcccagctacttgggaggctgaggcaagtgaatcacttgaacccaggaagcagaggttgcagtgagcagagatcatgccactgcactccagcctgggcgatggagtgagactccatctcaaaaaaaaaaaaaaaaaa

SEQ ID NO: 5206 - DNA, 1942 bp, Homo Sapiens
  NM_024107
gaagccggaagagaccggaccctgaacagaatcgcagattgccagcccttttcccgacccctacggaaagacgagtccaggggccgtcctggcgaggtcaaaacatttagtctggtcttttcagcgtggaccctgccagcagccaggccatggagctctctgatgtcaccctcattgagggtgtgggtaatgaggtgatggtggtggcaggtgtggtggtgctgattctagccttggtcctagcttggctctctacctacgtagcagacagcggtagcaaccagctcctgggcgctattgtgtcagcaggcgacacatccgtcctccacctggggcatgtggaccacctggtggcaggccaaggcaaccccgagccaactgaactcccccatccatcagagggtaatgatgagaaggctgaagaggcgggtgaaggtcggggagactccactggggaggctggagctgggggtggtgttgagcccagccttgagcatctccttgacatccaaggcctgcccaaaagacaagcaggtgcaggcagcagcagtccagaggcccccctgagatctgaggatagcacctgcctccctcccagccctggcctcatcactgtgcggctcaaattcctcaatgataccgaggagctggctgtggctaggccagaggataccgtgggtgccctgaagagcaaatacttccctggacaagaaagccagatgaaactgatctaccagggccgcctgctacaagacccagcccgcacactgcgttctctgaacattaccgacaactgtgtgattcactgccaccgctcacccccagggtcagctgttccaggcccctcagcctccttggccccctcggccactgagccacccagccttggtgtcaatgtgggcagcctcatggtgcctgtctttgtggtgctgttgggtgtggtctggtacttccgaatcaattaccgccaattcttcacagcacctgccactgtctccctggtgggagtcaccgtcttcttcagcttcctagtatttgggatgtatggacgataaggacataggaagaaaatgaaaggcatggtctttctcctttacggcctccccacttttcctggccagagctgggcccaagggccggggagggaggggtggaaaggatgtgatggaaatctcctccataggacacaggaggcaagtatgcggcctccccttctcatccacaggagtacagatgtccctcccgtgcgagcacaactcaggtagaaatgaggatgtcatcttccttcacttttagggtcctctgaaggagttcaaagctgctggccaagctcagtggggagcctgggctctgagattccctcccacctgtggttctgactcttcccagtgtcctgcatgtctgcccccagcacccagggctgcctgcaagggcagctcagcatggccccagcacaactccgtagggagcctggagtatccttccatttctcagccaaatactcatcttttgagactgaaatcacactggcgggaatgaagattgtgccagccttctcttatgggcacctagccgccttcaccttcttcctctaccccttagcaggaatagggtgtcctcccttctttcaaagcactttgcttgcattttattttatttttttaagagtccttcatagagctcagtcaggaaggggatggggcaccaagccaagcccccagcattgggagcggccaggccacagctgctgctcccgtagtcctcaggctgtaagcaagagacagcactggcccttggccagcgtcctaccctgcccaactccaaggactgggtatggattgctgggccctaggctcttgcttctggggctattggagggtcagtgtctgtgactgaataaagttccattttgtggtcctgcaaaaaaaaaaaaaaaaaaaaa

SEQ ID NO: 5207 - DNA, 822 bp, Homo Sapiens
  NM_024108
ggagggggcatggcggatactgtgttgtttgagtttcttcacacggagatggtggctgagctgtgggctcacgaccccgaccccggcccgggggtgagcgccgggctccgtggggaggaagcgggggccaccaagggacagaagatgagcctgtcggtcctggagggtatggggttccgtgtgggccaggctctaggcgagaggctgccccgggagacgctggccttcagggaggagctggatgtcctcaagttcttgtgcaaagacctgtgggtggcggtgttccagaagcagatggacagcctgcgcaccaatcaccaggggacctacgtcctgcaagacaacagcttccccctcctcctcccgatggcctctggcctgcagtatctggaggaagcacccaagttcctggccttcacctgcggcctcctgcgcggcgccctctataccctgggcattgagagcgtggtcaccgcctccgtggcagccctgcccgtctgtaagttccaggtggtgattccgaaatcctaagcctgcctcgcacctgctgagccgcactgctgcccctggcctcaccggcctcaggagacggtggggccgctgcatttcggggtggtcttgggaatcccaggccctaggggtcacatttgctcaggaagtgggtatcaaattgaggtgggggtgtcagaggaggcaaaggggtcccagctgcggtcaggactgtggtgggattcccgcctcggcagcgtcactgcccagtagctgctcaataaaggctgtgtgtgtggaatctgaaaaaaaaaaaaaaaaaaaaaaaaaaaa

SEQ ID NO: 5208 - DNA, 1570 bp, Homo Sapiens
  NM_024109
gcacgcgggggcggggccgcgcctgcgcagaccgcctgttatggcggccgcctaagtcccacagagacgggagtcgggtgggatcccaggctgggccccgcggcggctggattctcttccctggccaagtctctgagatcttctcccagggcgatgcaaagctactcgctaccagcttggacctgtctgcagtatctcctctgggacctgccatgctgaggacccattctcacctctgagggactcctgtcctaggactaaggtggagcctgggccatggtacagctggctcctgcggcagccatggacgaggtcacctttaggagcgacactgtgctgtcagatgtccacctctataccccgaaccatagacatctcatggtacggctgaacagcgtggggcagccagttttcctgtcccaattcaagcttctatggagccaagactcttggacagattcaggagccaagggtggcagtcacagagatgttcacacaaaggagcctccttctgctgagacaggcagcacagggtcccctccaggaagtggccatggtaatgagggtttctccctccaggccgggactgacaccactggccaggaagtggctgaagctcagctggatgaggatggggatttggacgtggtgagaagaccacgagccgcctctgattccaacccagcagggcctctgagagacaaggtacatcccatgattctagcacaggaagaagacgacgtcctgggagaggaagcacaaggcagcccgcacgatatcatcagaatagagcacaccatggccacgcccctggaggatgttggcaagcaggtgtggcggggcgccctgctcctggcagactacatcctgttccgacaggacctcttccgaggatgtacagcgctggagctcggggccggcacggggctcgctagcatcatcgcagccaccatggcacggaccgtttattgtacagatgtcggtgcagatctcttgtccatgtgccagcgaaacattgccctcaacagccacctggctgccactggaggtggtatagttagggtcaaagaactggactggctgaaggacgacctctgcacagatcccaaggtccccttcagttggtcacaagaggaaatttctgacttgtacgatcacaccaccatcctgtttgcagccgaagtgttttacgacgacgacttgactgatgctgtgtttaaaacgctctcccgactcgcccacagattgaaaaatgcctgcacagccatactgtcggtggagaagaggctcaacttcacattgagacacttggacgtcacatgtgaagcctacgatcacttccgctcctgcctgcacgcgctggagcagctcgcagatggcaagctgcgcttcgtggtggagcccgtggaggcctccttcccacagctcctggtttacgagcgcctccagcaactggagctctggaagatcatcgcagaaccagtaacatgacccatcgcctccacaaggcgcggcgtctcgactgttcttagagtgtatttctagtaaaatcagaagctcaccaaagcaa

SEQ ID NO: 5209 - DNA, 2631 bp, Homo Sapiens
  NM_024119
agtttcagtttccatttctgatttctgctctctgcgctgagcacagcggcaccaggctgagctaagcagggccgccttgggcaggcctacgtggtggtgcaggcgagacccaggctgggcaaggcgcagtttcagtttccatcttgggtctctgagctgagcagagtggcaccaggctgagttaagtgggactgccctgggcagacctacctactagagcagaatggagcttcggtcctaccaatgggaggtgatcatgcctgccctggagggcaagaatatcatcatctggctgcccacgggtgccgggaagacccgggcggctgcttatgtggccaagcggcacctagagactgtggatggagccaaggtggttgtattggtcaacagggtgcacctggtgacccagcatggtgaagagttcaggcgcatgctggatggacgctggaccgtgacaaccctgagtggggacatgggaccacgtgctggctttggccacctggcccggtgccatgacctgctcatctgcacagcagagcttctgcagatggcactgaccagccccgaggaggaggagcacgtggagctcactgtcttctccctgatcgtggtggatgagtgccaccacacgcacaaggacaccgtctacaacgtcatcatgagccagtacctagaacttaaactccagagggcacagccgctaccccaggtgctgggtctcacagcctccccaggcactggcggggcctccaaactcgatggggccatcaaccacgtcctgcagctctgtgccaacttggacacgtggtgcatcatgtcaccccagaactgctgcccccagctgcaggagcacagccaacagccttgcaaacagtacaacctctgccacaggcgcagccaggatccgtttggggacttgctgaagaagctcatggaccaaatccatgaccacctggagatgcctgagttgagccggaaatttgggacgcaaatgtatgagcagcaggtggtgaagctgagtgaggctgcggctttggctgggcttcaggagcaacgggtgtatgcgcttcacctgaggcgctacaatgacgcgctgctcatccatgacaccgtccgcgccgtggatgccttggctgcgctgcaggatttctatcacagggagcacgtcactaaaacccagatcctgtgtgccgagcgccggctgctggccctgttcgatgaccgcaagaatgagctggcccacttggcaactcatggcccagagaatccaaaactggagatgctggaaaagatcctgcaaaggcagttcagtagctctaacagccctcggggtatcatcttcacccgcacccgccaaagcgcacactccctcctgctctggctccagcagcagcagggcctgcagactgtggacatccgggcccagctactgattggggctgggaacagcagccagagcacccacatgacccagagggaccagcaagaagtgatccagaagttccaagatggaaccctgaaccttctggtggccacgagtgtggcggaggaggggctggacatcccacattgcaatgtggtggtgcgttatgggctcttgaccaatgaaatctccatggtccaggccaggggccgtgcccgggccgatcagagtgtatacgcgtttgtagcaactgaaggtagccgggagctgaagcgggagctgatcaacgaggcgctggagacgctgatggagcaggcagtggctgctgtgcagaaaatggaccaggccgagtaccaggccaagatccgggatctgcagcaggcagccttgaccaagcgggcggcccaggcagcccagcgggagaaccagcggcagcagttcccagtggagcacgtgcagctactctgcatcaactgcatggtggctgtgggccatggcagcgacctgcggaaggtggagggcacccaccatgtcaatgtgaaccccaacttctcgaactactataatgtctccagggatcctgtggtcatcaacaaagtcttcaaggactggaagcctgggggtgtcatcagctgcaggaactgtggggaggtctggggtctgcagatgatctacaagtcagtgaagctgccagtgctcaaagtccgcagcatgctgctggagacccctcaggggcggatccaggccaaaaagtggtcccgcgtgcccttctccgtgcctgactttgacttcctgcagcattgtgccgagaacttgtcggacctctccctggactgaccacctcattgctgcagtgcccggtttgggctgtagggggcgggagagtctgcagcagactccaggcccctccttcctgaatcatcagctgtgggcatcaggcccaccagccacacaggagtcctgggcaccctggcttaggctcccgcaatgggaaaacaaccggagggccagagcttagtccagacctaccttgtacgcacatagacattttcatatgcactggatggagttagggaaactgaggcaaaagaatttgccatactgtactcagaatcacgacattccttccctaccaaggccacttctattttttgaggctcctcataaaaataaatgaaaaaatgggatagaaaaaaaaaaaaaaaaaa

SEQ ID NO: 5210 - DNA, 4625 bp, Homo Sapiens
  NM_024293
agcgctccgcagtcacgtgacgctcgtccgcaacctctgctgtcctccgcggcgcccccttccgcctgacgcgcccccggcggcggccgcgcagccctggctcctcgcgggctcgggcggcggctgcggcggggctatggcgagcggcggtggcgggggtaacactggcgcgggtggggggccggggatgggcctgagcctgggcctgggtctgggtctgagcctaggcatgagtgaggccaccagtgaggcagaggaggaggcggccacggccgaggcggtgggacgcctggccacgacgctgtggctgcggctccgcggctgggaggcggtgctggcggcggcgcagcggttgctggtgtgggagaagccgctgcacagcctggtcacggcggccgcgctcaacggcctcttctggttgctgtcttcctcgtccctccggcccttcttcctactcagcgtctcacttttggcctattttctgctggatctctggcagcctcgctttctccctgacgtttcagcatcatccccagaggagccacactctgacagtgagggtgcggggtcaggcgcccggccgcacctgctgagtgtgcccgagttgtgcagatacctggctgagagctggctcaccttccagattcacctgcaggagctgctgcagtacaagaggcagaatccagctcagttctgcgttcgagtctgctctggctgtgctgtgttggctgtgttgggacactatgttccagggattatgatttcctacattgtcttgttgagtatcctgctgtggcccctggtggtttatcatgagctgatccagaggatgtacactcgcctggagcccctgctcatgcagctggactacagcatgaaggcagaagccaatgccctgcatcacaaacacgacaagaggaagcgtcaggggaagaatgcacccccaggaggtgatgagccactggcagagacagagagtgaaagcgaggcagagctggctggcttctccccagtggtggatgtgaagaaaacagcattggccttggccattacagactcagagctgtcagatgaggaggcttctatcttggagagtggtggcttctccgtatcccgggccacaactccgcagctgactgatgtctccgaggatttggaccagcagagcctgccaagtgaaccagaggagaccctaagccgggacctaggggagggagaggagggagagctggcccctcccgaagacctactaggccgtcctcaagctctgtcaaggcaagccctggactcggaggaagaggaagaggatgtggcagctaaggaaaccttgttgcggctctcatcccccctccactttgtgaacacgcacttcaatggggcagggtcccccccagatggagtgaaatgctcccctggaggaccagtggagacactgagccccgagacagtgagtggtggcctcactgctctgcccggcaccctgtcacctccactttgccttgttggaagtgacccagccccctccccttccattctcccacctgttccccaggactcaccccagcccctgcctgcccctgaggaagaagaggcactcaccactgaggactttgagttgctggatcagggggagctggagcagctgaatgcagagctgggcttggagccagagacaccgccaaaaccccctgatgctccacccctggggcccgacatccattctctggtacagtcagaccaagaagctcaggccgtggcagagccatgagccagccgttgaggaaggagctgcaggcacagtagggcttcctggctaggagtgttgctgtttcctcctttgcctaccactctggggtggggcagtgtgtggggaagctggctgtcggatggtagctattccaccctctgcctgcctgcctgcctgctgtcctgggcatggtgcagtacctgtgcctaggattggttttaaatttgtaaataattttccatttgggttagtggatgtgaacagggctagggaagtccttcccacagcctgcgcttgcctccctgcctcatctctattctcattccactatgccccaagccctggtggtctggccctttctttttcctcctatcctcagggacctgtgctgctctgccctcatgtcccacttggttgtttagttgaggcactttataatttttctcttgtcttgtgttcctttctgctttatttccctgctgtgtcctgtccttagcagctcaaccccatcctttgccagctcctcctatcccgtgggcactggccaagctttagggaggctcctggtctgggaagtaaagagtaaacctggggcagtgggtcaggccagtagttacactcttaggtcactgtagtctgtgtaaccttcactgcatccttgccccattcagcccggcctttcatgatgcaggagagcagggatcccgcagtacatggcgccagcactggagttggtgagcatgtgctctctcttgagattaggagcttccttactgctcctctgggtgatccaagtgtagtgggaccccctactagggtcaggaagtggacactaacatctgtgcaggtgttgacttgaaaaataaagtgttgattggctagaactgctgcctccctgactgtgagctgccttccacaccctgcactgcactgtgttctctcctcacccttaacctgcttcactccagtctgttctggctgtttattaccttgttgcaaaacagggccgaagcaaggattaccttgacaaccctagcttctccttagccatcttccttgacagtgtgatctgtttagtgagatttagcatgtgtgaataaagtatatgcaggaggaaattgctttgtcttcccaatcggtagaaattcgggaccataaaaattgtgttttaccatgtggcctacaaccttaacactgctttcttaagaagtcttcacccatctacatgctaacaactcactcagcctggatttatctttactggggaagccaaacaagcaatagaggacctttacctgtgttagaaatgagttggagccaaggaacactgaagaaatagtatcttaacagttactgagtccattgtatgtgcttggctctgctctgagtgatttatatgtattaagatttttcctcacaggtcagatatatactgttactaacttcattttatagacaggttaagcttcctgaaggccacaggtcccagtaaattgtggagccagaacccaaacccaagaagttttggcttcagcaaatgcatcagacagcccctgtccattaatagggcacaggtaggaagatgcacaaggatgtgggaactatagagaaccaatctgatgccttggcttaacaaagagtggacatggcaagccttcctctttggggaagaaaagcccagaactgagcagatggcctcctttatgagttcatgtcctccgccttcagctggaggtaccatatggcgatgctacctgtctttctgctggaggtaccatatggtaatgctgcctggctgtctgctggaggtaccatatggtaatgctgcctgtctttctgaggttgacttttatgccatgtctttcctaagtgtgtaagaatttttctgtttgcttcacatttgactgagaatcattctagggtttgattgagcccctgtcctgtgccactaaaggaactcgaacttttcatcacttagagatttcagaggggaatggaaaaacagttctaatcaataagcaagcaattcaagaaaaatagaattaatcaggcaatgactgcaacatgtcctatctttaatctattttcttattaagcttggacattgacaatagaaccagaagcttgtagctggatcaaaatattctccataggcctggagtttcatgagggtctattcttttgttgttgttgttttggttttttgttttttgtgggtttttttttttttttttttgagacggagtcttgttctgttgcccaggctggagtgcaatggtgcagtcttggttcactgcaacctctgcctcccaggttcaaacaattctcctgcctcagccgtccaagtagctgggattacaggtgcatgccacgatgcctggctattttttgtatttttagtagaggtggggtttcaccatgttggccaggctggtctcgaactcctgacctcaggtgattcacccacctcggcctcccaaagtgctgggattacaggtgtgagccacggcgcccagcctcatgagggtctattctttacattcaccatggtctgatggttgctacatgtttgtctatgattttttttttctattatcaggtgtcttggccggttcatgccccacgatgaaagggccagaggttttcatatgagtaaaagaaaaaagcagaaatgtgaaacctacaattaggctaaacaaaaatcaactggaaaagtacaggctgaggggagaagagttggctacatgtttatgttaggggaggagggagtacattttagctatgtattcaaacagctaatagtttaatgttgctgcttataaacttaattttaggctgcattaataaaagtgtagtctccaaaacaaaaaaaaaaaaa

SEQ ID NO: 5211 - DNA, 895 bp, Homo Sapiens
  NM_024296
aaatgaactccctccagcttagctttcacccggtggtgttcccgggaggagagggcggagggcggagggaacttgcaccgaagcatcactcgagaccccaaacctccaggcctgaggcccagccagcgcccaatggatgacaaaaagaagaaacggagtcccaagccctgcctggcccagccagcccaggccccaggcacactacggagggtccctgtgcctaccagccacagcggctccttggccctaggacttcctcatctgccatcccccaagcagcgggccaagttcaagagagtaggcaaagagaagtgccgcccagtcctggctggaggtggaagcggctctgcaggcacgcccctgcagcactccttcctgaccgaggtgactgatgtctatgagatggaggggggactcctgaacctgctcaatgatttccactctggccggctgcaggccttcgggaaggaatgctcctttgagcagctggagcacgttcgggagatgcaggagaagctagcccggctgcacttcagcctggatgtgtgtggggaggaggaggacgatgaagaggaagaggatggggtcactgaggggctgccagaggagcagaagaagacaatggctgaccgtaacctggaccagctgcttagcaatctggaagacctcagtaattctatccagaagctgcacctggccgagaacgccgagcctgaggagcagtccgctgcgtaggcgtcccacgcaggcccacactgcccctctcattctcttcaaactgtgactttttacagactcgggcgggtgttctgcggccccccaggtgctatgggggaggggggcgttgaatggaattaaaccagaaagaaagcaagcgaaaaaaaaaaaaaaaaaa

SEQ ID NO: 5212 - DNA, 2041 bp, Homo Sapiens
  NM_024297
aggagggagcaggcggccggcggcgcggggggagggggcccggtccgggagtgcgggaggcagtggtagagggaggtggcggcagcggctagcggactcgagtctcaaccgggctgaggcggacacttctgtggagcgaagcagtgggagcatcgagcactagaggcggcaccgggatccccggctccggggaggggggcgccggaccgggaggaggggagggggcgatgctggaagccatggcggagcccagtcccgaagatccacctccgacccttaagccagagactcagccaccagagaaacggcggagaacaattgaggatttcaacaaattctgcagttttgttttggcatatgctggttacattccccctagcaaagaggaaagtgactggccagcctctggctccagctctccattgcgaggagagagtgcggccgacagtgatggctgggactcggccccctcagatcttcgaaccatccagacttttgttaagaaagcaaagtcatccaagagaagggcagctcaagcaggtcccacccagccaggacccccaaggtccactttctctcgtctgcaggcccccgacagtgctaccttgcttgagaagatgaagctcaaggactctctctttgatctggatgggcccaaagtggcatctcctttgtcccccacatccctgacacatacctcccggccccctgctgctcttacccccgtgcccctttcccagggggacctctcccatcctcctcgaaagaaggaccgaaagaaccgaaagttggggccaggagctggggctggctttggggtgcttcggaggcctcggccaactcctggggatggggaaaagagatctcgaatcaagaagagcaagaagcggaagttaaaaaaggcagaacggggggatagactcccacctcctgggcctccccaggcaccccccagtgatacagactctgaagaggaggaggaagaggaggaagaggaagaagaagaagagatggcaacagtggtagggggtgaagccccagtccctgtgctgccaacaccccctgaggctcctaggccccctgccacagtgcaccctgaaggagtccctcctgctgacagtgaaagcaaggaggtgggcagcactgaaacaagccaagatggagatgccagctccagtgaaggcgagatgcgggtcatggacgaggacatcatggtagaatcaggtgatgactcatgggatctgatcacatgttactgtcgaaagccctttgcagggcggcccatgattgagtgcagcctgtgtgggacgtggatccacctctcctgtgctaagattaagaagaccaacgtccccgacttcttttattgccagaaatgcaaggaactgaggccagaggcccggcggttaggggggcctcccaaatctggagagccctgatggcaccaactttagcctggaacttccaaatgacaacatgatttgggaactgagcctcagggtcctcagcctatcccctggagcttggatactgtctgcacttcaaggcaggaattctcaagggagacttgtttgaaaatgagtgtctcactttcccaccctatccttcctccccactctgtggacttgaaattgaatccattacggttggggatgggaggctgtctgtgtcccgacacataatctctgtctcttggacctgccaccatcactttctgggtcaggattggaattgggatggaatgggacagttgtctataaaactctagtgtaaatattagcactcccctccctcatcttttcttctatttcactccccatttattttcttctacaccggttgtatttttaattttggacttcccctattgggcatggcagctcaaaggtggagtactagagcctggccaagtgaggaaggaaagcagaaaggtgacgattctcactcacctcttttgtttttaataatatcggccgctgtttgtacagacagcctgcgtgttgtaaataaagcagagtgggctcttttgtgtttataaaaa

SEQ ID NO: 5213 - DNA, 2615 bp, Homo Sapiens
  NM_024298
taaggactcgactacctccgaagaaagccgaaacatgtggctccgcccacactggcctcagctctccgttctcgactattgccgaagtgagccgaagtttgtggccccgcttccggagaactcaagctcccgattgtgcccgaaggaacccgaagggagaccccgcctcattcctcacggcgagctccagaccccgcctcctttccggagcccgtctgttccccttcgggtccaaagcttttggctcctccttgttccgagcccgaaggcccgccccttcacgtactcggagctcggatcccagtgtggacctggactcgaatcccgttgccgactcgcgctctcggcttctgctccggggcttcttccctgcccgcccggggccctgaccgtggcttcttccccggcctgatctgcgcagcccggcgggcgcccagaaggagcaggcggcgcgggggcgcgctgggcgggggaggcgtggccggagctgcggcggcaagcgggctgggactgctcggccgcctcctgcccggcgagcagctcagaccatgtcgcctgaagaatggacgtatctagtggttcttcttatctccatccccatcggcttcctctttaagaaagccggtcctgggctgaagagatggggagcagccgctgtgggcctggggctcaccctgttcacctgtggcccccacactttgcattctctggtcaccatcctcgggacctgggccctcattcaggcccagccctgctcctgccacgccctggctctggcctggactttctcctatctcctgttcttccgagccctcagcctcctgggcctgcccactcccacgcccttcaccaatgccgtccagctgctgctgacgctgaagctggtgagcctggccagtgaagtccaggacctgcatctggcccagaggaaggaaatggcctcaggcttcagcaaggggcccaccctggggctgctgcccgacgtgccctccctgatggagacactcagctacagctactgctacgtgggaatcatgacaggcccgttcttccgctaccgcacctacctggactggctggagcagcccttccccggggcagtgcccagcctgcggcccctgctgcgccgcgcctggccggccccgctcttcggcctgctgttcctgctctcctctcacctcttcccgctggaggccgtgcgcgaggacgccttctacgcccgcccgctgcccgcccgcctcttctacatgatccccgtcttcttcgccttccgcatgcgcttctacgtggcctggattgccgccgagtgcggctgcattgccgccggctttggggcctaccccgtggccgccaaagcccgggccggaggcggccccaccctccaatgcccaccccccagcagtccggagaaggcggcttccttggagtatgactatgagaccatccgcaacatcgactgctacagcacagatttctgcgtgcgggtgcgcgatggcatgcggtactggaacatgacggtgcagtggtggctggcgcagtatatctacaagagcgcacctgcccgttcctatgtcctgcggagcgcctggaccatgctgctgagcgcctactggcacggcctccacccgggctactacctgagcttcctgaccatcccgctgtgcctggctgccgagggccggctggagtcagccctgcgggggcggctgagcccagggggccagaaggcctgggactgggtgcactggttcctgaagatgcgcgcctatgactacatgtgcatgggcttcgtgctgctctccttggccgacacccttcggtactgggcctccatctacttctgtatccacttcctggccctggcagccctggggctggggctggctttaggtgggggcagccccagccggcggaaggcagcatcccagcccaccagccttgccccagagaagctccgggaggagtaagctgtcacgacgctccctctgccagctggtcccgggaattctgtgaaccaggctgctgtctcctccccagaaagagtccttaccttggagagggtcctggagagaatttcctcttccccagctaaataccctgcctgcaactgaagcagacccgggggtgtcctccctgccctctgcccagaggccacctccactcctacaaaatcaaagtattgtccagacaagagtcactggcccctgctccagcttctgggtatccagagagcactgcacttccccaaaacggaaggggcccctgggcagtgggttttgggcaaattccctttctttgcatccacaatgtggggtcggagcttgggggcaggtcctgggagtgggaagcctcttccttgtgtctttcgctccacttttagctcatcgcaccaatattgcagacttggaaggaagcataagcttcccatttcacaaaggggaaactgaggtgcgggtgcgcgggcctggggacggccgtcccatggcttccatctgagccacctcgggaccccagcgctcctggcgccctcttctcatcgcttggcctatgacaggtcaccgtgtgtaaatctttcccaataaagtgttgcacaaaggcaaaaaaaaaaaaaaaaa

SEQ ID NO: 5214 - DNA, 3422 bp, Homo Sapiens
  NM_024301
gtcccggcggccattgctccaagatggcggcggcggcggcagcgggagcgcagctcagctgggctggaactgccctcctggaactcccccagcctacaacctaggaggtgcagggactgaggctcaggccaaatcgcaactcagacccagtgaacccaaggcctgaagagaatttggattcatttaccttgttttgtggggactggagagacaagtaaactctcagagtaactgtcccctctgactaccatttctaaggatgccccggaggcccagctagccccagacttcggccccatgcggctcacccgctgccaggctgccctggcggccgccatcaccctcaaccttctggtcctcttctatgtctcgtggctgcagcaccagcctaggaattcccgggcccgggggccccgtcgtgcctctgctgccggcccccgtgtcaccgtcctggtgcgggagttcgaggcatttgacaacgcggtgcccgagctggtagactccttcctgcagcaagacccagcccagcccgtggtggtggcagccgacacgctcccctacccgcccctggccctgccccgcatccccaacgtgcgtctggcgctgctccagcccgccctggaccggccagccgcagcctcgcgcccggagacctacgtggccaccgagtttgtggccctagtacctgatggggcgcgggctgaggcacctggcctgctggagcgcatggtggaggcgctccgcgcaggaagcgcacgtctggtggccgccccggttgccacggccaaccctgccaggtgcctggccctgaacgtcagcctgcgagagtggaccgcccgctatggcgcagcccccgccgcgccccgctgcgacgccctggacggagatgctgtggtgctcctgcgcgcccgcgacctcttcaacctctcggcgcccctggcccggccggtgggcaccagcctctttctgcagaccgcccttcgcggctgggcggtgcagctgctggacttgaccttcgccgcggcgcgccagcccccgctggccacggcccacgcgcgctggaaggctgagcgcgagggacgcgctcggcgggcggcgctgctccgcgcgctgggcatccgcctagtgagctgggaaggcgggcggctggagtggttcggctgcaacaaggagaccacgcgctgcttcggaaccgtggtgggcgacacgcccgcctacctctacgaggagcgctggacgcccccctgctgcctgcgcgcgctgcgcgagaccgcccgctatgtggtgggcgtgctggaggctgcgggcgtgcgctactggctcgagggcggctcactgctgggggccgcccgccacggggacatcatcccatgggactacgacgtggacctgggcatctacttggaggacgtgggcaactgcgagcagctgcggggggcagaggccggctcggtggtggatgagcgcggcttcgtatgggagaaggcggtcgagggcgactttttccgcgtgcagtacagcgaaagcaaccacttgcacgtggacctgtggcccttctacccccgcaatggcgtcatgaccaaggacacgtggctggaccaccggcaggatgtggagtttcccgagcacttcctgcagccgctggtgcccctgccctttgccggcttcgtggcgcaggcgcctaacaactaccgccgcttcctggagctcaagttcgggcccggggtcatcgagaacccccagtaccccaacccggcactgctgagtctgacgggaagcggctgaagccctgataacctcgcctttgtttttcgggggtctgtctggatgtggagaagctctgtgtgagcggtgaggggtggagggatgtcgcggagaggggaagggggaaactgaccaagaaagaaattctaaggagagcatgagagaaggctggcattggcaggaggagagcaccaggacgaggatgggaagcgacctccagatttatcaaatggtcatgcccactgggagccgtggatatgcgtggggacatcctgggtcatctcagtcatggagggagacggggatgtcacgccgtcccgcagggcccagcacagccccagacccgaaaaaagtgttctgcccaagattccgagagccctgcgctctagggcaggggcagagttttggaaacagtgcaggctctggagccagactggcgagattcaaatcctggctctatcgcttcggagccaggtgggcctgggggggcgtcgcagtctctctgtgcctcagttgcttccaggatgcgggacccttggctgcaggggttgcttccgccactagagggcgcgccggtcccgctcctggtggcccactgtggctgcccgggcgacagtacgcccagggcctgtgttccatagccatctactctcttgagcctttggacttctctccaagcccctgtgggaggcggacagcagtgaccacctccccttcttttggactgcgacctccttccctcctgggagagccctgtgacctgcatgctactcttaactgttctattcaagactgaatagaagtatttcagtcttgcagaggaggaaatgctcagagctccgaggtgcggctgtggtcgagaaccgggtgctgggccgggcgcgggggctcacgcctgtaatcccagcactttgggaggccgaggtgggaggatcgcttgagcccaggagtctgagaccagcctcggcaacatgccaagaccccgtctctatttttaaaaaagaaaaagaaccgacttctgaatcgcagctccactcatgactaatacctcattatttcagctgtctgcacctaattccccacttgcacggcagtgtagacaataaccatagctcacactcactgagcacctactgggtaccaggcaccattctcagtgtttcacctggatcaactaatgcgtccctcacctcagccctctgaagtgacagctgctattattttcattacacagatgaaaaagctgaggccagaatcgtgaagtcacttgctcaaggtcaggcagcttaggaaggggcagatcgggggcttgaacccaggtggtcaggctctggagcccacaattgtcttacccactatgcccctctctagtcatggtccccaagaggggcttggagacccacttagcaggtgaaagcaatggcagccttccttatttgattatgcacctaagaataaatggtatttgggcatgtattcccaatatgtgtatatttatttataaatatatacagatactattatctgtatgttagtaataaagcttaaattattccattttaaaattatgaatatgaatagggttttttttatgtttcttgcctcatcccaatgacttttgcacacccaggtgtgagcacccagcattcaagaccacg

SEQ ID NO: 5215 - DNA, 1115 bp, Homo Sapiens
  NM_024307
cccacactggctaggcaggcagcacagtcccgcggacggctgagcgtgtggctgcaggagcttctgtgggagtacggtcatgagccttttgctgtactatgccctccctgccctgggcagctatgccatgctctccatcttcttcctgcgccggcctcatctgctgcacacgcccagggctcccaccttccgcatccgcctgggggcccaccgaggaggatctggagagctgctggagaacaccatggaggccatggagaactccatggcccagcgctcggacctcctggagctcgactgtcagctgacacgggacagagtggtggtggtgtcacatgatgagaacctgtgccgccagtcgggcctaaacagggatgtgggcagcctggacttcgaggacctgcccctctacaaggagaagctggaggtttacttctctccaggccactttgctcacgggtcagaccggcgcatggttcgtctggaggacctgttccagaggtttccaaggacacccatgagcgtagagatcaaagggaagaacgaagagctcatccgtgagatagcaggcttggtgagacgctatgaccgtaatgaaatcaccatctgggcctcggagaagagctcggtcatgaagaaatgcaaggctgccaaccccgagatgcccctgtccttcacaataagccgaggattctgggtgctgctttcctactacctggggctgctgcccttcatcccaatccctgagaagttcttcttctgcttcctgcccaacatcatcaacaggacctatttcccattttcctgctcttgcctgaaccagttattggctgtggtttcgaaatggctgatcatgaggaagagtctgatccgacacttggaggagcgaggggtgcaggtggtcttttggtgccttaatgaagagtcggattttgaagcagccttcagcgtgggagccactggcgtcataacggattatcccacagccctgcggcactacctggacaaccatggaccagctgcccggacctcctaagtccagaagcctcgaggtctcctgtttctcttcctgaaaaataaatatttgcctttcgatcaaaaaaaaaaaaaaaaaa

SEQ ID NO: 5216 - DNA, 1608 bp, Homo Sapiens
  NM_024308
gggcggccgggccgcggcggcctccgactggatacggcggatcgccgggggcctgagggtggagtcccggccggaggcaggccgggactctggtgggtctaggcgcggatcggacccaagcaggtcggcggcggcggcaggagagcggccgggcgtcagctcctcgacccccgtgtcgggctagtccagcgaggcggacgggcggcgtgggcccatggccaggcccggcatggagcggtggcgcgaccggctggcgctggtgacgggggcctcggggggcatcggcgcggccgtggcccgggccctggtccagcagggactgaaggtggtgggctgcgcccgcactgtgggcaacatcgaggagctggctgctgaatgtaagagtgcaggctaccccgggactttgatcccctacagatgtgacctatcaaatgaagaggacatcctctccatgttctcagctatccgttctcagcacagcggtgtagacatctgcatcaacaatgctggcttggcccggcctgacaccctgctctcaggcagcaccagtggttggaaggacatgttcaatgtgaacgtgctggccctcagcatctgcacacgggaagcctaccagtccatgaaggagcggaatgtggacgatgggcacatcattaacatcaatagcatgtctggccaccgagtgttacccctgtctgtgacccacttctatagtgccaccaagtatgccgtcactgcgctgacagagggactgaggcaagagcttcgggaggcccagacccacatccgagccacgtgcatctctccaggtgtggtggagacacaattcgccttcaaactccacgacaaggaccctgagaaggcagctgccacctatgagcaaatgaagtgtctcaaacccgaggatgtggccgaggctgttatctacgtcctcagcacccccgcacacatccagattggagacatccagatgaggcccacggagcaggtgacctagtgactgtgggagctcctccttccctccccacccttcatggcttgcctcctgcctctggattttaggtgttgatttctggatcacgggataccacttcctgtccacaccccgaccaggggctagaaaatttgtttgagatttttatatcatcttgtcaaattgcttcagttgtaaatgtgaaaaatgggctggggaaaggaggtggtgtccctaattgttttacttgttaacttgttcttgtgcccctgggcacttggcctttgtctgctctcagtgtcttccctttgacatgggaaaggagttgtggccaaaatccccatcttcttgcacctcaacgtctgtggctcagggctggggtggcagagggaggccttcaccttatatctgtgttgttatccagggctccagacttcctcctctgcctgccccactgcaccctctcccccttatctatctccttctcggctccccagcccagtcttggcttcttgtcccctcctggggtcatccctccactctgactctgactatggcagcagaacaccagggcctggcccagtggatttcatggtgatcattaaaaaagaaaaatcgcaaccaaaaaaaaaaaa

SEQ ID NO: 5217 - DNA, 1774 bp, Homo Sapiens
  NM_024310
agctggccgggacccgggcggagcgggcggggacccgggctactgcggtgtggactcgagggctgggcgcggggccggcgcagaagccgccagctggagacgatggtggaccacttggccaacacggagatcaacagccagcgcatcgcggcagtggagagctgcttcggggcctcggggcagccgctggcgctgccaggccgagtgctgctgggcgagggcgtgctgaccaaagagtgccgcaagaaggccaagccgcgcatcttcttcctctttaacgacatcctggtgtatggcagcatcgtgctcaacaagcgcaagtaccgcagccagcacatcatccccctggaggaggtcacactggagctgttgccggagacgctgcaggccaagaaccgctggatgatcaagacggccaagaagtcctttgtggtgtcggccgcctccgctacggagcgccaggaatggattagccacatcgaggagtgcgtgcggcggcaactgagggccacgggccgcccgcccagcacggagcacgcggcaccctggatccccgacaaggccacggacatctgcatgcgctgcacgcagacgcgcttctctgccctcacgaggcgccaccactgccgcaagtgcggcttcgtggtctgcgctgagtgctcgcgccagcgcttcctgctcccgcgcctgtcccccaagcccgtgcgcgtctgcagcctctgctaccgcgaactggccgcccagcagcggcaggaggaggcggaggagcagggcgcggggtccccagggcagccagcccacctggcccggcccatctgcggagcgtccagtggagatgacgatgactccgacgaggacaaggagggcagcagggacggcgactggcccagcagcgtggagttctacgcctcgggggtggcctggtctgccttccacagctgacccccggcctgcagaacatctgtccccaagccagctccactgcccaggcccccaagagggcagctccagaagctgcccagggctccgggaccccatcccatggtggcaggtgcagcggtggggagtggctctttctggactcccagtgcctttttgctggacactgtgtccttatggcttcactgcaggtaatgcctttcccttcaggaagccccagaacacccacaggtcttggtaacaaacgccaccttacactctgcaggctgcagcggcagctccagatggcctcctgagctggacgaccccaggtctccagacatctagggaccagagcaggtttgggaacacagagggaagacaggatgggagtgtagccacagaacccacctgcaccctgacaggcacaccccactgaagagcctgagtcccaggaggcctcctggaagcccaggactgcccacccaccacgctggtgcccaccgcctggccagccaagccctgccgatcagacatgtgggctccccgaagcccagccagagactgccgtgctgtgggtgccaccaggcccagggactgcagcctgagctccccgaggcccagggcagccgggtgaggactctgtcctgtgtcacctctctccaggtgtccagctgtctcatgcctttttgtcctgtcctcagctctccgtgtggtcagcgaaaccattgttttctgttaggactcagttgcaagaacagaaaccctgcccccacttaataataaaaaagaaagtttattgatgggtggttgcaaaacaaaaaaaaaaaaaaaaaaaaaaaaaaaaaaaaaaaaa

SEQ ID NO: 5218 - DNA, 5644 bp, Homo Sapiens
  NM_024312
gctcccggaagcggcggccgcggcgcggagccgagcgggcgtccgtcgccggagctgcaatgagcggcgcccggaggctgtgacctgcgcgcggcggcccgaccggggcccctgaatggcggctcgctgaggcggcggcggcggcggcggcggctcaggctcctcggggcgtggcgtggcggtgaaggggtgatgctgttcaagctcctgcagagacagacctatacctgcctgtcccacaggtatgggctctacgtgtgcttcttgggcgtcgttgtcaccatcgtctccgccttccagttcggagaggtggttctggaatggagccgagatcaataccatgttttgtttgattcctatagagacaatattgctggaaagtcctttcagaatcggctttgtctgcccatgccgattgacgttgtttacacctgggtgaatggcacagatcttgaactactgaaggaactacagcaggtcagagaacagatggaggaggagcagaaagcaatgagagaaatccttgggaaaaacacaacggaacctactaagaagagtgagaagcagttagagtgtttgctaacacactgcattaaggtgccaatgcttgtcctggacccagccctgccagccaacatcaccctgaaggacctgccatctctttatccttcttttcattctgccagtgacattttcaatgttgcaaaaccaaaaaacccttctaccaatgtctcagttgttgtttttgacagtactaaggatgttgaagatgcccactctggactgcttaaaggaaatagcagacagacagtatggaggggctacttgacaacagataaagaagtccctggattagtgctaatgcaagatttggctttcctgagtggatttccaccaacattcaaggaaacaaatcaactaaaaacaaaattgccagaaaatctttcctctaaagtcaaactgttgcagttgtattcagaggccagtgtagcgcttctaaaactgaataaccccaaggattttcaagaattgaataagcaaactaagaagaacatgaccattgatggaaaagaactgaccataagtcctgcatatttattatgggatctgagcgccatcagccagtctaagcaggatgaagacatctctgccagtcgttttgaagataacgaagaactgaggtactcattgcgatctatcgagaggcatgcaccatgggttcggaatattttcattgtcaccaacgggcagattccatcctggctgaaccttgacaatcctcgagtgacaatagtaacacaccaggatgtttttcgaaatttgagccacttgcctacctttagttcacctgctattgaaagtcacattcatcgcatcgaagggctgtcccagaagtttatttacctaaatgatgatgtcatgtttgggaaggatgtctggccagatgatttttacagtcactccaaaggccagaaggtttatttgacatggcctgtgccaaactgtgccgagggctgcccaggttcctggattaaggatggctattgtgacaaggcttgtaataattcagcctgcgattgggatggtggggattgctctggaaacagtggagggagtcgctatattgcaggaggtggaggtactgggagtattggagttggacagccctggcagtttggtggaggaataaacagtgtctcttactgtaatcagggatgtgcgaattcctggctcgctgataagttctgtgaccaagcatgcaatgtcttgtcctgtgggtttgatgctggcgactgtgggcaagatcattttcatgaattgtataaagtgatccttctcccaaaccagactcactatattattccaaaaggtgaatgcctgccttatttcagctttgcagaagtagccaaaagaggagttgaaggtgcctatagtgacaatccaataattcgacatgcttctattgccaacaagtggaaaaccatccacctcataatgcacagtggaatgaatgccaccacaatacattttaatctcacgtttcaaaatacaaacgatgaagagttcaaaatgcagataacagtggaggtggacacaagggagggaccaaaactgaattctacagcccagaagggttacgaaaatttagttagtcccataacacttcttccagaggcggaaatcctttttgaggatattcccaaagaaaaacgcttcccgaagtttaagagacatgatgttaactcaacaaggagagcccaggaagaggtgaaaattcccctggtaaatatttcactccttccaaaagacgcccagttgagtctcaataccttggatttgcaactggaacatggagacatcactttgaaaggatacaatttgtccaagtcagccttgctgagatcatttctgatgaactcacagcatgctaaaataaaaaatcaagctataataacagatgaaacaaatgacagtttggtggctccacaggaaaaacaggttcataaaagcatcttgccaaacagcttaggagtgtctgaaagattgcagaggttgacttttcctgcagtgagtgtaaaagtgaatggtcatgaccagggtcagaatccacccctggacttggagaccacagcaagatttagagtggaaactcacacccaaaaaaccataggcggaaatgtgacaaaagaaaagcccccatctctgattgttccactggaaagccagatgacaaaagaaaagaaaatcacagggaaagaaaaagagaacagtagaatggaggaaaatgctgaaaatcacataggcgttactgaagtgttacttggaagaaagctgcagcattacacagatagttacttgggctttttgccatgggagaaaaaaaagtatttccaagatcttctcgacgaagaagagtcattgaagacacaattggcatacttcactgatagcaaaaatactgggaggcaactaaaagatacatttgcagattccctcagatatgtaaataaaattctaaatagcaagtttggattcacatcgcggaaagtccctgctcacatgcctcacatgattgaccggattgttatgcaagaactgcaagatatgttccctgaagaatttgacaagacgtcatttcacaaagtgcgccattctgaggatatgcagtttgccttctcttatttttattatctcatgagtgcagtgcagccactgaatatatctcaagtctttgatgaagttgatacagatcaatctggtgtcttgtctgacagagaaatccgaacactggctaccagaattcacgaactgccgttaagtttgcaggatttgacaggtctggaacacatgctaataaattgctcaaaaatgcttcctgctgatatcacgcagctaaataatattccaccaactcaggaatcctactatgatcccaacctgccaccggtcactaaaagtctagtaacaaactgtaaaccagtaactgacaaaatccacaaagcatataaggacaaaaacaaatataggtttgaaatcatgggagaagaagaaatcgcttttaaaatgattcgtaccaacgtttctcatgtggttggccagttggatgacataagaaaaaaccctaggaagtttgtttgcctgaatgacaacattgaccacaatcataaagatgctcagacagtgaaggctgttctcagggacttctatgaatccatgttccccataccttcccaatttgaactgccaagagagtatcgaaaccgtttccttcatatgcatgagctgcaggaatggagggcttatcgagacaaattgaagttttggacccattgtgtactagcaacattgattatgtttactatattctcattttttgctgagcagttaattgcacttaagcggaagatatttcccagaaggaggatacacaaagaagctagtcccaatcgaatcagagtatagaagatcttcatttgaaaaccatctacctcagcatttactgagcattttaaaactcagcttcacagagatgtctttgtgatgtgatgcttagcagtttggcccgaagaaggaaaatatccagtaccatgctgttttgtggcatgaatatagcccactgaccaggaattatttaaccaacccactgaaaacttgtgtgttgagcagctctgaactgattttacttttaaagaatttgctcatggacctgtcatcctttttataaaaaggctcactgacaagagacagctgttaatttcccacagcaatcattgcagactaactttattaggagaagcctatgccagctgggagtgattgctaagaggctccagtctttgcattccaaagccttttgctaaagttttgcactttttttttttcatttcccatttttaagtagttactaagttaactagttattcttgcttctgagtataacgaattgggatgtctaaacctatttttatagatgttatttaaataatgcagcaatatcacctcttattgacaatacctaaattatgagttttattaatatttaagactgtaaatggtcttaaaccactaactactgaagagctcaatgattgacatctgaaatgctttgtaattattgacttcagcccctaagaatgctatgatttcacgtgcaggtctaatttcaaagggctagagttagtactacttaccagatgtaattatgttttggaaatgtacatattcaaacagaagtgcctcattttagaaatgagtagtgctgatggcactggcacattacagtggtgtcttgtttaatactcattggtatattccagtagctatctctctcagttggtttttgatagaacagaggccagcaaactttctttgtaaaaggctggttagtaaattattgcaggccacctgtgtctttgtcatacattcttcttgctgttgtttagtttgttttttttcaaacaaccctctaaaaatgtaaaaaccatgtttagcttgcagctgtacaaaaactgcccaccagccagatgtgaccctcaggccatcatttgccaatcactgagaattagtttttgttgttgttgttgttgttgtttttgagacagagtctctctctgttgcccaggctggagtgcagtggcgcaatctcagctcactgcaacctccgcctcccgggttcaagcagttctgtctcagccttctgagtagctgggactacaggtgcatgccaccacaccctgctaatttttgtatttttagtagagacgggggttccaccatattggtcaggcttatcttgaactcctgacctcaggtgatccacctgcctctgcctcccaaagtgctgagattacaggcataagccagtgcacccagccgagaattagtatttttatgtatggttaaaccttggcgtctagccatattttatgtcataatacaatggatttgtgaagagcagattccatgagtaactctgacaggtattttagatcatgatctcaacaatattcttccaaaatggcatacatcttttgtacaaagaacttgaaatgtaaatactgtgtttgtgctgtaagagttgtgtatttcaaaaactgaaatctcataaaaagttaaatttttgtctgacaaaaaaaaaaaaaaa

SEQ ID NO: 5219 - DNA, 1083 bp, Homo Sapiens
  NM_024315
ctcaagatgaggaggtgcgcggggccggggcggagcagtcgcgttccccgcgtgtgagcccccacccatccctggcgccagcgcttccccgaccactcgggttcggctatgcgggagccgtgaggaggaggcttgcagtcgtggacctgagacctcgggaggtcatgctgtcttgcttttaagtggcttggggaaagtgaagaaaccccaaaatggaggactttgctaccaggacctacggcaccagtggcctggacaacagacctctgtttggggagacgtccgccaaggatcgaatcatcaatttagttgttggcagcttaacatccttattgattctagtaacgctgataagtgcttttgttttccctcaactacctccaaaaccgttgaatatattctttgctgtctgcatctctttgagtagtattactgcctgcatacttatctactggtatcgacaaggagacttagaaccgaaatttagaaagctaatttactatatcatattttctatcatcatgttgtgtatatgtgcaaacctgtacttccatgatgtgggaaggtgaggctgccaaggagaagtacttaccaggactcttcaaaatgatacattaggacagtgagtaatttttggataaggtatgctgaagaatctcctgcagaagtctgatacatgattttcatgttaattgtaaatgttaattccctcttgcaagggagacatatcctagatcactttgctttttctttaaggagctgatgttgcacctaaacattccaacccttaaagctaaaacagcacaaaaaaatttcacttttgaaatgaaatttttataattgtatggcaaaaggctatgtaaaaacaaatcttgcatcttaagacaaatattcttttatttctgttaaactgaatatacaattgttccctaggcaaccaacttttgcttataactacaatttaatttcacgttgacaaaacacagtgaaaagacaactttgtgaagatctaattacaataataaataaaataatttatacaaaaaaaaaaaaaaaaaaaaaaaaaaaaaaaaaaaaaaaaaa

SEQ ID NO: 5220 - DNA, 3930 bp, Homo Sapiens
  NM_024318
atgagacaaccccatgacaagaaggacccagcctccgagcggccacaccctgtgtgtctctctgtcctgccagcactgagggctcatccctctgcagagcgcggggtcaccggaaggagacgccatgacgcccgccctcacagccctgctctgccttgggctgagtctgggccccaggacccgcgtgcaggcagggcccttccccaaacccaccctctgggctgagccaggctctgtgatcagctgggggagccccgtgaccatctggtgtcaggggagcctggaggcccaggagtaccaactggataaagagggaagcccagagcccttggacagaaataacccactggaacccaagaacaaggccagattctccatcccatccatgacacagcaccatgcagggagataccgctgccactattacagctctgcaggctggtcagagcccagcgaccccctggagctggtgatgacaggattctacaacaaacccaccctctcagccctgcccagccctgtggtggcctcaggggggaatatgaccctccgatgtggctcacagaagggatatcaccattttgttctgatgaaggaaggagaacaccagctcccccggaccctggactcacagcagctccacagtggggggttccaggccctgttccctgtgggccccgtgacccccagccacaggtggaggttcacatgctattactattatacaaacaccccccgggtgtggtcccaccccagtgaccccctggagattctgccctcaggcgtgtctaggaagccctccctcctgaccctgcagggccctgtcctggcccctgggcagagcctgaccctccagtgtggctctgatgtcggctacgacagatttgttctgtataaggagggggaacgtgacttcctccagcgccctggccagcagccccaggctgggctctcccaggccaacttcaccctgggccctgtgagcccctcccacgggggccagtacaggtgctatggtgcacacaacctctcctccgagtggtcggcccccagcgaccccctgaacatcctgatggcaggacagatctatgacaccgtctccctgtcagcacagccgggccccacagtggcctcaggagagaacgtgaccctgctgtgtcagtcacggggttattttgacactttccttctgaccaaagaaggggcagcccatcccccactgcgtctgagatcaatgtacggagctcataagtaccaggctgaattccccatgagtcctgtgacctcagcccacgcggggacctacaggtgctacggctcatacagctccaacccccacctgctgtctttccccagtgagcccctggaactcatggtctcaggacactctggaggctccagcctcccacccacagggccgccctccacacctgcctcacacgccaaggattacacagtggagaatctcatccgcatgggcatggcaggcttggtcctggtgttcctcgggattctgttatttgaggctcagcacagccagagaaacccccaagatgcagccgggaggtgaacagcggagaggacaatgcacccttcagcgtggtggagcctcagggacagatctgatgatcccagaaggctctggaggacaatctaggacctccagaggggggtgagatttcaggccacacactgtggaaggtaatcatgtctgatcacaaattttgggtctccaccttacttccaatctatgttgtgaatgcccagttgagacccacggaaaagagctcatgggtgagtgtgaagtgcttctctgtcttaagttcccagagatccttgcctcttggaggccagcaaacactaactcttgaggaattcatgacaatatcatctgattcctccttcccagcttgtatggcagtctcccaccctcatgtgttcaatctgatgatcccaggaggttctggaacaaaatctacagcctatgctttctggactatctgtcgatcattcctgaagagagggatcaatgttgaggtattcatttcacatgatgaaaatgacaatatcaaatgtcagaggtagtagggctcacgtagaaatccaatacatccatggtaggactgcaaattacttgaatcaatttggggaaaatatcagaagtacccagtgaaaaagaagaaacatggccgggcacggtggctcatgcctgtaatcccagcactttgggaggctgaggcgggcggacacgagttcaggaattcgagtccagcttggccaacatagtgaaaccccgtctctactaaaaatacaaaacattagctgggcgtggtggcaggtgcctgtaatttcagctactcaggaggctgaggcaggagaattgcttgaacctgggagacggaagcaagttggcgccagttggtgcagtgagccaaggtggcgccattgcactccggcccaggtgacagtacgagacttcatctaaaaaaaaaagaaaaaaaaaaagaagagacacacagctatgaacacaaagcacagaacctagaggaaaatgtgttcatatggtgaggtttcattcacaacaacatggacaggactgctgctcatattacacaacagccataaaacccaaaaatacatctaaaacaaaggaaacatatgtggttcaattccaccaagggatactacgaggccgtgcagaggcacagacaaaatctacaaagagcaatgcaaaccaaccttccatcatgatgttgagtaaagaaacaagagtataaaaagaaggtgtgcacatgaagctcaaaaagaggcagcatttattttctagggaggcaaactcaaaatagaccccataaataaaggaaatagattatgtaatccaaaatagtgcttgcacatcaggaaatactggagggttctgttcaacatggaaactccaaggaccactggacgcgggcactggaacgctgactttcatttggtgaccctcaatccacttcgagttattggtaaatcacataattttaatttgatacggaataatcatacatgtttcttgggagcatgtggtaatctgattcatccatgcaatgtgtaacgatccaataaaggttcccaggacattcatcaccctgaacatttgttattatggttattattttgagacagagtcttgcactgtcgcccagctggcgtgcagtggcaggatcttggctcactgcaaactctgcctcccgggttcaagcagttttcctgtctcagcctcctgagtagctaggattacaggcatgcaccatcacacctcgctaatttttgtatttttattacagacggggtttcaccatgttgctctggctggtctcgaactcctgacctaaggtgatccaccagcgtcggctttccatagtgctgggattacaggtgtgagccactatgcctggccaacttttataatttctgtgctgggaacattccaaatcttcatttctcactcatgtggaaaatacaataatctgttgctaactatggtcaccctactgagctctcaggccctggaacttactccttctctccacctgtatttctgcacccgtccaccaacctctctccatccctgtcctccacactcccttgccagcctctgttgacaaccattctactctctgccatcacaaggcccacttttgtagcttccgcgtgagtgagaacatgctcctctttctgggcctggcttatttcactgaacataatgtcttccagattcatctgtgttgctgaacatggtacaatttccttctttttatgcctgaatattatttcattgtgtatatagaccacatgttccttatccattcatccattgatggacataggttgattccatatcttggctattgtgaatactgctgcaataaacatggcaatgcagac

SEQ ID NO: 5221 - DNA, 1307 bp, Homo Sapiens
  NM_024319
tcgggcctgggtccgacggtagtgggtagcgggtctcgggttgcgggttgcaggttgcaagccgcaggccccaggcaactgccttcccggcgccatgttcggctccagtcgtggaggcgtgcgcggcgggcaggaccagttcaactgggaggacgtgaagactgacaagcagcgggagaactacctgggcaactcgctgatggcgccggtaggccgctggcagaagggccgcgacctcacctggtacgccaagggccgggcgccatgcgcgggcccgagccgcgaggaggaactggcagccgtgcgggaggcggagcgcgaggcgctgctggccgcccttggctacaagaacgtgaagaagcagcccacgggcctgagcaaggaggacttcgcggaggtctgcaagcgggaaggaggcgaccccgaggagaagggcgtggaccggctgctggggctggggagcgcaagtggctccgtgggccgcgtggcgatgtcccgagaggacaaggaggccgccaaactggggctgtctgtgttcacgcatcaccgcgtagagagcggcgggcccgggacctcggcagcctcggccaggaggaagccgcgggcggaggatcagacggaaagcagttgtgagagccacaggaaaagcaagaaggagaagaagaaaaagaaaaagaggaaacacaagaaagagaagaagaagaaagacaaagagcacaggcggccagctgaggccacctcctctcccacatctcctgagaggcccaggcaccaccaccatgactccgactccaactccccctgctgtaagaggaggaagcggggacacagtggggacaggaggagcccgtctcgcaggtggcatgacagaggctctgaggcctgatggctggaccctgctcactgctgttgtgggaccctgaaccctcccttcaccttgcttgcctcctgcctcggaagctccttgggtgtgggtgaagcccgaggctgctcctgtggaagtggctctgggcaccagcctgtggggctaaagacttgacagctagctctggagcagccggcttcctggaaaacctccaggtttcgcataccagggatggcccctggcttggcctgcgaaggtgaacctgcccagatttatcagtagaggctggactccctctgtgtcctgcccatggttgcagcagccatgggcctatgagcggtctaactgtggccaagtatggtgacctctatttttctttatattgactctttgtatttcaataaatatattttaaaaggaaggtaaaaaaaaaaaaaaaaaa

SEQ ID NO: 5222 - DNA, 4102 bp, Homo Sapiens
  NM_024322
ttgaagacgtggatggcgggaattctcgcttctggcctgggtgagctagaagggagaagcaaggacattggagtccctatcaccggttgcctagacaacttcatgggaaggcccttgggaatctgagatggagcaggcgaaccctttacgtccagatggcgagtccaaaggaggtgttttagctcacttggaaaggctagagacccaagtgagcagatcccgtaaacagtctgaagagctgcagagcgtgcaggcccaggaaggtgctcttggaaccaagattcataaactaaggcgtctgcgagatgagctgagggctgtggtgcggcaccggcgagccagcgtgaaagcatgtattgccaatgtagaacccaaccaaacagtggagatcaatgagcaagaagcattggaagagaaattggaaaatgtgaaagccattctgcaggcatatcattttacaggcctcagtggtaaactgaccagccgaggagtttgtgtctgcatcagtactgcttttgaggggaacctattggattcctattttgtggaccttgtcatacagaaaccactccggatacatcaccattcagtcccagtcttcattcccctggaagagatagctgcaaaatatttacagaccaacatccagcacttcctgttcagtctctgcgagtacctgaatgcttactctgggaggaagtaccaggcagaccggcttcagagtgactttgcagccctcctgactgggcccttgcagagaaacccactgtgtaacttgctgtcatttacttacaaactggatccagggggtcagtccttcccgttctgtgctagattgctgtataaggacctcacagcaactcttcccactgacgtcaccgtgacatgtcaaggagtggaagtattatccacttcatgggaggagcaacgagcatctcatgaaactctgttctgtacgaagcccttgcatcaagtgtttgcctcatttacaagaaaaggagaaaagttggatatgagtctggtctcctaatagattgttttcactgcactgggagcacatcagagaaataaatcccccctcccctgccaggtgaaaggaaatattgcactttctgttctcatgactaaggggacaggagttccagaagaacctttcaagatgatcaggaacaccaggacgagggccgtctcacctcactcggaccacatggagacctcccttcaaaatgggagccatgtcctgccccaccaagccctgtctgaagtggagcttccccgcctgtgctccctccacagtcccggaaagcccagcggcaaaggcagctttgtcccagctctgccaccctcctgctcacagtggtcagggcccctcaggggcaaggacggcagggattggaacgagggctctggaaggactgttcagccctatgcctaagacccctatgctggggacactacaggcacacacaggaatagcagggccaccctcagagctcacacatccacgaacaaatgaaggctgaggaggtttctaaacctaaagtccatgagtgtgcacttcaatccaggaaggtcgggacttccttcagtttcaaaaaataaattctcccttccggtttggactgttgcaggctcgaggccattcaggagttgtccaccacctggtggggcagtgtgacagaggggccattggggaaggtggctagcttatcccgccccttcaagaagaaggtcagcagctcccccttccccttcacaaagatggggcctcgcctcacaaagcggaagccgtactctcggaggatgacttgggtttcttctaccacctggagagggagggggagcaagaacgtggcgttacggggggagcctagactgagggcgggtgggggctttgggtggttggagccgagcactgatccatgggtcccaagcagtacgggacactccccaaacctcccagggccaagcccttccacccgtggcgagcagcgggtgggaaggagaaccctggagtgactggctgggggcctcctctcatccagagacttctctcctaggatggccatggtcacctgggtggcagcactgttacctggaaactgccactgcctgctcttctgtccctttgcccctttcgtggagcttttctgccagacgccactgagacagatcacaaggtattagaaggttcatacccaaaggtaggccatatgcatctagaacttcagcccagattttgtggatgggtggaagtgtttcttcctgtgctgaggctagctattgcagagattcttttccacttgccccacgtctctgcctctggacttactgttcagggccagggtgggaggcaggggcacgtgggaaagcactgttccggttttgttctcatgccgagtctgagcacgtgccagctgtgccactggacatacctgaatgttgcccatgacccccgtggactccatcctgctggctacattgactgtattgccccagatgtcgtagtgtggtttccgggctccgatgaccccagccagaaccccgcctttgttcatgcctagggtagaggcataaagttcagcacagccacaggccacaccttgttatgggcctcagaagccatctcctctccagacctgtaccacaaagctcctaatgtaacacatcattgtcctcattcaacttggctgtatgctattggagggtggaaatcacatctcctgtttatccgtgtgcttgttaggtgtcagccgccaccccccccccatatgcagatttactcggcatggtagtggccagcttctaacacagctggtatttcaagtctcctgggacctcactcaggaatgataccccctcagtagaagcagcaggtgatcttaactcctttcaaagagcaggcctgtctgggaagccatgtcctcagcaggcacagcaacccctctggaaatggatcacaaactcacttctcagccaggcaggccaagcttctattgtaacagtaggcacagtatagtcggatcatcacatcagctgggtttttggtttagtcatctagagtcgtctggactaaaggtctttcaggtctccttgccctgtgagtgcgtgaacctccccacccgaattgcctcagttgtcctgagcctcatgtctctcctggtggtgggccaggcccctgcatgggaagggagcctgctgcggggcaggccagctgggggtgctcacctatgcgcagcatgaagttattgaaggactggttgttgatgttggtgagcgtatccttcatggccagcgcgaagtcggccaggtcagccaggtgctgccagcgctctctctcggacttgtcttcctgtgccaggggaccgtggagaaagtgtcaggggccgctcactgcagcagcctgctctgctgccttccctggcagtgttctgggggtggattccctacacctagatgttcaaggccttacttttcctcccacaaaggagtcgcagccacgctagctctgacttgccactgtgacaaagttcacgtagcaggtctaggcaaagactgggcaattgagcagaggagacggacctgtgagtctgaccacgaggcggaccccttcaccttggctgggcctggtcctggtccttaggttttgtcaggttgtccttgtttggatccctcaactaggtgataagcactggagggggatgacccgccttggacgtgtttctttaacctcatccatataatagggccgtgggatggttgtagaggtaaagcaggatgatggtgttttaagaccagagcttgggaccagggctcctacacctaattttctctcctggtagctgaacaaaggtctaaattagcttaacaaaagaacaggctgccgtcagccagagttctgaaggccatgctttcagtttcccttgttgacaattgctctccagttcctatgaaagcacagagccttagggggcctggccacagaacacaaccatcttaggcctgagctgtgaacagcagggggttgtgtgtctgttctgtttctctgcttgccgaactttctcaataaaccctatttcttatttataaaaaaaaaaaaaaa

SEQ ID NO: 5223 - DNA, 2383 bp, Homo Sapiens
  NM_024326
tgtcctcccagctaccccctccctaagcaggctgaggaagaagagatagcaagccctcacctaacttgacccctttcttgtctctccccgctgctagcttctcccttctcgctgccttgcggggtggggaaacgtggaaggaattctgggaaaaccagatgtctgggttctctattcccgtctggcttgattctggacaaggggcttcctctccagggcctcggtttccccatctttaaaatggactgatagcatagacctgcccacctttcagaggtgcccgaagccttgacgagataacagatgagaagtggttttcgttgtgatgagccagctgaagcggttgcaccggagcgccagaccgtcagcggtgcagtggctctcgcgtccttcacatccccccacacccatcccgtggatgatgggggaaggcactactcctggggttccccgaagcggatcctgggactgggacctggggacgcggtgagaggcagccctgaagctgagtccagaggtctggggcgtcattgtcccagggcggacccagccccagaccctacaactaaacccaaggccagccgagaagcactaccactggcgggctgagctgagctctcattcttcttaggactctggacctttggaggaaatgaaagggacccagttggaaatatagtctttcttcgcgccccctacatctctctcccccggcggaaacgcggcccaaactgttacgaagtggaagaggctggatagctcttcataattaatcaggaatgggaggtttgagcaggtttacttgatgagggaaacattatagcctcgccaattcattcattatttcaacaattacttattgaacacctgctacgtggcagacagtaagagcctggatagtttctccccgtttttcaaagtcgctaaacgcgaccagagggcagaggagaggccggtaacctaagagtcctggctccgccccctccgcgtttggccttgcctgctcctcccaccaccacttcgctcagaggcggctactggctcaagaggacgacagaagccagtctctgatgcccaccgcattctccagcttcaggcctcaagccctgtagccgagaaggcgaggcctaatgttacaccaccggtctgttccgcctccgtttcggggtccacccgaaaagctttcagatcggatcctcggtgagacggcactcgattaaataggtctgtctctacaggccaaggaggcgggtttggtgcggccactccaaggccaaagcgagaaaatcttactgcgcacgcgcaatagacagccgatggagccaccgatggagccgtccggaggggagcaagagcccggagccgtcaggttcctggacctgccctgggaagacgtgctgctcccacacgtcctgaaccgggtcccgctgcgccagctgctccggctgcagcgcgttagccgggccttccggtcgctggtgcagcttcacctggccgggctgcgtcgcttcgatgccgcgcaggtgggtccgcagatcccgcgggccgcattggcccggctgctgcgggatgccgaggggctgcaggagctggcactggcgccgtgtcacgaatggctgtcagacgaggacctggtgccggtgctggcgcggaatccgcagctgcggagtgtggcgttgggcggctgcgggcaactgagtcgccgggcgcttggggctttggccgagggctgcccacgcctgcagcgcctgtcgctcgcgcactgtgactgggtggacgggctggcgctgcgcggcctcgctgatcgctgcccggccctggaggagctggatctcaccgcctgccgccagctcaaggacgaggccatcgtgtacctggcgcagaggcgcggcgctggtctccgcagcctctctctggccgtcaacgccaacgtgggggacgccgcggttcaagagttggctcggaactgcccagaactccaccaccttgacctcaccggctgcctccgcgtcggaagcgacggtgtcaggacattggccgagtactgccccgtgctgcgttcgctgcgggtgcggcactgccaccatgtggcggagtccagcctgagccgcttgcggaagcgcggcgtggacatcgacgtggagccgccgctgcaccaggccctggtgctgctgcaggatatggcgggcttcgcaccttttgtcaacctgcaggtctgacccgcctgccaatcggagcacagctggactgtgtggctggggcctgacactgagctgtagggaaactgaactgtgaggacctctggtgagaggccagtgccctgccccaccctggagcttcaaataaagagctttttacccccaaaaaaaaaaaaaaaaaaaaa

SEQ ID NO: 5224 - DNA, 1899 bp, Homo Sapiens
  NM_024327
attttgaggaccgggctggtgcgactatactactgccggatggcaaatccgggatctcggctccgagaggctcatctggcaaaagggcgcggaaaccacgggggccctgagactgagtggtccctatcccacttctctctggggcggcgctgtagccagcggctgacaggcgcagcgaaaggcagccctctgctaagggtcccagcaccatggaggacccgaaccctgaagagaacatgaagcagcaggattcacccaaggagagaagtccccagagcccaggaggcaacatctgccacctgggggccccgaagtgcacccgctgcctcatcaccttcgcagattccaagttccaggagcgtcacatgaagcgggagcacccagcggacttcgtggcccagaagctgcagggggtcctcttcatctgcttcacctgcgcccgctccttcccctcctccaaagccctaatcacccaccagcgcagccacggtccagccgccaagcccaccctgccggttgcaaccactactgcccagcccaccttcccttgtcctgactgtggcaagacctttgggcaggctgtttctctgaggcggcaccgccagatgcatgaggtccgtgcccctcctggcaccttcgcctgcacagagtgcggtcaggactttgctcaggaagcagggctgcatcaacactacattcggcatgcccggggggagctctgagtgcagcttaagcctctccacggtgacgggtggctctgtggctggtaggactcacccatgatatggggtgcaggaactctgggggccctgaaggatttgcttccctcccctgggaaggcagagggctcttaataaagaggacccagaagattcttatttagagcttcagtctttggagcacacagggccttcgtgagacagtgaaatcagataataatgagatcttttgttaaaaaaaaaaaatgggaagggagtgcgggagagaaatggtttgtgtctcccttattcccagttaaatacctagctgcagattgtgccatcacccttcattcttcccagatggatgccatgggctatgggagcaaattgccctggacctttgcctgaatgggggcaggaaaggtgaggtgttgctggcctgtaatgccaccaggtgagttccagatgtggagcaacttgggcttttggggatggggcagcaaagttgggagctggaccccaattgagtgggggtagcaattggagtccttgtgtctcttttccaccccctgccatcctcacttagaggggccatggcactagatggcactagtcccccgataatttatgtctcgttgaaataattttgtatatcattctagtcctgaaatatttttttcatatgtgtaggtgaaatggtatgaataagctaacaggaatagtatctaaaaacagaaaacatccatattaaaatgtctaaacagggagctctggcttttgagtgggaatttccagagaacataagggtgtgggcaggtgggggaactcaggccagagttggcctcgctttgtggggaaactggtttggaatcaaacagagataccttctgtttcgggttttatttggccaacactgggagatttcccattaagatcctattttcagctctcttgaaaggcccaacctaggctgacattgtcagcaggggcaggacagaagttacaacaggctggagggagcagtgggtgtcaccctcaactggagatgagtcccaccaggccagttttacccccttagttacctgccctgcacctgcagacaatggtcgatgccttgcatataatacttatagactctgtttatgttgagggatgtttttaaagcccacaggtgaggtggatgtggtagactgatcac

SEQ ID NO: 5225 - DNA, 2430 bp, Homo Sapiens
  NM_024330
cacacccgcactcctcccgggtttctgctctccgcccgtgtggagtggtgggggcctgggtgggaatgggcgtgtgccagcgcacgcgcgctccctggaaggagaagtctcagctagaacgagcggccctaggttttcggaagggaggatcagggatgtttgcgagcggctggaaccagacggtgccgatagaggaagcgggctccatggctgccctcctgctgctgcccctgctgctgttgctaccgctgctgctgctgaagctacacctctggccgcagttgcgctggcttccggcggacttggcctttgcggtgcgagctctgtgctgcaaaagggctcttcgagctcgcgccctggccgcggctgccgccgacccggaaggtcccgaggggggctgcagcctggcctggcgcctcgcggaactggcccagcagcgcgccgcgcacacctttctcattcacggctcgcggcgctttagctactcagaggcggagcgcgagagtaacagggctgcacgcgccttcctacgtgcgctaggctgggactggggacccgacggcggcgacagcggcgaggggagcgctggagaaggcgagcgggcagcgccgggagccggagatgcagcggccggaagcggcgcggagtttgccggaggggacggtgccgccagaggtggaggagccgccgcccctctgtcacctggagcaactgtggcgctgctcctccccgctggcccagagtttctgtggctctggttcgggctggccaaggccggcctgcgcactgcctttgtgcccaccgccctgcgccggggccccctgctgcactgcctccgcagctgcggcgcgcgcgcgctggtgctggcgccagagtttctggagtccctggagccggacctgcccgccctgagagccatggggctccacctgtgggctgcaggcccaggaacccaccctgctggaattagcgatttgctggctgaagtgtccgctgaagtggatgggccagtgccaggatacctctcttccccccagagcataacagacacgtgcctgtacatcttcacctctggcaccacgggcctccccaaggctgctcggatcagtcatctgaagatcctgcaatgccagggcttctatcagctgtgtggtgtccaccaggaagatgtgatctacctcgccctcccactctaccacatgtccggttccctgctgggcatcgtgggctgcatgggcattggggccacagtggtgctgaaatccaagttctcggctggtcagttctgggaagattgccagcagcacagggtgacggtgttccagtacattggggagctgtgccgataccttgtcaaccagcccccgagcaaggcagaacgtggccataaggtccggctggcagtgggcagcgggctgcgcccagatacctgggagcgttttgtgcggcgcttcgggcccctgcaggtgctggagacatatggactgacagagggcaacgtggccaccatcaactacacaggacagcggggcgctgtggggcgtgcttcctggctttacaagcatatcttccccttctccttgattcgctatgatgtcaccacaggagagccaattcgggacccccaggggcactgtatggccacatctccaggtgagccagggctgctggtggccccggtaagccagcagtccccattcctgggctatgctggcgggccagagctggcccaggggaagttgctaaaggatgtcttccggcctggggatgttttcttcaacactggggacctgctggtctgcgatgaccaaggttttctccgcttccatgatcgtactggagacaccttcaggtggaagggggagaatgtggccacaaccgaggtggcagaggtcttcgaggccctagattttcttcaggaggtgaacgtctatggagtcactgtgccagggcatgaaggcagggctggaatggcagccctagttctgcgtcccccccacgctttggaccttatgcagctctacacccacgtgtctgagaacttgccaccttatgcccggccccgattcctcaggctccaggagtctttggccaccacagagaccttcaaacagcagaaagttcggatggcaaatgagggcttcgaccccagcaccctgtctgacccactgtacgttctggaccaggctgtaggtgcctacctgcccctcacaactgcccggtacagcgccctcctggcaggaaaccttcgaatctgagaacttccacacctgaggcacctgagagaggaactctgtggggtgggggccgttgcaggtgtactgggctgtcagggatcttttctataccagaactgcggtcactattttgtaataaatgtggctggagctgatccagctgtctctgacctacaaaaaaaaaaaaaaaaaa

SEQ ID NO: 5226 - DNA, 2308 bp, Homo Sapiens
  NM_024336
gcgaggagggggagtgaaaactagaggagggcgaaggaagcgaggcgcgacactgctggggagaggagggcagtgaggagcgaggagcgggcagaggcagctccggcggccgagaggagggagcgcggcgcagagaggaggggcttgcgccccgtagaaatgtcaatcagagcccggagccccgggaatctccgccaatctgttcggacctgacctggctcctcgccgccgccctcgccgccgccgtcgccgccgcggagcagatcaataggcgaacgcggagcacagcgcagcgcgggcggcagcgcggccccaagcccggcccagcccccgatgcgcgccggagcccgcgggcggcgctgagctgggcggcccgggggtcggcccccctctccgtccgtgccccgcgggccaccatgtccttcccccagctgggataccaatacatccgcccgctttacccgtccgagcgcccgggggccgctggcggcagcggcggcagcgcgggggcccggggcggcctgggtgccggagcctcggagctgaacgcctcggggtccctgtccaacgtgctctcgtccgtgtacggggcgccctacgccgcggccgctgcggccgccgccgcccaaggctacggcgccttcctgccctacgccgcggagctgcccatcttcccgcagctgggcgcgcagtatgagctgaaggacagccccggggtgcagcatccggccgcggctgccgcgtttccgcacccgcaccccgccttctacccgtatggccagtaccagttcggggacccgtcccgtcccaagaacgccaccagggagagcaccagcacgctgaaggcctggctcaacgagcaccgcaagaacccctaccccaccaagggcgagaagatcatgctggccatcatcaccaagatgaccctcacccaggtgtccacctggttcgccaacgcgcgccggcgcctcaagaaggagaataagatgacttgggcgcctcgcagccgcactgacgaggagggaaacgcttatgggagcgagcgcgaggaggaagacgaagaggaggacgaggaggacggcaaacgcgagctagagctggaggaggaggagctcgggggggaggaggaggacacggggggcgagggcctggctgacgacgacgaggacgaggagatcgatttggagaacttagacggcgcggccaccgagcctgagctgtccctggctggggcggcgcgcagggatggcgacctaggcctgggacccatttcggactccaaaaatagcgactcggaagatagctctgagggcttagaggaccggccactaccggtcctgagtctggctccagcgccaccaccagtggccgtggcctcgccgtctctgccgtcgccccccgtgagcctggacccctgcgctcccgcaccagcccccgcctccgccctgcagaagcccaagatctggtccctcgcggagactgccacaagcccggacaacccgcgccgctcgcctcccggcgcgggggggtctccaccgggggcagcggtcgcgccttccgccctgcagctctctccggccgccgccgccgccgccgctcacagactggtctcagcgccgctgggcaagttcccggcttggaccaaccggccgtttccaggcccaccgcccggcccccgcctgcacccgctctccctgctgggctctgcccctccgcacctgctgggacttcccggagccgcgggccacccggctgccgccgccgccttcgctcggccagcggagcccgaaggcggaacagatcgctgtagtgccttggaagtggagaaaaagttactcaagacagctttccagcccgtgcccaggcggccccagaaccatctggacgccgccctggtcttatcggctctctcctcatcctagttctttaaaaaaaacaaaaaaacaaaaaaaactttttttaatcgttgtaataattgtataaaaaaaatcgctctgtatagttacaacttgtaagcatgtccgtgtataaatacctaaaagcaaaactaaacaaagaaagtaagaaaaagaaataaaaccagtcctcctcagccctccccaagtcgcttctgtggcaccccgcattcgctgtgaggtttgtttgtccggttgattttggggggtggagtttcagtgagaataaacgtgtctgcctttgtgtgtgtgtatatatacagagaaatgtacatatgtgtgaaccaaattgtacgagaaagtatctatttttggctaaataaatgagctgctgccactttgactataacccg

SEQ ID NO: 5227 - DNA, 1444 bp, Homo Sapiens
  NM_024339
gggcacagccgcgaggttctgcgcgggcgcggaagacgggcggcgcgtggcggaaggcaggcttgctcctcggggtgggggagggtatccggcttaagggggctgcggtggacaccacttcttaatgtcgggggtcttcgcggcgctcacctcggctcctagggttcgggacggtacgcaccagccaccttcgcgccgaaggcggtagggcgccacggagaggaaccgctctaggcacgtaaggcctcgtgaggttgcgtcgcgcgcggagcactctgggacttgtagttctggagatggagcgagctgtgccgctcgcggtgcctctgggtcagacagaggtgttccaggccttgcagcggctccatatgaccatcttctcccagagcgtctcaccatgtgggaagtttctggcggctggcaacaattacgggcagattgccatcttcagcttgtcctctgctttgagctcagaagccaaagaggaaagtaagaagccggtggtgactttccaagcccatgatgggcccgtctatagcatggtttccaccgatcgacatctgcttagtgctggggatggggaggtgaaggcctggctttgggcggagatgctcaagaagggctgtaaggagctgtggcgtcgtcagcctccatacaggaccagcctggaagtgcctgagatcaacgctttgctgctggtccccaaggagaattccctcatcctggctgggggagactgtcagttgcacactatggaccttgaaactgggactttcacgagggtcctccggggccacacagactacatccactgcctggcactgcgggaaaggagcccagaggtgctgtcaggtggcgaggatggagctgttcgactttgggacctgcgcacagccaaggaggtccagacgatcgaggtctataagcacgaggagtgctcgaggccccacaatgggcgctggattggatgtttggcaactgattccgactggatggtctgtggagggggcccagccctcaccctctggcacctccgatcctccacacccaccaccatcttccccatccgggcgccacagaagcacgtcaccttctaccaggacctgattctgtcagctggccagggccgctgcgtcaaccagtggcagctgagcggggagctgaaggcccaggtgcctggctcctccccagggctgctcagcctcagcctcaaccagcagcctgccgcgcctgagtgcaaggtcctgacagctgcaggcaacagctgccgggtggatgtcttcaccaacctgggttaccgagccttctccctgtccttctgatctctgacgacacccccagccagctcagggttttagagtgtttttcattttctttttttttttttttttacaataaagtttcaggcttttttaccatgaaaaaaaaaaaaaaaaaaaaaaaa

SEQ ID NO: 5228 - DNA, 799 bp, Homo Sapiens
  NM_024407
aaggagaacggacctcagaggttgtctgaaggccgaggccaagatggcggtgctgtcagctcctggcctgcgcggcttccggatccttggtctgcgctccagcgtgggcccggctgtgcaggcacgaggtgtccatcagagcgtggccaccgatggcccaagcagcacccagcctgccctgccaaaggccagagccgtggctcccaaacccagcagccggggcgagtatgtggtggccaagctggatgacctcgtcaactgggcccgccggagttctctgtggcccatgaccttcggcctggcctgctgcgccgtggagatgatgcacatggcagcaccccgctacgacatggaccgctttggcgtggtcttccgcgccagcccgcgccagtccgacgtcatgatcgtggccggcacactcaccaacaagatggccccagcgcttcgcaaggtctacgaccagatgccggagccgcgctacgtggtctccatggggagctgcgccaacggaggaggctactaccactattcctactcggtggtgaggggctgcgaccgcatcgtgcccgtggacatctacatcccaggctgcccacctacggccgaggccctgctctacggcatcctgcagctgcagaggaagatcaagcgggagcggaggctgcagatctggtaccgcaggtagcgccgccgccgccgccgccggagcctgtcgccgtcctgtccccagcctgcttgtgtcccgtgaggttgtcaataaacctgccctcgggctgccgcctcccaaaaaaaaaaaaaa

SEQ ID NO: 5229 - DNA, 2206 bp, Homo Sapiens
  NM_024419
cggcgagtctccatggcggtggcggcggcagctgcggcgggacccgtgttctggaggcgactgctgggcctcctgcctggccgcccagggctggccgcgctcctgggacgcctgtccgaccgcctcggcaggaaccgggaccgccagcgcaggaggtcaccatggctgttattggctcccttgctgtccccagctgttccccaggtcacctccccaccttgctgcctgtgtccagaaggcgtgcaccggttccagtggatcagaaacctggttccagaatttggagtctccagttctcacgttagggtgctttcttccccggcagagtttttcgagctcatgaaggggcagataagagtagccaagaggcgggtcgtgatggcatccctctacctggggacaggtcctttggaacaggagctggtggactgcctggaaagtactctagaaaagtcactccaagcaaagtttccttcaaatctcaaggtctccattctcttagacttcacgcggggctcacgaggccggaagaactcccgcacaatgctgctcccactcctgcggaggttcccagagcaggtccgagtctccctctttcacacgccgcacctccgtgggctgcttcggctcctcatccctgagcgcttcaacgagaccatcggcctccagcacattaaggtgtacctcttcgacaacagcgtcatcttgagcggtgcaaacctgagtgactcctacttcaccaaccgccaggaccgctacgtgttcctgcaggactgtgcggagattgccgacttcttcacggagctggtggacgcggtgggggatgtgtccctgcagctgcagggggacgacacggtgcaggtggtggatgggatggtgcatccttacaaaggggaccgggccgagtactgcaaggcagccaataagagggtcatggatgtgatcaactcagccaggacccgccagcagatgctgcatgcccagaccttccacagcaactctcttttgacccaggaagatgcagcagctgctggggatcgcagaccagcccctgacacctggatttatccgctgattcagatgaagcccttcgagattcaaatcgatgagattgtcactgagaccctgttgactgaggcggagcgcggggcaaaggtctacctcaccactggctatttcaacctgacccaggcctacatggacctggtcttgggcactcgggctgagtaccagatcctgctggcctcaccagaggtgaatggcttctttggggccaagggggtggccggcgccatcccagcggcctatgtgcacatcgagcgacagttcttcagtgaggtgtgcagcctgggacagcaggagcgggtccagcttcaggagtactggcggaggggctggacgttccacgccaaaggcctctggctgtacctggcagggagcagcctgccctgtctcacgctgattggctctcctaattttgggtacaggtcagttcaccgggacctggaggcccagattgcgatcgtgacggagaaccaggccctgcagcagcagcttcaccaggagcaagagcagctctacctgaggtcaggtgtggtgtcctctgccaccttcgagcagccgagtcgccaggtgaagctgtgggtgaagatggtgactccactgatcaagaacttcttctgaggacagacaggaatggccttgatgaagatgacaggcatggccggggtcagctctttcagccgcgcttcagcgatgactccagtctgggtgtcccagcgagcccctgcagggacagtatggctgagggtcaggtgtgctgccagtaagtgagggaggggctggcaggaagggtggggtcctcacactccccgccctctgcagagctgggctctaccccaaaaggcttcaggccagctgccacagctggaagcagaggccttcgtaggtgatggcctgcatgttgtaactaccccgtcccgctgggctcaaggaacagctcagctaaagccctcgggttccatccgtttaaatctgtggcattttcagagcctcatctgtcagccttaatgtcagtggcaggaagtcataactccagctaaaaattacagagtaaagttccctgattcttaatgtgtaatgtctgccctatgtgtacatacacaatataattatacatctgtgcatataaaaaaaaaaaaaaaaa

SEQ ID NO: 5230 - DNA, 5211 bp, Homo Sapiens
  NM_024422
gtgcagtcagggcttctgctgggcagggccggctgttaatctcgcctggcggagcggacaccggggcgtggtgggggagatgggccttataggtggcgtccgctggtgagaaacaccttgcgcaggtaaaagggtggcggcgagagggagttcccacccgtggctttcttagagaaatgaagtcttaagtcttaaatagacaacaaggaggggccgatcggtgtcttttggacgcgtctggagcccctccctccgccaaaggaaaagccccttggatgagaggcaggcgcttcagagaagctaagaaaagcacctctccgcgcgccccacctcctccgcctcgcgctcctcctgagcagcgggcccagactgcgctccggccgcggccctcgccccgcggagccctcctaccccggcccgacgctcggcccgcgacctgccccgagccctctccatggaggcagcccgcccctccggctcctggaacggagccctctgccggctgctcctgctgaccctcgcgatcttaatatttgccagtgatgcctgcaaaaatgtgacattacatgttccctccaaactagatgccgagaaacttgttggtagagttaacctgaaagagtgctttacagctgcaaatctaattcattcaagtgatcctgacttccaaattttggaggatggttcagtctatacaacaaatactattctattgtcctcggagaagagaagttttaccatattactttccaacactgagaaccaagaaaagaagaaaatatttgtctttttggagcatcaaacaaaggtcctaaagaaaagacatactaaagaaaaagttctaaggcgcgccaagagaagatgggctccaattccttgttcgatgctagaaaactccttgggtccttttccacttttccttcaacaggttcaatctgacacggcccaaaactataccatatactattccataagaggtcctggagttgaccaagaacctcggaatttattttatgtggagagagacactggaaacttgtattgtactcgtcctgtagatcgtgagcagtatgaatcttttgagataattgcctttgcaacaactccagatgggtatactccagaacttccactgcccctaataatcaaaatagaggatgaaaatgataactacccaatttttacagaagaaacttatacttttacaatttttgaaaattgcagagtgggcactactgtgggacaagtgtgtgctactgacaaagatgagcctgacacgatgcacacacgcctgaagtactccatcattgggcaggtgccaccatcacccaccctattttctatgcatccaactacaggcgtgatcaccacaacatcatctcagctagacagagagttaattgacaagtaccagttgaaaataaaagtacaagacatggatggtcagtattttggtctacagacaacttcaacttgtatcattaacattgatgatgtaaatgaccacttgccaacatttactcgtacttcttatgtgacatcagtggaagaaaatacagttgatgtggaaatcttacgagttactgttgaggataaggacttagtgaatactgctaactggagagctaattataccattttaaagggcaatgaaaatggcaattttaaaattgtaacagatgccaaaaccaatgaaggagttctttgtgtagttaagcctttgaattatgaagaaaagcaacagatgatcttgcaaattggtgtagttaatgaagctccattttccagagaggctagtccaagatcagccatgagcacagcaacagttactgttaatgtagaagatcaggatgagggccctgagtgtaaccctccaatacagactgttcgcatgaaagaaaatgcagaagtgggaacaacaagcaatggatataaagcatatgacccagaaacaagaagtagcagtggcataaggtataagaaattaactgatccaacagggtgggtcaccattgatgaaaatacaggatcaatcaaagttttcagaagcctggatagagaggcagagaccatcaaaaatggcatatataatattacagtccttgcatcagaccaaggagggagaacatgtacggggacactgggcattatacttcaagacgtgaatgataacagcccattcatacctaaaaagacagtgatcatctgcaaacccaccatgtcatctgcggagattgttgcggttgatcctgatgagcctatccatggcccaccctttgactttagtctggagagttctacttcagaagtacagagaatgtggagactgaaagcaattaatgatacagcagcacgtctttcctatcagaatgatcctccatttggctcatatgtagtacctataacagtgagagatagacttggcatgtctagtgtcacttcattggatgttacactgtgtgactgcattaccgaaaatgactgcacacatcgtgtagatccaaggattggcggtggaggagtacaacttggaaagtgggccatccttgcaatattgttgggcatagcattgctcttttgcatcctgtttacgctggtctgtggggcttctgggacgtctaaacaaccaaaagtaattcctgatgatttagcccagcagaacctaattgtatcaaacacagaagctcctggagatgacaaagtgtattctgcgaatggcttcacaacccaaactgtgggcgcttctgctcagggagtttgtggcaccgtgggatcaggaatcaaaaacggaggtcaggagaccatcgaaatggtgaaaggaggacaccagacctcggaatcctgccggggggctggccaccatcacaccctggactcctgcaggggaggacacacggaggtggacaactgcagatacacttactcggagtggcacagttttactcagccccgtcttggtgaaaaagtgtatctgtgtaatcaagatgaaaatcacaagcatgcccaagactatgtcctgacatataactatgaaggaagaggatcggtggctgggtctgtaggttgttgcagtgaacgacaagaagaagatgggcttgaatttttggataatttggagcccaaatttaggacactagcagaagcatgcatgaagagatgagtgtgttctaataagtctctgaaagccagtggctttatgacttttaaaaaaaattacaaaccaagaattttttaaagcagaagatgctatttgtgggggtttttctctcattatttggatggaatctctttggtcaaatgcacatttacagagagacactataaacaagtacacaaatttttcaatttttacatatttttaaattacttatcttctatccaaggaggtctacagagaaattaaagtctgccttatttgttacatttgggtataatgacaacagccaatttatagtgcaataaaatgtaattaattcaagtccttattatagactatttgaagcacaacctaatggaaaattgtagagaccttgctttaacattatctccagttaattaagtgttcatgtggtgcttggaaactgttgttttcctgaacatctaaagtgtgtagactgcattcttgctattattttattcttgtaatgtgaccttttcactgtgcaaagggagatttctagccaggcattgactattacaatttcattttggtggagtttagttttaggttttattgtatataaaatcctgcactgaatctgtgtctcctctgttacctacttttgccagtgaaatttaagttttaaaatactttcagaatgtatttttactactgcaagtttttggtctttaaaatgtcaagtagcatctctctctttctctctgtctctttctgtttctctctccagttttttttttttttttaatttccatatgggctaaagaatccaaatattttaaaaatctgtctctcttttcttctctcataaagtgaattattccttttttttgttttatgtaagtgtatatattcttagtttttcttgaaatcattgtaatgttaactttgttgtttcaaatatcttggtgattgcttcattatctcttcaacaaaaaaaacctttaattttgccattgaaactgtagaactatgccatgcttttattagaagcagtgctctgtgttaacaacaagaatggtgtaattagaattgggatgtggatatttactgtatgacaacacatttacagttctgtaatgcaaggatgcagtttaaaaatgtgaagtagtgatggtttttgaaataagctttaaaatatagggatcttgaaggctccctggggtaactattttataacttagataaaatggctagtcatatctgtgtgtttgtaaagttatttttttaatattttaagattacaattttaacaaatgtagaaatgagccaaactatttaaattttaaaacagtaaaacaaaatgaaacttaatagctcacaaaattccagtccatgtttcatgacttattttagtcaatgaattttctatttatactaaacatatggacattttaaatgtgtttctaatatttttgattatctataatgtgcctgtcttcaattcacaagattgggttataacaattatttgccagattaacactagggaattatttgataaccagcttatcttatcagtagttttattgctgatcaggcaaaaatagttttccaaagttatttttaataaagtatatacaaaattcttatatattactagtcatgataaagtaaattaagcagtttttaaaacttagtgtgagtttgttcatcacaggtctgatatgagtttaagggatttcgcactccctgaatcagagaagtaagaccccttccttagattcctgttatacattttttaaaatgtagagtttgttttggagacattttcagtgcattgttattgccatatttatataatatgactattctaaaggctgtgaggccatggggtattggttaagttgcttgcttttgctttgtccattttcatcattttaaaatgggggataataacagaacttgtttcctagggccattgtaagtcacttgaataaaaaatagttttgaagcatgagagtcatacagagcggtccacctaaaaggcactcctgataataataaatgattttaaacaaaaaaaaaaaaaa

SEQ ID NO: 5231 - DNA, 2248 bp, Homo Sapiens
  NM_024429
aggcccctcctcccggcggcgcggcagagccaggccccagcgctcggccggccgcgagcccgccggccggggacgagcgtcgcagctcatgctgatcgctgtcctcctcctccccctcaggcggcgctggcggcggccctgggacccgcggaagccggcatgctggagaagctggagttcgaggacgaagcagtagaagactcagaaagtggtgtttacatgcgattcatgaggtcacacaagtgttatgacatcgttccaaccagttcaaagcttgttgtctttgatactacattacaagttaaaaaggccttctttgctttggtagccaacggtgtccgagcagcgccactgtgggagagtaaaaaacaaagttttgtaggaatgctaacaattacagatttcataaatatactacatagatactataaatcacctatggtacagatttatgaattagaggaacataaaattgaaacatggagggagctttatttacaagaaacatttaagcctttagtgaatatatctccagatgcaagcctcttcgatgctgtatactccttgatcaaaaataaaatccacagattgcccgttattgaccctatcagtgggaatgcactttatatacttacccacaaaagaatcctcaagttcctccagctttttatgtctgatatgccaaagcctgccttcatgaagcagaacctggatgagcttggaataggaacgtaccacaacattgccttcatacatccagacactcccatcatcaaagccttgaacatatttgtggaaagacgaatatcagctctgcctgttgtggatgagtcaggaaaagttgtagatatttattccaaatttgatgtaattaatcttgctgctgagaaaacatacaataacctagatatcacggtgacccaggcccttcagcaccgttcacagtattttgaaggtgttgtgaagtgcaataagctggaaatactggagaccatcgtggacagaatagtaagagctgaggtccatcggctggtggtggtaaatgaagcagatagtattgtgggtattatttccctgtcggacattctgcaagccctgatcctcacaccagcaggtgccaaacaaaaggagacagaaacggagtgaccgccgtgaatgtagacgccctaggaggagaacttgaacaaagtctctgggtcacgttttgcctcatgaacactggctgcaagtggttaagaatgtatatcagggtttaacaataggtatttcttccagtgatgttgaaattaagcttaaaaaagaaagattttatgtgcttgaagattcaggcttgcattaaaagactgttttcagacctttgtctgaaggattttaaatgctgtatgtcattaaagtgcactgtgtcctgaagttttcattatttttcatttcaaagaattcactggtatggaacaggtgatgtggcataaggtgagtgcacggtatgttcagatcacagtgccttatgtccgaatacagcaatatgtcaccgccgcagccggggcgcacgcgtgtgaaacaacaccgagcttgaatgtggaagtctttgaaccttttaccaaatcagtttgttttctttagatttgtcaaaaagttgtaatttgaatataaataattactttaaaattgtaatgacacttttacacgtaagtgttttgttctgggctaccgtgtcaacgaggctgctttacaacagctttatttatttttactttcatgcaatttttttacacatcttttggtggagtaaacttcaccacatccatgaataaactctcagttattttgaaatggcaaatttctcattatttaagtttggatctggaaaggacatgacttctgaaatagccgctgctgggttttaaaagctgaggtctctcaaagtgtggaggagacgttgccgtcaggcgggagccaagtgccgggaagatgtctattttttttcttgtgtattgaaatgtaaaatcatgatgtttgttatgactgctgatgcgattgtttttgtaaattttattgtggcatatacagtattgtcatacagttgaagagaaacaatgtttcctaatgtaagtgctctgaaaatgttgacactgtatatatatatatgaggatagtttgttttttttttgttttgggtttttttttttcagattgaaaaattaaaatagatcctactatctaccattttgttaaaaaaaaaaaaaaaaaa

SEQ ID NO: 5232 - DNA, 3054 bp, Homo Sapiens
  NM_024430
agttgagtctgcggagccgcgggcagtggcagtcaggcctccccgctctgtgctacctgcggcccggctctcctccgcgcccccactcgcgctgcgatgacgcgctcactgttcaagggaaacttttggagtgcagacatcctcagcaccatcggctatgacaacattatccaacatctgaacaatggccgcaagaactgcaaagagtttgaagactttctaaaagaaagggcagcaattgaagagaggtatggcaaagatctgctcaacctctctaggaagaagccgtgtggacagtctgaaatcaacaccctgaagcgggcccttgaagtcttcaagcagcaagtagacaatgtggcacaatgtcacattcagcttgcacagagtttaagagaagaggccaggaagatggaagaattcagggaaaagcaaaaactacaacgaaaaaagacagagctcataatggatgctatccataaacaaaagagcttacaattcaagaaaaccatggatgcaaagaagaactatgagcagaaatgccgggacaaagatgaggcagaacaggccgtcagccggagtgccaacctggtgaacccgaagcaacaagaaaagctttttgtgaaactggcaacttcaaagaccgcagtagaggactcagacaaagcatacatgctgcacatcggcaccctggataaggtccgagaagagtggcagagtgagcacatcaaggcctgcgaggcatttgaggctcaagaatgtgaacgaataaacttcttccggaatgcattgtggttacatgtgaatcagctgtcacaacaatgtgtcaccagtgatgaaatgtacgaacaagtccgaaagagtttagaaatgtgcagcattcagagggacattgaatactttgtgaatcaacgcaaaactggacagattccaccagcacccatcatgtatgagaatttctactcctcccagaagaatgcagtcccagcaggaaaggctacagggcctaacttggcaaggagaggacccctcccaattcctaaaagctcaccagatgatcccaattactctttggttgatgactacagtttgctctatcagtaaaatcaatgaaaccagagctttttccggctagtgcttctgtgatatggaaagggcacccagagcagcaggacctatagccacgttatgtcagcaatgaagactttgaagtgaacccttgctataattttttagagatttaaaatttatggtagacatttaggacaacataagcaagtagagttctgcagttttttgaagtttacaaattgccccattctgaagaattattctttcccagttactcaggttatgaatgaattaggttttcaacatgggaagcatgaaatccacttctggatttggagcatccacttgaggagcagaggtggcagcagaggattctgagccaccaactgcagtagtggctcctttggctttgggcagcctggctgtggagtttccacggcgacacacagcctcagtggtgcaagatttaaaattaccttcctttttggctggaagacttagaagccgcctgatcatactttctcattttacagatgaggaaataaagcctacaagtgtgaaattaatttccttacagttttcctagctgatgagggacagaaccagaactagagcctgagcccaacccacatcactattcttctaacccttcctgaagttgtgatgctcatgctgaaatttaagatgccaaatatttttgccagcactttttcagttgggagaatcaccagggtttaaatgtcagatttatttttatgtggatccctgtgtatgctgaactacagagcatgatgtttaatctaatttaaggagccactgattgtaaaacatgccattattttatgttgcactaagaaggtggggtcgaggagttgccaataaacttgggacagactattgatggccaagcccatctgaatttaagatgctaaagtatgaaaaaaatacatcttagaatcaatgaaataccatattttgattccattcctcaagataattttagagttataaaaccagtcctcaattttgggtcttcacagagaatctttcccttgctagaccccagaattttaaatgcatccgtcttacactttcacaaatatttgggttttcctttttcactcacaaacagcagggaggtcatgtactttttgtacaacacctgtgcactatgagaaaatggtaccttttagttattgacaagttaaaatagcactctcagtttttcagtattacagagagcaaatagtttcctctcctgctctgtgcagtagcttttccagaactatggacaaattgatcagaagaagattgattatttcctcatctttttttcttttttttgagacagagtctctctctgtcccccaggctgaagtgcagcggcatgatctcagctcactgcaacctctgcctcccgggttcaagtgattctcctgcctcagcctcctgagtagctgggattacaggcacccaccaccacacctggctaattttttgtatttttagtaaagacagggttttaccatgttggtcaggctggtctcaaactcctgacctcaggtgatccacctgcctcggcctcccaaagtgctgggattacaggcgtgagccactgcgcccggcctatttccccacctttcgtgtaaggtgctactgaacatgacagcttcttgtcatgacaggaaacttgcatcagttggatatccttttgagaaactgaattttgcaaagggccaaatttccccaaactgaacgggctcaggaaatgttcctttacactcagaacattctattttaagtatattatttattgttggcagttcctcagggatttcccttttctctgtattggtcagtgtagttgatgtaaaaccgttttgtggatggaaaatatttttattttattgctcttttagtttggtaggttaaataaaggttcttggtaatttgggaaaaaaaaaaaaaaaaaaaaaaaaaaaaaaa

SEQ ID NO: 5233 - DNA, 1944 bp, Homo Sapiens
  NM_024482
aagcccggcctggcggcggcggtggcggtagctgccgtggcggcctctgcgcatgctccgtcgcctgcccgccctggccgctcgccgcccgcccgcccgacggagacgtcccagctatctgacttcatgtgaaagatggctaatgcagaagtgagtgtcccagtgggggatgtggttgtggtacctactgaaggaaatgaaggggagaatcctgaagacactaaaacccaagtgattttgcagttacagcctgtgcaacaagggatttatgaagctgggtcggagaacaacacggcagttgtagcagtagaaactcacacgatacacaaaattgaagaagggattgatacaggcactatagaagcaaatgaggatatggaaattgcttaccccataacttgtggggagagcaaagccatcctcctctggaagaagtttgtatgtccaggaataaacgtgaagtgtgtcaagttcaatgatcagttgatcagccccaagcactttgttcatctggctggcaagtccactctgaaggactggaagagagctattcgtctgggtgggatcatgctcaggaaaatgatggactccggacagattgatttttaccaacatgacaaagtttgctccaatacctgcagaagcaccaaatttgatcttctgatcagcagtgcaagagctccagtgccaggacagcagacaagtgtggtgcagacacccacttcggctgatggtagcatcacgcagattgccatctcagaagagagcatggaagaggcagggctggaatggaactcagctctcaccgctgctgtcaccatggccacggaggagggtgtaaagaaagactcagaggaaatttcagaggacactttgatgttctggaaaggaatagctgatgtagggctgatggaagaggttgtctgcaatatacagaaggaaatagaggagctactcaggggagttcagcagcggctcatccaggctcccttccaagtcacagatgctgctgttctcaacaatgtagcacacacatttggcctaatggacacagtcaagaaggttttagacaacagaaggaaccaagtagagcagggagaagaacagtttctctatactctgacagacttggaacgccagttggaggagcagaagaagcaaggccaggatcacaggctgaaatctcagacagttcaaaatgtggtactgatgcctgtgagcactcctaagcctccaaaaaggccccggctccagcggccagcctccaccactgtcttgagcccttctcctcctgtccagcagcctcagttcacagtcatctcacccatcaccatcaccccagtgggtcagtcattttccatgggcaatattccagtggccaccctcagccagggctccagtcctgtgactgtccacacactgccttctggccctcagctcttccgctatgccacagtggtctcctctgccaagagcagctcaccagacacagtgaccatccacccttcatctagcttggcgctgctgagctctactgccatgcaggatgggagtacactgggcaacatgaccaccatggttagccctgtggaattggtggccatggagtccggcctaacctcggcaattcaggctgttgaaagcacctcagaggatgggcagaccatcattgagattgatccagccccggacccagaagctgaagatactgagggcaaagcagtcatcttggagacagagctgaggactgaggagaaagttgtggctgagatggaagaacaccagcatcaagttcacaatgtggagattgtggtcttagaggattaactggggatctcagggccaggagttatgttttgatttggaattttaattatttgtttatttttatcattgtcccactcatttccacataggacccttttttaaaaaaaaaaaaaaaaa

SEQ ID NO: 5234 - DNA, 2312 bp, Homo Sapiens
  NM_024493
agtggcttctgtgccccgccctgcgggtggtttgctagtttcaagcactttgtgagtatggggtgaatcggcgtcggccttccactgtggggttaaatctcatcccgcggctctcctcctgtcggtcctgcagttcttttgtccccgggtagagggatcttctgcagaaatagcgctggaagctagagtgaggcctgagtactgccttggcctaggatggctagagaattaagtgaaagcacagccctggatgcccagtctacagaagaccagatggagcttctggtcataaaggtggaggaagaagaagccggttttcccagtagcccagatctgggttctgagggctcccgcgagcgcttccgaggcttccgctacccggaggctgcaggcccccgcgaggcgctgagtcggctccgagagctctgccgacagtggctgcagcctgagatgcacagcaaggagcagatcctggagctgctggtgctggagcagttcctgaccatcctgccggggaatctgcagagctgggtgcgggagcagcatccagagagcggggaggaggtggtggtgctattggagtatttggagaggcagctggatgagccggcgccgcaggtttcaggtgttgaccaggggcaagaactgctctgttgcaagatggcactattgacaccagccccagggtcacaaagtagccaatttcagctaatgaaggctctgctcaagcatgaatctgtgggatcccagcctttacaagatagagttctccaggtccccgtgcttgcccatggaggatgctgcagagaagataaagtggtagcttctaggcttactccagagtcccaggggttgttgaaagtggaagatgtggccctgaccctcacccctgaatggacacagcaggattcatctcaggggaatctctgtagagatgaaaagcaggagaaccatggcagcctggtctccctgggtgatgaaaaacagactaagagcagggacttgcctccagctgaggagcttccagaaaaggagcatgggaagatatcgtgccacctgagagaagacattgcccagattcctacatgtgcagaagctggtgaacaggagggcaggctacaaagaaagcagaaaaatgccacaggagggaggcggcacatctgccatgaatgtggaaagagttttgctcaaagctcaggcctgagtaaacacaggagaatccacactggtgagaaaccctacgaatgtgaagagtgtggcaaagccttcattgggagctctgcccttgtcattcatcagagagtccacactggtgagaagccatatgagtgtgaagaatgtggtaaggccttcagtcatagctcagaccttatcaagcatcagagaacccacactggggagaagccctatgagtgtgatgactgtgggaagaccttcagccagagctgcagcctccttgaacatcacagaatccacactggggagaagccgtatcagtgcagtatgtgtggcaaagcctttaggcgaagttcacatctcctgagacatcagaggatccatactggggataaaaatgttcaggaacctgagcagggagaggcctggaaaagtaggatggaaagccagttggaaaatgttgaaactcccatgtcttataaatgtaatgagtgtgaaagaagtttcactcagaatacaggcctcattgaacatcaaaaaatccacactggtgagaaaccctatcagtgtaatgcgtgtggaaaaggcttcacccgaatttcataccttgttcaacatcagagaagccatgtagggaaaaacatcctatcacagtgacccatgccatacatgccagagttggtgctcatttgtcactgatctgaagccactccccctggagtctcaactatagaaattgtgggctgggctttatttaccactacacattatcaggtgttagaaaatgtagactgggttagacaaattatcttctaagttctagaaggggtttgtaatcaaaacatatttgataggaggctacgggagagttgtctagaagaggtaagacctgaaactgtttgttctctcccactagaattaaatggatgtttagactggctacttgccctaaaccagcacttggtgatgtctactgggtggatggttgtgatttgggggctgcttctctgaccattctttttgactgtaatgaatcctccacagttggtcagattcataaagtcttatatccccctctgtgccttttctgcaggtgctaataaatgtttattgaatgtaaaaaaaaaaaaaaaaaa

SEQ ID NO: 5235 - DNA, 2549 bp, Homo Sapiens
  NM_024509
ccaaggggcctgaacccgagtttgggcctgaagtccttgctgcagacctgagtgcttaaatctggggcttgagacctcccaatcttgactcagcaccccaatatctgaatgcagaaccccgggatcggatctcagactctaaaccccaccgtttggctgcttagcatcccaagactggacctgggagaccctgaccctgaacaacccaaactggacccgtaaaactggaccctagaggcccaatatttaggggtctggaaccccgagtattaaggtctggagactccgttgccacagatttgagccgagtcaggacacagtccctctacagaagccttggggacaggaaaagcatgaccagatgctccctccagagccctgacctctgactcccctggagctaggactctgctccctggggctgcttctagctcaggacacccctgcccgcgatggccatcctcccgttgctcctgtgcctgctgccgctggcccctgcctcatccccaccccagtcagccacacccagcccatgtccccgccgctgccgctgccagacacagtcgctgcccctaagcgtgctgtgcccaggggcaggcctcctgttcgtgccaccctcgctggaccgccgggcagccgagctgcggctggcagacaacttcatcgcctccgtgcgccgccgcgacctggccaacatgacaggcctgctgcatctgagcctgtcgcggaacaccatccgccacgtggctgccggcgccttcgccgacctgcgggccctgcgtgccctgcacctggatggcaaccggctgacctcactgggcgagggccagctgcgcggcctggtcaacttgcgccacctcatcctcagcaacaaccagctggcagcgctggcggccggcgccctggatgattgtgccgagacactggaggacctcgacctctcctacaacaacctcgagcagctgccctgggaggccctgggccgcctgggcaacgtcaacacgttgggcctcgaccacaacctgctggcttctgtgcccgccggcgctttttcccgcctgcacaagctggcccggctggacatgacctccaaccgcctgaccacaatcccacccgacccactcttctcccgcctgcccctgctcgccaggccccggggctcgcccgcctctgccctggtgctggcctttggcgggaaccccctgcactgcaactgcgagctggtgtggctgcgtcgcctggcgcgggaggacgacctcgaggcctgcgcgtccccacctgctctgggcggccgctacttctgggcggtgggcgaggaggagtttgtctgcgagccgcccgtggtgactcaccgctcaccacctctggctgtgcccgcaggtcggccggctgccctgcgctgccgggcagtgggggacccagagccccgtgtgcgttgggtgtcaccccagggccggctgctaggcaactcaagccgtgcccgcgccttccccaatgggacgctggagctgctggtcaccgagccgggtgatggtggcatcttcacctgcattgcggccaatgcagctggcgaggccacagctgctgtggagctgactgtgggtcccccaccacctcctcagctagccaacagcaccagctgtgaccccccgcgggacggggatcctgatgctctcaccccaccctccgctgcctctgcttctgccaaggtggccgacactgggccccctaccgaccgtggcgtccaggtgactgagcacggggccacagctgctcttgtccagtggccggatcagcggcctatcccgggcatccgcatgtaccagatccagtacaacagctcggctgatgacatcctcgtctacaggatgatcccggcggagagccgctcgttcctgctgacggacctggcgtcaggccggacctacgatctgtgcgtgctcgccgtgtatgaggacagcgccacggggctcacggccacgcggcctgtgggctgcgcccgcttctccaccgaacctgcgctgcggccatgcggggcgccgcacgctcccttcctgggcggcacgatgatcatcgcgctgggcggcgtcatcgtagcctcggtactggtcttcatcttcgtgctgctaatgcgctacaaggtgcacggcggccagccccccggcaaggccaagattcccgcgcctgttagcagcgtttgctcccagaccaacggcgccctgggccccacgcccacgcccgccccgcccgccccggagcccgcggcgctcagggcccacaccgtggtccagctggactgcgagccctgggggcccggccacgaacctgtgggaccctagccaggcgcccccccctctaagggtcctctggccccacggacagcaggacccggacaccctgtgggacctggcctcaaactcaccaaatcgctcatggtttttaaaactctgatggggagggtgtcggggacaccggggcaaaacaagaaagtcctatttttccaagcttgggcgaaaaaaaaaaaaaaaaaaaaaaaaaaaaaaaaaaaa

SEQ ID NO: 5236 - DNA, 5620 bp, Homo Sapiens
  NM_024511
ctcccgtgaggcagtgcgaggcgcgcggggcacggagggcggtggcggcgggctcctgcgagaagcaagcggaacttcctgaggaggaatcattatagattctaaaaatatattttcccttctctgtggacttggtataaaacgtagctttttttctgcttggatttattttctaaaaatcaacaccgtaaacccatatcagatacaacaaaattggggtagttaaaaccatgagttgtggaaatgagtttgtggaaacattaaaaaaaattggttatcccaaagctgataatcttaatggagaagactttgactggttgtttgagggcgttgaagatgaatcgtttctgaagtggttttgtgggaatgtgaatgaacagaacgtgttgtctgaaagagaattggaagcttttagcattcttcagaaatcaggcaagcctattctagaaggggcggcattggatgaagctcttaaaacgtgtaaaacttctgatttgaagacacctagactggatgataaagagctggagaaattagaggatgaggttcaaactctactgaaattaaagaacctaaaaattcagcgacgtaataaatgtcaattgatggcttcagtaactagccacaaatctctgaggttaaatgctaaagaagaagaagccactaaaaagctgaagcagagtcaaggaattctaaatgcaatgatcactaagatcagtaatgaacttcaggctcttactgatgaagttacacaattgatgatgttcttcagacattctaatttaggtcaagggacaaatccactggtatttttatcgcaattttccttggaaaaatacctaagtcaggaagagcaaagcacagcagcattaactttgtataccaaaaaacagttctttcagggtatacatgaagtagttgaaagttcaaatgaagacaattttcaacttttagatatacagacaccatctatttgtgataatcaagaaatccttgaggagagacgactagagatggctagactgcagctcgcatacatttgtgctcaacatcagttaattcacttaaaagcaagtaattcgagcatgaagtcaagtataaaatgggcagaggagagtcttcacagcctaaccagcaaggctgtggacaaagaaaatttggatgctaaaatttctagcttgaccagtgagattatgaaacttgaaaaagaggtcactcaaataaaagacagaagtttacctgctgtggtaagagagaatgcccagttattgaatatgccagtggtaaagggagattttgatctgcagattgctaaacaagattattatacagcaagacaagagttagttttaaatcaattaataaaacaaaaggcatcatttgaacttctacagttatcatatgaaattgaattaagaaagcatcgggacatatatcgtcaacttgaaaatttggttcaagaacttagtcaaagtaacatgatgctctacaagcaattagaaatgttaacagatccatcagtttctcaacagataaatccaaggaataccattgatactaaggattattctactcataggctttaccaagttttggagggagagaataagaaaaaagaattgtttctaactcatggaaaccttgaggaagtggctgagaaattgaaacagaatatttctttagtacaagatcagttggcagtatctgctcaagaacattctttctttctgtccaaacgaaataaggatgtggacatgctttgtgatactttgtatcaaggaggaaatcagcttttgcttagtgatcaggagttaacagagcagtttcataaagttgaatctcaactgaataagctaaatcatctcctcactgatattcttgctgatgtgaagacaaaaagaaaaactttggcaaataataaattacatcaaatggaaagagaattctatgtatattttttaaaagatgaagattatctgaaagatattgtggagaatttagaaactcaatcaaagattaaggctgttagtcttgaagattgaaaattactgaaaactgaatctttattacgtgtcctcttttatttattagaagactgtgtataataaacactactaaatttttaaaatttgaggtcaatggaacatttaatttgatgaattgaactattatattaatttgtcttttttctcatgtagtacattcagaataccagtgctttttatgacttgagcatgtgtttagtggtacttagtcctggtaattttttacttacagggaaaaagcattattacataatgcaaatattttttaatatagttatctctctcctttttagaaatagaaattttctgccgttaaatttttttttgagatagagtctcactctgtctccaggctggaatgcagtggcacgatcttggctcactgcaacctctgcctcccgggttcaagtgattctcctgcctcagcctcccaagtagctgggactacaggcgcacaccgccacacccagctaatttttttgtattttagtagaaaaggggtttcaccatgttggccaggatggtctcaatctcttgacctcttgatcccctctcccggcctcccaaagtgccggaattacaggcatgagccaccacgctcagccgctattaaatattttaaaatgtgtagaacttctagtcagcatttttaaatctgtagaccttaatatgtgaaatagccaagtcccctcatgtttgactgtcaaataaaattctgctgctcaaattgtattcctccataattccctgctatagacctttaggctgttttaatgtccctacttgtaccacagagtattaggacttccttggcctgcctgcattcattttagagtctgaattctggggactcaaaagtttctacaagacagctgagcagtgctttgactttaatgtgacttacacatcataaatgactttcaaatgaaatttgaatttcaaaattctgtaaaagtggttgctcaaaggatgtatgatactattttaatcagtttaagagcaaaaatgtctaattgtatttaacaatggtatttgggcagccagaaaatattttaagcgttgctctaaaataatttgaagtagctcatctgttattacatcagatgcttcttgagtgcccaatttatacatggcctgtggtaaataccatgtgagctttgtaggaatacctttaagaatattcctcacctgttcgtaatatggaatgccaatctaaaaactacatgttttgggtggtctttatggaattttttagctataaccatcagaaaacaggcatacctagatgacagatgaaccttcttgatttttgaaacccattgaacaaaaatattttgccaattattgtgtttatgttatttaaaattttatgtaaaccttaattttgtagcagtaaattttgtttaagattttgctatcagctccctatcacctgagcaactttttttttgttgtatatgtttttttctattctatttcggaatagagaatttacttaaaatttttattttctccaaaaatgtggaaaatatgtcacctggtttcctggtttatggtagcatattctgtttaaattagtgtcacatatttagatgtgtggccagacgcttgatttattagttaatttttgagacagagtctaactgtgtcactcaggctggagttcagtggaatgatctcggctcactgcaacctccgcctcccaggttcaagtgattctcctgcttcagcctcctgagtagatgggattgtaggcgtgcaccactgcacctggctaatttttgtattttcagtagagacggggtttcaccatgttggtcaggctggtctcaaactcctgacctcaagtgatctacccgccttggccttccatagtgctggcattacaggtgtaagccaccatgcccctgcccagatgcttgatttatactgtccccacccaaaccttgacttgctcagcccagggggccagcagggcagatcaaggcacggatggtagttgtgtgtctgccgtaattacccaagttacttataatcgttgtgttactaggtaggtttatttgaagatttatttatttatttatttattttttattttttgagacggagtttcactcttgttgcccaggctggagtgcagtggcatgatctcagctcactgcaacctctgccttctgggttcacgtgattctcctgcctcaggcctcccgagtagctgggattacaggtgccaccatgcctggttaattttttgtatttttagtagagacggggtttcatcatgttggccaggttggtctcgaactcctgacctcaggtgatccacccgcctcagtctaccaaagtgcagggatcacaggcatgagcttccgcgctcagcctatttgaagatttaataacatttttcaaacctcaggatgtatttgagtagattgcttctaaattggtcacctagaaaataagttatctatttactatgatacctggattaagcctctagctattttgcttttttctttctatccatattattggatgattgatgcctattttctgtggttatgaatatagacattttaaatgaaagttggtatataaatttttgaaaataattgtatttcctgttttatagtcttaggattaatatatgggatttatcttatgttaatcttacatttaggattttgtgaaaatggaaaattatgaggcattggtaggctttgatctctgtaatacaccgctctccagtgttgctcagaagattatgtctgctatgcattcaggtgatttagtggattctaagacttggggaaagagtacagagagtaagtaatttttatgaacctttctttctcttgatactttgaatgttaattgttctaaagactaagaattgaaaatggaatgcatgtagacagatgaagcccagctcccgccccttttacactcattcagtgcagactgagcttctgcttgctaactttcgtgttcccttaaccttcattgctttaaaaatgtaacactctcttccttattccaggtatttctgtcaaacattcccttagaatctggatcaggtattttagtattttcaaaagagatgctttaatcttggttctcaggtcatcaaacctgtacatagtatttgctattttgtgtggtgaacaagagatatgtttttgacaatatgtgtattgtgctgctatagaaatgtaaactcttaggtggcaaggattattggatcagtgtatatggatttatgatgtggtataatagtaaaagcagtggggccgggtgcggtggctcacgcctgtaatcccagcactttgggaggccgaggtcggcgatcatgaggtcaggagatcgagaccatcctggctaacacggtaaaacactgtctctactaaaaatacaaaaaattagctgggagtggtggtaggcgcctgtagtccagctacttgggaggctgaggcaggagaatggcatgaacccaggaggcggggcttgcagtgagctgaggtctccagcgtgggcgacagagtgagactctatctctaaaaaaaaaaaaaaaaaaa

SEQ ID NO: 5237 - DNA, 8521 bp, Homo Sapiens
  NM_024513
gtgtgcgcgtcatggccgtcagcaccgcgttcccgtcctcttccgcttggccccagaaagtttcggttctgcccggcggtggacccacgagcgcgtgccaccatggagtctgaccactgctgagcagacagccaccgagggccgaaattctgagccttcctctggacccaggcaggagacatacagacaagaaaggcaaactcaccatggcctccaccaatgcagagagccagctccagagaatcatccgagacttgcaagatgctgtgacagaactaagcaaagaatttcaggaagcaggggaacccatcacggatgacagcaccagcttgcataaattttcttataaacttgagtatctcctgcaatttgatcagaaagagaaggccaccctcctgggcaacaagaaggactactgggattacttctgtgcctgcctggccaaggtgaaaggagccaatgatgggatccgctttgtcaagtctatctcagagctccgaacatccttggggaaaggaagagcatttattcgctactccttggtgcaccagaggttggcagacaccttacagcagtgcttcatgaacaccaaagtgaccagtgactggtactatgcaagaagcccctttctgcagccaaagctgagctcggacattgtgggccaactctatgagctgactgaggttcagtttgacctggcgtcgaggggctttgacttggatgctgcctggccaacatttgccaggaggacgctgaccactggctcttctgcttacctgtggaaaccccctagccgcagctccagcatgagcagcttggtgagcagctacctgcagactcaagagatggtgtccaactttgacctgaacagccccctaaacaacgaggcattggagggctttgatgagatgcgactagagctggaccagttggaggtgcgggagaagcagctacgggagcgcatgcagcagctggacagagagaaccaggagctgagggcagctgtcagccagcaaggggagcaactgcagacagagagggagagggggcgcactgcagcggaggacaacgttcgcctcacttgcttggtagctgagctccagaagcagtgggaggtcacccaggccacccagaacactgtgaaggagctgcagacatgcctgcagggcctggagctaggagcagcagagaaggaggaggactaccacacagccctgcggcggctggagtccatgctgcagcccttggcacaggagcttgaggccacacgggactcactggacaagaaaaaccagcatttagccagcttcccaggctggctagccatggctcagcagaaggcagatacggcatcagacacaaagggccggcaagaacctattcccagtgatgcggcccaggagatgcaggagctaggggagaagcttcaagccctagaaagggagagaaccaaggtcgaggaggtcaacagacagcagagtgcccaactggaacagctggtcaaggagcttcagctgaaagaggatgcccgggccagcctggagcgcctggtgaaggagatggccccactccaggaggagttgtctgggaagggacaggaggcagaccagctctggcgacggctgcaggagttgctggcccacacgagctcctgggaggaggagctagcagagttgaggcgggagaaaaaacagcaacaggaggagaaggagctgctggagcaggaggtcaggtctctgacccggcagctgcagttcctggagacccagctggcacaggtgagccaacatgtgagtgacctggaggagcagaagaagcagctcattcaggacaaagaccacctcagccagcaggtgggtatgctcgagcggcttgctgggccgcctggcccagaactgccagtggcaggtgagaagaatgaggccctggtccctgtgaactccagtctgcaagaggcctgggggaagccagaggaggagcagaggggcctgcaggaggcacagttagacgataccaaggtgcaagagggcagccaggaggaagagctccggcaggccaacagggagctggagaaggagctacagaatgtggtcgggcgtaaccagctcctggagggcaagctgcaagccctgcaggccgattaccaggctttgcagcagcgggaatcagccatccagggctccttggcctccctggaggccgagcaggccagcatccggcacttgggtgaccagatggaggcgagcttgctggctgtaaggaaggccaaggaggccatgaaagcccagatggcagagaaggaggccattctacagagcaaggagggcgagtgtcagcagctgcgggaggaggtggagcagtgccagcaactggcagaagcccggcacagagagcttagggctctcgagagccagtgccagcagcagacccagctgattgaggtcctcacagcagagaaaggccaacagggagttggcccacccactgacaatgaagcccgtgagctggctgcccagctagccctgtctcaggcgcagctggaagtccatcagggggaggtccaacggctgcaggctcaggtggtggacctccaggccaagatgcgggcagccctggatgaccaggacaaggtgcagagccagctaagcatggctgaggccgtcctgagggagcacaaaacccttgtgcagcagctgaaggagcagaatgaagcccttaacagagcccatgtccaggagctgctgcaatgctcggagcgtgaaggggcactgcaggaggagagggccgatgaggcccagcagagggaggaggagctgcgggccctgcaggaggagctgtcccaggccaaatgcagctccgaggaagcacagctggagcacgctgagctgcaagagcagctgcaccgggccaacacagacacagctgagctgggcatccaggtttgcgcactgaccgtggaaaaggagcgagtggaggaggcactggcctgtgctgtccaggagctccaggacgccaaagaggcagcctcaagggagcgagagggcctggagcgccaagtagctgggctgcagcaagagaaggagagcttgcaggagaagctgaaggcggccaaggcagcagccggctcactgcctggcctgcaggcccagctcgcccaggcagagcagcgggcccagagcctccaagaggctgcacaccaggagctcaacaccctcaagttccagctgagtgctgaaatcatggactaccagagcagacttaagaatgctggtgaagagtgcaagagcctcaggggccagcttgaggagcaaggccggcagctgcaggctgctgaggaagctgtggagaagctgaaggccacccaagcagacatgggagagaagctgagctgcactagcaaccatcttgcagagtgccaggcggccatgctgaggaaggacaaggagggggctgccctgcgtgaagacctagaaaggacccagaaggaactcgaaaaagccacaacaaaaatccaagagtattacaacaaactctgccaggaggtgacaaatcgtgagaggaatgaccagaagatgcttgctgacctggatgacctcaacagaaccaagaagtatctcgaggagcggctgatagagctgctcagggacaaggatgctctctggcagaagtcagatgccctggaattccagcagaagctcagtgctgaggagagatggctcggagacacagaggcaaaccactgcctcgactgtaagcgggagttcagctggatggtgcggcggcaccactgcaggatatgtggccgcatcttctgttactactgctgcaacaactacgtcctgagcaagcacggtggcaaaaaggagcgctgctgccgagcctgtttccagaagctcagtgaaggccctggctcccctgatagcagtggctcaggcactagccagggagagcccagccctgcactgtcaccagcctcacctgggccccaggccacaggaggccaaggagcaaatacagactacaggccaccggacgacgctgtgtttgatatcatcacagatgaggaattgtgccagatacaggagtccggctcctctttgcctgaaacacccactgaaactgattctctcgacccaaatgcggctgaacaggatactacatcaacctcgctaacgcctgaggacactgaagacatgcccgtggggcaggattcggaaatctgcctgctgaagtctggagaactgatgatcaaagtacccctcacagtggatgagatcgccagcttcggggagggtagcagggagctgtttgtgaggtccagcacctacagcctgatccccatcactgtggccgaggcaggcctcaccatcagctgggtcttctcctctgaccccaagagcatctccttcagtgtggtcttccaggaggccgaggacacaccgctggatcagtgtaaggtcctcattcccacgacccgatgcaactcccacaaggagaacatccagggccagctcaaggttcgcacacccggcatctacatgctcatcttcgacaataccttctcaaggtttgtctctaaaaaggtattttatcacttgacggttgatcggcctgtgatctacgatggaagtgatttcctgtagcttcagcacctcagtaacttcacttcatccacaggaaacactgctcttcctcacctgtcacataaagcatttttttaaaaagtcagctgctccaaaatcatcaactcagcccctgggctgcccctcagaggcggtgtctggggaggactttgtgctcagcactctgcaccggccactcttagcccccgaggcgttgaagggctcaggcaatgtttccattaagtagagactcagctgttgtcacacccaaagggatgctctgccaaaggtttaaacacccaggagaccatcagcctctcctgggagcacagttggctacaggcctcttgtggagagtttcacgggcaggggtgattccaacttctgcctgtggagagattttctgccctgccccaccagggccctgcatgttggagactgagctgggtgcactggccatgccctgtgaatcctcaggctgtgacgccctcaggtactcctgggaaaaggaggtacacagccatcatgcgagtcggtgccaggggaccccccggagatcctgaccagctcctccagtcatgctcttgtccctcactgccccagtaagctggaggctgctccagaactcagcagtgttggaggggcctctaagctgcactctctttctggcccttttgtctgggtgattctgtcctcaaataaagcccttcactcagccagacctctccacagctcaaagcattgccctaagaatcagaagtaaagataatccaagagcaaaacccactgtacttggggcctgcaatggctgtgtgtacactacatctaatgcccaaatgccagccagtgtggatgttgtgaccacagagcaggattgtgcattggctttagagctactcctcagctgatggcccacttttgtttatataaataagagcttctgccccacctgcagacatgtttactaatgatcatagccaggattagaaccactttcaaacattggggccttcttaacaaaagtctttgataacttaagaaccaaagtaacagagtaaacagaggcatgatggatccctgggccccactcccctcctgacaggttccccaacagcccatttgcccacttcccactgctcagcccacaccagacctccaggagacatccccccttgaggcagagagatcctgttccctattcccagacaagaattatttaatcttccctgttctctgtggtccttttcttccccaacaacagatagctcaccttggacagctcttcgtcccttgttcatggaaccagctgcctgcagtcaggccccaggttcttccatgggtgaacagagcatctgacaaaaggtcccagtttggccaggggtgagggagagagcaccagacaggctatccgagaatctgagagctgggcccggcagttcctccagctacccttgtgacctaagtccagtcacacatttcccaaagtttctctttgtcataaccctggtctggctggttttgagggcttgagaatgggtcagggactccaggccaagtccaacagagaccccaaacccaccacacaccagcagccacaacctcaccaccaacaaagaggacttttgtggggccacaagtaagaggtcatttctggaatggactcagacctttaaacaggagagttgagcacttccagtcagtttttaagcaaggcatggggaacagggaatagaacctttcaaagaggttgcccagagaaaagctgggcctcttgcattcggcttccttggagcagcctcttctggcagaaagccatcaggtgctcaatcatcttctcctggccaaggctctgaccatgcttagtactggaatagaggtggccaggcccccagcgactcttcttggcctgatgtttgtcctcacaggcatgccacgtggcctgagatgattcagaacaaatcatgctaactttgaatccatccagccacttgcaaatgataatcagaagtcagcttgttcactgttagaaagaaactaacaaaagagaacccagagcaatctagaatctttgagtgcttggctttccaaggatactgcggagactctggccaagctgatgaccttctgaagtgtcactggcaccatatgcaacaagaaccaccattcactgagtagctaatgggtttggggcctgggacattccatctgaggtccttcctgaacatgtcactccacagcagaggaccggttgcagcttacccagaaccactcctccaggagagctggatgttttgcgtgcaacaccttgagcactgactgctattgttcaaaaaaagcctttgctgcattcggaggactgccccgtgccctgaggtgacttcctaactatgtggtttcattagcgaatttattttttgtgctgggtggacatttgtattttgttaggttgctgtttaagctcaagtttgctgtgctctctgcagctacaaaacatcttggcatatttaagagtggcttttataaatagctttattctgatattaatcagattcccaactttactgagaattaaggactggggtactttaaagaaatgcaaatagcaattgaagaaccactgctgcaggtggtagccctggctagactgaattacactagaaatcagccagaaggaagcgtccttgggatcccagatcactctttttttttttttttaaaaggggcagccccttgatggctcatctctctgaataacagttacgtcttcatatcgataccagatgccttcttcatcatgccactgaagccactcaccaccttcaagaacatgccaacctctgtcagattcacttacccacaaacaaggaggcacgtttggcacaaagtgttgtcctccaggtccaagtggactctacagagtgcttgacctcaacacactggattccaggtggactggaccaagagcaggcaaagacacgggaactgaaaaactccacagggtttggagaatagaaatgaaaagccacgtcatataactcaagaataaatggtgttttggaaattttaaaattatcatcgaaggtggtgaaactatttcaggcccaaatgaaaggaaatcgccagttggggatgaaatcacagagcctgtgttttatgatatggttggatgtccactgatgaaattttaaaggagtttcagttttaaaagtgcgcatgattctacatatgagaattctttaggccaagaaactgtccttggctcagaggtgttgggaattaaagcagagagaagccattcgtgatgcttagaaccaaggatggtcatgtacacaaagaccatcgagacggccattcttgtttacaaaacacttaccaagaaagcactttgtaggggaactttagtaagttcttctcatttcattatgtttcttccaaggaaacaggagagactgaattaataattctctctttcctcttaagcacttttaaaataataaagtacatcttgaaatttggggaggcatctctgatttaaaaaaagaaaaaggctgcttgatgtatgttatgcagagacactctgcctctggtggctgcagagcaatacccaagcctcatttggaaggctcaacatttggaattgcactttaattgattaatcctcaattcatgtggccttacgggatggtgggtctgggaccccaattcattcttatctgccaaagaattatctagaagcacatcaaataccagcaccccacctgctcaatgggggtggaaaacttttgtatccctaagcatattattttatagtgtctgccatgccatgtggaaatactttatttttaacctcaggatttaaataaagtaaacactatgacatttaaaaaaaaaaaaaaaaa

SEQ ID NO: 5238 - DNA, 1633 bp, Homo Sapiens
  NM_024514
atgtggaagctttggagagctgaagagggcgcggcggcgctcggcggcgcgctcttcctgctgctcttcgcgctaggggtccgccagctgctgaagcagaggcggccgatgggcttccccccggggccgccggggctgccatttatcggcaacatctattccctggcagcctcatccgagcttccccatgtctacatgagaaagcagagccaggtgtacggagagatcttcagtttagatcttggaggcatatcaactgtggttctaaatggctatgatgtagtaaaggaatgccttgttcatcaaagcgaaatttttgcagacagaccatgccttcctttattcatgaagatgacaaaaatgggaggcttactcaattccagatatggccgaggatgggttgatcacagacgattagctgtaaacagttttcgatattttggatatggccaaaagtcttttgaatctaaaatcttggaagaaaccaaatttttcaatgatgctattgaaacatacaaaggtagaccttttgactttaaacagttaataacgaatgctgtttcaaacataaccaatctgatcatttttggagaacgattcacttatgaagacaccgattttcagcacatgattgagttatttagtgaaaatgtggaactagctgccagtgcctcagtcttcttgtataatgcctttccatggattggcatcctgccttttggaaaacatcaacagctgtttagaaatgcagctgtagtctatgattttctctccagactcattgaaaaagcttcagtcaacagaaagcctcagctacctcagcattttgttgatgcttatttagatgagatggatcaaggtaaaaatgacccatcatctactttctccaaagaaaacctaattttctcagtgggtgaactcatcattgctggaactgaaactacaaccaatgtgctacggtgggcgattcttttcatggccctttatcctaatattcaaggacaagttcagaaagagattgatttaattatgggccctaatgggaagccttcttgggacgacaaatgcaaaatgccttatactgaggcagttttgcatgaagttttaagattctgtaatatagttccattagggattttccatgcaacctctgaagatgcagttgtacgtggttattccattcctaaaggcacaacagtaattacaaatctttattctgtacactttgatgaaaagtactggagagacccagaagtgttccatcctgagcgatttctggacagcagtggatattttgccaagaaggaagctttggttcctttttccctaggaagaagacattgtcttggagaacacttggctcggatggaaatgttcttgttttttacagcattgcttcagaggtttcatttgcattttccacatgaactagttccagatctgaagcccaggttaggcatgacattgcagccccaaccctacctcatctgtgctgaaagacgctgaaactgcctgggatgttttcgggaacaagaatgtatatttgccttatccctgaacttggtttaatcaaatcaatgtgtgtattagaataaaagtcacagcatcaaaaagccaaaaaaaaaaaaaaaaa

SEQ ID NO: 5239 - DNA, 4127 bp, Homo Sapiens
  NM_024519
gccggcgcctgcggcggcgacagcggcagctgcggcgcgaccaggccgggcacctccgagcgcaaggacagcgcgaggtccgcgcagcccagcgcagccatggagccccgcgcggactcactctatgatgtccctgtcggtgcggccgcagcgccgtctgctcagcgcccgggtcaataggagccagtccttcgcaggcgtcctcggcagccacgagcgggggcccaggagtttcccggtcttcagcccgccggggcccccacggaagccccccgcgctctcccgagtgtccaggatgttttccgtggctcacccagccgccaaggtgccgcagcccgagcggctggacctggtgtacacggcgctgaagcggggcctgacggcctacttggaagtgcaccagcaggagcaagagaaactccaggggcagataagggagtccaagaggaattcccgcttgggcttcctgtatgatctggacaagcaagtcaagtccattgaacgcttcctgcgacgactggagttccatgccagcaagatcgatgagctgtatgaggcatactgtgtccagcggcgtctccgggatggtgcctacaacatggtccgtgcctacaccactgggtccccgggaagccgagaggcccgggacagcctggcagaggccactcgggggcatcgcgagtacacggagagcatgtgtctgctggagagcgagctggaggcacagctgggcgagtttcatctccgaatgaaagggctggctggcttcgccaggctgtgtgtaggcgatcagtatgagatctgcatgaaatatgggcgtcagcgctggaaactacggggccgaattgagggtagtggaaagcaggtgtgggacagtgaagaaaccatctttctccctctactcacggaatttctgtctattaaggtgacagaactgaagggcctggccaaccatgtggttgtgggcagtgtctcctgtgagaccaaggacctgtttgccgccctgccccaggttgtggctgtggatatcaatgaccttggtaccatcaagctcagcctggaagtcacatggagccccttcgacaaggatgaccagccctcagctgcttcttctgtcaacaaggcctccacagtcaccaagcgcttctccacctatagccagagcccaccggacacaccctcacttcgggaacaggctttctataacatgctgcgacggcaggaggagctggagaatgggacagcatggtccctgtcatctgaatcttcagacgactcatccagcccacagctctcaggcactgcccgccactcaccagcccctaggcccctggtgcagcagcccgagccccttcccatccaagttgccttccgcaggcctgagacccccagctctgggcccttggatgaggagggggccgtggccccagtcctggcaaatgggcatgcaccctacagtcggactctgagccacatcagtgaggctagtgtagatgctgccttggctgaggcttcagtggaggccgttggcccagaaagcctagcctggggacctagcccacctacacacccagctcccacccatggagagcaccccagtcctgttcctcctgccctggaccctggccactctgccacaagctctaccctcggtacaacaggctctgtccccacatctacagaccctgccccatctgcacacctagactcagttcataagtccacagactctggcccttcagaactgccaggccccactcacaccactacaggctctacctatagtgccattaccactacccacagtgctccaagccccctcactcacactactacaggctccacccacaagcccataatctctacccttactactacaggccctaccctcaatatcataggcccagtccagactaccacaagccccacccacactatgccaagccctacccataccacagcaagccccactcatacttccacaagccccacccatacccccacaagtcccacccacaaaaccagtatgtcacctcccaccactacaagtcctacccccagtggtatgggcctagtccagactgccacaagtcccacccatcctaccacaagccccacccatcccaccacaagccccatccttataaatgtaagcccttccacttctctagaacttgctaccctctccagcccctccaaacactcagaccccaccctcccaggcactgactcccttccctgtagtcccccagtctccaattcctacactcaggcagaccctatggcccccagaactccccacccaagtcctgcccattccagtaggaaacccctcacaagccctgccccagatccctcagagtctacggttcagagtctaagccccactccctcacccccaacccctgcaccccagcattcagacctttgcctggccatggctgtccagaccccagtcccaacggcagccggagggtctggggacaggagcctggaggaggcactgggggccctaatggctgccctggatgactaccgtggccagtttcctgagctgcagggcctggagcaggaggtgacccgcctagaaagtctgctcatgcagagacaaggtctgactcgcagccgggcctccagtctcagcatcactgtggagcatgccttggagagcttcagcttcctcaatgaagacgaagatgaagacaatgatgttcctggggacaggcctccaagcagcccggaggctggggctgaggacagcatagactcacccagtgcccgccccctcagcacggggtgtccagctctggatgctgccttggtccggcacctgtaccactgcagtcgcctcctgctgaaactgggcacatttgggcccctgcgctgccaggaggcatgggccctggagcggctgctgcgggaagcccgagtactggaggcagtatgcgagttcagcaggcggtgggagatcccggccagctctgcccaggaagtggtgcagttctcggcctctcggcctggcttcctgaccttctgggaccagtgcacagagagactcagctgcttcctctgcccggtggagcgggtgcttctcaccttctgcaaccagtatggtgcccgcctctccctgcgccagccaggcttggctgaggctgtgtgtgtgaagttcctggaggatgccctggggcagaagctgcccagaaggccccagccagggcctggagagcagctcacagtcttccagttctggagttttgtggaaaccttggacagccccaccatggaggcctacgtgactgagaccgctgaggaggtgctactggtgcggaatctgaactcggatgatcaggctgttgtgctgaaggccctgagattggcgcccgaggggcgtctgcgaagggacgggctgcgggccctcagctccctgctcgtccatggcaacaacaaggtcatggctgctgtcagcacccagctccggagcctgtcactgggccctaccttccgggagagggccctcctgtgcttcctggaccagctggaggatgaggacgtgcagactcgagtggctggctgcctggccctaggctgcatcaaggctcccgagggcattgagcccctggtgtacctctgccaaactgacacagaagctgtgagggaagctgcccggcaaagcctacagcagtgtggagaagagggacagtctgcccatcgacggctggaggagtccctggacgccctgccccgcatctttgggcctggcagcatggccagcacagcattctaaactattcacccatgggttcctggtgcccctttccccccactttcagggctcaccaggcactggcagggagggtaagggctggctccagatacccctcccccacagattcctagcaatgaaaatctaatatattcttctgttgcccctggggttggagagtcagtgcctgcagtcaagtgcctcccagcctcggctcagcacatcccttgccacaaatcagtgtctggggcttggccaccctgccgctgcccagccacatcccttggttttgtattttatttacagagttttacagaaaataaaaaagcaaaatgtctttcctacaaaaaaaaaaaaaaaaaaa

SEQ ID NO: 5240 - DNA, 4152 bp, Homo Sapiens
  NM_024523
cgccgttgtcggcaggcagctttagttaggatgtcgtgatgggaccgagctcagcgtaaccctctggccgacgtgggccgagggggccggcccgggctgctgtggcccagacgagcggagagtgcggagcggcttctgggccagcgctaacgagccctggcagtgcgcacctctggtgccagtgtcgccccgcctccggggtagaatccgccccagccctccgggcctgggaccgggcggccgctttcgccagtccgtccggccgttccgcattaggtccgggataactaggtggagtaggtgtgcggcccgccgccggacagcccgctcgctgtttctttaagcccccgcctgcgtcttcacggccctctcccgttctgctggaaagctgacgtggggcaatccgttcagaccctccatggagaagtttgggatgaatttcgggggcggcccgagcaagaaggacttgctggagactatagagacccagaagaagcagcttctccagtaccaggcacggctcaaggatgtggtccgtgcctataaaagcctgctgaaggagaaagaggcattagaggccagcatcaaggtgctgtcggtatcccacgaggcagatgtgggcctcgcaggtgtccagcttccaggcctcacctttcctgactctgtggatgaccggtgctccactcacagcgaggatagcactgggaccgccactagcttggatactgcggccagtctcaccagcaccaagggtgagtttggggtagaagatgacagaccggcccgtggaccaccacctccaaagtccgaagaggccagttggtccgagagtggcgttagcagtagcagtggggatgggccatttgcaggtggggaggtggacaaaagactgcaccagctgaagactcagttggctactttgaccagttctttggctacagtcactcaggagaagtcccgcatggaggcttcttacttggctgacaagaaaaagatgaaacaggacttagaggatgccagtaacaaggcggaggaggagagggcccgcctggagggagaattgaaggggctgcaggagcaaatagcagaaaccaaagcccggcttatcacgcagcagcatgatcgggcccaagagcagagtgaccatgccttgatgctgcgtgagctccagaagctgctgcaggaggagaggacccagcgccaggacttggagcttaggttagaagagacccgagaagccttggcaggacgagcatatgcagctgaacagatggaaggatttgaactgcagaccaagcagctgacccgtgaggtggaggagctgaaaagtgaactgcaggccattcgagatgagaagaatcagccagatccccggctgcaagaacttcaggaagaggctgcccgccttaagagccatttccaggctcagttacagcaggaaatgagaaagacagctcttgcagaggatcaactccgtcagcaatctcaggtagaagaacagagggtggcagccctggagaatcaaatatccgaggtgtctgagctgctaggcacctacgagaaagccaagcagaaggaccagctggccattcagaagctgaaggagcgcattctgcagctggacctggagaacaagacactggctctagcagcctccagcaggtcccctttagacagccatggagaggagtccagtctggatgtcaatgtcctgaaagataagatggagaagctgaagaggctgctgcaggttgcggccaggaaaagccaggtgaccctggatgtggagaagctctgtgacctggagataatgcccagctcggaggctgctgatggggagaaggctactgcactctattaccaacaggagctgaaacagctgaaggaagagtttgagaggtacaagatgagagcccaggttgtcctcaaaagcaagaataccaaagatggtaacctgggaaaggagctggaggcagcccaggaacagcttgcagagctgaaggagaagtatatttccctgcggctctcctgcgaggagctggagcaccaacaccagcaggaggctgatgactggaagcaggagctggcccggctgcagcagctccaccggcaggagctggagcggtgccagctggacttcagggaccgcacactgaaactggaggaggagctgcacaagcagcgggatcgtgccctagctgtgctcaccgagaaggacttggaactggagcaactgcgttctgtggccttggcctctgggctgccaggacgcagaagtcctgtgggtggtggcggtcctggggacccagctgacacatcatcctctgatagcctgacccaagcattacaacttgcagcggccaatgagcccactttctttctgtacgctgagcaactggcccgcaaggaggtggagatcacatcactgaggaagcagaagcacaggctggaggtcgaggtgcatcagctgcaggatcggctgctggaggagggcgaacggcatcgtgaggaggttgcagccctgcagagccacatcgaaaagaacatcagggaccagagcagggagggagccaatctggagtacctcaaaaacatcatctaccgcttcctgaccttacctgactccctgggccgccagcagactctcacagccatactgactatcttgcacttcagtccagaggagaaacaagtgataatgcgactcccaaccagtgccagctggtggccttctggcaagagatgatgccattttcatgaattcctggaatttctgtgcctcttttatgtgggaaagggcaggctctggtttctgctgcctcttctcttacattgtcatttatttcttcactgtgttgagctgggaggagtcttcaatgtgggaagggattttctgccaaatgccattaatgctgctttatccttaggccctagagatactgaaagtcctggggcagtatcttctgatggtgtgcatgtgaggagaagatgaggttaggactgagaagtgcagaagttggaacagtggtaaggctgttttaaaataagatgttttgttttaataatatgctcctggcacaaagctaggagtaaatgtgactccaaagggagttcagttaatctctgaaatgcacaaaacctagctattttctccctctcatcacagtctgagtctggtccattgctaccccaattctctggggacataaaaccaggctggaaagggaccaggaagtttgaaatagtgacatatcatccactagtcccaagggctaaggaatagtgagtttattctggaaggaactgggaagcttagtctaattagtgcctggggatgacctatgcaatcacaccgcttatgaccatcctagagagggccctgagcaccagcttgatcttagggatttccaaagtaacctgctttttgcctggatagggttaaaatagacctttcttgcctatccttgccttaacctatctgcctgaggttggcctgagattgtgagtcaacgactttgctatcttttcctcagtgttgaactttcattaagaaataaagtcctagcttcttacagagaggggtccaaatggtgaatgctcatcctgcctggattcaaggaattagctcagagattggcccctagcttttctgcctttgtagggacagcaaaaggggaaaatttgctgcagaaaattccaaaagattgctgtagctctcacagggaagtggtaaagatcagctaaacctgggttggggtgctttctgcccagtgggtcttggcataagtagattaatcctgctcttttaagaaaaggcaacttattcaggcagtctggaaagggggttctcagaaaactcagtttctttattccttcttttctcccaactactgttactggttatagaggtctttggactctaaagaccaatgtttggccactaactggactaatatgtatctttctgtgatttcatcatagaggtctgttttgtgagggtttggggtgcagaaaactttgattaaatcttaatgggaggctgggtgacctggattatctacagtgagcagacttaaatggaacagaagtttatgtgtccaaatgatggaatcattaaacctgagtgacttgaaaaaaaaaaaaaaaaaaaaa

SEQ ID NO: 5241 - DNA, 1952 bp, Homo Sapiens
  NM_024531
cttccggtcgtgggccatgccgggggcgggcccggaaccgccacgggtgagtcgggtcgtggctgctgccgggtcctgcgcgctccggactgaggtggcgtccctgggccggacggcggtgtcccggcgtggcgggaagccggcactggagcgggagcgcactgggcgcgggaccgggaggcgcagggaccggacggctcccgagtcgcccacctgacgctagaagaagtcttcacttcccaggagagccaaagcgtgtctggccctaggtgggaaaagaactggctgtgacctttgccctgacctggaagggcccagccttgggctgaatggcagcacccacgcccgcccgtccggtgctgacccacctgctggtggctctcttcggcatgggctcctgggctgcggtcaatgggatctgggtggagctacctgtggtggtcaaagagcttccagagggttggagcctcccctcttacgtctctgtgcttgtggctctggggaacctgggtctgctggtggtgaccctctggaggaggctggccccaggaaaggacgagcaggtccccatccgggtggtgcaggtgctgggcatggtgggcacagccctgctggcctctctgtggcaccatgtggccccagtggcaggacagttgcattctgtggccttcttagcactggcctttgtgctggcactggcatgctgtgcctcgaatgtcactttcctgcccttcttgagccacctgccacctcgcttcttacggtcattcttcctgggtcaaggcctgagtgccctgctgccctgcgtgctggccctagtgcagggtgtgggccgcctcgagtgcccgccagcccccatcaacggcacccctggccccccgctcgacttccttgagcgttttcccgccagcaccttcttctgggcactgactgcccttctggtcgcttcagctgctgccttccagggtcttctgctgctgttgccgccaccaccatctgtacccacaggggagttaggatcaggcctccaggtgggagccccaggagcagaggaagaggtggaagagtcctcaccactgcaagagccaccaagccaggcagcaggcaccacccctggtccagaccctaaggcctatcagcttctatcagcccgcagtgcctgcctgctgggcctgttggccgccaccaacgcgctgaccaatggcgtgctgcctgccgtgcagagcttttcctgcttaccctacgggcgtctggcctaccacctggctgtggtgctgggcagtgctgccaatcccctggcctgcttcctggccatgggtgtgctgtgcaggtccttggcagggctgggcggcctctctctgctgggcgtgttctgtgggggctacctgatggcgctggcagtcctgagcccctgcccgcccctggtgggcacctcggcgggggtggtcctcgtggtgctgtcgtgggtgctgtgtcttggcgtgttctcctacgtgaaggtggcagccagctccctgctgcatggcgggggccggccggcattgctggcagccggcgtggccatccaggtgggctctctgctcggcgctgttgctatgttccccccgaccagcatctatcacgtgttccacagcagaaaggactgtgcagacccctgtgactcctgagcctgggcaggtggggaccccgctccccaacacctgtctttccctcaatgctgccaccatgcctgagtgcctgcagcccaggaggcccgcacaccggtacactcgtggacacctacacactccataggagatcctggctttccagggtgggcaagggcaaggagcaggcttggagccagggaccagtgggggctgtagggtaagcccctgagcctgggacctacatgtggtttgcgtaataaaacatttgtatttaatgagttggcattaaggaagccaatacct

SEQ ID NO: 5242 - DNA, 894 bp, Homo Sapiens
  NM_024540
agaaagtcgacgggcgtggcgggggaggggacgctgagggcccatgtgctgaaaatccgaagtgccgcggaaagtggagagctgacaaggaaggtttcgagcgttttgctggcaaagggatttcttacaacctccaggcatgcgtctttctgccctgctggccttggcatccaaggtcactctgcccccccattaccgctatgggatgagccccccaggctctgttgcagacaagaggaagaaccccccatggatcaggcggcgcccagtggttgtggaacccatctctgatgaagactggtatctgttctgtggggacacggtggagatcctagaaggcaaggatgccgggaagcagggcaaagtggttcaagttatccggcagcgaaactgggtggtcgtgggagggctgaacacacattaccgctacattggcaagaccatggattaccggggaaccatgatccctagtgaagcccccttgctccaccgccaggtcaaacttgtggatcctatggacaggaaacccactgagatcgagtggagatttactgaagcaggagagcgggtacgagtctccacacgatcagggagaattatccctaaacccgaatttcccagagctgatggcatcgtccctgaaacgtggattgatggccccaaagacacatcagtggaagatgctttagaaagaacctatgtgccctgtctaaagacactgcaggaggaggtgatggaggccatggggatcaaggagacccggaaatacaagaaggtctattggtattgagcctggggcagagcagctcctccccaacttctgtcccagccttgaaggctgaggcacttctttttcagatgccaataaagagcactttatgagtccaaaaaaaa

SEQ ID NO: 5243 - DNA, 4101 bp, Homo Sapiens
  NM_024541
ccgtgagcccggagcagcggcagcgtcggtggcgtcgagagcgagcgggcccgggaacggcgcgggtggtagaggaggagccgcgggctcgattctctaaccatggcacaggtagagaaacgtggaggtttgctccggaaatcttcagcctccaaaaaaccactgaaggaaaaagtggtgctgatgtatgatgagatcttcatgacagaggaccccagtaagtgcagtcctcggttttgggaggagctctttctcatgaaggtgaatttagagtacctagaaggcaagctggaatctcttgatggtgaggagttaatgaagatcaaggacaatattaattgcttattccaacactgcatccaggctctgggagaggagcatccaattcgggttgtcaatgcattgcagaccctgtgcgcactcattcgaggagtccatcaaaagaataagtctacctctgggtttgacattatcaacatgctgatgggctttgacaaggcggagctgtgcatgaagaacttgatggagagtttggattcattgctttgtgcagaaggttctgaaagtctgaagagtttatgtctgaaacttctcctttgcttagtgaccgtgacagataacatcagccagaacactattctcgagtatgtaatgatcaacagcatatttgaagcaattttacagatactttcccatcccccaagtcgtagggagcatgggtatgatgctgtcgtcctcttggctttgctggtgaactatagaaaatatgagtctgtgaatccttatattgtgaagctgtctatcgtggatgatgaggccacactcaatggaatgggacttgtaattgctcaggctttatctgagtacaacaggcagtataaagacaaggaagaagaacaccaaagtggttttttctctgctttaacaaatatggtgggcagcatgttcatagcagatgcccatgagaaaatctcagtacaaaccaatgaggccattcttctggcactttatgaagctgttcatttaaatcgcaacttcatcacagtattagctcagagccatccagaaatgggcttggtgacgacccctgtcagtcctgctcctacaaccccagtcacaccacttgggaccacaccgccttcctctgatgttataagttctgtggaactcccactggatgcagatgtacagaccagtaatctactgataacctttttaaagtatagctcaattgtcatgcaggacaccaaagatgaacacaggcttcacagtggcaaactctgtctgattatccttacatgtattgcagaggatcaatatgccaatgcatttttgcatgatgacaacatgaattttcgagtaaacttacatagaatgcctatgagacacaggaagaaggcagcagacaagaatcttccctgccgtcctttagtatgtgcagtactggacctgatggtagagtttattgtaacacacatgatgaaggagtttcctatggatctctatatacgctgcatccaggtagtacacaaactgctctgctaccagaagaagtgtcgggtacgcctgcattacacctggcgggagctctggtcagccttgataaatttgctgaagttccttatgtcaaatgagactgtacttttggccaaacacaacatttttacattagcccttatgattgtgaacctatttaatatgtttatcacatatggcgacacatttctgccaacccccagcagctatgatgaactttactatgagattatccgcatgcaccagagctttgacaacctctactccatggtcctgaggctttctaccaatgcaggccagtggaaggaagcagctagcaaggtgacccatgcattggttaatatcagagccatcatcaaccactttaaccccaaaattgagtcctacgctgctgtgaatcacatatcccaactgtcagaggagcaggtgctggaggtggtgagagccaactatgacacgctcacgctgaagctgcaggatggcctggaccagtatgagcgctactcagagcagcacaaggaagctgccttcttcaaagagctggttcgatccattagcaccaacgtccggagaaacctggccttccacacactcagccaagaagtcctgctcaaggagttctccactatctcctgaggccacgcctacctgagcagcctctgactgcccttacccatgaggatcatgggctggagggggagcgaggggagagggggctgcccccgaggttggagagaaacacagataccaagttctcttggtgaagaccgcacttcaatggagcttgggcagcaggggcaggagggtcaagccagggataatcttatttggggaggaatgggtgggcacagtggggagaggcctccaggaatgtggggacttccagagtgggctccctaaacagcccctcacatttccaatcttgaggttacaagctgtagctactgactaattttcgggagctggtgaggcaagcctcagggtaatgccagcaccctgaaagtcagtggctctgctcggcttctgaaaacagatcaactctcagatatagctggagctacatcctgcttcctttgggcctggggctgtgcttggcttgaaatctgtgtcccctgcctgcactggcactttgtccagtcatcgggacctttggctcagatttagggtaagataggaatagggtacctttttccttttttttctgagacggagtctcactctgtcgcccaggctggaatgcagtggcgtgatctcggctttactgcagcctccgcttcctgggttcaagcgattctcctgcctcagcctcccgagtagctgggactacaggagcgtgtgccacgcccggctaattttttgtatttttagtagagatggggtttcaccatgttacccaggatggtctcaatatcctgagttcatgatccacccaccttggcctcccaaagtgctgggattacaggcgtgagccaccacacccagccagttttcctattttctgaattcagaattgacttctctgggaaaactggagatgagaatctgcccagtgctctgctgtccagtcaccgccttttgaattttagttttggcaccaggagtaccgttagctttccccttcttctggcccatttgactcatcagcacaatagggtcaccaccttaacttttaatttctaatctgctttactgtctttagggtgtgtatgaaataaacattgacaggctttctggagccctcaaggtgcctactttgctggttccctttccagcagctcccccacctcccttagccccccctcctctggcagcctctcctgcctctgctgagctcccctccacgtgttccacccccttaccctgctgttgtttacatccaacctgcctgagaatttcctctggggaggaatctattcctgtcatggtctagtgcctgggagggagagaactttctgggggtagggtgccctccatctgaaacaggccaggtgagcatcatgcataaggcctccattctgtccgctcagattctgggtggggccacaggcaaatctcctgacttatggggagttggcttgtggttcctcccttggatagcctccatggaaccactataggctttcccaacagctgcctctgaaatagctgctgcttcgagatcctccctttttaaagcactttctaaagccctcaggatggcgggagcaaacagcactggtatattctaggagtaagtgcaggaattcagcagtgagagcatgtctgggaccacctggactgccatccatttaacctcaaatctctttgggatactcgccctccctgggaaccagagttctggctctaacattgagcagctatgcactagttccagagaagccactaacaggctgccatgtgtagatgtaggttcttaagagatcacaggctgggtcatctgatcactggatggatagctcagcctggggcatttagtgttttccctggtgataaatccccaaggcagctggatttggagctggtggcaagttgaaattattaaaaattgatttgtgtgggactgtc

SEQ ID NO: 5244 - DNA, 1781 bp, Homo Sapiens
  NM_024555
gcttccccgagcgccgtcggtggtcatggctgccccagcctcccggcaggtccgacgcagagcccgggcagcgccgcggccccgctcggccgaggactggtggtgggaccggctggcgccgaggggctcggggtaccacctgctgcagtccgacagcatgctgctggtgctgtccgaacccggccccgcccggccccgcgcacagcggcgcgcttcccgccgcactccccggcagccgccccggggccccagcgccgcggccaagcccaaggccgggctcaggtccgaggcggcggccgcgcccgcacccgcaccggcacccacgcccacgcccgaggaagggcccgacgcgggctggggagaccgcattcccttggaaatcctggtgcagattttcgggttgttggtggcggcggacggccccatgcccttcctgggcagggctgcgcgcgtgtgccgccgctggcaggaggccgcttcccaacccgcgctctggcacaccgtgaccctgtcgtccccgctggtcggccggcctgccaagggcggggtcaaggcggagaagaagctccttgcttccctggagtggcttatgcccaatcggttttcacagctccagaggctgaccctcatccactggaagtctcagctggtaggtgagtgctgtcctcggctcactttcctcaagctctccggctgccacggtgtgactgctgacgctctggtcatgctagccaaagcctgctgccagctccatagcctggacctacagcactccatggtggagtccacagctgtggtgagcttcttggaggaggcagggtcccgaatgcgcaagttgtggctgacctacagctcccagacgacagccatcctgggcgcactgctgggcagctgctgcccccagctccaggtcctggaggtgagcaccggcatcaaccgtaatagcattccccttcagctgcctgtcgaggctctgcagaaaggctgccctcagctccaggtgctgcggctgttgaacctgatgtggctgcccaagcctccgggacgaggggtggctcccggaccaggcttccctagcctagaggagctctgcctggcgagctcaacctgcaactttgtgagcaacgaggtcctgggccgcctactccacggctctcccaacctgcgcttactggatcttcgtggctgtgcgcgcatcacgccggctggccttcaggatctgccatgtcgggagctggagcagcttcatctgggcctgtatggcacgtcagaccggctgactctagccaaggagggcagcccctttttgacccagaagtggtgccatacactgcgagaactggacttgagtggccaggggttcagtgagaaggacctggagcaggccctggctgccttcttaagcacccctgggggctcacacccagccctgtgctctcttaacctcaggggcacccgggtcacaccaagcactgtcagctctgtgatcagcagctgcccgggcctgctctacctcaacctggagtcctgccgctgccttccccggggtctgaagcgggcctaccggggcctggaggaagtccagtggtgtctggagcagctgctcaccagcccctcacccagctaggcagccacagacctgggacacctcagccagcttgcccaccctccacctttgcccaatttcagatatttgagcattttgttaaaataaaacatttttaggaaaaaaaaaaaaaaaaaaaaaaaaaaaaaaaaaaaaaaaaaaaaaaaaaaaaaaa

SEQ ID NO: 5245 - DNA, 4359 bp, Homo Sapiens
  NM_024561
aaagggcgctccgcgcatgcgcacaggatccggctcgggaggcggaccctggctgccatcttgcagtgcgcgggaaccgccgccgccgccgctggccaaaaagcggagcccaggggaagcgtgtcctgctcagaccgccttccttctccattgccacccgtgccgaacagccaggctgcccaattgcaactgtagaccaatgaactaatccatcgcccgcagcccgactctcagcagcggttcgtcccggtgcccacccccgcgaagcggagcgcccgggcacctagcctccctgccggccacctagcctccctgccggccacgatgccgaacgtgctgctgccgcccaaggagagcaacctcttcaaacgcatcttgaaatgttatgaacagaagcagtacaaaaatggcctcaagttttgcaagatgattctgtcgaacccaaaatttgctgaacatggagagactttggctatgaaaggattaacactgaactgtttaggaaaaaaagaagaagcttatgagtttgttcgtaaaggacttcgtaatgatgtcaagagtcatgtctgttggcatgtatatggactcttgcagcgttctgataaaaaatatgatgaagctataaaatgttaccgaaatgccctcaaattagataaagataacctgcaaattttgagggatctctcactgttgcagatccaaatgagagaccttgaaggttaccgagagacaagataccagcttcttcagttgcgccccacacagcgtgcctcctggattggatatgctattgcataccatttgctgaaagattatgatatggccctaaaactgttggaagaatttagacaaactcagcaagttcctccaaacaaaatagattatgaatatagtgaattgatattataccagaatcaagtgatgagagaggcagatctgttgcaggaatctttggaacatatagaaatgtatgagaaacaaatatgtgataaacttttggtggaagaaattaaaggggaaatactgttgaaattgggaagattaaaagaagccagtgaagtgttcaaaaacttgattgatcgaaatgcagaaaattggtgttattatgaaggcttggaaaaagctctacaaattagcactttagaagagaggcttcaaatttatgaagaaattagtaagcagcaccccaaagcaattacacccagaagattacctttgactcttgtcccaggtgaaagatttagagaactaatggataagttcctgagggttaacttcagtaaaggctgcccacccttgtttactactttgaaatctttatattacaatacagaaaaggtttctataatccaggaacttgttactaattatgaagcctctcttaaaacgtgtgacttttttagcccatatgagaatggggagaaggaacccccgacaacactactctgggttcagtatttcctggcacagcactttgataaacttggacagtattctttggctttggattatattaatgctgcaattgctagtactccaactctaatagaattattctatatgaaagcaaaaatttacaagcatataggtaatctcaaagaagctgcaaagtggatggatgaagcacagtctttggacacagctgatagattcatcaattccaaatgtgcaaaatacatgcttcgagcaaatatgataaaagaagcagaggaaatgtgctccaagttcacaagggaaggaacatctgccatggaaaatctaaatgaaatgcagtgtatgtggtttcagacagaatgcatttcagcttatcagcgtctggggagatacggggatgccttgaaaaaatgtcatgaagtagaaaggcatttttttgagataactgatgaccaattcgacttccatacatactgcatgagaaagatgacccttcgtgcctatgttgaccttttgagattagaagatatactcagaagacatgccttttatttcaaggctgctagatcagcgattgaaatatacttgaaattgtatgataatcccttaaccaatgaaagcaaacaacaagaaataaactcagaaaacttgtcagccaaagaattgaagaaaatgcttagcaagcagagaagagctcagaaaaaggctaaactagaagaagaaagaaagcatgcagaaagagaacgtcaacagaaaaatcaaaagaaaaaaagagatgaagaagaagaagaagccagtggccttaaggaagaacttatacctgaaaaattagaaagggtagaaaatccattagaggaagccgttaagttccttatacctcttaagaaccttgttgctgataacattgacactcatctgttagcatttgaaatatattttagaaaaggaaagtttctgttaatgctgcagtctgtcaaacgagcttttgccattaacagtaataacccatggttacatgaatgtttaattagattttctaaatctgtgtctaatcatagtaatcttccagacattgtgagcaaagttctatctcaagaaatgcagaaaatatttgtcaaaaaggatttggaaagttttaatgaggattttctgaaacgtaacgctacctctcttcagcatctactttcaggtgctaaaatgatgtattttctggacaagtcaaggcaggagaaagcaattgctatagccactagactagatgaaactataaaagataaagatgtaaagacattaataaaggtttctgaagcactgcttgatggcagctttgggaactgtagttcccaatatgaagaatataggatggcctgtcataacctgcttccttttacatctgccttcttgcctgctgtgaatgaagtcgacaatcctaatgtggcactgaaccatacagctaattatgatgtcttggcaaatgaaatttgaaatcttctagaaagtagactcctatagactcaaagctgaattgagatcagggtttcttttccagggtgcattttaatatacgtatgaaatgaaatatttggttaggatttttaaatggcatattctgtaagcttattttgttctttacccgacctgccaatttacataaccatctgttaaaattacctgtttattcttacacagttttgtggtagctccgatcgcttctgtataattataatttcttactaagctaagttgtatacaaccccactgtattattttctttagattctgatttcaggatctgtgctttgattccttgtctgttttatcgtatatttgcttgctttttaattaaagcacatcagttttaaagtgttaactatatgttaacaatatggaggctgggcgtggtggctcacacctgtaatcccagcactttgggaggcccagactggcggatcacctgaggtcaggagatcgagatcagcctggccaacatggtgaaaccccttctctactgaaaatacaaaaattagccagacgtgatggcacatacctgtaatccaagctgcccaggagctgaggccggagaatcgcttgaacctgggaggtggaggttgcagtgagccgagatcatgccactgcactccagcctgggcaacagagcaagactccatctcgaaaaaaaggaattcctcttggcagatattgaagtttatttgaaaatttaattcgtccttttttcattgtaatatttcatggtttactatttccttttagtattcatgaaaatggtattttctggttgaataagggtactctagttttatgtagatgatttcagaatgtgaaggctggtttgcctgtcagtcatggaaattcactggtaaaattgttgaatatttctctctcccagtcttaaaagcccacaggcaagaattaatgctttcttaactaagttactttgagtattaacaagtagcttatactgaggtgtgcttcaagggagcattatagggcagaaaacaaattaaaatgaaatgttgttgttatagccatgcattgaccattaaatgcattttaatatctcggcaaaatgagatttgaaactcattagtttaactcttaaaacatagtgttgttaaacagtattttttgggggcgggtggatagctttttgttctatcttgtacagaaaacagtaatggaatcactcatgttcagaaccttgtaaatatgtctgtaatattaatgcttccctttattaagacaaatatacattcaaaaagggagattttatttagacacacattttcttttcaccctaatctatttagattcatacttattgagacgggaaaaactcgctgtaaaataatgccaacctagataatgctataataaattattttgtacacagttaaaaaaaaaaaa

SEQ ID NO: 5246 - DNA, 3274 bp, Homo Sapiens
  NM_024565
ccgggagcctgcgagccgcggcgggacccgagcgcacgcaggggcgcggcgacggcgggggctagtcgggctgcggaggcggccgtcgggagtgcggagcgcctcggacgagggtccaaccgccggcaggcaccagagggcacggctggctcggcactgggaggggcccggcgctcgcagccccccacgcccagagaggatgcggtgcgccctgagagccgggtagcctcggatagcggcgctgcgtacgcgatgatggatgagccgtggtgggaagggcgcgtcgcctcggacgtccactgcaccctgcgcgagaaggaactgaagctgcccaccttccgagcccactccccactcctgaagagccgccggttcttcgtggacatcctgaccctgctgagcagccactgccagctctgccctgcagcccggcacctggccgtctacctgctggaccacttcatggatcgctacaacgtcaccacctccaagcagctctacaccgtggccgtctcctgcctcctgcttgcaaacggagtttcgctcttatcgcccaggctgaagtgcagtggcatgatctcagctcattgcaacctccacctcccaggttcaagcaattctcctgcttcagcgccccaccccccacccacaccgccccaagtagctgagactacaggtaagttcgaggatcgggaagaccacgtccccaagttggagcaaataaacagcacgaggatcctgagcagccagaacttcaccctcaccaagaaggagctgctgagcacagagctgctgctcctggaggccttcagctggaacctctgcctgcccacgcctgcccacttcctggactactacctcttggcctccgtcagccagaaggaccaccactgccacacctggcccaccacctgcccccgcaagaccaaagagtgcctcaaggagtatgcccattacttcctagaggtcaccctgcaagatcacatattctacaaattccagccttctgtggtcgctgcggcctgtgttggggcctccaggatttgcctgcagctttctccctactggaccagagacctgcagaggatctcaagctattccctggagcacctcagcacgtgtattgaaatcctgctggtagtgtatgacaacgtcctcaaggatgccgtagccgtcaagagccaggccttggcaatggtgcccggcacaccccccacccccactcaagtgctgttccagccaccagcctacccggccctcggccagccagcgaccaccctggcacagttccagacccccgtgcaggacctatgcttggcctatcgggactccttgcaggcccaccgttcagggagcctgctctcggggagtacaggctcatccctccacaccccgtaccaaccgctgcagcccttggatatgtgtcccgtgcccgtccctgcatcccttagcatgcatatggccattgcagctgagcccaggcactgcctcgccaccacctatggaagcagctacttcagtgggagccacatgttccccaccggctgctttgacagataggccacctccagacctcacgaggaagccttggagatgtgggcagaggaagaggacactgaagaggagagctcagccaagtgaggcagcaggaggccatccctgaagagccttggaacgtggagggtctgtgctccttttaaataaaactgacccagagcaaaacattcaataacatacctcacccgagagcattcctctgagaaacgtctgccacgtgtggctagggtacaaaaggatggcttggtggccgtccccccacacaggggcccagtgaatcgagaaagacttgataagaggccaggagagtgggaactggacacagaccactgatctcaagcatgtccagtttttagcattaaagacttttctattctttgctgatggcagctacaccgctgaaaaaggaggggcagcctggcgtgttctcaggacccccggaggatcccatattgggtgcttttctttccctggctctatgcagaggggcctgagttggtgtgtatgcctgagtgtttgccttgcgaggcacagtgggtggctgtcttgcctttgttttcgaacctaaaaccattttcagccttttagatatgtcatgtgctgctgcttcccgaagtggtcttgctttctgtttcgtaagatgtcttgtttacacactgtatcagggatttggtgatacttgaaaattcctttggagaaaaaaacaaatttaattgccacactgcctgtcccacatgagggctgttaatttggaacccaagtttgaacccaacttgtgatggacccgcaggtaaccacagagcttcctttttgaaggcatatggttggagagaaccattttcccagctctcggttccggaagattccacgtcttggaggctgtgttcaccactagaactttaataactacccagggagggagaagctcgttgaaaggaagacaaagatttaaacagttcccacctctctccaccacatacttacagggcatgagtttaacccagtctaggctttgagtgtggctgatagcgaaggatagcaatgtggaaaatttgcttagtcccacctgtatttggggagtgggatgtacatgggcgtttgataccaccattgataggcaagcgactggttggatcaaaagccagtatttagggatctgcagcgagagggccctcaggaagactcttgtaaccatgtgcaatatgtttttattctgactcgcagcttgtgctcagcatgttctttggtttagtttggggttgggggacacattgttcacccagcagaactgggaggtgcaaaggaccgtggaagcaatttttgttttgtttgaggaatacctgtcttggattccttagccccttgccagtcctggagactgtggcaggggccgccaggaaggcagctgtctgctgctgagtcagatcggaaggtggtgaatctttccagagcagctgaaaatctcagcatggagacagtaagaaaagagacggggtgtggataagactctgccaccgtgtcacactagcataggaggctgcacgttcatttgttgttgtttttttttcctttgccaacctccgttctatttatgtgcaagcagtttggattcaagttcttgtatctgtctgttctgggacctggggattgtgagggttccctcacagccagcacgacccccagaaagaggcgtcccacaataaacacgtcacctgct

SEQ ID NO: 5247 - DNA, 1613 bp, Homo Sapiens
  NM_024570
actcggcgccctgcggcgcgcgatgagcacctaccactagcggagccgcgagggagaggccgcggccccttcccgttgcctgcggccaccggccggcattcagagcccctcgcctggcgctaaatttaaaaacgtaacacgagcagcaggctggtctcggaaacgaaacgaaattcggtccctgggcctcctcccgggcgctgccggtccctcagcgcgccgcgccacccggaacagacccttctcccgccattttcggcggggctgggagactgaggcccgcggcgctgagcctgcggcgccccggaagaggcgggcggcatggccgctggcgtggactgcggggacggggttggcgcccggcagcacgtgttcctggtttcagaatatttaaaagatgcttcaaagaagatgaaaaatgggctaatgtttgtaaaactggttaacccctgttcaggagaaggagccatttacttgttcaatatgtgtctacagcagctgtttgaagtaaaagttttcaaggaaaaacaccattcttggtttataaatcaatcagttcaatcaggaggtcttctccattttgccacacctgtggatcctctatttctgcttctccactacctcataaaggctgataaggaggggaagtttcagccccttgatcaagttgtggtggataacgtgtttccaaattgcatcttgttgctgaaacttcctggacttgagaagttacttcatcatgtgacagaggaaaaaggtaatccagaaatagacaacaagaaatattacaagtacagcaaagagaagacattaaagtggctggaaaaaaaggttaatcaaactgtggcagcattaaaaaccaataatgtgaatgtcagttcccgggtacagtcaactgcatttttctctggtgaccaagcttccactgacaaggaagaggattatattcgttatgcccatggtctgatatctgactacatccctaaagaattaagtgatgacttatctaaatacttaaagcttccagaaccttcagcctcattgccaaatcctccatcaaagaaaataaagttatcagatgagcctgtagaagcaaaagaagattacactaagtttaatactaaagatttgaagactgaaaagaaaaatagcaaaatgactgcagctcagaaggctttggctaaagttgacaagagtggaatgaaaagtattgataccttttttggggtaaaaaataaaaaaaaaattggaaaggtttgaaactttgaaaataaaatctagcaaaaatatttgctttttacatgtttcagtttgtccttcctgactgttaatgactacctttggttgggggaaggaagaggccaatttcatgttctcttaaacatttctttgcatttggtttttgtgttcctgaacaaaatatgggaaagtgtctaacttcatggctatggccttttggagtctcatctgacataatgaaaagtaatcacttgaagagaattaacatatagcatcatgattttctcaataaactgatgtgtgacaatgttaaaaaaaaaaaaaaaaaaaaaaaaaaaaaaaaaaaaaaaaaaaaaaaaaaaaaaaaaaaaaaa

SEQ ID NO: 5248 - DNA, 2762 bp, Homo Sapiens
  NM_024572
ccgccccgccccgccttgccccaacccacgatggtctgggagctgcgcccagggcttggcgctggcggccccgcaacagcaccgagcgtttcggtcggcgggcggcggtagcgccccctctcagagccccgctcactcccacctcggctcgctccgagtcggcctgtctgtcgggcccgccctccccgctcactccctccgccctcgtgctcctcccggggtgcttggcacagcctcggattcctccctctcgctgctcgagtcagtttccctatcggcggcagcgggcaaggcggcggcggcggcggcggcagccgcggtggcggcgtggggaacatctcggcagccaccgcgcttctcccgctggagcgggcgtccagcttggctgccctcggtccttccctgccacgtttcgggtcgccctgcaccccccacccaggctcgcttctcttcgaagcgggaagggcgccttgcaggatcctgccgcccctccaaccggatcctgggtctagagctccccagagcgaggcgctcgccaggactcctgccccgccaaccctgaccgccggggggtgcccccgggacgtagcgccgcggagaggaagcggcaaaggggaccatgcggcgcctgactcgtcggctggttctgccagtcttcggggtgctctggatcacggtgctgctgttcttctgggtaaccaagaggaagttggaggtgccgacgggacctgaagtgcagacccctaagccttcggacgctgactgggacgacctgtgggaccagtttgatgagcggcggtatctgaatgccaaaaagtggcgcgttggtgacgacccctataagctgtatgctttcaaccagcgggagagtgagcggatctccagcaatcgggccatcccggacactcgccatctgagatgcacactgctggtgtattgcacggaccttccacccactagcatcatcatcaccttccacaacgaggcccgctccacgctgctcaggaccatccgcagtgtattaaaccgcacccctacgcatctgatccgggaaatcatattagtggatgacttcagcaatgaccctgatgactgtaaacagctcatcaagttgcccaaggtgaaatgcttgcgcaataatgaacggcaaggtctggtccggtcccggattcggggcgctgacatcgcccagggcaccactctgactttcctcgacagccactgtgaggtgaacagggactggctccagcctctgttgcacagggtcaaagaggactacacgcgggtggtgtgccctgtgatcgatatcattaacctggacaccttcacctacatcgagtctgcctcggagctcagaggggggtttgactggagcctccacttccagtgggagcagctctccccagagcagaaggctcggcgcctggaccccacggagcccatcaggactcctatcatagctggagggctcttcgtgatcgacaaagcttggtttgattacctggggaaatatgatatggacatggacatctggggtggggagaactttgaaatctccttccgagtgtggatgtgcgggggcagcctagagatcgtcccctgcagccgagtggggcacgtcttccggaagaagcacccctacgttttccctgatggaaatgccaacacgtatataaagaacaccaagcggacagctgaagtgtggatggatgaatacaagcaatactattacgctgcccggccattcgccctggagaggcccttcgggaatgttgagagcagattggacctgaggaagaatctgcgctgccagagcttcaagtggtacctggagaatatctaccctgaactcagcatccccaaggagtcctccatccagaagggcaatatccgacagagacagaagtgcctggaatctcaaaggcagaacaaccaagaaaccccaaacctaaagttgagcccctgtgccaaggtcaaaggcgaagatgcaaagtcccaggtatgggccttcacatacacccagcagatcctccaggaggagctgtgcctgtcagtcatcaccttgttccctggcgccccagtggttcttgtcctttgcaagaatggagatgaccgacagcaatggaccaaaactggttcccacatcgagcacatagcatcccacctctgcctcgatacagatatgttcggtgatggcaccgagaacggcaaggaaatcgtcgtcaacccatgtgagtcctcactcatgagccagcactgggacatggtgagctcttgaggacccctgccagaagcagcaagggccatggggtggtgcttccctggaccagaacagactggaaactgggcagcaagcagcctgcaaccacctcagacatcctggactgggaggtggaggcagagccccccaggacaggagcaactgtctcagggaggacagaggaaaacatcacaagccaatggggctcaaagacaaatcccacatgttctcaaggccgttaagttccagtcctggccagtcattccctgattggtatctggagacagaaacctaatgggaagtgtttattgttccttttcctacaaaggaagcagtctctggaggccagaaagaaaagccttctttttcactaggccaggactacattgagagatgaagaatggaggttgtttccaaaagaaataaagagaaacttagaagttgtctctggaaaaaaaaaaaaaaaaaaaaaaaaaaaaaaaaaaaaaaaaaaaaaaaaaaa

SEQ ID NO: 5249 - DNA, 1755 bp, Homo Sapiens
  NM_024576
cgcgagggtgcctgtccgccgctcgccgcgctgaggcagtgcggggcgggcgcgcctaggctgccgcccagcgccctcgccgcggccatgcccgggccctagagcgcctgccgcagcttgcgccccgcagccccgcagccccgcgcccgccgccgcctcttcaatgggcaacctgctcggcggggtcagcttccgcgagcccaccaccgtggaggactgcgactccacctggcagaccgactcggagcccgagcccgaagaaccagggccgggcggcggcagcgagggcccggggcaggagtccgagcagcccgcgcagcccccggagcaagccggcgggcggcccggcgccagccccgcgccggacgaggacgccgaggcggcgggcgccgagcagggtggtgattccactgaagcaactgccaaaccaaagagaagtttttatgctgccagggatttgtacaagtaccgacaccagtacccaaacttcaaagatatccgatatcaaaatgacttgagcaatcttcgtttttataagaataaaattccattcaagccagatggtgtttacattgaagaagttctaagtaaatggaaaggagattatgaaaaactggagcacaaccacacttacattcaatggcttttccccctgagagaacaaggcttgaacttctatgccaaagaactaactacatatgaaattgaggaattcaaaaaaacaaaagaagcaattagaagattcctcctggcttataaaatgatgctagaattttttggaataaaactgactgataaaactggaaatgttgctcgggctgttaactggcaggaaagatttcagcatctgaatgagtcccagcacaactatttaagaatcactcgtattcttaaaagccttggtgagcttggatatgaaagttttaaatctcctcttgtaaaatttattcttcatgaagctcttgtggagaatactattcccaatattaagcagagtgctctagagtattttgtttatacaattagagacagaagagaaaggagaaagctcctgcggttcgcccagaaacactacacgccttcagagaactttatctggggaccgcctcgaaaagaacagtcggagggaagcaaagcccagaaaatgtcttcccctctcgcctccagtcataacagtcaaacttctatgcacaaaaaagccaaggactccaaaaattcctcctcagctgttcatttaaatagcaaaacagctgaagacaaaaaagtggcaccaaaagagcctgtggaagagacagacaggcccagcccagagcccagcaatgaagctgccaagccaagaaatacagagaaggacagtaatgctgagaacatgaattctcaacctgagaaaacagttactactcccacagaaaaaaaggagagtgtatctcctgagaataacgaagaaggtggaaatgataaccaagacaatgaaaatcctggaaatacaaattgccatgatgttgtactagtacagtgaattatcagaaaacccagaagccagtttaggctagagaggaaaaaactactgtatcatttatcctaaagaacagagatgaggtcaatttcaaattttagccatctgtttgtgatttctgtcataagcattttgttgtttgtttttttattttggatgacaatgaattgaatatctaataaggagatttaagataagacccaataaatgaatgtattctgtaaaaaaaaaaaaaaaaa

SEQ ID NO: 5250 - DNA, 1124 bp, Homo Sapiens
  NM_024578
aaatgcacaacccggacggaagtgcctctccgacagcagatccaggctcggagctccagacgctgggacaggccgcccgcagaccacccccgccgcgcgcgggacacgacgccccccgcaggacacgcccatcagcccggaaacccctgagctgcttctcccggaggccgatgcccacccgggagcccccaaagactcgcggctcccgggggcacctgcatactcacccgcctgggcctgggcccccgctgcagggactggcgccccgaggcctcaaaaccagcgccccccgccctccgtgccagccccagccgggaccccacaaggcaaagaccaagaagattgtgtttgaggatgagttgctctcccaggccctcctgggcgccaagaagcctattggagccatccctaaggggcataagcctaggccccacccagtgcccgactatgagcttaagtacccgccagtgagcagtgagagggaacggagccgctatgtcgcagtgttccaggaccagtacggagagttcttggagctccagcacgaggtggggtgtgcacaggcaaagctcaggcagctggaggccctgctgagctccctgcccccaccccaaagccagaaggaggcccaagttgcagcccgggtttggagggagtttgagatgaagcgaatggatcctggcttcctggacaagcaggctcgctgccactacctgaagggtaaactgaggcatctcaagactcagatccagaaattcgatgaccaaggagacagcgagggctccgtgtacttctaagtgcccctgcagatgggcagagggatgcatggggatgcaggtcccttgcatttcttggtatctctcagcttttcctcttgcagctccccctaccaggggtcgctttctcctggattgcaaatgcctcttcagtttggactcagctctgacagcccctcctccaggaaggccttccaggacttcctcctctgggtcctctagctctgaccctacagggactccagatctcaacctgttccctggaagtagggcctgctctccatcccagtgaaataaacatgtattagacacctaaaaaaaaaaaaaaaaaaaaaaaaaaaaaaaaaa

SEQ ID NO: 5251 - DNA, 3685 bp, Homo Sapiens
  NM_024580
agagacgtgcgggtgaaaggtcgagcgacagccggccccgccccctggcgcgcgggcgtgtcggacccgcagagctctcggactttcggaagctctcggtgtgggtgcgacccgagagaaggagcggggctggtggggctgctgcagccgtcacaggaaataagtaatcatggtgctcaacagtttggataagatgattcaactccagaaaaacactgccaacatcaggaatatttgtgttttggctcatgttgaccatggaaaaactactctggctgactgtcttatatctagcaatggaatcatctccagccgcctagcaggcaagttaaggtacatggacagcagagaagatgaacagatccgagggatcactatgaaatccagtgccatttccctacattatgcaacaggtaatgaggagtacctgatcaatctgatagactctccaggacacgtggacttttcctcagaagtatcaaccgctgttcgcatttgtgatggatgcatcattgtggtagatgctgtggaaggagtctgtccacagacacaggcagttctgcgacaagcttggcttgaaaacatccgtccggttttagtgattaataagattgatcgcttgatagtggaactgaaattcaccccacaagaggcctattctcacctcaagaatattttagaacagattaatgcgctcacagggactctttttacttctaaagtcctagaagaaagagcagagagggagactgaatcccaagtgaatccaaattctgaacaaggagagcaagtatatgactggagcactggcttggaggacacagatgattctcacctttacttctctccagaacagggaaatgtggtgtttaccagtgcaatagatgggtggggctttggaattgagcacttcgccagaatctacagtcaaaaaattggcatcaaaaaggaagttcttatgaaaaccttgtggggagattactatataaatatgaaggctaaaaagatcatgaagggtgatcaggccaaaggaaagaaacctttatttgtacagttgatcctggaaaatatatggagtttgtatgatgctgttttgaaaaaggacaaagacaaaattgataaaatagtgacttctttaggattaaaaattggagcccgggaggcacgacattcagaccctaaagttcagatcaacgccatttgcagtcagtggctacccatatcccatgctgttcttgctatggtgtgtcagaaacttcctagtccccttgatattacagctgagagagtggagagactgatgtgcacaggatcacaaacttttgactcttttccaccagaaactcaagcactgaaagcagcttttatgaaatgtggaagtgaggacactgctccagttattatatttgtttccaaaatgtttgcagttgatgctaaggccttgcctcagaataagccaaggcctctcactcaagaagaaattgctcagagacgtgagcgtgcaagacaaaggcatgcagagaagcttgcagcagcacagggacaggcacccttggagcccacccaagatgggagtgccattgaaacatgtccaaaaggagaggagccaagaggtgacgagcaacaggtggaaagtatgacccctaaacctgtgctccaggaagaaaacaaccaagagtcttttattgcatttgctcgggtgttcagtggtgtggctcgaagaggaaagaaaatttttgtcttggggcccaaatacagtcctcttgagtttttacgaagggtaccattaggcttctcagctccaccagatggcctcccccaagtcccccacatggcatactgtgctctggaaaacctgtatcttctgatgggaagggaactggaatatctagaggaggtacctccaggaaatgtgctaggaataggaggccttcaagattttgtgctgaaatctgcaacactgtgtagcctgccatcctgcccaccatttataccactcaacttcgaagccactcctattgtgagagttgctgttgaaccaaaacatccaagtgaaatgcctcagctcgtaaaaggaatgaaactgttaaaccaggctgatccctgtgtccagattttaattcaggaaacgggagagcacgttttagtcacagcaggagaagtccaccttcagcgatgcctggatgacttaaaagaaaggtttgcaaagattcatatcagtgtatctgaacctattattccattcagagaaacaatcacaaaacccccaaaagttgacatggtcaatgaagaaataggcaaacagcaaaaagttgcagtcatacaccaaatgaaagaagatcaaagcaaaatccctgaaggaatccaagttgactctgacgggctaatcaccataacaactcccaataaacttgccacgctcagtgttcgagccatgccccttccagaagaagtcacccagattctggaagaaaatagtgatttgattcgttctatggagcagttgacatcctctttgaatgagggtgaaaatactcacatgattcatcagaagacccaagagaaaatttgggaattcaaaggaaaactggagcaacacctaacagggagaagatggaggaacattgttgaccaaatctggtcatttggcccaagaaaatgtgggcccaacatactagtcaataaaagtgaagattttcagaactcagtatggacaggtccagctgacaaagcttcaaaagaagccagtagataccgagatttgggcaatagcattgtgagtggcttccaactagcaaccctctctggccccatgtgtgaggagcctctcatgggtgtctgttttgttctggaaaaatgggacctaagtaaatttgaggaacaaggagcaagtgatctggcaaaagagggacaggaggaaaatgaaacctgttctggtggaaatgaaaaccaagagctacaagatggctgctctgaggcctttgagaagaggacatcacagaaaggagaatctccactcactgactgctatggacctttctcaggacagctaattgccaccatgaaagaagcatgtcgctatgcactgcaagtgaaacctcagcgcctgatggcagctatgtacacatgtgacatcatggccactggtgatgttctcggtcgagtctatgctgtcttgtcaaagagagaaggtcgggtacttcaagaagaaatgaaagaagggacagacatgttcatcatcaaggctgtgctgcctgttgctgaaagctttggttttgctgatgaaatcaggaagaggacaagtggcctggccagcccacaactagtattcagccattgggagatcattcccagtgaccccttctgggtgccaactactgaggaggaatacttgcactttggggagaaggctgactctgagaaccaagcccggaagtacatgaacgcagtacgaaagcggaaggggctttatgtggaagaaaagattgtggagcatgcagaaaagcagaggacactcagcaaaaataagtagctacctactactggtggattcttttccttatagtgaatttaaaagtatcatcaagggtttaatattgggaaaatttctttttgccacattatctctgtttattcactttcaataaagttgatccatataaatattttaaagaggatgttagag

SEQ ID NO: 5252 - DNA, 4992 bp, Homo Sapiens
  NM_024588
ggctatcctactgcagctggctgcatcagatgtgccaggcctgccctctagctcccaacaccatctgcctgatctaagctttgccatgttgttgtcactgctgggtgcctgtgctgtggtggggccattccatggccctgagtgggagccagtgcagggcctgctctcccagaatcacagctgcagggaccctcagtgctgtggcaacctgcttgtcctctgcctctttctggtctggcaggtccggcactgttggcaccaggtcaccaggacccgcttcagcacaaggaatgtcatcaaggtgccactgcagaagcgggcagtgccctccatgaggtgcgaaactgtcttcaagctgactcctgaattcttcagtcctggaaagtccaggggcctagattctcaacaatgcgcacaaaggcagagatggggataccggaggagcctccaggaatcatgggcccagaacctgctctctccacagcacccatgtccaggcccaccttcgggtgtccacacccactctgagcccatcttttgtaccacctccatttcaaacacctgtttactgcctcagaacagttcctggaaagcatggcaggtgccttggtgtctccatgatggtcagactcgccctgccttggacatgtgtcaagagatggagcagctgctgcttcactcacaggaaaggttggtgtcactggagcctgtcatcagtgtgaggtctcgccccacctccatgaccttaaccacctctcttccaaacttactttcagctgagaggctgcagttctgcccccagagagctcctgcctgatccttcccaccaaacactgagaatgtgcacttggaagtcttggcactgtcgaccagaggcctgggaaccagggggtaaaaaccagaaagcaggcagagaggatagtagagagacccaggctccaaggtgggtgaaccagacagggagcagacgggaggatgcttcagaaatccaggcatctggggagtagttcccagtagactttggaatggagggtgatgcagagactaacgtgttggagtgtgcaaaccagagactagtaataagtgaaactgatggcgagatcttgacaccagggtgggacacccaggaccggatgggagttgagagtagaaccaacattcaggaactagggaatagaaaccagagggaggctggaggtgagaatctccctgaaacccaggcacatatgggagagaaccaagaacagttaagatgtaaaattgatgcagagacccaaacacctgagtgggagaaccaggataagaatggaagtgaggatgctgtggagacccagacatttgagaagaaggacaagaaagaggctggagaggaggatggggaagagatccaggctcaaggattggggaagcaaggccagactggagatgagaatggtgaggagacccagacaccacagtgggagaaacaagatcagatgaaaggtgatgcggatgtggaaattcagatggaagaggggagaaacaaggatcaggttggaggtcaggatgctgcacaaacccaatcatgtgggagggagaacgtgggagaagtaaaaaaagagaatagtgtagagacccaggccttggattggggaaaacaggaatgtgttggaaatgggaatgttacagagatccagacaccaaggtgggagaagcatgatcaaggtggaagtaagaaagctaagaagacccaagcatctgggggagagaaccagaaacaattaagtcatgaaattcaagtggggtggggaaataagggcctgagaagagatgaagatgctaaggaaacccagatagctaccaagaagaagctcagggagataagagaaggattgggtggtgatccaggcactatggtggggaaaccggagacaagtagcaagtgaaatttatagagaatttgagatactatgttgggagaatcagaactggattggaggtgaacatagagcagaaattcaggcatcagagaagagagaccaaagaaaggatggatgtgaggatggcacaaatatcctggcacccgaggctgagatccaggaacaattaaaaggtgaaactgatgtggagactcagagcaatgagccacttagagaagaggatggtacagacattcagtcactagggaggagagaggttaaaggtgaggatgataaagacacccaggaacttgggaggaaaaatcagggtcagttaggaaatgaatttagtggaaagattcacataccaaaggggaagaatcaggaacatattagaggcgaagatggtgcacatacccagatatctgagtcagggaactggggcaaattaacaagtcaaattgatggagaaatgcattcagcagaatggaagaaagatcagcagattggaggtgagaatggggcagaaattcagatacaagggaagagaaacctgagagaagttggaggtgaggacggtgtaaagacctgggcacctgggaaagaaacccagagtcagtttagaagtgatcttggtagaaagatccttttatcagagtggaagagccagaagcagatgggaagtgagaatggaacagaaattcaggctccagtggagagaaaccagagagaacctggaggtgaggacggtgtaaagactcagagacctaagagagagaacgaggaccagttagatagtgaaattggagggagccattcaccagggaggaggaactgggagctgattggaaaggatgttgcagaaaatcaggcatcagagaagagaaaccagagagaggttggaaacgaggacggtagaatgatctggaggcttaggggaaaaaactggaggcttagagcgaagaaacagactgttaaaaagtaaagataatggaaagacccgtttatcagagtggaagaaccaggaacagggtggaggtgggaatgatgaagaaattcaaatacaggggaagagaaacctgagagggaccacagctgatgatggtacagagacccaggctcctgcaggagatgaccagggacagttaagagttgaaattgctgaagagatccaggtacaagggcaaggaaataagaatgacggtggagttgaggatgttgcagaactccaggatataggaagccagagaaagtgcacagatgaggatgttggagagcctcgagcaccaaggggaggaaacaaggatctggtcagaggagaggatgctgtgagggacagtctccaagtcgactgttctgggagtgagaggcccacaggcaggaagcacagcctaccatggcctccagccttcactggctatggatgtgggacccgggaacaggaacaggcagtggctgtgaatggtttcatctctgccccctgtcctgagatgaatcctgtcccccactggggtgaagtcttcctgctggtgggtggggagggagagcatctggccagccagggcacaacccctgccagggatcatagagtggggatcagtccagcctcccagcaggcccaacctgaatcctggagaagacgacaaagggacaaaggggtggatccagagaaggcccccagcctgactcggcagtcccaaaaccctccgtctctgacagctcccttgggcatgccctctgcctgctcctgtctcccgtgtggcccagccccggaagctgccatcattctagcgggtcctcccaccgccctcactgtcctgcccaaggggacaggcctcaagaagagcaaacgactgctcctggagtccctcatgcggaggaggattgcacacctgaagtggggtcttccccggcggatcctggagtcctatttcctgtttaacttcttaggatcttgctcattgacccttgctggggcgaggctctctggactgaacacaggccaggagctccaagcccagcaggaaaggtattgtgaggcccaaggctccccaccaggccttaagtccccagagaggttccagagggttcagcgcccagacagaaaaagctcgaaacttcctatacaagccagagctctggagaggaacagaccgcacatgtcagagcccattaagcatttccatccagcctgaaaaggccaggagagtcaggccaccagggggcgccagagaaccacaggagatccaggaagcgcttgctaggaccaagctcccagctcccaggacccccaggccggcagcggagtccaggagctggtgtggcccacaaagggtcggagagcctcccagtgagaacagtaggggcaggaaaatgatcaggtcaagggtctcccagctggcagagagggctcccagcagagtgaggacttcattctctagggcagaccacgcccactggaggaaggaatgtacatcctgggaggcctctaagctccccagactcaaatgccagcagctcacatactggagaagaggaagcctggaatctacagggtgcagaggggctgggcagcagccttcctgccattctgcagaacctgtcagcttcaaagggaggctccactctgcggtggcaaagctgggcctgacccttctggccaagatgtcctggtccccacagctcgccaagcgcaagcacttggcccctaacctgagcctgagggaacctgattctactctgcctcccaaagtgggtgatcctcgtgcaggggaggacagcatcggagatcacactgcttcacagagggatcttcagctgcaaggtcactgctgtactggggccacccttcctaagacagagagtccccagggccaggaggcacctgggaacccaaatggggctccacagaatacacgagcctccaaaaagtttagtattatgaagcatctgaattttttttctcttccagaatggctttaaaaagtagactcaggcccagagtcctcaggacatatcagaaaagctttgagagtgtcctgatccctgcaaagcctctaataaattggtcatttgggcaaaaaaaaaaaaaaaa

SEQ ID NO: 5253 - DNA, 1474 bp, Homo Sapiens
  NM_024589
agacgccgggggcggacgggaggaccggaggaccgaggacagaaagattggtggacaggagcagcggccggtggggagggcgctcggcggcggcctgcggccatggccaccgtgatggcagcgacggcggcggagcgggcggtgctggaggaggagttccgctggctgctgcacgacgaggtgcacgctgtgttgaagcagctgcaggacatcctcaaggaggcctctctgcgcttcactctgccgggctccggcactgaggggcccgccaagcaagagaacttcatcctaggcagctgtggcacagaccaggtgaagggtgtgctgactctgcagggggatgccctcagccaggcggatgtgaacctgaagatgccccggaacaaccagctgctgcacttcgccttccgggaggacaagcagtggaagctgcagcagatccaggatgccagaaaccatgtgagccaagccatttacctgcttaccagccgggaccagagctaccagttcaagacgggcgctgaggtcctcaagctgatggacgcagtgatgctgcagctgaccagagcccgaaaccggctcaccacccccgccaccctcaccctccccgagatcgccgccagcggcctcacgcggatgttcgcccctgccctgccgtccgacctgctggtcaacgtctacatcaacctcaacaagctctgcctcacggtgtaccagctgcatgccctgcagcccaactccaccaagaacttccgcccagctgggggcgcggtgctgcatagccctggggccatgttcgagtggggctctcagcgcctggaggtgagccacgtgcacaaagtggagtgcgtgatcccctggctcaacgacgccctggtctacttcaccgtctccctgcagctctgccagcagctcaaggacaagatctccgtgttctccagctactggagctacagacccttctgatcacagcacccaggagcttgtctccaggaaggcggccccgtcccctactcatacccaccacagagcaccagccagtgccaacgccaggctgctatttatctccctatcccaccccctaccccacctaacacatttgcactgccaggaatggacactggaagtgccaggaggaaggaaggctggtttggtggggtagtggggaggtcagggaggcggggccaagggtgtcccacattcccaacaccgccctctgatcaccatgggaatctttggactcaggacagggccaggtgcagggctctccctcctctccccttcgctgtcccctccccctggagggcatggtgtcggggggtggcactgagctatgagtcccggggatggtgaggaacgccacagacagagccaccctaggagtgagtatagtgctggtgactgtgtttcatagccccagtccagggctgtctaagaaataaagatcatcagactccaaaaaaaaaaaaaaaaa

SEQ ID NO: 5254 - DNA, 3154 bp, Homo Sapiens
  NM_024596
gcatgcccagtgcccgcgcgcgccgccaggctcgcaagcaccgcgtaggccagctggccggatcccgccgtctgtcatggcggcccccatcctgaaagatgtagtggcctatgttgaagtgtggtcatccaatggaacagaaaattattcaaagacatttacaacacagcttgtggatatgggggcaaaggtttcaaaaacttttaacaaacaagtaactcacgttatcttcaaagatggctaccagagcacttgggacaaagctcagaagagaggcgtaaagctcgtttcggtgctctgggtggaaaaatgcaggacagctggagcacacattgatgaatcattgttccctgcagctaatatgaatgaacacttatcaagcctaattaaaaaaaaacgtaaatgtatgcagcccaaagattttaattttaaaacaccagaaaatgataagagatttcagaagaaatttgagaaaatggctaaagagctacaaaggcaaaaaacaaatctagatgatgatgtacctattctcttatttgaatctaatggttcattaatatatactcccacaattgaaattaatagtagtcaccacagcgcaatggagaagagattacaagagatgaaggagaaaagggaaaatctttcccccacctcttcccaaatgattcagcagtctcatgataatccaagtaactctctgtgtgaagcacctttgaacatttcacgtgatactttgtgttcagatgaatactttgctggtggcttacactcatcttttgatgatctttgtggaaactcaggatgtggaaatcaggaaaggaagttggaaggatccattaatgacattaaaagtgatgtgtgtatttcttcacttgtattgaaagcaaataatattcattcatcaccatctttcactcacctcgataaatcaagtcctcagaaatttctgagtaatctttcaaaggaagaaataaacttgcaaagaaatattgcaggtaaagtagtcacccctgaccaaaagcaggctgcaggtatgtctcaggagacgtttgaagagaagtatcgtttgtctcctaccttatcttcaacaaaaggccaccttttgatacattcaagacccaggagttcctcagtaaagagaaaaagagtatcacatggctcccattcacctccgaaggaaaaatgcaagagaaagaggagcaccaggagatctatcatgccgaggctgcagctgtgcaggtcggaagacaggctgcagcacgtggcgggacctgccctggaggctcttagctgtggggagtcttcatatgatgactatttttcacctgataatcttaaggaaaggtattcagagaatcttcctcctgaatctcagctgccatcaagccctgctcagttgagctgcagaagtctttctaagaaggagagaacaagcatatttgaaatgtctgatttttcctgcgttggcaaaaaaaccagaacagttgacattaccaatttcacagcaaaaaccatctccagtcctcggaaaactggaaatggtgaaggccgtgcaacttcgagttgcgtgacttctgcccctgaagaagccctaaggtgttgtagacaggctgggaaagaagacgcatgcccagagggaaatggcttttcttacaccattgaggaccctgctcttccaaaaggacatgatgatgatttaactcctttggaaggaagccttgaagaaatgaaagaagcggttggtctgaaaagcacacagaacaaaggtaccacttccaaaatatcaaactcctctgaaggcgaagcccagagtgaacatgagccatgttttatagttgactgtaacatggagacgtctacagaagagaaggaaaacttacccggaggatacagtggaagtgttaaaaatagaccaacaaggcatgatgttttagatgactcatgtgacggctttaaggacctcatcaaacctcatgaggaattgaagaaaagtgggagaggcaaaaagccaacaagaacattagtcatgacaagcatgccatctgaaaagcagaatgtcgtcatccaggttgtggataaattgaaaggcttttcaattgcaccagacgtctgtgagaccacgactcacgtgctttccgggaagccacttcgcaccctgaatgtgctgctgggaattgcgcgtggctgctgggttctctcttatgattgggtgctatggtctttagaattgggtcactggatttctgaggagccgttcgaactgtctcaccacttccctgcagctcccctgtgccgaagcgagtgccacttgtctgcagggccgtaccgcggaaccctctttgccgaccagccagcgatgtttgtctcgcctgccagcagccccccagtggccaagctctgtgaactagtccacctgtgcggaggccgggtcagccaagtcccccgccaggccagcatcgtcatcgggccctacagcggaaagaagaaagccacagtcaagtatctgtctgagaaatgggtcttagattccatcacccagcacaaggtctgtgcccctgaaaactacctattgtcacaatgacagtgacctcactggcctgtggtgactgcacacagctcgcaaaactgtctttggatgttcaaatgagaaacaaaactgtgaagagaaggaactggcgtatacaagatgacttctgatatcatgtttgccatgtgttgtggttcttaagaactcataggtgactttctgatgactgaatgtctgtttcagagacgcttcgggcctttttatttttattttattttttattttttgagacggagtcctgccctgtttcccaggctggagtgcaatggcacaatctcggctcactgcaacctccacctcccaggttcaagcgattctgctgcctcagcctcctgagtagctgggattacagatgtgtgccaccatgcctggctaatttttgtagttttagtagagacagggtttcgccatgttggccaggctggtctcaaacgcctgagctcaggtgatctgtcaggcctcttctatagaattccagtctttgtgtcttagtcatgatcataattgaaaggtcacagaacctttgtcattagagcacagtactgccaaataaagaatggaaat

SEQ ID NO: 5255 - DNA, 2287 bp, Homo Sapiens
  NM_024598
gcggtgccagcccaggccccgcccctgggagggcgcttccggcacagcggaactccgggtgccggttgaggttgctggtggacctgctctggtggtcttggatgaggccccatgagcgcggcgcccctggtgggctacagcagcagcggctccgaggatgagtccgaggacgggatgcggaccaggccgggggatgggagccaccgtcgtggccagagcccccttcccaggcagagatttccagtacctgacagtgtgctgaacatgttcccgggcaccgaggaggggcctgaagatgacagcacaaaacacgggggacgggtgcgcaccttcccccacgagcgaggcaactgggccacccacgtctatgtaccatatgaagccaaggaggagttcctggatctgcttgatgtgttgctgccccatgcccagacatatgtcccccggctggtaaggatgaaggtgttccacctcagcctgtcccagagtgtggttctgcgccaccactggatcctccccttcgtgcaggctctgaaagcccgtatgacctccttccacagattcttctttactgccaaccaggtaaagatttacaccaatcaagagaaaaccaggacctttattgggcttgaggtcacttcagggcatgcccagttcctggacctggtttcagaggtggacagagtcatggaggaattcaacctcaccactttctaccaggatccttctttccacctcagcctggcctggtgtgtgggtgatgcacgtctccagctggaggggcagtgcctgcaggaactacaggcaatcgtggatgggtttgaagatgctgaggtgctgctgcgcgtgcacactgagcaagtccgctgcaagtctgggaacaagttcttctcgatgcctttgaagtgagcaccagaggccttcctcctccagggccctctgcagaccaggctgagatggaggaacctgctaaaatcgatggagatgcttctagcctcccagtaggaggccccagccatgccttcaacctggcaggaggtgtagccactcctcatcctccctgagtgctgatattctctctctctctttctcttcctcttctttctctctcttctcctctctttctctcctctgtctctcttcctctcctctcttcctctcttctctcttcctctcctctctctcttcctcttctctctcttcccctcctgtctctcctcccctcctctcttcctctcctctctcttcctctcctctctctacccctcctgtctctcctcccctcctctctcttcctctcctctctctcttcctctcctctctcttcccttcctgtctctcttcccctcctctctctcttcctgtcctctatctcttcccctcctctatctcttcctctcctctctctcttcctctcctctctctctcttgctttcttctctctctcctgtctcggctgttgtgggttgcaggttgggtgctgctgttgtggtccttcccagaaactgccagtagagggcagcctgggcatcctaatgcttactctggttgttacacaaagaaaatattggggtcactggcgagcccacccacactcaccagaatctccactgtagtccccctaacaaacagcccttcacttcctctcccacttcagcaatttgtattttgatgccattggcctcagatcagagtgttttaaatcatcacgccctggcttatccctggtcgagccaggacacggggtgcttcagtgggtctgtcaccctctctccttgaagcatgttgcttttatttatttacttttactctcaccctgctcctgtaccagcaggggccacttcaaagccaaggtacagggtgataacttgtggtccagcatcagttttctccacttctttctcccactcacccccagcaaggtgcctggggagacttgagcagatgtttcattttggcctggccagtggctgaaagccaggcctccaatgcactgtgacctctggcttccccagcagctttcccagagaggcagaggggccttccacagcccgggttctcctgctgcctcctgcctgctgcagctgcaggcattctgaggggcaacgtggaggaagggccagggatgcatgggattttaattgtttcatcacaccttccccgtggcaaagaaacagtcagtcctcttcaggtgtcttctggatttctggtgatggacagagaaatctttttacagtttcaaattatgttcaacaaataaaaattgcattttttattttggatcttt

SEQ ID NO: 5256 - DNA, 3615 bp, Homo Sapiens
  NM_024599
ccccgaggagccaccgcccagccgctcgcaggcgccgcacggagttgcgtcccggggacttggggccgcagggagctgtgagtacccaggaagctgcaccgtgtggcctggagctgtctatctgtccttccagccacctgtctgtccagccacccttccacagactgaggcttgacaccggagcatctgtacagagcaaggagaagacaagaacatgctctaaagcccttcacagcaagacccaggaagccgcgggcaaactcagactcgaagccctcccgcctcctgcccacaatggcctctgctgacaagaatggcgggagcgtgtcctctgtgtccagcagccgcctgcagagccggaagccacccaacctctccatcaccatcccgccacccgagaaagagacccaggcccctggcgagcaggacagcatgctgcctgagggttttcagaataggaggctaaagaaaagccagcccaggacctgggctgcacacaccaccgcctgccctccctccttcctccccaagaggaagaacccagcctacttgaagagcgtcagcctccaggagccacgcagccgatggcaggagagttcagagaagcgccctggcttccgccgccaggcctcactgtcccagagcatccgcaagggcgcagcccagtggtttggagtcagcggcgactgggaggggcagcggcagcagtggcagcgccgcagcctgcaccactgcagcatgcgctacggccgcctgaaggcctcgtgccagcgtgacctggagctccccagccaggaggcaccgtccttccagggcactgagtccccaaagccctgcaagatgcccaagattgtggatccgctggcccggggccgggccttccgccacccggaggagatggacaggccccacgccccgcacccaccgctgacccccggagtcctgtccctcacctccttcaccagtgtccgttctggctactcccacctgccacgccgcaagagaatgtctgtggcccacatgagcttgcaagctgccgctgccctcctcaaggggcgctcggtgctggatgccaccggacagcggtgccgggtggtcaagcgcagctttgccttcccgagcttcctggaggaggatgtggtcgatggggcagacacgtttgactcctccttttttagtaaggaagaaatgagctccatgcctgatgatgtctttgagtcccccccactctctgccagctacttccgagggatcccacactcagcctcccctgtctcccccgatggggtgcaaatccctctgaaggagtatggccgagccccagtccccgggccccggcgcggcaagcgcatcgcctccaaggtgaagcactttgcctttgatcggaagaagcggcactacggcctcggcgtggtgggcaactggctgaaccgcagctaccgccgcagcatcagcagcactgtgcagcggcagctggagagcttcgacagccaccggccctacttcacctactggctgaccttcgtccatgtcatcatcacgctgctggtgatttgcacgtatggcatcgcacccgtgggctttgcccagcacgtcaccacccagctggtgctgcggaacaaaggtgtgtacgagagcgtgaagtacatccagcaggagaacttctgggttggccccagctcgattgacctgatccacctgggggccaagttctcaccctgcatccggaaggacgggcagatcgagcagctggtgctgcgcgagcgagacctggagcgggactcaggctgctgtgtccagaatgaccactccggatgcatccagacccagcggaaggactgctcggagactttggccacttttgtcaagtggcaggatgacactgggccccccatggacaagtctgatctgggccagaagcggacttcgggggctgtctgccaccaggaccccaggacctgcgaggagccagcctccagcggtgcccacatctggcccgatgacatcactaagtggccgatctgcacagagcaggccaggagcaaccacacaggcttcctgcacatggactgcgagatcaagggccgcccctgctgcatcggcaccaagggcagctgtgagatcaccacccgggaatactgtgagttcatgcacggctatttccatgaggaagcaacactctgctcccaggtgcactgcttggacaaggtgtgtgggctgctgcccttcctcaaccctgaggtcccagatcagttctacaggctctggctgtctctcttcctacatgctggcgtggtgcactgcctcgtgtctgtggtctttcaaatgaccatcctgagggacctggagaagctggccggctggcaccgtatcgccatcatcttcatcctcagtggcatcacaggcaacctcgccagtgccatctttctcccataccgggcagaggtgggcccggccggctcacagttcggcctcctcgcctgcctcttcgtggagctcttccagagctggccgctgctggagaggccctggaaggccttcctcaacctctcggccatcgtgctcttcctgttcatctgtggcctcctgccctggatcgacaacatcgcccacatcttcggcttcctcagtggcctgctgctggccttcgccttcctgccctacatcaccttcggcaccagcgacaagtaccgcaagcgggcactcatcctggtgtcactgctggcctttgccggcctcttcgccgccctcgtgctgtggctgtacatctaccccattaactggccctggatcgagcacctcacctgcttccccttcaccagccgcttctgcgagaagtatgagctggaccaggtgctgcactgaccgctgggccacacggctgcccctcagccctgctggaacagggtctgcctgcgagggctgccctctgcagagcgctctctgtgtgccagagagccagagacccaagacagggcccgggctctggacctgggtgcccccctgccaggcgaggctgactccgcgtgagatggttggttaaggcggggtttttctggggcgtgaggcctgtgagatcctgacccaagctcaggcacacccaaggcacctgcctctctgagtcttgggtctcagttcctaatatcccgctccttgctgagaccatctcctggggcagggtccttttcttcccaggtcctcagcgctgcctctgctggtgccttctcccccactactactggagcgtgcccttgctggggacgtggctgtgccctcagttgcccccagggctgggtgcccaccatgccccttcctctttctcctcctacctctgccctgtgagcccatccataaggctctcagatgggacattgtgggaaaggctttggccatggtctgggggcagagaacaaggggggagacacaagtagacctcaggtagaacgacactgggcggagccaccccagggcctgctcccagggagtgctcgaggcgcatcaggcccgttttttaccagtttatatcacggtcttcatttttaaaagtaacgctaactttgtacggacgatgtctcatggattaaataatattctttatggcagtaaaaaaaaaaa

SEQ ID NO: 5257 - DNA, 943 bp, Homo Sapiens
  NM_024600
ctgggacttggctttctccggataagcggcggcaccggcgtcagcgatgaccgtgcagagactcgtggccgcggccgtgctggtggccctggtctcactcatcctcaacaacgtggcggccttcacctccaactgggtgtgccagacgctggaggatgggcgcaggcgcagcgtggggctgtggaggtcctgctggctggtggacaggacccggggagggccgagccctggggccagagccggccaggtggacgcacatgactgtgaggcgctgggctggggctccgaggcagccggcttccaggagtcccgaggcaccgtcaaactgcagttcgacatgatgcgcgcctgcaacctggtggccacggccgcgctcaccgcaggccagctcaccttcctcctggggctggtgggcctgcccctgctgtcacccgacgccccgtgctgggaggaggccatggccgctgcattccaactggcgagttttgtcctggtcatcgggctcgtgactttctacagaattggcccatacaccaacctgtcctggtcctgctacctgaacattggcgcctgccttctggccacgctggcggcagccatgctcatctggaacattctccacaagagggaggactgcatggccccccgggtgattgtcatcagccgctccctgacagcgcgctttcgccgtgggctggacaatgactacgtggagtcaccatgctgagtcgcccttctcagcgctccatcaacgcacacctgctatcgtggaacagcctagaaaccaagggactccaccaccaagtcacttcccctgctcgtgcagaggcacgggatgagtctgggtgacctctgcgccatgcgtgcgagacacgtgtgcgtttactgttatgtcggtcatatgtctgtacgtgtcgtgggccaacctcgttctgcctccagc

SEQ ID NO: 5258 - DNA, 1342 bp, Homo Sapiens
  NM_024603
cgcgggctgagctgcccgaccggggcccgcccccggcgcccaccatgtacgcctttgtgcggttcctggaggacaacgtctgctacgcgctgcccgtgtcgtgcgtgcgcgacttcagcccccgctcgcggctggattttgacaaccagaaggtgtacgccgtgtaccggggcccggaggaattgggcgccgggcccgagagccccccgcgcgccccccgcgactggggcgcgctgttgctccacaaggcccagatcctggcgctggcagaagacaaatctgaccttgaaaacagtgtgatgcagaagaaaataaaaatccccaagctttctcttaatcatgtagaagaagatggagaggttaaagattatggggaagaagatttacagcttagacacatcaagagacctgaggggcggaagccgagcgaagtggcgcacaagagcatcgaggcagtggtggctcggctagagaagcagaacggcctgagcctgggccatagcacgtgtccggaagaggtcttcgtggaggcctcgccaggcacagaggacatggacagtctagaagatgctgtggtgccccgggctctgtatgaggagctgctgcgcaactaccagcagcaacaggaagagatgcgccacctccagcaggagctggagcggactcggaggcagctggtacaacaggccaagaagctcaaggagtacggggcacttgtgtctgaaatgaaggagctccgtgaccttaaccggaggctccaggacgtgctgctcctgcggcttggcagcggtcccgccattgatctggaaaaagtaaagtcagaatgtctcgagcccgagccggagttacggagcactttcagtgaggaagcaaatacgtcgtcctattaccccgctcctgcgcctgtcatggacaagtatatcctagacaatggcaaggtccatctgggaagcgggatttgggttgatgaggagaaatggcaccagctacaagtaacccaaggagattccaagtacacgaagaacttggcagttatgatttggggaacagatgttctgaaaaacagaagcgtcacaggcgtcgccacaaaaaaaaagaaagatgcagtccctaaaccacccctctcgcctcacaaactaagcatcgtcagagagtgtttgtatgacagaatagcacaagaaactgtggatgaaactgaaattgcacagagactctccaaagtcaacaagtacatctgtgaaaaaatcatggatatcaataaatcctgtaaaaatgaagaacgaagggaagcaaaatacaatttgcaataaactttggatttttcataaaaaaaaaaaaaaaa

SEQ ID NO: 5259 - DNA, 3687 bp, Homo Sapiens
  NM_024604
gcttgtggggaagcgcaggaggcggggctttgcgtgagtcactgccgggctcggcgtgagtcgctgcggggctgacggggtggcagtgcggcgggttacggcctggtcagaccataatgacttcagcaaataaagcaatcgaattacaactacaagtgaaacaaaatgcagaagaattacaagactttatgcgggatttagaaaactgggaaaaagacattaaacaaaaggatatggaactaagaagacagaatggtgttcctgaagagaatttacctcctattcgaaatgggaattttaggaaaaagaagaaaggcaaagctaaagagtcttccaaaaaaaccagagaggaaaacacaaaaaacaggataaaatcttatgattatgaggcatgggcaaaacttgatgtggaccgtatccttgatgagcttgacaaagacgatagtacccatgagtctctgtctcaagaatcagagtcggaagaagatgggattcatgtagattcacaaaaggctcttgttttaaaagaaaagggcaataaatacttcaaacaaggaaaatatgatgaagcaattgactgctacacaaaaggcatggatgccgatccatataatcccgtgttgccaacgaacagagcgtcagcatattttagactgaaaaaatttgctgttgctgagtctgattgtaatttagcagttgccttgaatagaagttatacaaaggcttattccagacgaggtgctgctcgatttgctttgcaaaaattagaagaggccaaaaaagattatgaaagagtattagaactagaaccaaataactttgaagcaacaaatgaactcaggaaaatcagtcaggctttagcatccaaagaaaactcatatccaaaggaagctgacatagtgattaagtcaacagaaggagagcgaaagcaaattgaagcacaacagaataagcagcaggccatttcagagaaagatcgggggaatggatttttcaaagaggggaaatatgaaagagcaattgaatgctatactcgagggatagcagcagatggtgctaatgcccttcttccagctaacagagctatggcctatctgaagattcagaaatatgaagaagctgaaaaagactgcacacaagccattttattagatggctcatattctaaagcttttgccagaagaggaactgcaagaacatttttgggaaagctaaatgaggcaaaacaagattttgaaactgttttacttctggaacctggaaataagcaagcagtaactgaactctccaaaattaaaaaggaattaattgagaaaggacactgggatgatgtctttcttgattccacacaaagacaaaatgtggtaaaacccattgataatccaccgcatcctggatcaactaaaccactcaagaaggttattattgaagaaactggtaatttgatacagactattgatgtgccagatagcactactgctgctgctccagagaataatcctattaatctagcaaatgtaatagcagccacaggcaccacaagtaagaagaattcaagccaagatgacctttttcccacaagtgatactccaagagcaaaagtattgaaaatagaagaagtcagtgatacttcatccctgcaacctcaagccagtttgaagcaggatgtatgtcagtcttacagcgagaaaatgcccatagagatagaacaaaaacctgctcagtttgccacaactgttcttcctccaattcctgcaaactcgttccagctcgaatctgatttcagacaattgaaaagttctccagatatgttgtatcagtatttaaagcaaattgaaccatctttgtatcctaagttgtttcagaaaaatctggatccagatgtattcaaccagatcgttaaaattctgcatgacttttacattgagaaagaaaagccattactcatctttgaaatcttacaaagactttctgaactaaaaaggtttgatatggcagtgatgtttatgtcagaaacagagaaaaagattgcacgtgcattatttaatcacatagacaagtcaggattgaaggatagttctgtcgaagaactcaagaaaagatacggtggttgatttccatttttgctgaaataattgtttttgactttcatatgtaaattttttctactgaaagtgttttgctttttaagaaaatgaaattatatagcaggaaaggactatctttgaacataagttaattaactataaggtgaattgtgatttaactagtgagaattgtattcaagtgaactctgtttttctgaaaataaaaatataaacaatgagatacatttgtaaggatcagcattttattttatgagtcattttaaatgttaaatttagatacattcttcagtgacccataaatgtaacattatttttatattttcatgagtttttgtaaccacttgccaaagctgcttcattagcatatgaataattacctttgtaaagaggaagttaaatagatagtgagatcctttctttataaaacttttaaatgttattgtgccaattcactaacatgaagttatttagttgcagggtatgtatgtatttttagtatttatgttgaaagaaagaagacttttaactagactttcaaactaggttaattgaagtatcacagtattcttacattttaatgccatagggttttttcccttaagatatccatgttacataccagttaaggacagataatctaatgcaaggtgtaaaaatgtaaaaattagtaatgtttaaagtactaattagcatatagcccatatgtatttgttggatgtgagtgtagcgtttgtaaacttttgaaagtagggctagaactctgctcatccctgtactctgcatagtacctagcacagacgtttgcacatagttaggtgctcaactgatacttataaaatttaattgaatttgacgcaagaatcatattaagtaaatgtttaaagtagcagcctagcaaatttttgggcatggtgtaagcactggtaaaaccagttaattttagagactatcaagttgttaaaaaatattaggacaccatcctttaattgttatcagcatcaataagacagttcagtttacaattttatacgatattgtggttaatttttattgccattatacatattactattcttatgaattgtttgagaagtaatcataatttatttacaaagataatttcttcagattgtggtataaattattgagatatgtttgtaatttggatagtttgaatgctttaaaatacacttgatagagtttattaactttgtttattgctaaatgtattatgatatataaacaggcaattgaatttagctttttatctgctatgatctgaatgtttatatcccccacaaattcatatgttgaaatcctaaccctgaaggcgatggtcttcggaggtggggcctttgggaagtgattgggtcaagagggcaggcccttgtaaaagaggccccagagagcttgttcaccaattacaccatgtaaggacacataagaaggcaccatctacgaacaagaaggtgggccttcaccagacaccagagaccagaatctactggcatcttcatcttggactccccatcctccagaactgtaagaaataaatttctgtttttattaatgtaagcta

SEQ ID NO: 5260 - DNA, 3073 bp, Homo Sapiens
  NM_024605
atggggctgcagcccctggagttcagcgactgctacctcgacagcccgtggttccgggagaggatccgcgctcacgaagcggaactcgagaggaccaacaagttcatcaaagagctcattaaggacgggaagaacctcatcgctgcgacgaaaagtctgtcagtggcccagcggaagtttgctcattcactcagagactttaagtttgagtttatcggtgatgctgtgacagatgatgaacgatgcatagatgcttccttacgtgaattttcaaattttttgaagaatctggaggaacagagagaaattatggcattaagtgtaactgaaaccctgattaaacccttggaaaaattcagaaaagagcaacttggagctgtaaaggaagaaaaaaagaagtttgacaaagagacagaaaagaattatagtctaattgataaacatttgaatttatcagcaaaaaagaaagactcacatttacaagaggcagatatccaagtagagcagaaccggcaacacttctatgaactgtctctcgagtatgtgtgtaagctgcaggaaatccaagaaagaaagaagtttgagtttgtggaacctatgctgtcattttttcaggggatgtttaccttctatcatcagggccatgaacttgccaaagacttcaatcactacaaaatggaactacagatcaacattcagaatacacggaatcgatttgaaggaacaaggtcagaagtggaagagctcatgaacaaaatcagacagaatcccaaggaccacaaacgagcaagtcagtttacagccgaaggctacctgtatgtccaggaaaaaaggcctgctccgtttggttccagttgggtcaaacactattgcatgtatcgaaaagcagcaaagaagttcaacatgatcccatttgagcacagatctggagggaaacttggggacggagaggtgttctttttgaaagaatgtaccaagaggcatactgactccattgacagaaggttttgttttgacatagaagctgctgatcggcctggcgtttccttgaccatgcaggcattttccgaagaggaaaggaagcagtggttggaagctctgggtggaaaggaagctctgtcccatagttttaatacagccatcatcccaagaccagaaggaaatgcacagttggataagatggggttcacaattatcagaaaatgcatcagtgccgttgaaacacgaggtataaatgaccaaggattgtacagagttgtgggggtgagttcaaaggtccagagacttctgagtatgttgatggatgtaaaaacatgcaatgaggtggacctggagaattctgcagattgggaagtgaagacaataacaagtgccttgaaacagtatttgaggagtcttccagagcctctcatgacctatgagttacatggagatttcattgttccagccaaaagcggcagcccagaatctcgtgttaatgcgatccatttcttggtacacaaactgccagagaagaataaagagatgttggatattttggtgaaacacttaacaaatgtttcaaatcactccaagcagaacctgatgactgtggcaaacttaggagtggtgtttggaccaactctgatgaggccacaggaagaaactgtcgctgccctcatggacttgaagtttcagaatattgttgtggaaatcttaattgaaaaccatgaaaagatttttcggacgccgcccgatactacattccctgagcccacctgcctgtcagcatcacccccaaatgcgccaccaaggcagtcgaagagacaaggccagagaaccaagaggcccgtggccgtctacaatctttgtctggagctggaagatggtgacaatccttacccttccaaggaggacacccctaccagcagtctggactcactttcctccccgtctcccgtgactacagctgtccctgggcctcctggaccagacaaaaaccaccttctggcagatggagggagctttggagactgggcatccactatcccaggccagacccgatcgtctatggtccagtggcttaacccacagtctccaaccacaacaagctccaactcagctgtgacacctctttcacccgggtcgtcccctttccccttttctcctcctgctactgtagcggacaagccacctgaaagcatccgcagtcggaaggctcgagccgtgtatccgtgtgaagcagaacacagctcggaattatcttttgaaataggagcaatttttgaggatgtacaaacctccagggaacctggctggctagaagggactctgaacggcaagagggggctgattccacagaactacgtcaagctgctgtagctcctggcctcagagcccctgctgaccctggcacccagggacctgcctgggggcagagagctgtcttcctcctccgaggctctgggctgcacccacaggtacctccacacttgggagttaccatcatcacagtcagccctgggggtggggggtggtgggcagggatgggacgcaccacacagaactgtgattgtggatcaggaggggaatgtcaggattcgcaaaatggacttttcatttgtcaagtattgggacttgtgatttttaattatccagcatatagaatgagagggagggcagccttctgccacctgtgtcgcctccactggcagtcacgccaccagagccaccctggctccctctcctccctgagcacctgctgctgcgattttaaagggaactgtactactcgcagtgataggtttgcagagtgtgtgcttggctgtggcagcctagcttggagaagctgctgttggtgcaagggagatggtctcaagtcagagggaagcagagacgcgcgtctcaagcctgcccttcctagacggccacctgcaggaccccacactcactgcactggcagcgtgcactggcgtatttgtaacaggcttctcggtgctcctcacccgtgtgctgttttccaaacaccacctttttgcctcaaggtctctgtaaatgaaataaactgtaatttactaaaaaaaaaaaaaaaaaa

SEQ ID NO: 5261 - DNA, 5574 bp, Homo Sapiens
  NM_024607
ttcctcccaccgccgacatctccgggaacccagcccaggccctgcctcccggacacaccgacgctcacgtagtcgcgcttgccacaaccctgcgggctctccgatgcggcgagcgagctggggagggggcttctccgcggcccaaaagcctgttcatctagccccatgatggctgtggacatcgagtacagatacaactgcatggctccttccttgcgccaagagaggtttgcctttaagatctcaccaaagcccagcaaaccactgaggccttgtattcagctgagcagcaagaatgaagccagtggaatggtggccccggctgtccaggagaagaaggtgaaaaagcgggtgtccttcgcagacaaccaggggctggccctgacaatggtcaaagtgttctcggaattcgatgacccgctagatatgccattcaacatcaccgagctcctagacaacattgtgagcttgacgacagcagagagcgagagctttgttctggatttttcccagccctctgcagattacttagactttagaaatcgacttcaggccgaccacgtctgccttgagaactgtgtgctcaaggacaaggccattgcaggcactgtgaaggttcagaacctcgcatttgagaagaccgtgaaaataaggatgacgttcgacacctggaagagctacacagactttccttgtcagtacgtgaaggacacttatgccggttcagacagggacacgttctccttcgacatcagcttgcccgagaagattcagtcttatgaaagaatggagtttgctgtgtactacgagtgcaatggacagacgtactgggacagcaacagaggcaagaactataggatcatccgggctgagttaaaatctacccagggaatgaccaagccccacagtggaccggatttgggaatatcctttgaccagttcggaagccctcggtgttcctatggtctgtttccagagtggccaagttacttaggatatgaaaagctagggccctactactagtgactgcaggtgacagggcgtggcggagctgccacagacaagcctagctctgctcactgtgcagtggagatggaaggccagggaggagcaacgtggaacttccatgaggccccgtttgggaaaataaaaggatcctcttcacttctttcttaaacagcaaatccagccaggttcagattacacaaccagtgtctcactcaaaggagcagtggtggctggcgcgctttcgcactgtggcagccacgagagtctgtgcacgtctgtgctggaaagggtatggatgggaatcaagcctatgccagtgctgatgaagctggaggagtctctcctctgctctccactcagatgtgggacatcagtcgccaaaagccactcagccccagccacctcgcgtgagaccctcactgttcattgtgttcatctttgggtgctctctgccagccaggcctttcctgcaagctgctgtgcttccccgtccacgtgtatctctgctgtgacacactgagctgacgcacatttccagtgcagctgcagaagagaaatgggattggctcttgttttctgcaagttcatgttttgcattttatgttcttccacaattgatctgatgttcaggaaaagataataaaggcaaattagttagtggttgagacaggcatttcctcctcccgcttcttgaccccacagatgtattccagcagagagcaacacaccagtcatcaaaacccactggctcctgtgcggtgtcacagattgcagggttctgacaaggcaggacagtcaagagtggggacactttcagcttctacttttgccttctagggggagctttctaagtccccacatttaccccgagtcaccggaaaaatctgatttttcccccgaaagctcaatgactttaacgtgcttggctggtttgtctcattctttatgaaagaattttggggccgggcgcggtggcttatgcctgtaatcccagcactttgggaggccgaggcaggtggatcacgaggtcaggagatcgagaccatcctggctaacacggtgaaaccctgtctctactaaaaatacaaaaaaattagccaggcgtggtggcgggcgcctgtagtcccagctacttgggaggctgaggcaggagaatggcgggaacctgggaggcggagcttacagtgaaccgagatcacaccactgcattcccgcctgggcagcagagcgagactccgtctcaaacagaaaaaaaaagagaattttgaatctcctttcccaaagagtcatcttttctgctgtgtttaggacatttgatttgcatatccaatatctcctcgaaaccttcagaaaatggttttatcgtgactgtgattcacactatctagaacactttaccagcacccagggacatggacttgggtgttcttatttatggtgtgtatgtaaagagataggggagaaaaacctcacccaagttcttatacgttattttaaacgtttgccaactctgaaatttcagagattcattgttcttaaccatattggactaaagtctgttggttagtgctgttgtaaaagagacctctggggccgagtgtggtggcttatgcctgtaatccctgcactttgggaagccaaggcgggcagctcacctgaggtcaggcgttcaagaccagcctggccaacatggtgaaacctcgtctgtactaaaaatacaaaatttagctgagtgtggtggcaggcgcctgtaatccagctactcgggaggctgaggcaggagaatcacttgaacccaggaggtggaggttgcagtgagccgagatcacgtcactgcatttcagcctgagcgacagagtgaaactgtctcaaaaaagagagacttccgggacagtcattatcagataggccccaaacctgtgatttttcttgggcaagattggtgtttacttaggggtgctttaaaaatatatttttacaagtatacttgtaggaagttggttttttattttctatttttgtttgtttttggagtttggttaaacgactcttttattttctgttttgccttatcttactaaagtgaagttttcctaaggcaagcaagaagaggagtggaagcacagttgcctggatttggaggcagagttgtcaggcttttcaagctaagagtcttgtgcttggattttccagattaatttgaaaagacctcccatttgtggctttgtacataaccaacaggcagatactgagtgccttggctcctagagttttgtggttgggttaggttgtttttgttgttgttttgttttggttttgttttcatttctgaagtttaagatgccttgactttttaaatgctcttaaggctattcgatgtaattcttactcctaaaactggctgttcttagcctgaaatctaatgctttgttttttgtacctctcccaggtgggtaacactctaggatgacatgatgttataattttaggggaaatcacatttttaccttatgctgttactgggcagaaccacgttttatgtaaacataccagacatcgggtaacagacagtactttaaatgttataaatttggtgatcagaactattaatagcataaatcgaactcaaatggaagcaaaactgatttcatgcaggtcctgaattttactttgccttaagaagtgccctccccacaatgcaggagaggcacagagtgcactgtcattgacatgttacccgactaaggatcactctgttcataagaaaaaggcctgaagtgactctgtttaataaagtcagtttaattttatctaataatgatcttaagacattcccatgtcaaaatttgaaatatggtaattcagtgataactatctcttctaaagcagccgtaaaccctccccactacccgtctttctcccagctcaccctggctttttttgctgggggtgctggatgcaagcccccagccagcacacctgggatgctcaccctgccgcacagttcagaaggcaagtcctcacctgctcgcaaagacccttcttctccaataaaagactctacttgcctgagtttcctcatcagggctgtcattcagtgatgtatgggggtctgaagaatactgccttctatctgtcttctgtttaccacttgctcctctgctaccctcctgccgcaaacagtcttcttccttttggcccagttctgtcccgtgaaattctcagaaggcctcgggagctgcgctgatgtattctctccttgtttgatagctcatcatcagtagataagcctacacacttcagagggtgacaggtttcttacttggagacttcactgcaccttgacttgtagatttgccttcagacagctcttggttatggttacaagtggcccccgagtcccagaatctttcccaggttgccccagaaagaccagccacctgtcacaggtgcagttgtccggcaatagggaagcaacttcatttttgttttatatttattccctcaagtgccctgaggagcatttgcaaactgggtacaataaataagctggattatacaaagatatttaataaataagctttcagtatctattggaagacatgaagcatttgagtgggtttctttatttaaaaaattattctactggagctggtgagaaataatgaagctgtacagttctccagaaattaaaacaatgtcagagtcaatgggagaatttaatttacctttaagatttcattttaatggtggcaaaattatacattcttagaagatgtaaatttggaactgttaggagattgctctgtggttttgatcttttcaaaccattttctttttgaaaaaaggcattagttgtagtcatggacattaaatgggccatatatgcttatcaatcaaaaaagtgttccttttttggaactgcccattttctggatcttccctctcaatggataggggatgaaaaccttggttgccttttatttgtttcctcttctaaaatttctcacctgaatgtagtcctgggagagtcccgatcacgtctctcctgacatgttcactgaaatcggagacaagaagttacatggatgatgggatcttatagggtcacacaaagacaatttggcagcttatcttaatttcctgcagtgagacaacacatgtggaactgggaaggacagctgttgttacgagcagtttttcctggtcatggttgtaaagctctgtaacccacattgtaaagccgtgaatgtttttagtcttgttgacgagtttttagagactgctggacctctgagggctttgagagtgcagctgtgatgatgtttcactattacttcagtgtgaatgtagaaccaaggactcatcttcattttatacctaaaagtgccttgtcaagaaatttttgcatgttttaaaagataaatatttttgtacacagagttcaaggggaaatgcactttaaaaatcccaagaatggatgttctttgtgtggtatgagaggttggtttgtatctcaaaagcaaaaatgtaataaaggaagacaaaacaaaacaaaaaaaaaaa

SEQ ID NO: 5262 - DNA, 1844 bp, Homo Sapiens
  NM_024619
ctctcgagtctccgccagatccggggcgggtccgcggccgcggcgggaacatggaggagctgctgaggcgcgagctgggctgcagctctgtcagggccacgggccactcggggggcgggtgcatcagccagggccggagctacgacacggatcaaggacgagtgttcgtgaaagtgaaccccaaggcggaggccagaagaatgtttgaaggtgagatggcaagtttaactgccatcctgaaaacaaacacggtgaaagtgcccaagcccatcaaggttctggatgccccaggcggcgggagcgtgctggtgatggagcacatggacatgaggcatctgagcagtcatgctgcaaagcttggagcccagctggccgatttacaccttgataacaagaagcttggagagatgcgcctgaaggaggcgggcacagtggggagaggaggtgggcaggaggaacggccctttgtggcccggtttggatttgacgtggtgacgtgctgtggatacctcccccaggtgaatgactggcaggaggactgggtcgtgttctatgcccggcagcgcattcagccccagatggacatggtggagaaggagtctggggacagggaggccctccagctttggtctgctctgcagttaaagatccctgacctgttccgtgacctggagatcatcccagccttactccacggggacctctggggtggaaacgtagcagaggattcctctgggccggtgatttttgacccagcttctttctacggccactcggaatatgagctggcaatagctggcatgtttgggggctttagcagctccttttactccgcctaccacggcaaaatccccaaggccccaggattcgagaagcgccttcagttgtatcagctctttcactacttgaaccactggaatcattttggatcggggtacagaggatcctccctgaacatcatgaggaatctggtcaagtgagcgggccttactctggaaggaggcctcagaggtttctccacagtcctcttctgggcaaattcttgtttcttcacatgccggactagcttaagaccaatgcagtagcttatttccaagccttgcaaagtatataatatctaagaggaaaggttttgtcatcccagcgttgtccactttgtggggctttgtaggtagacggagccacactacaggcagggtatgagcagagggatgtatggagtgtgggtgactctgagcctcactgctgctgcaaggtggggaaactgtaagtgaacccctgtgggtgcgggggagggtatccggtgcgcagggaggtggccagcgcccccgggcactgctgctcataggtacctttccactgcctcctccctgctctcctgtgcaggaatgtctctgagctgttcacgttgatgcttcttggttggcaagacttgggtgtagacatgaaaccatcttactaaaagcgtcttaaaatgaccaattccagaatcaagcgtattccgttttcttcctgcatgatccctgggccctcccgcaggctgagcaagtctgtaaactgattctgggagaaaccaagctgctggccatagggtgtccttgggtacatccaggagtcttcattgcttctgttattaccccgtctcctctgccattttctacagcttgctgagttgtcattcctttgcaacattaaaatacatgctgaactcatatttttccttccttcactgttgtagtaaagagacatatttcatgaatggcattgatgctaataaatcctttgcacaaaaatttgaataaacttccagtggtttcgataatgtaaaaaaaaaaaaaaaaaaa

SEQ ID NO: 5263 - DNA, 3426 bp, Homo Sapiens
  NM_024620
ccggaacatggctgccgccggccgccaaccggtcttgctgtctcacccaggctggagtgcagtggcacgatcacagctcactgcagccttgagctcctgggctaccaagtagctgggacttcagagatggctggagccgtgtggatgggcataaatggctaatgtccagcaaccatcgatgtcaagtatccacacacctggcctgaatggatccctctgcctttcagagtttgggatatgagattgaaaatgacgactcggaattttcctgagagagaagtaccctgtgatgtagaagtggaaagattcacaagggaagttccctgcttgtccagtttaggtgatggttgggactgtgagaaccaggagggacacttgaggcaatcagctttaactctggagaaaccagggactcaggaagcaatttgtgaatatcctggttttggggagcatttgattgcaagctcagaccttccaccgtctcagagagttctggcaacaaatggtttccatgcacctgactcaaatgttagtggtctggattgtgaccccgccttacccagctatcctaaaagttatgcagataagagaactggtgacagtgatgcctgtggaaaaggcttcaaccattccatggaagttattcatggaagaaatccagtgagagagaagccctacaaataccctgaaagtgttaagtcttttaatcattttacctctcttggtcatcagaaaataatgaaaagaggcaagaaatcgtatgaaggtaagaattttgagaacatctttactctgagctcatcgcttaatgaaaaccagagaaatctccctggagagaaacaatatagatgtactgaatgtggcaaatgcttcaaacggaactcttctcttgttttgcatcaccgaactcacaccggagagaagccttatacttgtaatgagtgtggaaagtccttctccaagaactacaacctgattgtgcatcaaagaatccacacaggagagaagccctatgaatgcagtaaatgtgggaaagctttcagtgatggctcagctctgacacagcaccagagaattcacacaggcgagaaaccttatgaatgcctagagtgtggaaaaaccttcaaccgaaattcatccttaattttgcaccaaagaactcatacaggggaaaaaccatatagatgtaacgaatgtgggaaacccttcactgacatctcccaccttacagtgcatctcagaatccacaccggtgagaagccctatgagtgtagcaaatgtggaaaggctttccgggacggctcgtacctcacccagcatgagaggactcacactggagaaaagccctttgagtgtgcagagtgcgggaaatccttcaacagaaactctcacctcattgtgcatcaaaagatccattctggggagaaaccctatgaatgtaaagaatgtggcaagactttcatcgagagtgcgtacctcatcaggcatcagaggattcatactggcgagaagccctatggctgcaaccagtgtcagaaacttttcaggaatatcgctggcctcattaggcaccagaggactcatactggtgagaagccctatgagtgtaatcagtgtggcaaagccttcagggacagctcctgtctgaccaagcaccagagaattcacactaaggagaccccatatcagtgtccagaatgtgggaagtccttcaagcagaactctcacctggcagtacatcagagactccatagcagggagggtcccagccggtgtcctcagtgtggaaaaatgttccaaaagagctcatcccttgttcgacatcaaagagcacacctgggagagcaacccatggaaacataatggttgggggccacatgagtcttccagttcactctcactcctgtgtttaggaggcgtgtcttagatctgactcctctctggtcagtagaaaagaatcctttaagctatccagtgaattgatgaatgtgagacattgctgagccacactgttaagtctgctcattggggaactccagagacaacttaggatgagggcagaaaagtctttggggatgattcagtctgtaccagacatgacaacacacacactggaatgaaatgtgcaaacatgggggtgacaccacagagagaacctgtgaatgcattcagaacatgattggaatgaagagccctgtagtagggagtttccaccttgtacgtaagcaaacactgaatcaacttttttttttttttcggacagagtctcactgtgcagtggcatgatctccactcacagcaacctctgcctcccaggttcaagcagttctcctgcctcagcctccaaagtagctaggattacaggtgcctgccaccatgcctggctaattttttctatttttagtagagacagggtttcactgtgttggccaggctggtcttgaactcctgacctcatgatccgcccacctcagcctcccaaagtgttgggattacaggcatgagacactgcctggcctgaatcaaccttttttaagtgtaatcagaaagagaggctttggcaggggctcttactgtgttttctgtaacaacaaaggtgtacaatgagagagtccacacagtgctgtactgcacacaccacagaatgtgtgagattttcctgtttgaatgtatgtctgcattatactcctgcaataatgctgaggactcgttgcaggagggcaaactaggtgaataaattacctgtgaatgaacaatgaagtcgttcctcttaagactgaaacaagcaggccagatgtggtggctcacgcctgtaatcctagcactttgggaggccgaggcggccagatcacaaggttaggagttcaagaccagcctggccagcatggtgaaaccccatctctaccaaaaatacaggaaattatctgggcatagtagtgtgtgcctgtaatcccagctacttgggaagctgaggcaggagaattgcttgaacctgggaggtggaggttgcagtgagctaagatcgcaccactgcactccagcctgggtgacagagcgagactccatttcaaaaaaaaagactgaaacaagcttgtgctaagatggaaagggctgcttctaacagatgtggtttgttgctttagttgttgaagcaaaaatactgagttgttatgtttatgttatcaccccaccactacctccatggttgttcatttaggatgcttctaattcagccactgtgaaccattataaaggttttattgccatgttgaaaatgtttataatatggcaaaaaggggcatcaaatagaagatttactattattccagccatgtaaaaatatgtgcacatatggatgtatgttgaaagtggatgatggagaaataaaatgtggttttctttggggactggaaaaaaaaaaaaaaa

SEQ ID NO: 5264 - DNA, 3020 bp, Homo Sapiens
  NM_024622
gtagtgcgtgacttccgcagtgcacgctgcgcctgccgggcattttttcctggtttgggggcaaggtctcatgggaaaggtcatgtctctcgaagaaaggttataaaccctgagatatgagggttgggcgagacatccgagcctgtttcgttccgtgttgggaccaggaataaccctgacttctgagctttcataaccccaggatcctccagaaaatttgcggcgcgctgagggaaaaccttgctgaagctgtacattggaatgcgtttacagtcattgtaatggaagcaaaatacatgaaggaaaaactgttatttgtatccctgcttattgcacctgacgactagttgcagatggttttgtttacctaagaaaacttgtgatataaatgaaaaaaacacctgttttcctagagtcattggttacaaatatgcttcgtctaagagctatttgtccattctcctggagagtgtttcaatttcgacccatcagttgtgaaccactaattattcagatgaataagtgtacagatgaggagcaaatgtttggttttattgaaagaaacaaagccatactttcagaaaagcaagtgggatgtgcatttgatatgctttggaagcttcaaaagcagaagaccagcctgttaaaaaatgctgagtatgtcagagaccatcctcaatttcttactcttcataatttagctacaaataaattcaaattaatgaatgacgataccctggtgaatgtgttatacgtcacacaacagtttgctggtgaggcccatgacccgctagttgaagcactagttacagaagcatggagaaggctagaaaggtttgatattaaactgctctcagaattttcctcttgcctagcagatcagcatttgtattttagtccattaatgggaaaaatagctgatattgttcataggaacttggaaaccacacaggacttaagttccttgtctgtcttgatggtcaacatatcttctttaatatcacgacattttcaacaacaactggtgaacaaaacagaacttctttttgacaccatagattcttctgaggtcaacgttgcaaaaagcatagcaaagtttcttcgaaatgttagatatcgttatcaaccactattagaaagatgtaataacgtatttttaagtaatgtggaccaccttgatttggattccatcagtaaaatacttagtgtatacaaatttctacaatttaatagttttgaatttattataatggctaaaaagaagctaactgaaatgattcctctgtgtaatcatcctgctagctttgtaaaattgtttgtagcattgggacccattgcaggacctgaagaaaagaaacaacttaaatcaactatgttattgatgtcagaggacctaactggcgagcaagccctggcagtgttgggagcaatgggagatatggaaagcagaaactcatgtctgattaaaagagttacttcagttctgcataaacatttggatggctataaaccattagagttgttgaagataactcaagaattaacttttctgcatttccaaaggaaggagttttttgcgaaacttagagaattactgcttagttatttgaaaaatagtttcataccaactgaggtgtctgttctggtccgtgctatttccctgctcccttctcctcacttggacgaagtggggatatcccgaattgaagccgttttaccacagtgtgacctaaataacctgagtagttttgccacatctgttttaagatggattcagcatgatcacatgtatttggataatatgactgcgaaacaactgaaactacttcaaaaattagatcactatggtcgtcagagactacaacacagcaacagtttggatctgttacggaaggaacttaaatctctcaaaggaaacacgtttcctgagtcacttcttgaagaaatgattgctactttacagcatttcatggatgatattaattacataaatgttggggagattgcatcttttatttctagtactgattacctcagtactttgctactagataggatagcctcagtggctgttcagcagattgaaaagatccatccttttacaatccctgctattattcgtccattcagcgtattgaactatgatccacctcaaagggatgaatttttgggaacttgcgtgcaacatcttaattcttacttaggtatattggatccttttatattagtgtttcttggtttctctttggccacacttgaatattttccagaagatctgctaaaggcaatttttaacatcaaattcttagctagattggattctcaacttgaaattttatctccatctcgaagtgcaagagtccagtttcatcttatggagttaaatagatcagtctgcttggaatgccctgagtttcagattccatggtttcatgaccgcttctgtcaacaatataataaaggtattggtggcatggatggaacacaacagcagatttttaaaatgttagcagaggtactaggaggaatcaattgtgtaaaagcctcggttcttacgccttattaccacaaagtagattttgagtgtatcttggataaaagaaaaaaacctcttccgtatggaagccataatatagcattgggacaactaccagaaatgccctgggaatcaaatatcgaaatagttggatcaaggctgccaccaggggctgaaaggattgctttggaatttttggattcaaaagcactttgtagaaatatccctcacatgaaaggaaaatctgctatgaaaaaacgacatttggaaattctggggtatcgtgtaattcagatttcccagtttgaatggaactctatggcactgtcaacaaaggatgctcggatggactacctgagagaatgtatatttggagaagtcaagtcatgtttgtagtttttatttaaaatgaatgttatcgtgtgttacatttggacctattttaataaagtggcctgtctcaattaaaaaaaaaaaaaaaaaa

SEQ ID NO: 5265 - DNA, 6693 bp, Homo Sapiens
  NM_024627
gagcaggcgttcccgactccggcaagagggtcagtgtggaggcgggagcccgggcggccggcttgaactccgtgcacgcgggcctggagctgcgcccctgcgtcttttcccgacttctgatccgcagaggggcactcggagccccagcctgggtcgcagtgccttcggtctgcgggcctcagtttctcggtggcgcctggactctcgccctcagagggaggcccgtcccacggtctgtggctacggatcccaggaccctcttcgcgggcgattcgcgtagcctcagattgcctcggatgatggcctgcgactgacagtctctcagctcttctcagctctcctgaggctgcagctgtcagctccctgatcctcagcacttgcctggaccagtgcgggtctgccacgccctgttcagccatccctgtcctgttgtgtcgtgcaagccacatctgtccacacccccaccacccaccagtgctggctctcctctcttctcccctgtgctcccagcatgcctcgtggccggtgccgtcagcagggccctcgcattcccatctgggcagccgccaattatgccaacgcacatccatggcagcagatggacaaggcgtctcctggggtggcatacaccccccttgtggatccctggattgagcggccctgctgtggggacaccgtgtgtgtgcgaacgaccatggagcagaagagcacagctagtggcacttgtggcggtaaacctgcagaaaggggtcccctagctgggcacatgcccagctcccgaccccacagggtggacttctgctgggtaccaggctcagacccaggcacctttgatggctccccgtggctactggaccgcttcttggcccagctgggcgattacatgtccttccactttgagcactatcaggacaacatcagccgtgtctgcgagatcctcaggcgcctaacaggccgagcccaggcctgggcagccccctaccttgatggggacctgcccctgcctgacgattacgagctcttctgccaggatctcaaggaagttgttcaagacccgaacagttttgctgagtaccatgctgtggttacctgtcccctgcccctggcctccagccagctgccagtggcccctcagctgcctgtggtgaggcaatacttagctaggttcttagagggcctggcactcgacatgggtactgcccccaggtctttaccagccgccatggccacccctgctgtgtctgggtccaactctgtatctagaagtgctctgttcgagcagcagctgaccaaggagagcacccctgggcccaaggagcccccagtcctgcccagttctacatgtagctccaagcctggtcctgtggaaccagcctcttcccagccagaggaggcagcccccacacctgtccctagactgtcggagtcagctaatcctcctgcccagagaccagacccagctcatccaggaggtccaaaaccccagaaaacagaggaggaggttttggagacagagggagaccaggaggtgtccttaggtaccccacaggaggtggtggaggccccggagaccccaggagagccaccactttctcctgggttctgaacacagcccaggtgggaacaatgctgcccctcatgatgaagtggcctgtgtggcttgagcgccccatagtccccagtcagagcagagtggtgtccccagatgacttcagaccccatagctgggcaagatgcgcttgttttggactctgcgctgagcagaaccagctcccccaactccagcagagcttgacctccgccctgtgccctttccctgctgctggctctctgctgcatccctgcccgtcttctgggagtgccgtctcacccaggcctgctcccacgagggggtcgttttgtagatcaactctcagcagatagttgcatcatctttgtcacctccacccccataaaacaccccccttggtgtcttccacactggctgggactgaactgggtctgccacgtctgccctgttgggacctcgttcctgtatggggtttctgtgtctgtccccctagccccaccctctctgctccctgtgacttctgtcccagctggaatgtgaggaaggctgcctggaggaagtggccactttgattctgggggatgagtgggatagcatcttggcaaagaatgatgtttcctgtgggattaccagcagttctgggcagctggaaggtttggatgcaggaaggtgggatgcaagccccttgccaggctcagctgcaggcattcgccctttgtgtgttaacactgtagctctaatcgtgcctggtgttctgaagcaggctcctcttccctgctgctgtgctgccatcccctgctcactccgcactcgcatgcattgcggattcagcacttaagccctagtgtgtaaatgacttggatctccctcctggcagactgtgaccctcagcacaggggctctgtcttagtcagctctgtggcctggtacacaattggtgctcattaaacacgtgttggattactggctgaggtggtgcagtggctgcctaccagcaagtctttgtttcccattctgtcaggagcagaggcctggccatgagcattccaggtcagcattgcagctgtggtttctggcaggggctttgagggtccaagggtctgatcaaagaagctgggtggggctgagtagggggtgggtggctctgcaggtagagaactgacttccgagagctgtaggtgaagtgaggaccaggcagcagtccagagctgtgaggccccaggcccagaggaatggaatgaagaaagacctgttccacacaaggaggggttttctagtggaagctgagcttggaagctcctggagccaagtttaccacaggataggcaggtacagccgcccagtgtgtgcagtgtgtgcccactctggtgcttggacaagaagttcaagtccctttcaggtttacaattgtgaaaacaacaaaacaacaccttcctggaaagtaggaagaaaaagcagaaatgtgaattggaaatacagccaactattttaggaaaaactaattagcaagcatctgattaaacttattcagaaactggccgggagcagtgtctcacacctgtaatcccagcactctgggaggccaaggtgggtggatcacctgaggtcaggagttcaagaccagcctgaccagcatggagaaatccatctctcctaaaaatacaaaattagccaagtgtggtggtgcatgcctgtaatctcagctacttgggaggctgaggcagaagaattgcttgaacccaggaggcagagggtgtggtgagccgagatcacgccattgcactccagcctggacaacaagagtgaaactccatcccaaaaaaaaaaaaacaacaaaaaacaaaaaccttatttagaaaaatataaattgttgggattattttatggtaactatcactagaaaaggctctgggttcagatggttttatgtgtgagttatttcagggcacagataccttgtaggtaaaacaactggaaaccttggaaataggtgggaagctatttttagaaagcaggtatagccctggtagcaaagcaagtgagctggcagaagaaacccattttcagtcttgattctggtcagatgtgagaagtccctggatgtcctggcccagccccatgcttctgtgccaggtcacagctgccctccgtccgatgactcaggccccatccccccttttgtgggttgggtcagactgctccctgatgcctacctccagtgcactgtggcctggctcacctgtgggtctggcagtagaacccagagttgctctctaggatggacagcctagtcacccagctgacctttaccctgtcccacaggcttctggacaggccaccttccccatctccctttagtggacctgaagtggatactccagcctgggattgctgccttctcttttgaaccctgtcctattggggctttggggcttttgtgcccttgggacccaggcagctcctgggggtgtgtgagttatggtctgccgtgtgtctgagggccagtcatgcagcatccacctaggcaggcttgagagtccttgggagagtccaggtgacctggtttttaattaaaacgcgtcctgtttattgtggttgggctctgcccagaaaggaaggtagggccttgaagtggtgatgtccaggtttcctgcacaggtagggtggaggcaacgatggactctggcatggccttccagacaggcagtgcacacagctcctttcagagtggctttgttgccagctgctgcagcacctgctttcagacagatgatgaccaagctgctttcctgctgggggaaggaggcattccccctgggttgtttttctcttctggcccccacacactggcagacccgaaggcagggtgctcaggagctgcagagcctggcagggtttgctggacatgctcagggacgggccatggtgctggctctgctttctaatcatggtgtcagtccttcacttcccttggaaatacccagagattttatttcctgaagataggacatgatgggtgctgtgagatggtatttaaagtacctgtctgcaaggaaaactttaaaataggaagtactaaggataaggtcctatgggatattggaatattttataaagccacaatagttaaagcacttagatgtggacagatgagcagagaatagaggactttgaaacgggccaaataaatatggaaatttagtacaggctagaggtgtttccaattaacgagtaaaatggattattcagtaaaagcagttggccctctggaaaatagtaaagccatgtatgtgcctcactctttatgccagtacatattccagattaaagatttcaatgttacaattatgaaagtactagaggaaaatatgggtgaatttttttttttttttttttttgcctatgattccaggattttaaaagttttagatgcccagagttgtggaggtatggagaagtggaccttctcatactgttggtgggaatacacaataatataatttgaccacgtaacaattctaggcacatgcatgctgtgactacttgctaggtgcatgaaggctcttgccaggggtggtcatggttcggtaccactacatgggggtttagagcagggactggaggttggccttgcctcctcccctccccgcatgagctgagggtccttacctgacctttttgagctgtgaccagagtttttcctcatggggtggttagaagggttgaatgagaatgatgcccatgcagtgccttggctggggtctgggccctctaacacccacctcatgggtgtcactgttttttgaacagcagaactggaaaagcccaaagatccagcaataaaggagcaaggcaaataaagctgttaccctgcaggatcagtcagcatgagccagattgtgctgcagtaacaaagatctccaacagcgcagcggctacagttggcactgcttatttcttgcttgcacctgtgggccaccgtggctggggcctgtcagacctgtgctgacgacagcctacctggacatatttctccatgctcactgaggcaggggaaaggccacagcaggccacaagtaatgtgtgtcaccccacttccatttctgtggccaaaggaagccacagagccacacctgagttccataggacggcagcagctgatcatcctatgggctggggtgctcagtatggagaagtacaagcagccacccagcgtggggctggttggtgctgctgaggatgggaggatgggaggggcctgcatccatcccagggcaacatacctgtttgtctgctggggctgcctgacaaaggaccgcaggctaggggacttaaacaacagacatttcctcatgattctggagctagaagcctgagatcaaggtgtgggcagggttggtttctcctgaggcctcgctccttggcctgcagatagccatcttcttgccgtgtccctgtctgtgtctgtgtcctaatctctcataagctcactagtctattggatcagggcccaccctcatgacctcatttaaccctgaattacctctttaaagaccctgtcttcaaatgtaagtactaggggttaggacttgaacataaaaatattgaagggacatagttctgcccacagcggtgcccgcgataggcttctctggttttgtctttgctgttcctggcagcgctatattgggcaggcttctgtggtctccacatgcctgtgtgcagagtcccccaggccctgggttctggggcccatactgaggagtggggatggccaagccttggctgttgagtaggcagtgcccagttgtgctgtatgggatgctgtttctcacttaagaaatctttccctacctggggggtacaaaggcattatcctgtattcccaggttgtaactttctgcctttgacattcaaccttgagtccacctgtaagtgtaactgcggcagaagggaggggtctgctgtcatccttgatagcctgtgatgagcagagcccctctgccgaccgcgatgcacatgtaatatgagcaagaaataaatttttgatgtgcgaagccactgaaaaaaaaaaaaaaaaaaaaaaaaaaaaaaaaaaaaaaaaaaaaaaaaaaaaaaaaaaa

SEQ ID NO: 5266 - DNA, 2821 bp, Homo Sapiens
  NM_024630
gaaggagtggacccaacctggccgcgccgcagaagtggctcccgaggaagccggcgccggggccgccgcctcgtgtcccctcggggcgcagtgctcgggggtcggcgggccagagccgaggcgcggccggggagccgggggctgcggggccgagcgggcagccgcgcgagggggcgggcgctcggcgacccgggggccggccgggctgagccccgcgccccgggacgcgggctggaagcgacggaggagtgctgccgcgggctgcggaccagcgccgtcccctcacggagcggggattctgctatgacagttgggctccccggagggttaacctgggtgtcctcggcaaagttgtcgccgagccgggagcccgtgtaggggccgcggcgccgcggctcggggggcggccgggcggccggcggcggtcgtggctcggcggggcccgcgcggccggggggctcctgggggtgtgcgcccccagccggctgccctcgtggatgcctcccggcggcggcgggcccatgaaagactgcgagtacagccagatcagcacccacagctcctcccccatggagtcgccccacaagaagaagaaaatcgcggcccggaggaaatgggaggtgttcccgggaagaaacaagttcttctgtaacgggaggatcatgatggcccggcagacgggcgtcttctacctgacgctcgtcctcatcctggtcactagcggactcttcttcgccttcgactgtccgtacctggcggtgaaaatcacccctgccatccctgcagtcgctggcatcctgttcttctttgtgatggggaccctgctccgcaccagcttcagcgaccccggagtcctcccacgagccacgcctgatgaagccgccgatctggaaaggcaaatagatatcgcaaacggcaccagttcaggggggtaccgcccgcctcccagaaccaaagaagtcatcatcaatggccagaccgtgaaacttaaatactgtttcacctgcaagattttccggccccctcgcgcctcccattgcagcctttgtgataactgcgtagaacggtttgatcaccactgtccctgggtaggcaactgtgtggggaaaagaaactacagatttttttatatgtttattttatctctgtcttttctgacagtctttatatttgcattcgttatcacccacgtcattcttcgttcacagcaaacaggattcctaaatgcccttaaggacagtcctgcaagcgtcctggaggctgtggtgtgcttcttctctgtctggtccatcgttggcctctcaggattccacacctacttgatcagctccaaccagacaacaaatgaggacattaaaggatcctggtcaaataaaagaggtaaagaaaattacaatccctacagctacggaaatatctttaccaactgctgtgttgccctgtgtgggcccatctcaccaagcctgatcgacagaagagggtacatccagcccgacacgccgcagccagcagcaccctccaatggcatcaccatgtacggggccacgcagtcacagagtgacatgtgcgaccaagaccagtgcattcagagcaccaaattcgttttgcaggctgcagccacgcccctgctgcagagcgagcccagcctcaccagcgacgagctgcacctgcccgggaagcctggcctgggcacgccctgcgccagcctcacactgggcccgcccacaccgcccgcctccatgcccaacctcgccgaggccacgctcgcggacgtgatgccccggaaagatgagcacatgggccaccagttcctgacgcccgatgaggcgccctcgccccccaggctactggcggcgggcagccccctggcgcacagccgcaccatgcacgtgctgggcctggccagccaggactccctgcatgaggactctgtgcgcggcctggtgaagctcagctccgtgtgacccacatggccccaggccgggggacaccagaggctcctccatgggcagcaggagtgagcggaggggtgtgtcccacagcgactttcccagccaatgccacggtggagatgacagccccaggtctggggtacagagaccacttaggatggcacagggtggctggccccggatgctgagagcttggtttcatttgaattttcttccccaacctgagtgctttgacaacaatggaaatagagaagtggctgctttcttttggtgaccctccaggggtggaatcggagtgtgtctgcccgcccttgtgacagacacacggaaggcttctgacgcttgtggccagactgcaattgcacttatgtgttatgctactaatatttgaaacagacctgccattccatttgttaattaaaaaaaaaaaaaatcctaaagggaaaaaaccgaccaggtgtggatctgcatgccacgctgccgtctgtgttacagtggtgttgctatttccaaggaagtgctgctttctttttctttttttaattttgtgaattttcaagtgctgttttgttggaagacagtgcaacgaactgagactaatggacagtgtcatcactcagcttactgggctgaggcgtctgtggagaggtggcaccggggctgcagagggcggctggggttccgtcgtgtcgggtgtcacttcaccttctgtttggccgctcgatgaggtctcgtgttgagatattgtgtgccacaacccccacagtcttcacctccgtgtgtgatgaaacttcccgtggacagccaataaaatgacgtcctctgttattttggaaaaaaaaaaaaaaaaaaaaaaaaaaaaaaaaaaa

SEQ ID NO: 5267 - DNA, 2252 bp, Homo Sapiens
  NM_024631
gtgcagcggcggccgcttggaagatggctgcgccctgtggctcggagctgcccgccaactcgccgctaaaaattccgaagatggaggtgctttccccggcttctcctggtggcctgagcgacggaaatccatcgctgtccgacccttccacgcctcggggtgcctccccgctcgggccgggcagtgcggcgggctcgggggcagcggcgtccgggggtctcgggctggggctggggggccgcagcgccgcctcgtcctcggtctccttctcccctggtggcggcggtggcggggctgcggcagccgccgccgccgcctgccggggcatgtcgtggacgccagccgagacgaacgcgctcatcgcagtgtggggcaacgagcggctggtggaggcgcggtaccagcagctggagggagccggcacggtgttcggcagcaaggcccccgggccagccatgtacgagcgcgtgtcccgggccctggccgagctgggctacgagcggaccccgtcccagtgccgggagcgcatcaaggagctggagtcagatggcagcactatggaggactattcacaggaggactggggaaaccacagtcaggatctccatggctatccaacagatcaggaattggatgaaatacctgtcacaaagagaacattaaaaataaaacaagagtcttctgaagaagcacagaagagagacatcatgcagaatattgtacagattttggaatcggtacagttgaaatgggaactttttcagagctggacagacttttcaaggctccatctttctaataaactggccatttttggaattggttataacacccgttggaaagaggatatccgttaccattatgctgagatcagctcccaggtgccccttggcaagcgacttcgggagtacttcaactctgagaagcctgaaggacggatcattatgacccgagtgcagaaaatgaactggaaaaatgtttactacaaatttttagagatcactattagcgaagctaggtgcttggagctgcacatggaaattgactggatacccattgcccactccaaaccaactggtgggaatgttgttcaatatttattgcctgggggtattcctaaaagcccaggcctttatgccattggctatgaagaatgtattgagaggcccctctcaccacacatggagcaaagttccctggacccaggaaaagagggccgggttgacctggaaaccctttcagcacaagcctcattacaggtggaaatagaacccacccgaattatctattgctacctcgggattgctgaggtcaggactctacagcagtgcttatttttacatttccaagcgaataccaaaaccttcagcaaagattgggttggtattaacgggtttttgtctcagaactgtattgtggatcccggagtttcccccaaatccatctacatcaaatttgtagaagtagagagggattttctttccgcaggctctttagttgagtgcctggaaaaagccattggataccccttaaaatttaacaactgaatgtcatccttcataaggatttgggctcttagctccttcttctctactcacttcccattacccggaccacccctcatccagatgccgccgtcagactcttcatggaaaccctttcttcaattgggccagtacgacttctaaggaatcatagtagacttgggccagaaaaaacagacctcacctgaaaatgctcattttgagcaagcaagatatatagcgaacttgcatggtgggtcagctatttcttttttaaaaacagaaaaacaatttttaaatggattttagagccctaatataaacaaatgtaggtacattccatattggacaaaacttatactttgagtttcatatgaaattgaaaaattgtatttttttcacaatgtttcatttttacacatctctatgtctctatataagtaatatttacaaccctgaataaataagcaatagataatggcaagttaaatcttgattcacagttaaaaagactttttcaatatcacccttagctactattgtatataatttagattttcatttttttcaccagccaagtgttttgctatttccaatcagtattgcttgcaaagacctttgtttctgtgatgtaccaactttacagttgtgttgccatttaaacctttttttaaaaaaaaaaaattaaagtaattcctggccaaaaaaaaaaaaaaaaaaaaaaaaaaa

SEQ ID NO: 5268 - DNA, 6243 bp, Homo Sapiens
  NM_024632
acttccgctgtcccgcgaagggcggggggagcgaactgttgtggtgcggagcgttcggcgggcggcggccgggcggcccaggggctgccgcgggactcggggcgcagccgagtggctgcaggggtggagtgggccggacgagccgcggggcccgggtgccgcgggttcgaggccgggccccgcgcgaggaggccgcgccaccccgggggagctgcccggcagcgagtttgccccgctgccgaaagaaggcgggagccggcaggggccttcgaaaccccctggcaacccaggcccggagtccttggggagcggctgtttcctgggacgccctcccggacacccccgctgcagggttacggttctgggcccccggcagaaggctcctccgggtgacccccggcggggccctgcgagccgcgggagccgaccccggggcctcgagccgggaggaagggggcttccggaggcggagggccgggggccgagggagccgggcctctcggacgcggggcagggcagcgcccgggctggagacggactctgggaccctcggctgcgggggtctcagcgacctgccccgcggcaagcgcggccgcggagtggcctaccggggaccctcccccagagggaccggcccggggcggggagatgaacggcttcagcacggaggaggacagccgcgaagggccccccgccgccccagctgccgccgccccgggctacggccagagctgctgcctcatcgaggacggcgagcgctgcgtccggcccgcgggcaacgcctccttcagcaagagggtccagaagagcatctcgcagaagaaactcaagctggacatcgacaagagcgtaaggcacctatatatctgtgattttcacaaaaatttcatccagagtgtccgaaataaaaggaagaggaagacaagtgacgatggcggagattctcccgagcacgacactgacattcctgaggttgatctgttccagctgcaggtgaacaccctacgacgttataaacgacactacaagttgcagaccagaccaggcttcaataaggcccagttagcagaaactgtgagtcgacacttcaggaacatacctgtgaatgaaaaagagacccttgcctacttcatctacatggtgaagagtaacaagagtagactggaccagaaatcggagggtggcaagcagcttgagtgaggatgaagcacatcttaaaggaatgaagtgtaatgcttgatgcacaggtgatatctactacatttaagcccataaagactgttaaatattattgtaaataaaaaagtttgaatgatgaatactgtaaatctttttggtcaggaggattatattctcatgattcagcatgtgtatagaaagactttcttttacgataactctggactaaaaaaatcaggatcattaaaagaattaaaaactatgtatttcagcattcaacaaagcattaaatcaattctactggaaatgtgggataagaaatattttggtaatcaccttatccaccaggctgccacgtgtgagctgtagcttggaatagcagcaaggtgcaattggccatggaagtgcatgagcagacccacatctggacttgcatgctgcccgctggcgacatagatatcccgcccgctttgttgcaagctttgtcatttatcagcagatcagtttgacactggtccccctcactcaccctgtgccttgtacacagtaggcactcaatcagtaggtattggctaattgagctgtcactaatagtgccagccttgtaacatccgcttcacacctctcatgactgagacctctgccatttctgttgctcaccacttaactgctagaatgtggaggaaatcctgatgcaccaacaaggaagtttctgatcagataaggatttcaggacagttgcatgtgcaaaactattcgttgaggttccagaaacactgatatagagaccctcacagaagatacggtcccttatgcaccccactatgcttcactctttggggtgcagttagatattatgacttcagccaagcttcttggtaataaatgcattgacacactgacatatttagtaggttggggcaagtatttttagaagttttcatcctaagttcacaaccaccatgcaagctgccaggggccatgtgattcctgcccagaagttcagcttaggattgaaagtctggctggccttgactccctgggctctggtcatcagcaaatcatgagtttgggcaacaaaggtcaattccatctgatgctcatttttgtgaacaatttgcctccctcttagggagaaagattgctaaaataatttttgaaaattacctaatttttttgttgttcaaaacgttgaactcctcaatctaattatatcagagccaaagtatcctgtgaaaacaaagctttatatccaaaaatgtgcttttgcaaaattctttaatctgtgtaatggagggcagagggtatggggtaggagggtgggagaaagaaaagaaaagaatttggattctaatttatgaccatcttgacatatggtcaaaggtgtcattttcctactcagtttcaattctgagttaatttcttaagccttaaataataagaacaatggacagcctggcctggcagagagtttcacagatgacttaatctgagcaccatcacagagaagtcaggactaaaccccctactgagcagggcggcggagtgtccaaaggtctcagttctgtggagcagagtaccacgctttctgtggaatggggacagggtcaccacgctcactaaaatgcagtatgttccattgcagcaaagctttcgcctgtgttcaaaatgcatgtctagcagattgcagccttttaaattaaatatatataaatggttgtatatagaatatactctggactgtgagggcatcctattttggtatgcctcctggctgtggatggcatgtccagtgctctgtgagtgttttcagtcattcacattcactatgtgtttagagattctctccctgcttacagctgaaggatgttgatacaggcatcaagaaggctgaggggcagatggggcctgcaggttaaggcattgttaacttgctccatggaaatgtccatatcttaatgagtaaaaaagtgtatttttctgatacgtaaaccagaattgtgggcgtgtaggtcacatcactatttctttagcagcaaatctgttttcccagttgagagagacaatagcttctgcacaagaatatatgatggtaggatccatctgttcaattgtgtctgaaagaatctttattccaaagcgaaacctggggaaatgttttaccttcagccagatgctgtgtgtgtacttgggtcccttgtctttcctctaaggagaggtgcttgtggaaagtggaggttgtgggcatcttttcaaccttttcaatctgacctttcaacaggtcaggtgagagaaaagacaaagctatttgaacctatgtttttcttatgtccagaaatctgttctttcatcaaaccactaaaccactcgccttagcctcttctgcagtttctggtggctctatctgtgggcaagggactcctgcctgtgagaagtggccaggccctccagagcaacggggtctggcttcagggagcagtggggtgtggggaaagcaatgttcatcttggctgctccatttttataccatccatcaaggactcttgcgcttctctccacctgtgacgtagcagcattgccttctttcctcttggtgcttctgggcaaaactggaatttgaaatccagaactggcgttgtcttcttaaagagtatggttcctgcctcagttccagcctggtatggttctttgatatgccctgaaggttctcacatggaaacatcagtatcctgccattcatgttgttttaagatgttttaaaaaccaatggacaaacttcttgcttcaaggaacaaactcttaggttggcaacagcatataaaaaaaaagatcacagctgaatctcatgaaagattaaaaaccaaaggattcaagaccggtgttgtaaaatgaagaggaattttacttacatgttacagctgccaagtttttagatgttcctgtcatagctaaatagtcactgctagcctttcagagaacagatagtaacaattgtttgcagctgcagtgttgcatctaattttggtgtttaggctttttattttgtgggaagctttttgttaatatcctgcagggcaactgcctgttgggagggagaggatggaagaaggagcttactctgggggccttgcctattgagggaggctgttgcccagagcagttgcttcatggaagtcatccaaaggcgctctcagtcattacaatgacaggatctcaaagttgggaaagggctgttaagtcatccagtctagtctccacataggtgctgacattctgcctacaaccatcccaccaaggggttgagcagtctggacttaaacacctccgaggacagagaacccactacctcgtggagaagcctgttctttgtaaacctctggcttttctatgttctctgtaatttccatcttagtctctgccccatgggggccacatgggacaagttatttttggcaaagcacctaattgctggcactgtcccaaagcatagcgtttgccttttggaaagaaacaatgctaggacatggacactttggtacactgtccttacccctgagtattagtccactcagttccttgttggagaatgttgagaaaaccctactggctggcttgtttctgccaaagcttggggagaggagagggggatgagaagatgttagcagcctgctaaacctcagacagatgaggactcagttctgtgcttgccccacaaaaacggatgctcacatcatcaggaaattgttcagctggaggatttataacttcgttgctttgcatgaagtttaaagttttcatggttgcccagggcttgtaccttagattcctgtaaggactttgcactgtttttgctgagaaaacaacgcttcaggacttaaggtctaagcgtcagagaagtgccgtattttcaaggtggaaagtctgttaagcttgctgttgtccaatcatccgtttttagagatggggaaactaaaactcaaaaagatgtgcctgaggtcatatggcattatcagaaccaacctctggccctcttgacctgtctagcattctttctttctgacctataggatgactctaattcagtctaaatcggctgccctcagattcttgagaacttaaaattgagcagaaattcccaaggccaacctagctctcagggaccaacctgcagaactcaagattgagcgaaatgtttaggccagttgagttttgcaaaatgagtggtaagggaaaacagatctagcctgttatttaaaaccagggttcaaaagccctattgggagaggtagtattgtcctagcatttaaattctcatgaaatgtgcttggtctgtgatctcttggtcagatatctgccttccaggcgatcctttgaggttgtgtaattcagctggccctggctcctggtccctgttactgagctgggcagtcgaaccgaagggcagatgagctcaagatcatgccttgggaagcatggtgctctaggggtgcctttttattcctttcattgtattatagactgtttccaagtttatggttagaaatggtaaagtgggtctggtgttttgaggtagaacccagcctagggcaagatatgaactgttcttgaggtagaaatgtctacagtcagttgtttcatctagcttgcatcttaaaacacaaacccttcagttgctttcacttaatgcacacatttgccaatgacagagggttatacaggatccttcttttacatttctattgtctgctacgctcatcagagtatattttggggtacaaggttttgggggttttttttcccattttgtaactgccttattgaaaagtaagtgcccttccattccaggcctcctcatattgtacttgtttcctgccaaatctgggggatcatttgtattttaacttcgtaatctatggctctgtactgttgaaaggctctcaattctgtggggtctccttagtatgtatgtgacttttcatgttgcaatatcacacgatgggatggcccgacttttgctcttaataaataatctgaatgagtaagagaaaaaaaaaaaaaaaaaaa

SEQ ID NO: 5269 - DNA, 2657 bp, Homo Sapiens
  NM_024635
gggcatacgcatgcgtgcacgctgccggtcgggctgggctgagaggggagggggcggcggcggccgaggcggcgtcgttatttccgtggtccggacagtgcgtggcggcgcgggtgaccacgggagaagtaggcataatggttatgaaagcttctgtagatgatgacgattcaggatgggagctcagtatgccagaaaaaatggagaaaagcaatacaaactgggtggacattacccaagattttgaagaagcttgtcgagaattaaagttgggagaactacttcatgataagctatttggtctttttgaagccatgtctgctattgaaatgatggatcccaagatggatgctggcatgattggaaaccaagttaatcgaaaagttctcaattttgaacaagctatcaaggatggcactattaaaattaaagatctcaccttgcctgaactgatagggattatggatacatgtttttgctgtttgataacgtggttagaaggccattcactggcacagacagtatttacgtgcctttacattcataatccagactttatagaagatcctgctatgaaggcttttgctctgggaatcttgaaaatctgtgacattgcaagggaaaaagtaaataaagctgctgtttttgaagaggaagattttcagtcaatgacttatggatttaaaatggctaacagtgtgacagatcttcgagttacaggcatgctaaaagatgtggaggatgacatgcaaagaagagtaaagagtactcgaagtcgacaaggagaagaaagagatccagaagttgaactagaacaccaacaatgtttagcagtattcagcagagtgaaatttactcgtgtgttactgacagtgcttatagcctttactaagaaagagaccagtgctgttgcagaagctcaaaaattgatggttcaagcagcagatcttctttctgccattcataattcattgcatcatggcatccaggcccagaatgatactacaaaaggagatcatccaattatgatgggttttgaaccccttgtgaaccagaggctacttccacctaccttccctcgatatgcaaaaataattaaaagggaagaaatggtgaactattttgcaagattaatagatagaataaaaactgtctgtgaggttgtgaatttaacaaatttacattgtatcctggattttttctgtgaatttagtgaacagtcaccatgtgttctttcaagatctctgttacaaaccactttcctggtggataacaaaaaggtctttggaactcatctcatgcaagacatggtgaaagatgcacttcggtcttttgtcagtcctccggtgctttcccccaagtgctacctatataataatcaccaggctaaggactgtatcgactcctttgttactcactgtgttcggccattctgtagtcttattcagatccatggacataacagggctcgacagagagataagcttggtcatattcttgaggaatttgccaccttgcaggatgaggcagagaaggttgatgcagcgcttcacaccatgctgttgaaacaggaaccccaaaggcaacatttggcctgtttaggtacctgggtcctttaccataaccttcgcattatgatacagtaccttctaagtggctttgaattggaactctacagtatgcacgagtactattacatatattggtatctctctgaattcctttacgcatggttgatgtcaacattgagtcgtgccgatggctctcaaatggcagaggaaaggataatggaagagcagcagaaaggccgtagtagtaaaaaaacaaagaaaaaaaagaaagttcgcccattgagccgagagatcacaatgagccaagcatatcagaacatgtgtgctggaatgtttaaaaccatggtagcatttgacatggacggcaaagtacgtaaaccgaagtttgagcttgatagtgaacaagttcggtatgaacacaggtttgctccattcaacagtgtgatgaccccgccgccagtgcactacttacagttcaaggaaatgtctgacctcaataaatatagccctcctcctcagtctcctgaactgtatgtggcagctagtaagcactttcaacaggcaaaaatgatattggaaaatattcctaacccggaccatgaggttaatagaattttaaaggttgccaaacccaactttgtggttatgaagttattggcaggaggacacaaaaaggaatctaaagttcctcctgaatttgatttctctgctcataaatattttcctgttgtgaaacttgtttgagagagactggggaggtggccataaaggggcagagtcttctttcagacccaactcttagagggcacatcaccaggctccacatcacgggaagtgagatggatttcttgggtaacaactcattataaggaatacttttagtttgacagccttatatgacatgaatgaaaactgctgttttaaagtggtttattatgttccatggaagaaactggtcttattgaatgcattgatgaacgttatatggttttattacagatttaatcacaaatcattttttatgaatgattgagtgaaaatagtgtttataaaggttaataaatttcttgacaaaaaaaaaatgca

SEQ ID NO: 5270 - DNA, 4008 bp, Homo Sapiens
  NM_024638
aggcagtgattttggggcagagaattttgcaacacgtggtagtgaactgtgaggagtttgaggggtctgaagactgaaagagtcgaatggtttgttggcagggtgtcctggtggattggtttctgtaagttcagattctcataaatcgtgtgagcgtcgccgacacctctgagataaaagggcccctttcgactagcctctgctgaaaggacctagaagaatcccttaggatgaagctgagtcttaccaaggtagttaatggctgtcgcctaggaaaaataaaaaacctgggcaaaacaggggaccacaccatggatattccaggctgccttctgtataccaagactggctccgccccacacctcacccatcacacgctgcataatatccacggggttcctgccatggctcagcttacgctgtcatccctagcagaacatcatgaagtcttgacagaatataaagaaggagttggaaagtttataggcatgccagaatcactcttgtactgctccctgcacgatccagtcagcccctgcccggctggttatgtaacaaacaagtctgtgtctgtgtggagtgttgcaggacgagtggaaatgactgtttccaagttcatggcaattcagaaggcccttcagccagactggttccagtgcctctccgatggagaagtatcttgtaaggaagcaacttccataaaaagggtcagaaagtctgttgaccgatcacttcttttcttggataactgtctgcggctgcaggaagagtcagaggttcttcagaagagtgtgatcattggagtgattgaaggtggagatgtgatggaagagaggctgaggtcagcacgagagacagccaagcggcctgtgggtggcttccttctggatggttttcaaggaaatccaacaaccctggaggctagactacgcttgctgtcatcagtcactgcagagctgccggaggacaagccaaggctcatatctggtgttagtcggccagatgaggtgctcgagtgtattgaaagaggagtggacttatttgagagttttttcccttatcaagtaacagagcggggatgtgccctgactttcagttttgattaccagccgaatcctgaagagacactactacaacaaaatggaacacaagaagaaataaaatgtatggatcaaataaagaaaattgaaacaactggttgcaaccaagaaataacatcatttgaaattaatctgaaggaaaaaaagtaccaggaggactttaacccgctggtgagaggatgttcctgttactgctgtaagaatcacactcgggcatacatccaccatctgctggtgaccaatgagctgctggccggagtcctgcttatgatgcacaactttgaacactactttgggtttttccattacatccgggaagcactaaaaagtgacaaactggcacagttgaaagagctcatccacaggcaagcatcttgagatcttgcaaatacaagtctcactcttcacactgagcctgtaccactgttgtaacatgggaagacgtgaagaagaaataatctgagctttaattatttatatttggatataaggtctgcttaaataaagaatctttgtaccaaactgcccacatgagggtgaagagatttcctcaaaagacttaaatgacctggattgatcagagagaattgaactgtgacctttaagacttctagactaattcttttagttgatagagattcatttagtcaaagacaaaagctttaactgtgagggcacagccttgaagtgggagtgatgagattctgagggacccatgaattggattgaggcttgaggggaaatggtgtgagacgaatgggctctggacatatgcctgttgatttgagaagaaatctggctggtttgagggtttcctttagttcaccctcatactctcaggagactcttctggatacttttgtcttccaccctgccctggcagtgcagccaatcagaaatggctcttgtgacttaactgggcttggatatccctggaatgtggggcttgaacattgctcctgtgatgatcatctgtcccaggtcacactccttcatttgaccacatggcctatttgcaacttctttttagagccaatgtaattgcctgttaggagccagaagtttgcccagctgctttcttctggttgtacagatccattgtggtctgccttccaggctcattaatagtctaactacgtaataactgaagacctatctcttgtgaagattcattctcaatgtgttcacttggacagagccctgcctggcctaacgattagagggttagtctccatcctgctcagatatgactcctgggcaattcacttaacttctccatggctgcttcctgctgaataaatagggacaggcataatggataggaatgaatgaacttttaagatactgtctagctctaaaattggaagaacaaaaagttttagattagagtcatagccttaatagccctagttgtcatcctgggagacaggcaacagtagagatatttgagagcctaaagagaggtttggcctgtgggtttttaagtggttattgaattggtatcaggagatcctgaggctggtaggggaaggtaattctttctaagttacctctgtatttttcaagttttctataaggaatacacatacacccacatgcacacaccatagtttttatacaaacagcaataacaaaaccaaaaagatgcccctttttttgtagggataagaaatacatttgttttatacttctatgctatattttgctattcaaaatttagtgggcattacttaacattgtttctaattattttgtggctgctgtatgttttatgtgttgggagcccattgtattaggccgttcttggattgctataaagaaatacctgagactgggtaatttggttttttggttttttggggttttttttgagacggagccttgctctgtcgcccaggctggagtgcagtggcgcgatctcggctctatgcaacctccacctcctgggttcatgccattctcctgcctcagcctcccgtgtagctgggactacaggcgcccgccaccatgcctggctaattttttatatttttagtagagatggggtttcaccgtatgagccaggatggtctcgatctcctgacctcatgatccacaagactgggtaatctgtaaagaaaagaggtttaattggctcatggctctgcaggctttacaggaagcatggtactggcatctgcttggtttctggggaggcctccggaagcttatagtcatgacagaaggtgaagggggagcaggcacatcacatgacaaaagcaggaacaagactcagagcaagaagtcacttatcaccaaggggatggcccaggccattcatgagggatccacctttgtgctccaaacacctcccaccaggccccacctccagtattggggattacatttcaacttgaggtttgggcgggaacaaatagtcaaattatattacccatctacatggttttctttttcttagtatgggagtgtccatgaataaattcatgggcatcctcataactcttccatgaatggcaaggggtacttatggaaaacagttttccaaagatctgattgttttgaaatgtgttagattggacttgttcaaatgttcatatttttgttctatgctaaatgcatcgttaggggagtagtggtaaatattccagaatccatatgaaattcatgagtttatttatgtctaaaacactgaaaactgtgtccaatatcgttcagtttcctgggtctttttcttattagcacatttgagaaaaatattcctttcctttattgtagtaaatctattaaaggcaatagccaataaaacatttttaattttaaaaatttactgtgtttggctttctgtaaatgtagtaggtctgttaaacaaaatattaaatttccatagtaccagaaaaaaaaaaaaaaa

SEQ ID NO: 5271 - DNA, 1871 bp, Homo Sapiens
  NM_024640
cgggcctgggcggatgtctccggcgcgtcggtgcagggggatgagggccgcggtggctgccagcgtggggttgagcgaggggcctgctggctcccggagcggtcgcctcttccgcccgccgagtcccgctccggcggcccccggcgcccggctgttgcggctcccggggagcggggccgtgcaggccgcgagcccggagcgcgccggctggaccgaggcgctgcgggccgccgtggccgagctgcgcgccggcgccgtggtggccgtccccaccgatacgctgtacggcctggcctgcgcggcgagctgctcggcggctctgcgcgctgtgtaccgcctcaagggtcgcagcgaggccaagcctctggccgtatgcctcggccgcgtggccgacgtctacagatactgccgtgtgagagtacctgaggggctcctgaaagacctactgccaggaccagtgaccctggtgatggaacgctcggaggagctcaacaaggacctaaacccttttacgcctcttgtaggcattcggattcctgatcatgcttttatgcaagacttggctcagatgtttgagggtccgcttgctctcactagtgccaacctcagctcccaggccagttctctgaatgtcgaggagttccaggatctctggcctcagttgtccttggttattgatgggggacaaattggggatggccagagccccgagtgtcgccttggctcaactgtggttgatttgtctgtgcccggaaagtttggcatcattcgtccaggctgtgccctggaaagtactacagccatcctccaacagaagtacggactgctcccctcacatgcgtcctacctgtgaaactctgggaagcaggaaggcccaagacctggtgctggatactatgtgtctgtccactgacgactgtcaaggcctcatttgcagaggccaccggagctagggcactagcctgacttttaaggcagtgtgtctttctgagcactgtagaccaagcccttggagctgctggtttagccttgcacctggggaaaggatgtatttatttgtattttcatatatcagccaaaagctgaatggaaaagttaagaacattcctaggtggccttattctaataagtttcttctgtctgttttgtttttcaattgaaaagtaattaaataacagatttagaatctagtgagagcctcctctctggtgggtggtggcatttaaggttcaaaccagccagaagtgctggtgctgtttaaaaagtctcaggtggctgcgtgtggtggctcatgcctgtaatcccaacattctgggaggcccaggcgggagaactgcttgagcccaggagttcagaatcagcctgggcaacatagcaatactccgtctcataaaaattaataaataaaaagtctcaggtgaccaaaggctcctgaagctagaaccaggtttggataaagattgaagagccacaggccactcttccctctgagccattgggcctagtggtgtcatgtattgtaattgctcgcagggagagcagtctttttggtgtaatagtgggatgtctgcttagttggcaggggttcagtccaaatggaagaatattgggaaataaacctccactatcctttatagccagggacttttttcttatttattcataaaataaattatagttaattatacccataacacctttatttaaatccagtgttctccgcagccttttgtctatttatatgtgtaccaagtgttaaacataattattattgggcatttgaactttgtttttctttaaagaaatgctgctattaaacatatttgtaaatggtttaaaaaaaaaaaaaaaaaaaaaaaaaaaaaaaaaaa

SEQ ID NO: 5272 - DNA, 4593 bp, Homo Sapiens
  NM_024641
ggggctgtctgggctcggggcgcggcggcagtcagctctatgttcgcggtcttaacctctcctctggccgagtccttgcaagaagtgaattacccgaccctgcaaaacacttactattttggagtttaaagtatgtcatcatggcaaagtttcggagaaggacttgcatcattttggcactttttattctatttattttctctctgatgatgggtttaaaaatgctgagaccaaatacagctacttttggagctccttttggacttgaccttcttccagaacttcatcaacgaactattcatttggggaaaaattttgatttccaaaagagtgacagaatcaacagtgaaacaaataccaagaatttaaaaagtgttgaaatcactatgaaaccttccaaagcctctgaacttaacttggatgaactaccacctctgaacaattatctacatgtattttattacagttggtatggaaatccacaatttgatggtaaatatatacattggaatcatccagtgttagagcattgggaccctagaatagccaagaattatccacaagggagacacaaccctccagatgacattggctccagcttttatcctgaattgggaagttacagttctcgggatccttctgtcatagaaactcacatgagacaaatgcgctcagcttcaattggtgtactagccctctcttggtacccacctgatgtaaatgatgaaaatggagaacctactgataacttggtacccactattttggataaagctcataaatataacctaaaggttacttttcacatagaaccatatagcaatcgagatgatcaaaacatgtacaaaaatgtcaagtatattatagacaaatatggaaatcatccggccttttacaggtacaagacgaagactggcaatgctcttcctatgttttatgtctatgattcctatattaccaagcctgaaaaatgggccaatctgttaaccacctcagggtctcggagtattcgcaattctccttatgatggactgtttattgcccttctggtagaagaaaaacataagtatgatattcttcaaagtggttttgatggaatttacacatattttgccacaaatggctttacttatggctcatcacatcagaattgggctagcctaaaattattttgtgataaatacaacttaatatttatcccaagtgtgggcccaggatacatagataccagcatccgtccatggaacacgcaaaacactcggaaccgaatcaatgggaagtattatgaaattggtctgagtgccgcacttcagacacgccccagcttaatttctatcacctcttttaatgagtggcatgaaggaactcagattgaaaaagctgttcccaaaagaaccagtaatacagtgtacctagattaccgtcctcataaaccaggtctttacctagaactgactcgcaagtggtctgaaaaatacagtaaggaaagagcaacttatgcattagatcgccagctgcctgtttcttaatgcattgattaaagtttaatagttatcaaaatcacctaatttttaaaaatagctttcgttttgagttctggaaagaaaactgtcaaaatcagtatatactattagttatatttaaaaatatttttttaaattctttacagataatattatacttgttacccttcacaataccacatgagaaaatatctgagacaaaatgtatacaaatatattccttatggcataatttattgcatttctgactgaaatcaaaattctgatttgatggcaattgaattttcattttacaatagataaatgcttgtgttacctaaagcacttagcacacagttaaattatatttacatcctagacccaaataaataggattgtgtgtatatttgggatatctattgaagaaaaaaagaaaaccccttaaagataatgtacatgcttcatgtcatgtctttaaaataatttaatcaactttattgtcttagtatttagactctggataactctacaataatgaggaaattcttaagaataacaaaatcactgtaccttcctctcaattttgctgtgaacctgaaatggctttaaattaatactcttattttttatttaatttaattacataaattaaaccttaccatgaccaaattgtgttaggaaggcctgctatctacagcacagtgtgtcatttgcagatttgtggttacctataccacgctaggtgttttgacatgtttagtgtttctgctttacagtgctgaattccatattttagaagctatgaaagtccttttatgaaaaagttactgattgcttctcagttattaggaaaacagttgtttcacaattattatgtagatatgatgcccaaatatcatttttagtatatcttgtcgatctttaagttgttactattgtgttattcatgtctttaaatcagataccaaatattttttaggaaagaaaaatgttattactgtcattaggttgtcttttaatactttaagttattttgacgaaaagtaatagagaaaatttacttagcattttagattctagagacatggaaatgaaaattattttatgtctagagtaggtcctgaagtttggctttacattaagtttagcactgtatcagaatgaagaaactaatattttacataaaaactaatactttcaattttttatatagtaatatccccattttgtaaatgttagacttttatcatacctgtaagttaaaatacttgttatcaataacttgtcatattgtgacaaattgatcacttgtgtacgaaaaataaatctccttaaaaactaaataaaatgcactgtattcttacagttaatgtttataactatagtaaaaaattaatatatatcctattacataaatgttatttcttaggtgttccattaagaagagcaatagaataatgctaaaaaataatgcctataaatcttcagagtataaagacatccattcagaaacaaaaattagcactaaattttttataaaatagaccagatgacaaaatttattttatttttaaacagtggttttgacacaaattatgttattgaaaagcattattaatgtttaatttatttaaaattttggaatttgccatttctcagacaatgatcaggccttaggaaattaatacagtagtagtaatcattttctaggggaaaataaaagaataaatcactatactgatattttgatataagcaagcacttacatggtaatcactatatagatccaacctgtggattttcttcttatgtccatttaactagaatatattattttaggtataatttacaaatgtcacacctaataatcttttataatataccatatttcattaaagttttgttagagaagtatctaccacagaggagtttttgtcattgtgtacgttgtgtatttgaacccaccatgacagaaagtaaattttaggaaatagttatgagattaagggaaaatctataaaaacaaggttagcatattctcaacacagataccaccactttctttttcccattatagacatggtgaatccacacagcatacttcatctctgagctttgttgtgattcctcaacacattaccctaaccagccagcagtaacagatttcagagtaagataaagcagattctgtcttcattgcaaaaagttattctcaatggaagaatggcatctgatctcataattactagtttatattaatatagtttttttctccctttttaataaaataattacagtcatccctcagtgtctgtgggggattggttccagttacccctatagataccaaaatctgcagatgctcaagtccctgatataaactggcatagtagttgcatataatctatgcacatcctcctgtatacattaagtcatctctagattatttataacacttaatacaatgtaaatgctatgtagttgttataccatactggttagtgaataattacatgaaaaaaaagagtctgtacatcttcagagtttcagtcggcaatttcttggccatggatgtagaacctacagataaggtgagccaactgcattaggaaataactctaataattctgttaattcttagagaggaaaactttcaaaatcttcctcaggtatttattacaactgcctttaccattttagttgtaacacagtttaaattgttatgataacaagtaaataagagcaaagaatttatttcttaattcaaaactatacgtttgaattcaatatggtataacttaaagtggtataatacatacaatgcatgaatcataatggattcttttataagttattaatttttatggtttaatcagtctaattgttttgactgttatagaaaccaaatattttactgtttcttttaaggactaatattgtcaaaaactgctgttattaacttcacttgagttgtttaacttccttctgttttaagattgtaattaaaaattactattttgttatatggaatggttaatttttacctaataaaaacatagatgaaatacattgaaaaaaaaaaaaaaaaaaa

SEQ ID NO: 5273 - DNA, 2770 bp, Homo Sapiens
  NM_024642
atgtgggggcgcacggcgcggcggcgctgcccgcgggaactgcggcgcggccgggaggcgctgttggtgctcctggcgctactggcgttggccgggctgggctcggtgctgcgggcgcagcgtggggccggggccggggctgccgagccgggacccccgcgcaccccgcgccccgggcggcgcgagccggtcatgccgcggccgccggtgccggcgaacgcgctgggcgcgcggggcgaggcggtgcggctgcagctgcagggcgaggagctgcggctgcaggaggagagcgtgcggctgcaccagattaacatctacctcagcgaccgcatctcactgcaccgccgcctgcccgagcgctggaacccgctgtgcaaagagaagaaatatgattatgataatttgcccaggacatctgttatcatagcattttataatgaagcctggtcaactctccttcggacagtttacagtgtccttgagacatccccggatatcctgctagaagaagtgatccttgtagatgactacagtgatagagagcacctgaaggagcgcttggccaatgagctttcgggactgcccaaggtgcgcctgatccgcgccaacaagagagagggcctggtgcgagcccggctgctgggggcgtctgcggcgaggggcgatgttctgaccttcctggactgtcactgtgagtgccacgaagggtggctggagccgctgctgcagaggatccatgaagaggagtcggcagtggtgtgcccggtgattgatgtgatcgactggaacaccttcgaatacctggggaactccggggagccccagatcggcggtttcgactggaggctggtgttcacgtggcacacagttcctgagagggagaggatacggatgcaatcccccgtcgatgtcatcaggtctccaacaatggctggtgggctgtttgctgtgagtaagaaatattttgaatatctggggtcttatgatacaggaatggaagtttggggaggagaaaacctcgaattttcctttaggatctggcagtgtggtggggttctggaaacacacccatgttcccatgttggccatgttttccccaagcaagctccctactcccgcaacaaggctctggccaacagtgttcgtgcagctgaagtatggatggatgaatttaaagagctctactaccatcgcaacccccgtgcccgcttggaaccttttggggatgtgacagagaggaagcagctccgggacaagctccagtgtaaagacttcaagtggttcttggagactgtgtatccagaactgcatgtgcctgaggacaggcctggcttcttcgggatgctccagaacaaaggactaacagactactgctttgactataaccctcccgatgaaaaccagattgtgggacaccaggtcattctgtacctctgtcatgggatgggccagaatcagtttttcgagtacacgtcccagaaagaaatacgctataacacccaccagcctgagggctgcattgctgtggaagcaggaatggatacccttatcatgcatctctgcgaagaaactgccccagagaatcagaagttcatcttgcaggaggatggatctttatttcacgaacagtccaagaaatgtgtccaggctgcgaggaaggagtcgagtgacagtttcgttccactcttacgagactgcaccaactcggatcatcagaaatggttcttcaaagagcgcatgttatgaagcctcgtgtatcaaggagcccatcgaaggagactgtggagccaggactctgcccaacaaagacttagctaagcagtgaccagaacccaccaaaaactaggctgcattgctttgaagaggcaatcattttgccatttgtgaaagttgtgttggatttagtaaaaatgtgaataagctttgtacttattttgagaactttttaaatgttccaaaataccctattttcaaagggtaatcgtaagatgttaacccttggtatttagaaaattaaaaccttataatatttttctatcaagatgtatattttacagtcgtgccttttactctcattagcaaaaaagataaagattttattttggtatttacaagaattcccaggtacgaagatatctgcatgggtggaaatcaggttcaagcaacgtactttgcattaactgataatacctcagctgcggggttaaagttttcccagtatagagagactgtcactaggaacattgtattgatttattcaggtcattgagatcttctagatgtattttaaaaagaatgctttttggttatgtgttgctaccacagttaacactccataatgttcatgtcagccaaagaggactaaccaaagctgaaatctcagagaacaatttgctttactaagctgagtcaacttgagagcgaacttctaacaatgccgcactgtagtgtggctggttctaccactatgactttaaaacatgtttatatcatttttaatttttatgatacggtagtgtcagggagaaatgtaatgttctatatgaaattcctttttcaagtttgttcattaataacagttattaatttaaatcagcgttagagtttgtgctgctgcaactgctgtgaaaatttctctgagtaattctgatttgtgaatgatcccagaccaaccctgagattttgtcaacctgattaagtcaatatgaatgattaaaaagatgtgagaacaaaaaaaaaaaaaaaaaaaaaaaaaaaaaaaaaaaaaaaa

SEQ ID NO: 5274 - DNA, 2463 bp, Homo Sapiens
  NM_024644
caccgcagccgctgcattcaggaaccgctttagcttcgcccccggccggccgggcggggaagactggtgtggtctggccatggatgggctccaggccagtgcagggccgttgaggcgcgggcggccgaagcgccggcgcaagccccagccacacagcgggtcggtcctggccctgcccttgaggtccaggaagatacgaaagcagctgcgaagtgttgtatcccgcatggcagcgctgaggacgcagacgctgcctagcgagaactcggaggaatcgagggtggagtcgacggccgacgacctgggggacgcgctacccggtggggcggcggtggcggccgtcccggacgcagcccggcgagagccatacggccacctggggcccgcagagctgctggaggcctcgcccgccgcgcgctccctgcagaccccgtcggcgcgcctggtgcccgcttccgcgccgcccgcgcgcctggtggaggtgcccgccgcgccggtccgggtggtggagacctcggccctgctgtgcaccgcgcaacacttagcggccgtccagtcgtccggggcccctgcgacggcgtcggggccgcaggtggataacacgggtggggagccggcctgggactccccgctgcggcgcgtcttggccgagctgaaccgcatccccagcagccggcggcgagcggcccgcctctttgagtggctcatcgcgcccatgccgccagatcacttttaccggcgcctatgggagcgcgaggcggtgctggtgcggcggcaggaccacacctactaccagggacttttctctaccgctgacctggattcgatgctgcgcaacgaggaggtgcagttcggccagcatttggacgccgctcgctacatcaacggacgacgcgagaccctgaacccacccggccgcgcgctgcccgccgccgcgtggtccctgtaccaggccggctgctccctgcgtctcctctgtccgcaggctttctctactactgtgtggcagtttttggctgtgcttcaagagcagtttggaagcatggcaggctccaacgtttacctcacgccccctaactcgcagggctttgccccccactacgacgacatcgaggccttcgtgctgcagctggaaggtaggaaactctggcgtgtataccgaccccgagtcccaaccgaggaactggctctgacatccagccccaacttcagtcaggacgacctcggtgagccggtgctgcagaccgtgctggaacctggagatttgctgtattttcctcggggcttcattcaccaagctgaatgccaggatggagtccactctctgcacctcaccttgtccacgtaccagcgcaatacctggggtgacttcttagaggccatactgcctctggcagtgcaggctgcaatggaagaaaatgtggagtttcggaggggtctgccccgagacttcatggattacatgggggcccagcattcagattctaaggatccgcgaagaaccgctttcatggagaaggtgcgggtcttggttgcccgcctgggacactttgctcctgttgatgctgtggccgaccagcgagccaaagacttcattcacgattctctgccccctgttttgactgatagggagagggcactaagtgtttacgggcttccaattcgctgggaggctggagaacctgtaaacgtgggggcccagttgacaacagaaacagaagtccatatgcttcaggatgggatagctcggctggtgggtgaggggggccatttgtttctctattacacagtggaaaactcccgtgtgtatcatctggaagaacccaagtgcttggaaatatacccccagcaagctgatgccatggaactgttgcttggttcttatccagagtttgtgagagtgggggacctgccctgtgacagtgtggaggaccagctgtccttggcaaccacgttgtatgataaggggctgctgctcactaagatgcctctagccctaaattagtttcttgttgattgctggaaacaaggcagtagtgattctccgctgccactgctaccttttttttttttttttccttaaactcacgttcttaccttgataagcatcagtgtgctcacatttacctttatcactgcttcagtgtcacaaacctcggaaggtcttctaggaagaaccatctcatctaggtacaaaaggaaaaggagaagttggaggtggaaaaaaaacccttgatccgtgatcatttcagagcaccaacttcatcaccttcaggcttcagtgtactgggtaacactgaccatgtcgttctgcttgagacagatattagattttttttggaatttggatctttcatctgagttctttttcatgggcgggtcggggtcagtatcctgtttgttattgttaaatttgtatgaaccttagaaaagttattaaagtgccaaagaatgtttcccttt

SEQ ID NO: 5275 - DNA, 2998 bp, Homo Sapiens
  NM_024647
gctgagaggcgcgtactgtgcttgctttttgcagtacctgctgcggccgctttcggcatggaggaaatttatgcgaagtttgtgtcccagaaaatcagcaaaacccgctggcgaccgctgcctccgggaagtttacagaccgcggagacgttcgctacaggatcttgggacaatgaggaaaattatatttcactgtggtctattggagattttggaaacttggactctgatggagggtttgaaggagaccatcagttattgtgtgatatcagacaccatggtgatgtaatggatttacagttttttgaccaggaaagaattgtcgctgcttcatcaacaggatgtgtaacagttttccttcaccatccaaataaccagactctgtcagtcaaccagcagtggactacagctcactaccacacaggccctggcagtccttcctatagcagtgcaccatgtacaggtgttgtgtgcaacaacccagaaatcgttacagttggagaggatggtcgaataaatctcttcagagctgatcacaaggaagctgtaagaaccatagacaatgcagatagtagtacactccatgctgtaacctttcttcgaactcctgagattcttactgtaaattcaattggacagttgaaaatatgggatttcagacaacaaggaaatgagccttctcagatattgtcactgactggtgaccgagtgccactccactgtgttgatagacatcccaaccaacagcatgttgtagctactggtggccaagatggaatgttgagtatttgggatgttagacaaggtactatgcctgtatctctgctgaaggctcatgaagctgaaatgtgggaagttcactttcacccatccaacccagaacatctttttacctgctctgaagatggatccctctggcactgggatgcttccacagatgtacctgaaaagtcgtcactctttcaccaaggaggaagaagcagtacttttttgtctcatagcattagtaaccaagctaatgttcaccagtctgtcattagctcctggctcagcactgatcctgcaaaagaccgaattgaaatcacaagcttacttcccagtaggtctctgtctgtgaacactttggatgttttaggtccttgtcttgtttgtggaaccgatgcagaagcaatttatgttactagacatcttttttcgtagaagtactataattataagatttcagatagaacatgcaattagccttttgaaatccaacttctgtgcaaaattttagtatcagaaaatacgagatttgcaggggaaacatcagtaaactaccattaatgtcaatgcccagttttgacttttgttagcctgacactcccaaacagttgtagaatccgatagatgactgatggcaaaagattgtgaacatgtggaagaaaatcagtgggattctggtgctgatgaataggttgccttcagagtattattgacagacagcttgtggaactaattctttatttttgatgttgtgggaattaacacatcaatggtggttatgggaactaccaatgggttcctacaatttttatcagtagtatgtggcatatacaccttcctagtggcagttgccaatgttaatgattattctttttattgcaagtatttcctatgatccttccacactttatttccttaataataataaactttttcagaaagaattgagtagagcaaaaatgacaaagatgtgtagctgtgttcaatttttttttttttttttttttgaggcagagtcttgctctgctggagtgcggtggtgcaatctcggctcactgcaacctccacctcccaggttcaagcaattctcctgcctcagtctcctgagtagctggaactacaggtgtgcgccaccacgcccagctaatttttgtaattttagtagagacagagtttcaccatgttggccaggatggtctcgatctcttgacctcatgatccacccgcctcgacctcccaaagtgctgtgattacaggtgtgagccactgcacccggcctgaaatttttttaaggtgaaaatgttttgacaagttcctttttcagaataggtttttgagcagaactctttcagcttgttagacccaactttgcttttgtttagcttcacagcatagctgaaagttgccaaactggacattgtgcaataaagtagaattctatattgataagcaaactatttccaaactaaaaatgtgatagataaaagtgtgattaatcaaatgatatgatcagagtaaagaattttgccattttgatccttttactttgttttagccacctatagtgttaccaaccatctttatccttgtctgcagggataataatgaactaatgtagtgttttaagataatttaatgatactatctttccaaactttgttagattttaaatgtattattgacctgagaccttaatgacaaatcactgctattagacaattgaagtgttcatttactttgtaattccaataatcatagttatggaattatggtaaggttttgcttttctgtcctaataaatatatatattttttgagatggagttttgctcttgttgctgaggcaggagaattgctcaaacccgggaggcagaggttgcagtgacccaagatcgtgccacttcactccagcctgggcaaaagagcaaaacgccatctcaaaaaatatacatatataaggagataaagtttcccattttccaatacagtttcacatttgaacagccctaattgatacaactttatggcagggttttagtgtgtgagtgggatccaaaacactcaatcctgtaaaagggtacagtcctattgtatgttaacacactgatgatgtgagcctgtgagatgagccaatcaccagttgttatgttcgaatctgctttgtgttgggacgctttaatgtcagggtttcactaaataaatgaattttcatatactgaaaaaaaaaaaaaaaa

SEQ ID NO: 5276 - DNA, 4300 bp, Homo Sapiens
  NM_024648
gattgctcgggcctggccgccagcccaggggccgatggccgagcgcgtcgcactcgcgtccctgcgccgtgcctgcctcgcgctccctgttacggcgttcgtccccgggcctggcgcccgcgtccggcccggctccgcggcggcctggtccgatggctcctcagcggagggccgcaaccaaggcgcccgagggcaacggagcggccgagcgccggaaccggagcagcaccaagaaggaccgagccccgcgggaggtgcagaggctgtggcagaggccgtggctaaggaccgcgggcctgggggctggctttgtgctcaccgcactcctgctctggagcagcttgggggccgacgacggggtcgcagaggtcctggcccgccgtggcgaggtcgtggcagggagattcatcgaggtgccctgctctgaggactacgacagtcaccgcaggttcgaaggctgcactccccgaaagtgcggcagaggtgtcaccgatgtcgtcatcaccagggaggaagcggagcggattcgcagcgtagctgaaaaggggctctccctgggaggatctgacggaggggcatccattctggacttgcactcaggggccctgtctgtcgggaagcactttgtgaacctgtacagatacttcggggataaaatacagaacatcttctcagaggaggacttccggttataccgggaggtgcggcagaaggtccagctcaccattgctgaggcttttggcatcagcgcatcctcgctgcatctgaccaagcccaccttcttctcccgcataaacagcacggaagcgcggacggcgcacgacgagtactggcatgcgcacgtggacaaggtgacctacggctccttcgactacacctcgctgctgtacctctccaactacctggaggacttcggcggagggcggttcatgttcatggaggagggtgccaacaagacggtggagccgagagctggtcgcgtctccttcttcacctcggggtccgagaacctacaccgcgtggagaaggtccactggggcacccgttacgccatcaccatcgccttcagctgcaaccccgaccatggcatcgaggacccagcgttcccgtagccagcagccgggccaaggtaacttcaggagggcccgtgtggaggcagccgcgccagtcgtgcacccacccccacgtccacccgctcctgttgcacagagtgccttaggaattctctgattttgatttgctgacgtgttaatcttttcatctgtgagtaaatgaagggaaccagcttttcacttctccagcatcatgtgtgcttgggctgtaggcctgggagcctgaggtggaggccaggaaagggacccagcaggacggggcacaagtccccatctgtgaatggacgggactcatccacccaggttcagcaaccccccgggactcgtccaggttcagcaaccccccggcccatcaaagactggctaaagcatcagccataaatggggacaaacgtggggccagcagcttctgttcggggtctcggcatcagcaaaccgcagcagctttggagaagggtccgtgagtggcggctctggaggcagcaacggggtcctttggggtgggtgggagttctgctggattcaggtggaggtgaacatctgccgttcccacagccctgcgtgcacccccaatgctgctggcccacaaatcaccgtgggccacggccccaccacaccaggcttggccctgtcagcggccagcatcccaagggccagggtccgagtgtcctcaccaaggaggctcttggcgtcgctgtgccggctcccatgggccttctgctgggtcgagggtaggtctcctcctccccctttgccctggcattaaactgatggtcaggctgggcgcggtggctcacacctgtaatctcagcactgcgggaggccgaggcaggaggatcacttgaggtcaggagttcaagaccagcctggccaacatggcgaaaccctgtctctactaaaaacacaaaaacaaattaatcccagctactggggaggctgaggcaggagaatcgcttgaacccagggggcagaagttgcagtgagccgagatcgtgccactacactccagcctgggtgacagagtgagactccatcttaaaaatataaaaataaagtggtggtcagaggagccccgaatagaccagttgtggagaggcctgggtggggtggctggcagggagggcaggccaagcccagtttctgcccacagtcacctcgaggtgactgtccagggctttgggcaccttcccgggagggggacggccgcccaccctgagtggtgttggaagctgggctctcctggatgccctgacccagctgcctggggagagccctgggcccctcctccctcagcacctcctccctcagcccctcctgcctcggtccctcctcccttagcctgtctggcatagatccatgttccctagcccctggcacaggtgcctctgactggaggaggccccacctgtggcccgggagctgctctgggggttgataaagggcagcattattgggtcctgggaaggagcgggcgtgaggccagctgaggcatggtgacccctgggaaggagcgggcgtgaggccagctgaggcatggtgacccctgggaaggagcgggcgtgaggccagctgaggcatggtgacccctgggaaggagcgggcgtgaggccagctgaggcatggtgacccctgggaaggagcgggcgtgaggccagctgaggcatggtgacccctgggtacgggggacttgggggccgcaccttggtttgcccagggcccctcctgcaccacgggccacatgcggaggacggcgtgggataggctccctgggtccacagcttctgcccgtgtatggggaaccctccttggtcagggctgcaggctctgggcagatggggcaggaaccctgaggctcccgcgccctcccatggcctctgatgtgggacactggagcgaggcacgattctgaaggactccatggatctgggaggatgaggcccacctccggttggtggccaaagccgtccttgcggggccggctgcttcacggacactctccgggtcgggctggtgggccccatcgtgggtgggaagtcgcctgagcctgggccgcccttgagcttctcccagtcttgactttccagagggtccgtggctgtggtcatggtcggggcaggtggaaaatgctgcatggaaacctgatcctgtcaccttggagtaaatgatgatgtcgccggcttctcgccacgtctaaaggataaatgcatttgaagaaagtgggtgttgggtttgttatgggttaaagtgcttttgaaataagtaaattattagtttgattttcattcttggctacttacactattcatgataatcacagagatacttggacaaagaaatatatttgggcaaaagcaagaatttccttctttttttttttgagacggagtctaactctgtcgcccaggctggagtgcagtggcgcaatctcggctcactgcaaggtccacctcctgggttcccaccattctcctgcctcaacctcccgagtagctgggactacaggcgcccgccaccatgcccggctaattttttttgtatttttagtagagatgggatttcaccgtgttagccagaatgaagaatttccttctgaagtgggaacatatggctcatgctggtaatcccagcactttgggaggccaaggtaggaagatcacttgagcccaggagttggagacccatctgtgcaacatagtgagacgctgtctgtacaagaaacttttaaaaaatgtagctgggcgtggcagtgtgctcctgtggtcccagctactcggagctgaggcaggacgactgcttgagcccaggaggtcgaggctacagtgagctgtgacggctccactgcattccagcctgggagacagcaagatactgtctcaaaaaaaaatttatcattgaagcctgggcattttaaaaaaataaaaaggtgggaaaatacgtgggcacagcagtgaatcctcacaccctgggctttgcccaagaagtgctcgtgaacctgatgaaagtgtcgggtgtggccgacgtgaggctgttccaggagccacgaggggtgattggttccgctagaaggttccagggaggaactggagtctcaggtgtgtcctctgatgagtgatctatttttaagtaaaagtgtttcattaaagtcaaagatgattattcctttcaaaataaagaatctaggagggcga

SEQ ID NO: 5277 - DNA, 3370 bp, Homo Sapiens
  NM_024649
acgcctgcgaagatggccgctgcgtcctcatcggattccgacgcctgcggagctgagagcaatgaggccaattcgaagtggttggatgcgcactacgacccaatggccaatatccacaccttttctgcctgcctagcgctggcagatttacatggggatggggaatacaagctggtggtaggggaccttggccctggtgggcagcagccccgcctgaaggtgctcaaaggaccactggtgatgaccgaaagcccgctacctgctctgccagctgctgctgccaccttcctcatggagcaacatgagccccggaccccagctctggcacttgcttcaggcccttgtgtctatgtgtataagaatctcagaccctacttcaagttcagcctgccccaattgcctccaaatcctctggaacaagacctttggaaccaggccaaagaggaccgaatcgaccccttaaccctgaaggagatgctggagagcatccgggagacggcagaggagcctttgtccatccagtcactcaggtttctgcagctggagctaagtgaaatggaggcatttgtaaaccaacacaagtccaactccatcaagcggcagacagtcatcaccaccatgaccaccttgaagaagaacctggctgacgaggatgctgtgtcttgcctggtgctgggcaccgagaacaaggagctcctggtgcttgaccccgaggccttcaccattttagccaagatgagccttcccagcgtccccgtcttcctagaggtttctggccagtttgatgttgagttccggcttgccgcggcctgccgcaatggaaacatctatattctgagaagagactccaagcaccccaagtactgcatcgagctgagcgcccagcctgtgggacttatccgggtacacaaggtcctagtggtgggcagcacccaagacagcctgcatggcttcacccacaaggggaagaagctgtggacagtgcagatgcccgcagccatcctgaccatgaacctcctggagcagcattcccggggcctgcaggccgtcatggctgggctggccaatggagaggtccgcatttatcgtgacaaggccctgctcaatgtcatccacaccccggatgcagtgaccagcctttgctttggccggtacgggcgggaggacaacaccctcatcatgaccactcgaggtggtggcctgatcatcaagatcctgaagcgtacagcagtgtttgtagagggaggaagtgaggtgggtcccccaccagcccaggccatgaaactcaatgtgccccgaaagacccggctttacgtggatcagacactgcgagagcgggaggctggcaccgccatgcaccgggccttccagacagacctatacctgctgcgcctacgtgctgcccgcgcctacctgcaggccctcgagtccagcctgagccccctgtccacgacagcccgagagccactcaagctgcacgccgtggttcagggccttggccccacctttaagctcacacttcacctgcagaacacctcaacaacccgtcctgtcctggggctgctggtctgcttcctgtacaacgaggcgctctattccctgccccgggccttcttcaaggtacccttgctggtgccagggctcaactaccccctggagacctttgtggagagtctcagtaacaagggcatctcagacatcatcaaggtgctggtgcttcgagaaggccaaagtgcacccctgctgagtgcccacgtcaacatgcctgggagcgaggggctggcggccgcctgagacctgagctgctgtgaaagcccctgcacaatcagccagggagaactgggcgggtttagtggccccaggcccactcctcatgcagcagtgtgctggggcgacagctcgtctcccctctcttaagcacccgcttcctcaccacccccactgttgggcctatagtagcaggttagtgagtacctagggcggctcaactcctcccacagcaccaacccagcatggtcccactgaagtcctactacgccctcccctccccagccttttccagaaaccatactgggctcagatcagagctccgaagcggtcaaagtgagctgagcaggacaggcccagcctttctccactgccacgtccctcatgcacatcactcatctcctgctgcaggccaaggccaaaattgggctagtcctggccagggaaatcagaagctcttcttgggtgagattgagcctcctgttgctccctggagttccggaggctgggctgcagcccactcagcttgcgggcaaaatacgtgctctcctctctccttgtcagctgagcaaacccagggaatagccctcctctccccaggaaacttctctgaaatcttagacttagccagtcttaggcctacgatgccacacaaaggttgttcagggagaagggggtgcaggaggcagagggtgccccgcagggagctggtggctccagccccactagagctcctaaagatcacacagcagctgctcctgacagggatgctcatgcccagaaagcaagcccaggagaggaaggcagagtgtgacagagcagagccagggccaggcgcaccaggagaggcgtttctggggctccagagaagtgccacgggaggcagaagtccagaactgcccatatagatgcccttctacatcctggagcccaaatcagtcatgtgggtgggaagttcccagggcagtggtcacatcgtgagaattagcaggaaaggcggggcctttcttgtcatagctatttctgaggatgaaatgggagacatatgcccagcacctgatgtaagtttatataatgtaatattatgtacctaccactaagaaatacatgaaccgtgccatgaggacagtaagtgttcataaagcaacatgaagcaagaaacagtgcagggtgcccagtgcacacactagagagaaattgtgaacattaaggacaaggagaattggtgtctttctaaaacatacttatttaaaaacacatacccacttactaatgtggaattacacagtttgtaacaagaaaacagtctctcccattctctagtactgctcccctacccagcagtcacttccagttcattcagctatttttaaaatgtgcttatatgactcttgcttgatatatcaatcttagacattacctgttgactccctgttgtcatacatgaggctttagctctcttttgtcagcaaccctcccccatccctagttattaggttaaaaaatactcagattactatttctattactatgtgaaagttaactgcggagccaagagttggactataattaaattaccttccttgtactttctttttaatgg

SEQ ID NO: 5278 - DNA, 2323 bp, Homo Sapiens
  NM_024650
ggaagggatgggctcgcgctgccgggcgtgggcgtggactcgggcgtgggcactggcggagttccaagcccgggctgaggagggggcggcggcggcggcggcggcggcgggcgggtacccttcgactgggcgttgccgctgttccctgcgcggcatggaggggacggccgtggccgtgttcgagattttgagatttttaataattcactggaagtgtgacatagatgtatcaaagggagcattgctagaagggcagctagtgatttccatagaaggattaaattctaagcaccaggcaaatgctcttcattgtgtaacaactagatggagtctcactctgttacccaggccggagtgcagtggcgcagtctcggctcactgcaacctccacctcccaggttcaagtgattctcatgcctcagtcccccgagtagctgggattacagatgcccaccaccatgcctggctaattatggttgcttctgcaggaagcctttttggtggcatggtcctcaagaagttcctaaaagaaatacagtccatactgcccggaatctctgcaaagctgacttggacttcagaggaaggcagctattctcaggatatgacaggggtaacacccttccagatgatttttgaggttgatgaaaagcccagaaccttgatgacagattgtctggttataaagcattttttacgtaaaatcatcatggtgcaccctaaggtcagatttcatttcagtgtaaaggtaaatggaatcctctccacagagatctttggggtggagaatgaacccactttgaaccttgggaatggaattgctcttttggtcgactcccagcattatgtgagaccaaattttggtacaattgaatcacactgcagcagaattcaccctgtgctaggacatccagtaatgcttttcatccctgaagacgtggctggcatggacttgttgggagaactgatactgactccagcagctgcactgtgccccagcccaaaggtttcttccaaccagcttaacaggatttcttcagtttccatatttctatatggacctttgggtctgcctctgatattgtcaacttgggagcagccgatgactactttcttcaaagatacctcttctttagttgactggaaaaaataccatttgtgtatgatacccaatttggatctcaatttggatagagatttggtgcttccagatgtgagttatcaggtggaatccagtgaggaggatcagtctcagactatggatcctcaaggacaaactctgctgctttttctctttgtggatttccacagtgcatttccagtccagcaaatggaaatctggggagtctatactttgctcacaactcatctcaatgccatccttgtggagagccacagtgtagtgcaaggttccatccaattcactgtggacaaggtcttggagcaacatcaccaggctgccaaggctcagcagaaactacaggcctcactctcagtggctgtgaactccatcatgagtattctgactggaagcactaggagcagcttccgaaagatgtgtctccagacccttcaagcagctgacacacaagagttcaggaccaaactgcacaaagtatttcgtgagatcacccaacaccaatttcttcaccactgctcatgtgaggtgaagcagcagctaaccctagaaaaaaaggactcagcccagggcactgaggacgcacctgataacagcagcctggagctcctagcagataccagcgggcaagcagaaaacaagaggctcaagaggggcagcccccgcatagaggagatgcgagctctgcgctctgccagggccccgagcccgtcagaggccgccccgcgccgcccggaagccaccgcggcccccctcactcctagaggaagggagcaccgcgaggctcacggcagggccctggcgccgggcagggcgagcctcggaagccgcctggaggacgtgctgtggctgcaggaggtctccaacctgtcagagtggctgagtcccagccctgggccctgagccgggtccccttccgcaagcgcccaccgatccggaggctgcgggcagccgttatcccgtggtttaataaagctgccgcgcgctcaccaagtcctcttccgcgtctgcttccgcgtcgggcccgggcggggcggggcggggcgtggagccgcgccgcggcctgacgtcacccacacctccctgggactgcgtcactggtgcgcgccgcgggtcagggcgcaatggcggcgctgggcggggatgggctgcgactgctgtcggtgtcgcggccggagcggccgc

SEQ ID NO: 5279 - DNA, 2181 bp, Homo Sapiens
  NM_024653
gtcgtcatacttgcgcgccgacgccgccgctcgcttgtgaaactggaaggctgccatggctagcccagccgcctcctcggtgcgaccaccgaggcccaagaaagagccgcagacgctcgtcatccccaagaatgcggcggaggagcagaagctcaagctggagcggctcatgaagaacccggacaaagcagttccaattccagagaaaatgagtgaatgggcacctcgacctcccccagaatttgtccgagatgtcatgggttcaagtgctggggccggcagtggagagttccacgtgtacagacatctgcgccggagagaatatcagcgacaggactacatggatgccatggctgagaagcaaaaattggatgcagagtttcagaaaagactggaaaagaataaaattgctgcagaggagcagaccgcaaagcgccggaagaagcgccagaagttaaaagagaagaaattactggcaaagaagatgaaacttgaacagaagaaacaagaaggacccggtcagcccaaggagcaggggtccagcagctctgcggaggcatctggaacagaggaggaggaggaagtgcccagtttcaccatggggcgatgacaatgtttgccacagcctctgcctggaacctggctcgtgctgtgaccagaagggaaaggcggctgtttggctctttctcccccgcaaggacccgctgacccgctggatggagagcaaaggagacccctcccgagccgctcacagtcctgtatttggcaggtttgggagcctgaggggccatctccctgacactcagaggcactgccttgcagacaccatccgtgctcctggtaaagggggacagagagcctcaccttgccacatatttgaacagtgatgagtttggggctggtttctgggaagggaacgtttatttagtaaagagcagaacacccttgcgttttgttgggacatgtggaccgtgagtcgcaaacactctggagaaggctgagatgccaccattcccacggggactgaagacacattacgtggacctggtcccaggctcagtgaggagatggcctcagctgtggggctggtccatgttgcccactcactccagtgggaagtggggaccacgccatagagggtctgctcccactgcagctcccggtgctctcgtgttctgggaaggcctgggtgtgtgcacaaggaggcccgggccagggacttcaccaggggctgggtcacaagggcacagggtgtgtggaaagcgctgtgggggaagagccggtcaccggagagtgagcaggcggagactccaagctgggctgagccagagcagaaggcgagggattcccagccggacgggggttctctcaccaacagctgtgatttcatcccgaagtggaagggggtctaaacagaacaggctgagagaggcgggactgggtcaagtgggtggagctcctccttgcatgactgcaactgtcggggctttccgccggctcacagcagttggggccagcggggagaagagaggcggaactgctgtgtcctcatgtggcgcagcctcaaactggcatccaggcactgggcccgtgcagagaaggcacctgcagagagcagggcagcccggcgcaggggcatgcgcctagaatcccagctactcggaaggccaaggcaggaggaccgcttgagtccagggattcaaggccaacctgggcaatagagcgagaccctgtctcttaaaaaacgatgatgatgaacacagaggacggggcactgtgctgggagccagggggcctgggaggagccgagaccagccttttacctcggggttttgaggccaacagggacgacagagacagtttctagttagagccttggctccatttttggatgatttagccccgagttcctgagtctattttatgccccttacgtactttgatagaactaaggaaatagtggttttgagtgaagggaaaggaaacccagaaacattttacgttgcttttacttctgtagtgtagattgccccggcccctctctgagccctgtagcatctgtgatagcttctgtcccttcatcggttcatgtcacagggattttctttcccaggaagcggacacggagagtcagccctaataaatgagcacatgccctggctgtacattttgaaacctgtt

SEQ ID NO: 5280 - DNA, 6728 bp, Homo Sapiens
  NM_024654
ggctcggaggcccctcttttcggcagctgggagggcagcggggcggaccgacgggatctcgcgagattctcgcgcggtaggccctgaggacccagcatggcggactcgggactgctgctaaagcggggttcctgccgttccacttggctgcgggtccgcaaggcccggccccagctcatcctcagccgccggccccgccgccggctcgggagcctgcgctggtgcggtcggcggcgcctacggcggcggttactgcaagcccaggcggccggcgtggactggagggagggagcccgccaggtgtcgcgcgcggcggcggcccggagacccaacaccgcgacccccagcccgatccctagcccgaccccggcctccgaacccgagtccgaacccgaactcgaatccgcctcgagttgccaccggcctctcctcatcccaccggtgcggcccgtgggccccggccgcgcgttgctgctgctgccggtcgagcagggttttacttttagtgggatctgtcgtgtgacttgcctctatggccaggtgcaggtatttggttttaccatcagccaaggccagcctgcccaagacatcttctctgtgtatacccactcttgcttgagtatccatgcacttcactactcacagcctgagaaaagcaagaaggaactgaaaagggaagcccggaatttgctcaaatctcatcttaaccttgatgacaggcgttggtcgatgcagaatttttctcctcagtgttccattgtgttgctagaacatctgaaaactgccactgtaaacttcataaccagctatccgggttcatcctacatttttgtgcaagagagtccaactccccagattaaacctgaatatttagccttgaggtctgttggcatcagaagagagaaaaaaaggaaaggccttcagttaactgagagtaccctttcagccctggaagagttagtcaatgtttcctgtgaagaagtagatggctgccctgtcattctagtttgtggatcccaggatgttggaaagtcaacatttaatagatacctgattaaccatttgttaaatagtcttccctgcgttgactatttggaatgtgatctgggacagacagaatttacccctcctggttgcatttctttgcttaatattacagaaccagttctgggaccacctttcactcacctgaggactccacagaagatggtatattatgggaaaccttcttgtaaaaacaactatgagaattatattgacatagtgaaatatgtgttcagcgcttacaagagagagtcccctctcatcgtcaacactatgggatgggtttcagaccaggggctcctgcttctcattgatctgatccgattgctgtctcccagccacgtggttcagttccgctctgaccacagtaaatatatgccagaccttaccccgcagtatgtagatgacatggatggcttgtacacaaaaagcaagaccaagatgagaaatcgacgtttcagactcgcagcatttgcagatgctttggaatttgctgatgaagaaaaagagagtccagttgagttcactggacataaactgataggtgtttatacagactttgcattcagaataactccaagaaatagagagtcacataacaaaattcttcgagatctgtccatcttgagttaccttagccagctgcagcccccgatgcccaaaccactttctcctttacatagcctgacaccctatcaggtccctttcaatgcagtcgcactccggattacccactctgatgtcgcccctacccatatactatatgctgtaaacgccagctgggttggtctttgcaagatccaggatgacgtcagaggatacacgaatgggcccatcctgcttgcccagactccaatctgtgactgcttgggctttggcatctgtagaggcattgacatggagaagcggctgtaccacatcctcacccctgtgcccccggaagagctaaggaccgtgaattgtctgctcgttggagctattgccattccacattgtgtccttaagtgccagcgtgggatcgaagggacagtaccttatgtcacaacggattacaattttaaacttcctggagcatcagagaaaattggagcaagagaacctgaggaggcacataaagagaaaccataccgaagacctaagttctgtcgaaaaatgaagtgatgctcgcgtttttaataagggaagaaactttcctaccagaaagctttgtctcaagcctgaccacaagagacatgatggagtttcatggccatgaatggtgcccttattagcaacagtgttttttgtgtaattcgtgaatgtcatatagtagtcttaagtttctcttttaaagctgcatgagctagaatttgttctagtcttctgtgtgatactcatacttgctgtccagagggagtaaaacagcagagaacagtttgtgtgccattaaaacagagattcctcagaaagttcttcagggacctggttattagaatcaggataaaaataaggaaactggggccattacaatgtaccgagaaggaaggaagaaggccgacctgcaggatctcaagcataatggatacaagggctcgccacgggccttgcctgagccatgtgcagagctggggtccagcggtctgcttccttggagccagtgtggatggttacagcccatccatttggtgcagttgtacttggtctgttatattcaatcaaggtttaatagatagggctgggcatggtggctcatgcacacctgtaatcctagcactttgggaggctgaggcgggaggattgcttgagcctcggagttccaggctggagtacaccaactactccagcctgagcgacagagtaagaccttatcttttaaaaaagaaaagaaaaatttaaacgggtttgatagatataaatttggacccaagagcccttccttttttttaatcctgaggttttatgctgaggaaatttctttcaaatctggaaaacctcggggccaggcgcagtggctcacgcctgtaattccagcactttgggaggccaaggcaggcggttcacgaggtcaggagattgagaccatcctggctaacacagtgaaactccgtctctactaaaaatacaaaaaactagctgggcgtggtggtgggcgcctatagtcccagctactcaggaggctgaggcaggagaatggcatgaacccaggaggcggagcttgcagtgagccgaggtcacgccactgcactccagcctgggcaacaagagcaagactccatctcaaaaaaaaaaaataataatctggaaaacctcttctgggggctcttataaaagtagatttgtccaaattgacttctgatctgaggccagagacaaccacagggcagagctggagactgggctgttttgaaggaagaaggactggcagaccagctcttgggaaagctccattattgcctgtgggaggctggacctgaacttgcacctatgaacaaccctgccatttagagctttttcctgggggtgccggcggctggtgaccagactgccattctccacgttctccctggtgcttccgactctgtcctctaggttggaagtggtttgtgtaaacgggtgatgggaccaggtcacatcatttctgcatttaagacagcaggatacttcctggggctgaggttcaaactggtattgtgaccaccgctttgacagaattccatcttcccagcatgatcacattgtaagactattaggatgtgtgggttttaacacttatatacacttatacaactgttggttatcattgtctttagtattttacagtggcccctcagcacctcttagacccaacagcaaaggacttaaaataagcacaggaaaccttgctatggtgattagttttgatacctttgagacaattgagtctagcttcttagttgccccttatttatgttgaaatctggctcattcatatgatgttttactgtgctggccttgtaaagaattttaagacaatccatcaccatcaatgttttgcctttctccactttcgtgtatcttacagttatactcactggaggtcatttgcagcaaggctctggaagaatgaaactggtgccctgtaattgcatttgcattcaatctaggtttgccttcaggctttaaatgcggcctgtatgaaggtcaagtctttttcttcagtccctatcagtaaagaaaaatcgttgcctctagagggagctatcagctgtgggtcaggtggccgtactggggctagagttggcccaggaagctgtacagggtttagggaaggaggttcggagacagggagccaaggcctctgtcaggtctagcttgtgccggtcagacctgcagcagcaccattctccaggatgacaattcatcccattattgatggcagtggcctttttatccttttttttttttttttttttttttgagatggagtttcgctcttgttgcccaggctggagtgcagtggcgcaatctgggctcactgccacctccgcctcccgggttcaagtgattctcttgcctcaacctcccgagtagctgggattacaggcatgcgccaccatgcctggctgattttctatttttagtagagaaggggtttcaccatgttggccaggctggttttgaactcctgtcctcaggtgatccacctgccttggcctcccaaagtgttgggattacaggcatgagccaccgcacccggctggtggcagtggctttaagggcatttagaagaaggacaagattggactttttatcatttccacagtctgttatgggtcagattaggtagtaaggagttctccattggagctattcttttttttttttctttttttttgagacagagtctcgctctgtcacccaggctggggtgcagtggcacgaccttggctcactacagcctctcccctcccgggttcaagtgattcttctgccccagcctcccaagtagctgggattacaggtgagcgccaccatgcctggctaatttttatatttttagtagagatagggtttcaccgtattggctaggctggtctcgatctcctgaccttgtgatccgcttgcctcggcctcccaaagtgctgaagcaatttcttttttttttttttttttgagacagagtctagctctgtcgcccaggctggggtgcagtggagtgatctcggctcactgcaacttccgcctcccaggtttaagcgattctcctgcctcagcctcctgagtagctgggattacaggcgtatgccaccacgcccagctaatttttgtatttttagtagagacagggtttcaccatgttggtcaggctggtctcgaactcctgacctcgtgatccgcccgccttggcctccgaaagtgctgggattacaggcgtgagccactgcgcctggcctgaagctattctttacaaaagctcttagtttttgtttgtttgtttgtttttttcttttgcgacggactctctgtcgccaaggctggagtgcagtggcctgatctcaggtcactgcaacctctgcctcctgggttcaagcgattctcctgcttcagcctcccaagtagctgggattacaggcgcctgccaccacacccagctaatttttgtatttttagtagagatggcgtttcactttattggtcaggctggtctcgaacttccaacctcaggggatccgcctgccttggcctcccaaggtgttgggattacaggcataagacactgtgcctgggcctcttagtaatttttgtatgtaattttcaaagtatccgggattacaggcgcccgccactacactagctaattttttttgtatttttagtagagatggggttttactatgttggctaggctggtctcgagctcctgacctcgtgatccgtccaccttggcctcccaaagtgctgggattacaggcgtgagccaccgcgcccggcctaggtcatttgtttttgggtttggatggcaagatcatggataagacagcaggctttgattatagagctctgagttcaaatcctggctctaccacttgtcagtggtgtaacttggaggaagatgcttagcctgagcctgttttatgttttgaagattgggtaattgtccttccttcagtgttcctgggtgaggagtaagtgaagtcatgtctataagagatgtagcacagtctccggcatgtagaaacggtcagtaactcctagtgtgtagctagcctctgatgagatggtaaactcaggaggctggcaccacggctgtgctactcacggtcatgctggagggatgcagaaactaaatgaatccacagctacttactcatcttgcctctggcaggttcaccttaaaattgttgctaccaagcttcctgtggtcaaagagcccttgaggaagcaagctccacggccaccatagataacccattcctgaaagtttttcataaacccccacttgttgcttttaaaattttataagcagcttacacatgtagaaaatgatcctccagcccaccaccacatagtaatcactgacactgtgaggtgtctcagctggggttctgctgtgtgtgtgtgtattttacaaaatatgtatggtttctgttcagctcttttcagttaacagatgaacttttgtatcattaaatatttttgaaaacatgaaaaaaaaaaaaaaaaaa

SEQ ID NO: 5281 - DNA, 3593 bp, Homo Sapiens
  NM_024656
acgcgtggcgcgatggcggcggccccacgcgcgggccggcggcgcgggcagccgctcctggcgctgctgcttctgctgctggcgccactgccgccgggggccccgccgggcgccgacgcctactttcccgaggagcgctggagcccggagtcgcccctgcaggcgccgcgcgtgctcatcgcgctgttggcgcgaaacgcggcccacgcgttgcccaccacgctgggcgcactcgagcggctgcggcacccgcgggagcgcacggcgctatgggtggctacggaccacaacatggataacacgtcaactgtgctgcgggagtggctggtggccgtgaagagtttgtaccattccgtggagtggcggccagcagaggagcccaggtcctacccggacgaggaaggcccgaaacactggtctgactcacgctacgagcatgtcatgaagttgcgccaggcagccctgaaatcagctcgagacatgtgggctgattacatcctgtttgtagatgcggacaacctgatcctcaaccctgacacactgagcctgctcatcgctgagaacaagacggtggtcgcccccatgctggattcccgggctgcgtactccaacttctggtgtggaatgacttcccagggctactacaagcgcacacctgcctacatccctatccgcaagcgagaccgccggggctgctttgcagttcccatggtgcactcgaccttcctgatcgacctgcggaaggcggcgtccaggaacctggccttctacccacctcaccctgactacacctggtcctttgacgacatcatcgtctttgccttctcctgcaagcaggcagaggttcagatgtatgtgtgcaacaaggaggagtacggattcttgccagtgccattgcgcgcccacagcaccctccaggatgaggccgagagcttcatgcatgtgcagctggaggtcatggtgaagcacccgcccgcagagccctcccgcttcatctcggctcccaccaagacaccggacaagatgggcttcgacgaggtcttcatgatcaacctgaggcggcggcaggaccggcgggagcgcatgctgcgggcgctgcaggcacaggagatcgagtgccggctggtggaggccgtggacggcaaagccatgaacaccagccaggtggaggcgctggggatccagatgctgcctggctaccgggacccctaccacggccggcccctcaccaagggtgagctgggctgcttcctgagccactacaacatctggaaggaggtggtggaccgggggctgcagaaatcgcttgtgtttgaggatgacctgcgttttgagatcttcttcaagagacgtctgatgaacctcatgcgggatgtggagcgggagggcctggactgggacctcatctatgtgggccggaagcggatgcaggtggagcaccccgagaaggctgtgcctcgcgtgaggaacctggtggaggccgactattcctactggaccctggcctacgtgatctccctgcaaggcgcccgcaaactgctggctgctgagccgctctccaagatgctgcctgtggacgagttcctgcccgtcatgttcgacaaacacccagtgtccgagtacaaggcccacttctccctccgcaacctgcatgccttctctgtggagccgctgctcatctaccccacacactacacaggagacgatggctatgtgagtgacaccgagacctcagtcgtatggaacaatgagcacgtcaagaccgactgggaccgcgccaagtcccagaagatgcgggagcagcaggcactgagccgtgaggccaagaactcggacgtgctccagtccccactggacagtgctgcccgggatgaactctgaggggtagcagccagaaagccaaagcagccatcggtggcccaggctccacgtgcttactgaggacatcagggccacctctggaccccttggcaggccacagagggctctcgtgtggggtggtgtccagccagctcttgctaagcaatcacgtgcacacaggcagcattaatggagtgcctactgcatgccagcaacagggcttggccctggggaattgggaggaaccaagccctcttcatctgttcatgtgcccagcatttattaagcacctgctgtatgcaaggttcccatgttacggcagtgaatgaggcataattgttccctccatcagcgattgattcagtcatcaagcagttactgatcagattaagaatcaggcactagtgatacacattcatttttaaaattcattcaaggatttattgagtgcctactgtgtgttgggtgccattccaggctctgggatttttttttttttttttttaagagtagagtctgtctctgtcacccaggctggagtgcagtggtgtgacggctcactgcagcctgcgcctcccagcgtccagcaattcttgtttctcggcctcccaagtagctgggactataggtgcgtgccatcacatctggctagtttttgtatttttagtagagacggggtttcaccatgttggccagactggtctcgaactcctgacctcaagtgatctgcccgccttggccacccaaagtgctagggttacaggcatgagccactgtgcccagcccaggctctgggaatattgagataaataagatgcttctatccatttattcaagcacatattggtcacctactgtgtgcctggcactcatgtcacaaagataagttcctgattcggtacacttactgagcacctgctgtgtgcagggagctgagctatgggatgggaatgggagtaaacaaggtacttttcacttttttctttttttcctcactgctagacggtgtgggaacttctcactcattggcttctttcccacacacctgaagagcactgactgtgtgccgggcactagtgatacaaaagagtgtgacagttgttcagtctgcattttcgatcatgggctacatgccgagtgctggggcacagagatgaacaagatcggttccttcacttcttcatgccacaagtgtttattgagcacctgtgtgccaggcctcacagactcccagttgggttgaagaatggttgactgagtttgattcttcctgtaccctcggtcgtctgagctgtgtgcggacaacatccccccaccacccaagagggagggtagctcttccgccaccaggggcaagcacaggtcctggtggccccacgccacatgttagcccccctggagggggcgccagttggagacgggggctgggtgtccctggcccactcccagtcccctgtgctttacctccttgcccttgtgtctcaggtgtggtccctgcctgcttgatgaagttgctctgttcaagcctttggtgggatcatgtgtttgggggcttttaggggacccagctgcactggggcactgcccgtggcctgggtaggacatttcccagcaagggctggaggagttgccgtgccttcagcctgaatcgaatgtcagaaccagccagcggtgcttcaccctcttggggataacttgcttagttttttaataaatgttcctggttggttttc

SEQ ID NO: 5282 - DNA, 3606 bp, Homo Sapiens
  NM_024658
gaattgaatcaccttggcaacccgcggggcgtgcagcaacgccctttcctccggaagtgggtgtcagaacctccacgtgctgtccctccccctccccttttcggcccagtagcggcggctcagttgctgccatggagtcagccgggctagagcagctcctacgggagctgctgctaccggacaccgagcgcatccgtcgggccacggaacagctccagatcgttcttcgggcccccgccgctttgccggctctctgcgacctgctagcctcggcggccgacccccagatccgccagtttgcggccgtgctgacccgcagacgactgaacacccgctggcgacggctggcggcggagcaacgggagagcctcaagtccctgatcctgacggccctgcagagagaaacagagcactgtgtgagcctcagcctggcccagctctcagccaccatttttcgaaaggaaggcttggaggcctggccacagcttttgcagctgcttcagcacagtacccacagcccccacagcccagagagagagatggggcttttgctgctaagtgtggtggtgacctcccggcccgaggccttccaaccccaccaccgggagcttcttcggcttctgaatgagactcttggtgaggtgggctctcctgggctgctcttctactccctgcgcactctgaccaccatggctccctacctcagcactgaagatgtgcctctcgctcggatgttggtgcccaagctgatcatggccatgcagactctgatccccatagatgaggcaaaggcctgtgaggcccttgaggctttggatgaactgttggagtcagaggtgccggtcatcaccccctacctctctgaagtcctcacattctgcctggaggtagctagaaatgtggccctgggcaatgcgatacgcatacgtattctctgctgcctcactttcttggtcaaagtcaagagcaaggccttactgaagaatcgtctcctgccacccttgctgcacacccttttccccattgtggctgctgagcccccaccaggccagttggatcccgaggaccaggattcagaagaggaagagttggagattgagctgatgggggagactcccaagcatttcgctgtacaagttgtggacatgctggcactacacctgccccccgagaagctctgtccccagctgatgcccatgttggaagaggctttgcggagcgagagcccataccagcgcaaagctggactcctggtgctggccgtgctgtctgacggagctggcgaccacatcaggcagagactgctgcccccactgctgcagattgtgtgcaagggcctggaggacccctcgcaagttgtacgcaatgctgcgctgtttgccctgggccagttctcagaaaacctacagccccatatcagcagctattcaagggaggtaatgccactgctcctcgcctacttgaagtcggtgcctcttggacacacacaccacctagccaaggcctgctatgccctggagaattttgtggagaacctagggcccaaggtgcagccctaccttccggagcttatggaatgcatgctgcagcttctgaggaaccccagcagtccccgggccaaggagctggctgtgagcgccctgggagccattgctacggctgcccaggcctcgctgctgccctacttccctgccatcatggagcacctgcgggaattcctgttaacaggccgtgaggaccttcagcctgtgcagatccagagcctggagacactgggggtgctggcacgagcagtgggggagcccatgaggccgctggctgaggaatgctgccagctgggtctgggcctctgcgaccaggtagacgaccctgacttgcggcgctgcacgtacagcctatttgcagccttatcgggtctgatgggtgagggcctggcgccccacttggaacagatcaccacgctcatgctgctgtcactgcgttccaccgagggcattgtgcctcagtatgacgggagcagctccttccttctgtttgacgatgagagtgatggggaagaagaggaggagctcatggatgaggatgtggaagaagaggatgactcagagatctcagggtacagcgtggagaatgccttcttcgatgagaaggaagacacctgtgctgccgtgggggagatctctgtgaacaccagtgtggccttccttccatacatggaaagtgtctttgaagaagtatttaaactgctggagtgccctcacctgaatgtgcggaaggcagcccatgaggctctgggtcagttttgctgtgcactgcacaaggcctgtcaaagctgcccctcggaacccaacactgctgctttgcaggctgccctggcccgagtcgtgccatcctacatgcaggcagtgaacagggagcgggaacgccaggtggtgatggccgtgctggaggccctgacaggggtgctccgcagctgtgggaccctcacactgaagccccctgggcgcctcgctgagctctgtggcgtgctcaaggctgtgctgcagaggaagacagcctgtcaggatactgacgaggaggaggaagaggaagatgatgatcaggctgaatacgacgccatgttgctggagcacgctggagaggccatccctgccctggcagccgcggctgggggagactcctttgccccattctttgccggtttcctgccattattggtgtgcaagacaaaacagggctgcacagtggcagagaagtcctttgcagtggggaccttggcagagactattcagggcctgggtgctgcctcagcccagtttgtgtctcggctgctccctgtgctgttgagcaccgcccaagaggcagaccccgaggtgcgaagcaatgccatcttcgggatgggcgtgctggcagagcatgggggccaccctgcccaggaacacttccccaagctgctggggctcctttttcccctcctggcgcgggagcgacatgatcgtgtccgtgacaacatctgtggggcacttgcccgcctgttgatggccagtcccaccaggaaaccagagccccaggtgctggctgccctactgcatgccctgccactgaaggaggacttggaggagtgggtcaccattgggcgcctcttcagcttcctgtaccagagcagccctgaccaggttatagatgtggctcccgagcttctgcgtatctgcagcctcattctggctgacaacaagatcccaccagacaccaaggccgcactgttgctgctcctgacgttcctggccaaacagcacaccgacagctttcaagcagctctgggctcactgcctgttgacaaggctcaggagctccaggctgtactgggcctctcctagactgcaggctgcagccagtccagagagaatagagcctgcccaggccttaagaccacctctcagcccagttcagttctgccttaccaaagattctgagactcatacccatttggagccagccccacttgctgccttacagggctgtccctgaggctggatctgttacaaatgagtcatgacatcatactgtaataaaagcagcttgttttctgcttgaacaataaaaaaa

SEQ ID NO: 5283 - DNA, 2419 bp, Homo Sapiens
  NM_024659
gtctggctagctgtccctaacgtcatttcctggtctcaactctttaagaccctgacatactctgagattggagtgaagatttctgtgacatgctgggtatctctgcattagccagattggacatatgtaaagggacatcagtatatctggatcatcagattgtgcttcaagaagaccatagggaagaacgcattttcatcttgctgcaaaagttgcaatagaagatctgaaggtttgaatgggccaatgagtatcctcatcattgaagcattctatggaggctcccataaacagctggtggatcttcttcaagaagagttaggagactgtgtcgtttatacccttcctgcaaagaaatggcattggagagcccggacatctgctttatatttctctcagaccattcccatcagtgagcattacaggaccctctttgcaagttcagtgcttaacctgaccgaactggctgcccttcggcctgaccttgggaaactgaaaaagattctgtattttcacgagaaccagttgatatatcctgtcaagaaatgtcaggagagggatttccaatatggatacaaccaaattctttcatgcctggtggctgatgtggttgtattcaactcagtttttaatatggaatcatttctcacttccatgggaaaatttatgaagctgattcctgatcacagacccaaggatctggaaagcatcatcagacccaagtgccaagttatttactttcccatcaggtttcctgatgtgagcagattcatgcccaagcacaaaacaacccatttaaagaagatgctcggccttaaaggaaatggcggtgcggttctgtccatggcccttccttttcagccagagcagagagattcagaggatttattgaagaattttaattcagagtgtgatacacactgtggccttgatactgcacgacaagaatatttgggtaactcattaagacaggaatcagacttgaaaaaatccacctcgtcagataattcaagctctcatcatggtgaaaataaacaaaatctgactgttgatccctgtgacattttgggtggagttgataatcagcaaagactgctacacattgtctggcctcacaggtggttggaagctgtgtactgtgggtgttacccactttgtcctaaagatttggtttatcccgaaatatttccagctgaatatctgtattctacacctgaacagctttcaaaaaggctccagaatttctgcaagagaccagatattataagaaaacatctctataagggtgaaatcgctccgttttcttgggcagccctacatggtaaattcaggtctctgcttacaacagaacctagggaagatttgtgacagatggggctaagtcacaaacttgcagcctaaggcagaatctgaagaactttccagagtgtgcccatatttacctgatcagagagaaaagaaaatctgcagaggaagctgagcctggctgcttgtcatagctgacacagagccatctgccacaaacctgtggcggcttcagatctccaatccctgccaccaccccaactcaaattaaatacagattcctagagacgttatgatggttacacatgtcctcggcatcacatgtaggagactgttcaaaaaaaatatgtggcctgttgtataaccgcactcatgtatcccatatgtggtgccacattgaatttccggttgaatccgtttttatcctttgtactggatgacatggtgcctgaattctttcttttcgccgacacgatggcagccaaactgcagcttcaaacgctcacacttggctgggtttctacctaggttgccaggttatcatcggagccttcttgtgtcctcaaagggccacgaggcctgaaaggaggatcagaatgctttgggattaattgggcagccatcgcagaattgtttgtgggcaaagggctgctttagcacttttcttttagcaaattaatgactctcaggcacagggggttttaagtgaaggtattaataagaggtctggcaggtattcccatgattcacagagttacatttgcatttaattaatcttaaagttgcaagataaacagctgtaattcggacaaacatgacaaacacagtgaagccaactatcccataaaatgaacactgacatacttgttttaatttttttcccagcgtaaaaatagaaaaatcaaaatactcctaacaaaaccagtgattttgatagaaatatttctccaatatacttgcatccacctacaaatataaccttttcaagataaatcgcttatgatttcaatagtcaaactgctgtgtttgttgatgtaaagatgttttgaatggctagatggtaaaataaattcttaataaagtacccactgcaatttttaaaaaaaaaaaaaaa

SEQ ID NO: 5284 - DNA, 1506 bp, Homo Sapiens
  NM_024661
agacgattggtcgggccacgccagatctcaggatgatggggcgcagccctgggtttgccatgcagcacatcgtgggtgtgccccacgtactggttcggaggggcctccttggaagggacctcttcatgaccaggactctgtgcagcccaggcccaagccagcccggagagaaaagacctgaggaggtggccctggggctgcaccaccgcctcccagcactgggaagagccctggggcacagcattcagcaacgagcgacctccacagccaagacttggtgggacagatatgaagagtttgttggactcaacgaggttcgagaggcccagggaaaggtgacagaggctgagaaagtgttcatggtggctcgagggcttgtccgagaggctcgggaggacttggaagttcaccaggccaagctgaaggaggtgagggaccgcttggaccgtgtctccagggaggacagtcagtacttggaactggctactctcgagcacaggatgctgcaggaggagaagaggcttcgcacagcctatctgcgtgcagaagactctgagcgagagaagttctccctcttctctgcagctgtgcgggaaagtcatgagaaggagcgcacaagggctgagaggaccaagaactggtccctcattggctcagtcctgggggccctgattggtgtggctggctccacctatgtgaaccgtgtgcgactacaggagctgaaggctttactcctggaggcgcagaaggggcctgtgagtctccaagaggccattcgagaacaggcgtctagctactcccgccagcagagggacctccacaatctcatggtggacttgaggggcctggtacatgctgctgggccagggcaggactctgggtcacaggcaggtagtcccccgaccagagacagagatgtagatgtcctttcagctgccttgaaagagcagcttagtcattccaggcaagtccattcatgtctagaaggcttacgagagcagcttgatggcctagaaaagacttgtagccaaatggctggggtggttcagcttgtaaagtctgcagcacacccaggcctggtggaaccagcagacggggctatgcccagcttcttgctggagcaggggagcatgatcttggcactgtcagacacggagcagagactagaagcccaagtcaacaggaacaccatctatagcaccctggtcacctgtgtgacatttgtggccacactgcctgtgctctacatgctattcaaagccagctaacccctggcccctcctccagagggtctgaggcaatagctgtgaatgtggatttaagtagagaatcgtagcaatgaagcgagcctttgggggcatgtacaacctcaatctgaaggagcagtatctgtgtggctcaccagcaggcatgcttcgctttgtagacaaggttcatttacattaattatcaaaactttgtgctaatgtccaattaaaatatcctgagttttattatttaaaacaa

SEQ ID NO: 5285 - DNA, 4058 bp, Homo Sapiens
  NM_024662
gaggaaggtcccttctcgctcgccatctctgcgactttaatgcgcttgcgcacgtgctgtctaccagttcctgagagggacgcgtgccgcggagccaggcttactacgtgacccggacaccaggcatacgctaggggcagtcagctgtgccttctctttcggagttgttccgtgctcccacgtgcttccccttctccactggctgggatcccccgggctcggggcgcagtaataatttttcaccatgcatcggaaaaaggtggataaccgaatccggattctcattgagaatggagtagctgagcggcaaagatctctctttgttgtagttggggatcgaggaaaagatcaggtggtaatacttcatcacatgttatccaaagcaactgtgaaggctcggccttcagtgctgtggtgttataagaaagagctggggtttagcagtcaccggaagaaaagaatgcgacagctgcagaagaaaataaagaatggaacactgaacataaagcaggacgacccctttgaactcttcatagcagccacaaacattcgctactgctactacaacgagacccacaagatcctgggcaataccttcggcatgtgtgtgctgcaggattttgaagccttaactccaaacttgctggccaggactgtagaaacagtggaaggtggtgggctagtggtcatcctcctacggaccatgaactcactcaagcaattgtacacagtgactatggatgtgcattccaggtacagaactgaggcccatcaggatgtggtgggaagatttaatgaaaggtttattctgtctctggcctcttgtaagaagtgtctcgtcattgatgaccagctcaacatcctgcccatctcctcccacgttgccaccatggaggccctgcctccccagactccggatgagagtcttggtccttctgatctggagctgagggagttgaaggagagcttgcaggacacccagcctgtgggtgtgttggtggactgctgtaagactctagaccaggccaaagctgtcttgaaatttatcgagggcatctctgaaaagaccctgaggagtactgttgcactcacagctgctcgaggacggggaaaatctgcagccctgggattggcgattgctggggcggtggcatttgggtactccaatatctttgttacctccccaagccctgataacctccatactctgtttgaatttgtatttaaaggatttgatgctctgcaatatcaggaacatctggattatgagattatccagtctctaaatcctgaatttaacaaagcagtgatcagagtgaatgtatttcgagaacacaggcagactattcagtatatacatcctgcagatgctgtgaagctgggccaggctgaactagttgtgattgatgaagctgccgccatccccctccccttggtgaagagcctacttggcccctaccttgttttcatggcatccaccatcaatggctatgagggcactggccggtcactgtccctcaagctaattcagcagctccgtcaacagagcgcccagagccaggtcagcaccactgctgagaataagaccacgacgacagccagattggcatcagcgcggacactgcatgaggtttccctccaggagtcaatccgatacgcccctggggatgcagtggagaagtggctgaatgacttgctgtgcctggattgcctcaacatcactcggatagtctcaggctgccccttgcctgaagcttgtgaactgtactatgttaatagagataccctcttttgctaccacaaggcctctgaagttttcctccaacggcttatggccctctacgtggcttctcactacaagaactctcccaatgatctccagatgctctccgatgcacctgctcaccatctcttctgccttctgcctcctgtgccccccacccagaatgcccttccagaagtgcttgctgttatccaggtgtgccttgaaggggagatttctcgccagtccatcttgaacagtctgtctcgaggcaagaaggcttcaggggacctgattccatggacagtgtcagaacagttccaagatccagactttggtggtctgtctggtggaagggtcgttcgcattgctgttcacccagattatcaagggatgggctatggcagccgtgctctgcagctgctgcagatgtactatgaaggcaggtttccttgtctggaggaaaaggtccttgagacaccacaggaaattcacaccgtaagcagcgaggctgtcagcttgttggaagaggtcatcactccccggaaggacctgcctcctttactcctcaaattgaatgagaggcctgccgaacgcctggattacctgggtgtttcctatggcttgacccccaggctcctcaagttctggaaacgagctggatttgttcctgtttatctgagacagaccccgaatgacctgaccggagagcactcgtgcatcatgctgaagacgctcactgatgaggatgaggctgaccagggaggctggcttgcagccttctggaaagatttccgacggcggttcctagccttgctctcctaccagttcagtaccttctctccttccctggctctgaacatcattcagaacaggaacatggggaagccagcccagcctgccctgagccgggaggagctggaagcactcttcctcccctatgacctgaagcggctggagatgtattcacggaatatggtggactatcacctcatcatggacatgatcccggccatctctcgcatctatttcctgaaccagctgggggacctggccctgtctgcggctcagtcggctcttctcttggggattggcctgcagcataagtctgtggaccagctggaaaaggagattgagctgccctcgggccagttgatgggacttttcaaccggatcatccgcaaagttgtgaagctatttaatgaagttcaggaaaaggccattgaggagcagatggtggcagcgaaggatgtggtcatggagcccacgatgaagaccctcagtgacgacctagatgaagcagcaaaggaatttcaggagaaacacaagaaggaagtagggaagctgaagagcatggacctctctgaatacataatccgtggggacgatgaagagtggaatgaagttttgaacaaagctgggccgaacgcctcgatcatcagcctgaaaagtgacaagaaaaggaagttagaggccaaacaagaacccaaacagagcaagaagttgaagaacagagagacaaagaacaaaaaagatatgaaactgaagcggaagaaatagtgaagagaaactcgggcatctgtgtttgatcatgggaagatactctcactaactgaaccctctctggctggactgttaaaagcaacgagaggccccggcacacctggaagctggccgcgaattcggcctctgggcctgtgtgtctgtgagctcaacctggctaaaggcagagtcactcccaaatgggtctctttagaacttgatggctgggcactgccatctctagaattgccacgagtctctctcttcctgcccagtccagggccctcctttcctataagttcatattttgctttgagccagctttttagtctcattcccacacatgtggaagccacgttgcctctcgaccgcctgaggcccttaagtacatcgctttctggtggtgcccaggaggctgctgctgggccgctgggtctctctttgtggacttgtacctggagcaggaggaactccagtccgtcccggcatccatggcagcccgcggttaggtgcgccagggtttgctgatgttgtcttgtgctgttccactcttggctccagcagacccactgtcccagaaaagcctgatcctgtagtttatgtagaatgccacatctgcgtcctcaagacctgtttcatccatttgggaaaagatgttgggaaaggccactttgctcgcaggggtgaggggaaggatagagaatctatttttaataaataacattctagaaagatcaaaaaaaaaaaaaaaaaa

SEQ ID NO: 5286 - DNA, 2502 bp, Homo Sapiens
  NM_024669
acatgctctgtctggccctgtgaatcctcactcacccattcagatttctgttggtgtaaagcgacattccagctgctgaagctccgtgatctgctgtgtttttccagcccagatccaagagacctggatgctttttgccattctgatggtaaatgatgagacaggctaccatggatttcagcaccccttctgtgtttgatcagcaaagaggtgactcatctgaggaagttgacctgaccatggtttatcaagcagcctctaatggagatgtcaatgctctgactgcagtgattcgggaagacccttctatcctagaatgctgtgacagtgaaggatgcacgcccttgatgcatgcggtttctggacgtcaagcggacacagtgaagctgctgttgaagatgggagccaatattaacatgcaggatgcttatggccgcacaagtttatgcctggccacctacctgggctggcttgaaggctgtgtgagtctactcagaaacggtgccaagcacaatatcccagataaaaatggccgcctgccactgcatgctgccactgctgagcccgatatgaggctcctcacggtcctgttgcaacagtcgaacatcagcgagattaatcaccaggacaatgagggaatgacaccactccactgggcggctttccacaaccagcctcaacacacacaaatgctgctgaagaagggggcagaccccacccttgtggataaagactttaaaaccgctctccactgggcagtccagagtggaaataggattctgtgctccatcattctgagccatcaccaggggccgtccataatcaactatgatgatgagagtgggaagacatgtgtacatatcgcagcggcagcgggcttcagcgatattattcatgagctggcaagagtccctgagtgtaacctgcaggctctggatgtggatgacaggacacctctgcactgggctgcagctgcagggaaggccgaatgtgtccagtcactgctggagttgggaatggacagcaacctgcgggacatcaatgagagcacgcccttggcctatgccctgtactgcggtcacacggcgtgtgtcaaactcctctcccaagagagcagaacagagcctactcgaccccctccctcccagagcagtcggccccagaagaaggagagacggttcaacgtgctcaaccaaatattctgcaaaaacaagaaagaagagcagagagcccatcagaaggatcccagcagggaccgatacagagaggaggacacctcagaagtcaatgacatcatcaccacctttgatagcatcgtgggtaccaactgccaagaacagcctggtgatcaggtggctatggttgaatttaagaagaaaacctcagacaattcaaaatatctcttaccagaaaagaaaccgctggcccgtaaggggcttccaccaatcagaacgcagagtctcccacccatcaccctgggcaataacttcctaacagcctcccatagggccacttcccatgcaggcctgagctctgctcctcatcatatggcccagcgatctcagaaaagtcgaagtgagcaggatttattaaataacagaactggctgccagatgttactagataacccctggaagagtgattctaatcaggtattttcctacaaagtttggactgtgtcttcttctgataagctgctggacagattgctcagtgtccggcctggtcaccaagaggtctccgtgccaccacaccttcgccatctacataatccatcatcaggacaaaattttcagcatctttccccaaacagacacaaaatcagggatcttcctttcactcggaacaacctagctcccctaccagatcaaaaatttctatctggagaacctctgcggacaaaccgagtgcttcctgcaattccaagtcaacgaagacacagcacagcagcagaagagagtgaacattctgccaaccccaccagtgatgaaaattaactgtgggccactcgctgcagaaatgtagatgaatatgtattttcaactctcaaaggacaagattactccagtttgtaagaacgaagaccaatttagtaagctgcattctataagccatcagttttataactcgaaattctttattccaaataaagatactccctaaataagcacttagaatatttgggtgtgcatattaagtctgtgaatttctgtgacttccacatgccaaaattaaaagacaaaatatgttatcagtaggaaaactgagctatgtttggtttgctttgtggcatgtgcactgtttttttgttattgttctttggttgtttttttgctgaatgattttatgttttgggaaaaaaagtacgctttgctgaataaaagcaaaaaacaaaacaaaaaaaaaaccacatcccagacaaacatgtcttcacatttattgtcattctaacttgaactaatgaaacctatttaaaaataaattcctatgatcagtcacaaa

SEQ ID NO: 5287 - DNA, 4069 bp, Homo Sapiens
  NM_024675
gcaggccgaatggtggatttaattggccggagtttagggcgcgcttggcccgcgtgggtcagctgatcgcgcactgagggtgcgatcccgggctccccattccttcctggggcgcctccccggcccagggccaactgggtcccggtgtcggcaggcctggggtcggcgacggctgctcttttcgttctgtcgcctgcccgatggacgagcctcccgggaagcccctcagctgtgaggagaaggaaaagttaaaggagaaattagcattcttgaaaagggaatacagcaagacactagcccgccttcagcgtgcccaaagagctgaaaagattaagcattctattaagaaaacagtagaagaacaagattgtttgtctcagcaggatctctcaccgcagctaaaacactcagaacctaaaaataaaatatgtgtttatgacaagttacacatcaaaacccatcttgatgaagaaactggagaaaagacatctatcacacttgatgttgggcctgagtcctttaaccctggagatggcccaggaggattacctatacaaagaacagatgacacccaagaacattttccccacagggtcagtgaccctagtggtgagcaaaagcagaagctgccaagcagaagaaagaagcagcagaagaggacatttatttcacaggagagagactgtgtctttggcactgattcactcagattgtctgggaaaagactaaaggaacaggaagaaatcagtagcaaaaatcctgctagatcaccagtaactgaaataagaactcaccttttaagtcttaaatctgaacttccagattctccagaaccagttacagaaattaatgaagacagtgtattaattccaccaactgcccaaccagaaaaaggtgttgatacattcctaagaagacctaatttcaccagggcgactacagttcctttacagactctatcagatagcggtagtagtcagcaccttgaacacattcctcctaaaggtagcagtgaacttactactcacgacctaaaaaacattagatttacttcacctgtaagtttggaggcacaaggcaaaaaaatgactgtctctacagataacctccttgtaaataaagctataagtaaaagtggccaactgcccacaagttctaatttagaggcaaatatttcatgttctctaaatgaactcacctacaataacttaccagcaaatgaaaaccaaaacttaaaagaacaaaatcaaacagagaaatctttaaaatctcccagtgacactcttgatggcaggaatgaaaatcttcaggaaagtgagattctaagtcaacctaagagtcttagcctggaagcaacctctcctctttctgcagaaaaacattcttgcacagtgcctgaaggccttctgtttcctgcagaatattatgttagaacaacacgaagcatgtccaattgccagaggaaagtagccgtggaggctgtcattcagagtcatttggatgtcaagaaaaaagggtttaaaaataaaaataaggatgcaagtaaaaatttaaacctttccaatgaggaaactgaccaaagtgaaattaggatgtctggcacatgcacaggacaaccaagttcaagaacctctcagaaacttctctcattaactaaagtcagctctcccgctgggcccactgaagataatgacttgtctaggaaggcagttgcccaagcacctggtagaagatacacaggaaaaagaaaatcagcctgcaccccagcatcagatcattgtgaaccacttttgccaacttctagcctgtcgattgttaacaggtccaaggaagaagtcacctcacacaaatatcagcacgaaaaattatttattcaagtgaaagggaagaaaagtcgtcatcaaaaagaggattccctttcttggagtaatagtgcttatttatccttggatgatgatgctttcacggctccatttcatagggatggaatgctgagtttaaagcaactactgtcttttctcagtatcacagactttcagttacctgatgaagactttggacctcttaagcttgaaaaagtgaagtcctgctcagaaaaaccagtggagccctttgagtcaaaaatgtttggagagagacatcttaaagagggaagctgtatttttccagaggaactgagtcctaaacgcatggatacagaaatggaggacttagaagaggaccttattgttctaccaggaaaatcacatcccaaaaggccaaactcgcaaagccagcatacaaagacgggcctttcttcatccatattactttatactcctttaaatacggttgcgcctgatgataatgacaggcctaccacagacatgtgttcacctgctttccccatcttaggtactactccagcctttggccctcaaggctcctatgaaaaagcatctacagaagttgctggacgaacttgctgcacaccccaacttgctcatttgaaagactcagtctgtcttgccagtgatactaaacaattcgacagttcaggcagcccagcaaaaccacataccaccctgcaagtgtcaggcaggcaaggacaacctacctgtgactgtgactctgtcccgccaggaacacctccacccattgagtcattcacttttaaagaaaatcagctctgtagaaacacatgccaggagctgcataaacattccgtcgaacagactgaaacagcagagcttcctgcttctgatagcataaacccaggcaacctacaattggtttcagagttaaagaatccttcaggttcctgttccgtagatgtgagtgccatgttttgggaaagagccggttgtaaagagccatgtatcataactgcttgcgaagatgtagtttctctttggaaagctctggatgcttggcagtgggaaaaactttatacctggcacttcgcagaggttccagtattacagatagttccagtgcctgatgtgtataatctcgtgtgtgtagctttgggaaatttggaaatcagagagatcagggcattgttttgttcctctgatgatgaaagtgaaaagcaagtactactgaagtctggaaatataaaagctgtgcttggcctgacaaagaggaggctagttagtagcagtgggaccctttctgatcaacaagtagaagtcatgacgtttgcagaagatggaggaggcaaagaaaaccaatttttgatgccccctgaggagactatactaacttttgctgaggtccaagggatgcaagaagctctgcttggtactactattatgaacaacattgttatttggaatttaaaaactggtcaactcctgaaaaagatgcacattgatgattcttaccaagcttcagtctgtcacaaagcctattctgaaatggggcttctctttattgtcctgagtcatccctgtgccaaagagagtgagtcgttgcgaagccctgtgtttcagctcattgtgattaaccctaagacgactctcagcgtgggtgtgatgctgtactgtcttcctccagggcaggctggcaggttcctggaaggtgacgtgaaagatcactgtgcagcagcaatcttgacttctggaacaattgccatttgggacttacttctcggtcagtgtactgccctcctcccacctgtctctgaccaacattggtcttttgtgaaatggtcgggtacagactctcatttgctggctggacaaaaagatggaaatatatttgtataccactattcataagttagggtaaagtgaaaacacaattttctggatatattgggcctcttagtattttttggagttttaaatataaaggagaatatctgaatgacacttaaaatgattgcttgtttatgtccagacagacttattttttattctaatgatggtagcaccactgatcttggatgtacatttatgtatactttgagaaaaagggttttaggttgatttttgtaatttcccacatttgtacatgtgcttttaaaggtgtacataaagcttcaaatggcaataaatatttatttttatacattcaaaaaaaaaaa

SEQ ID NO: 5288 - DNA, 3711 bp, Homo Sapiens
  NM_024677
cgccgcgccccctgccccacctccgctcgcggttgccatgaagacccggtccgggagcagtcgactgccggagactcgggaggctgagctttcctcggcctgagccagccagaccccgggcaccgcgctcacccctcttcgccgccacgtccgcgaaggcctcacgcgcgaggccaggcgaggccccgaggcgcccaccacttcacgacaccggagcgaaccgggcgccagaggctgcgacccccctgccccgaatcctgccggtgggagtggctgcatttgaaccaaacggccttcgcgggcagcagccgtcgccccgcagtcccggggctcccaagggcctgtgaccgacgccgccctccgcgtcttcgtccccgaagccccgggaaccatccgccctcgggagaccatgctgcagatgcgaggaaagccgtttcctggaacatcggaattctaaccccagggtgaaggactcacgacaggcgaggggcagacatgctgaattccacgggcgaactggagttttcgaacgaagaagatcccgagatcatctcccaactcacttccctgcctctgtccggtgggaaaagctcagctggtgtgcccgaaaaaacgggctatccggactccgtttatgtcatggcagccaacatttttcagggtattcgaatcgaaaagtcggcacagaaagtcttaatcaagtatgggaatgaacccctgcggtccttgtccgagtctgaggatcagtcctttcagcgtttgtcttatgagctggctttcagtgccctgaaatatcaagatattttggaaactatattgatagacagctgtatcttcccaagtaccacaataccagatcatttgagcagtcttattattgtgatgctatatgatttccaagatagaaaatttcaaactcgtgtcctttctgataatgaagagcccatatcagaagttcaagaagtagagaaccttcttaacagttttaagataaaattggctgcagcattggcaagatgtcgaatcaagcatgatgccctttcaatttaccacatccttccagaaacagttaggaaacaggaactaagggcctccactttaccactttatgcttggataaatacttgtaaaatcagccctgaagaagtttataataatttgaagagaagaggctataataaagtcaaatctgtattgcatattgatgataaagtctttgctgtggatcaacattgctatgatgtcttaatttttccatctcatcttaaaaatgatcttataaatatagatcttttcaaagattacaaacttatatttcaggacaaatctcgaagtcttgctgtccattctgtaaaggctttattaaatatggatgatgatgtcttaatggtcaatacaggctcatggtacacagtttcccacatgtcaattttaacaaataataatacctcaaaagtatttgtgtgtggagtacaatcacaagctaaggatcctgacttgaagacccttttcacaaaaataggatgtaaaaatattgaaatacttcatgagaaatttattaacattgaatcaaaggatcacaggttacagaaagttaaagtgattttgctgctacctcgttgttcaggactgggtgttagtaatccagtagaatttattttaaatgaacatgaagatacagaattccttaaagatcactctcaaggaggcatctcagtggacaaacttcacgttcttgctcaacagcagtatgaacagctaacacatgcaatgaaatttactaaagctcaagcagttgtttactgcacatgttcagtttttccagaagaaaatgaagctgttgttaagaaagcactggaatttcaagaccttgggaataaaggacaaccttacaggcttagtcctcctgttcttccactgtgctccttaaaggaaattcaattgtctactgataaatttttcagaatggaaccatctgaaattaccaatggttgttttctttctattttaacaagggagcgggacccttctgagacagtgtctgtgaatgatgttttggcccgagctgcagccaagggtctgctggatgggattgagttgggtaaatcatcaaaacgggagaagaagaagaaaaaatcaaaaacatcattgacaaaaggtgccactactgataatggcatccaaatgaaaattgctgagttcctgaatcgagaaactaaagccagtgctaatctatcagagactgtaacaaaaccacctcttccccagaaaaatactgctcaagtgggggcttcctcacagaccagaaaacccaacaagctggccccccatcctgcagtgcctgcatttgtgaagaacacttgtccctccagaccgcgtgaacggcagacacacttcttaagacctcggccagaagacagaatggttgctctgaaacccatcgagattgttctgcctccagtctttatgccattttcaagtccccaagggatcagatctcggatgccaactcaacatttgtactgtcgttgggttgcacccaaggcacttgtgcccacctgccttcccacacactcactatccagaaaagaggaaaagcctaaagatgacacaccttcctccctactcaggcctcctcggcgatggctttgattgtcttgtgttttttataggggccaaagagcagttgattttttttcaaagtctagtatttctctgaagattctacatctctacacaagatattcattcttttggtcacctagggatcttctaagtgtgatattactttcagagaattcagacaagtgagaaacaataatgtaggagtcagcaaagcagaattcagagacttcagccaatcactgctgctctgagaggatccagttagagactcagtatcagcggtcagaacttatctcactcctgtgaactttcaggctggacttaaagctgccaagtttcccctgcagggaaggaaacactgcctcccttcagcaggtagctcattagaaagccaaacaggcaaacgatcctggcctctcccgccagctgaccgctcttcagcatccatgcggttgtagtcgtgactttctcagtcacgatcaagggtgattttttcttaaatatcaagctgttctttgaacagggaatgaacatgagtttttgtaacgtgactgaagttgagtttaagtaggaagcgcaggaagttcccaagtgccaggtgtgtgtagctcagagttccttttacagtgaggtgtctctcactgggggagcttccaggatcctgagcagactggacacaatcatctctcccttcctctatgtcaagcactgttacaaaagactgtgagcaaatttccatctaaatattaataattctgaagaagaggcaaaactgttgaatgcaagcgatacctattgttgaagaaacccacaaatttctgattctaagatcaggggatacaacaaaatctacaagtcatttcaaatagcacacaggaatcaaactttggtaaatcatttctgaggcacaattaaatatattgtagcactatgttaattaattatattaaatgtcgattcatcttgaatgtattctcaattgcctaccaaaaattggtatgattatcatttctgggtctactgatttttcatcatggcaacagaaattgtcattaaatagaattaagatacaaaaaaaaaaaaaaa

SEQ ID NO: 5289 - DNA, 2513 bp, Homo Sapiens
  NM_024678
gtagcgtgatgacgtaagcggcgttggcgtggtgtggtaggagtggttgcgcgtgttgcggcccgggttctgttcgtaggtttacaattgtcgcgggtagtggggcgccccagctgccaactgcacgtggtttctttctggcgtttgcctagtgtcctgtccattccgccccgttgggaagtgggaagcggagaggttctgtggggacagagctgggagtcctgaaggagaaagcgcgcagccgaggggctctggagtgccttagagcagagctgcggccgcggaaggggagcagctgagaaaggagggccgctgcaggcggggttcgaaccgtggggtctgggctgctcccgcggagggcctgggcggacgcgggatgctgggggtccgctgcctgctgcggtccgtgcgcttctgttcctccgcccccttccccaagcacaaaccttcagccaaactgagcgtgcgggacgctctcggggctcagaacgcgagtggggagcgcattaagatccagggatggattcgttctgtccgatcccagaaggaagtcttgttcctgcatgtaaatgatgggtcatctttggaaagccttcaggttgttgcagattcaggccttgacagtagagaattaaattttgggagttctgtggaagtacaagggcagctgataaaaagtccatccaaaaggcaaaatgtggaactgaaggcagaaaaaattaaagttattggaaattgtgatgccaaggatttccccatcaaatataaagagaggcatcctctggagtatctgcgacaatatcctcactttaggtgtaggactaacgttctgggttctatattgaggattcgcagtgaagcgacagctgctattcattctttctttaaggacagtggctttgtacatattcatactccaataatcacatccaatgactctgagggagctggagaactttttcaacttgaaccttcaggcaaacttaaggtacctgaggagaatttcttcaatgttcctgctttcttaactgtctcaggacaacttcatctagaagtgatgtcaggagcttttactcaagtgtttacctttggtccgaccttccgagctgaaaattctcagagccggaggcacctggcagagttttatatgatagaagcagagatttcttttgttgacagccttcaagatcttatgcaggttatagaggaactgttcaaggctacaacaatgatggttctctcaaaatgtcctgaagatgttgaactctgtcacaaattcatagcacctggccaaaaggacagattagaacatatgctaaaaaacaactttttaatcatttcttatactgaagcagtggagatcttaaagcaagcatcccagaacttcacctttaccccagagtggggtgctgacctacggactgaacatgaaaagtacctggtgaagcactgtggcaacatacctgtcttcgttattaattatccattaacactcaagcctttctacatgagggataatgaagatggccctcagcacacggttgctgctgttgatcttctggttcctggagttggggaactctttggaggaggcctcagagaagaacgataccatttcttagaggagcgcttagccagatcgggacttacagaagtctaccaatggtatctggaccttcgtcgatttggatctgtgccacatggaggttttgggatgggatttgaacgctacctgcagtgcatcttgggtgttgacaatatcaaagatgttatccctttcccaaggtttcctcattcatgccttttatagctggaagattggttaaggaaaagcaccccccatggcagagacactgcacatgattgtgcatacagcagaatgcatgtttggattttagaaatgcagatttcaatatgtaattgttgtgccataagatatcatagaaaaaatataagtggttgtgattttcttagaaagttgagggtatttcacgtaaggatgagctcccgcaagaagaggtacttatagcaaggggactctcaaatccattacctcaattaagaaatgaagaaattgaattagtctcaaagtttcttttaaactctaaaacagaatgagataatgtattttacgttgtctataatcattaaatcactccctgtgtaatttgtgagaaccatctagtagctcgaaataaaataatgttgcatcttttctcccttgccatatactttgtgataaatccttatctcattttcagtacttcattaaacattgcagaaaaaaatattccttaaggtcttaattgatttaaagaagtagctattctgaattgaaatctcctttcattgaactggatgaaaaaatcatgtttaataactgttgcttttcaattttcaaagctgttgagatattacattaagtatttcaactctttaatcactgttgttataatttgtttatatttgatgtttataatttgtctaataaaatagatttttttaatagaaaa

SEQ ID NO: 5290 - DNA, 4284 bp, Homo Sapiens
  NM_024692
cggggccgtggccgaggcctgcgcgccgcccggccgcctgcactgcgcgcgcgcccaccccgcgtgggaggcagcgggaggggcccggagaggtgtggagcggcgcggcgggaggctccgtgggcggccacgggagacagcgccggcgggagcgcgcctctcggcctttcctccgcgcccccgcgtccccagccggccgctccgagaggacccggaggaggcaggtggctttctagaagatgaccatagaggaccttccagattttccattagaaggaaatcctttgtttggaagatacccatttatattttctgcttctgataccccagttatcttttccatttctgcagcaccaatgccttcagactgtgaattttctttctttgatcctaatgatgcatcatgccaggaaattctttttgatcccaaaacttcagtttcagaattatttgccattttgagacagtgggttcctcaggtccaacaaaacattgacattattggaaatgagattcttaagagaggttgcaatgtgaatgatagagatggattgacagatatgactcttttacattatacctgcaaatctggagctcatggtattggtgatgtggaaacagctgtaaaatttgcaactcagcttattgacctgggagcagacattagtttgcggagtcgctggacaaacatgaatgctttgcattatgctgcttattttgatgtccctgaacttataagagtgattttgaaaacatcgaaaccaaaagatgtggatgccacttgcagtgattttaattttggaacagctttgcatattgcagcatacaacttgtgtgcaggtgctgtgaagtgcctcttggagcagggagcaaatcctgcatttaggaatgacaaaggacagatccctgctgatgttgttccagacccagtagatatgccgttagagatggctgacgccgcagccactgctaaggaaatcaagcagatgcttctagatgcggtgcctctgtcatgtaacatctcaaaggccatgctcccaaattatgatcatgtcactggcaaggcaatgcttacgtcacttggcctgaagttgggggatcgtgttgttattgcaggacagaaggttggtacattaagattttgtggaacaactgaatttgcaagtgggcagtgggctggcattgaactggatgaaccagaaggaaaaaataatggaagtgttggaaaagtccagtactttaaatgtgcccccaagtatggtatttttgcacctctttcaaagataagtaaagcaaaaggtcgaaggaagaatataacacacactccttctacaaaagctgctgtacctctcatcaggtcccagaaaattgacgtagctcatgtgacgtcaaaagtaaatactggattaatgacatcaaaaaaagatagtgcttctgagtcaacactttcattgcctcctggtgaagaacttaaaactgtgacagagaaagatgttgccctgcttggatctgtcagcagctgctcctctacatcttctttggaacacagacagagctaccccaagaaacagaatgcaatcagcagtaacaagaagacaatgagcaaaagcccttccctttcatccagagccagtgctggtttgaattcctcagcaacatctacagcaaataatagccgttgcgagggggaactccgcctcggagagagagtgttagtggtaggacagagactgggcaccattaggttctttgggacaacaaacttcgctccaggatattggtatggtatagagcttgaaaaaccccatggcaagaatgatggttcagttggaggtgtgcagtattttagctgttctccaagatatggaatatttgctcccccatccagggtgcaaagagtaacagattccctggataccctttcagaaatttcttcaaataaacagaaccattcttatcctggttttaggagaagttttagcacaacttctgcttcttcccaaaaggagattaacagaagaaatgctttttccaaatcgaaagctgctttgcgtcgcagttggagcagcacccccaccgcaggtggcattgaagggagcgtgaagctgcacgaggggtctcaggtcctgctcacgagctccaatgagatgggtactgttaggtatgtgggccccactgactttgcttcaggtatctggcttggacttgagctccgaagcgccaagggaaaaaatgatgggtcagtgggtgacaagcgctatttcacctgtaagccgaaccatggagtcttagttcgaccgagcagagtgacctatcggggaattaatgggtcaaaacttgtggatgagaattgttaagcttctaaaatattaaataagctcaaatatatatatttggtgtaaataaagagtccatggtaaatggtttactttatttagccatattaaaattttgaaaatatagttatcttcttaaaaaccattataacaattcagagagagttctttacaaagccatgaatatgaactatggggaatcatggttcttttaaagcaattttcaaaataagtaccaattaaagctttaggttccaagaagattctgggactcaggaagaaaaagtgccatcaggtgaccagctgttgcatttcttgcttattctgttttgtttttgcacatcataatggatttttcttagtgccctaattgtgaagggtttctctagctttggttatgtgtaatgttcacgtgacctttttttgtcaatcatttttggaatttttctttctttctgtgctttattactaataagtccaatgagtgagtagtagctagatgactagtatgtagttttatattttggtaaaattatttgccctttcagaaatgcctcatctaaagatacatgataattttggagttggaaggggccttagaggctctccagctctgcttcttgcccattgccaaatactgaaatggaagcccgtcttacctggggtcactaactggttggttaactgagctaagaatagactgtgggtctcctcacttgtggcccagtgctctttctgctatacaaaatgtctaatctcagatttttcttctgctgcttgactgcttcatctggatgaactacaaaaaacccatgattaaggtttatgaattcaagtaataattagattttttttgcacagacttacttaacttccttattggatatgtttgtaacacataaacacaaagcacttttcaaacatgatgcacttttatctttgtgaataatttactgtcctttcctcctgggatatgagaaacattttaaaaaacgtatttaacagaagagagcaaataaagatatatcaggaaggatgtattagttatttacttaaatgtttataatatctggattttttttgttttgttactcatagaactggtgttgtttgctgtttttatttctctaattgttgcagagttctgcctgttacaaagctacagaactgtattgtttttattttccttcttgagcacatgttaacaaactaagcttcacattagagtgatgtcataatgtaaaatgtttgcattgtggttaggtattgaagtttatgtcctgtctgtgtaaagattcatcttttattgtaaatatttagactttaccacagaaatattggaacagtttgctttataagattaaaaagcatccttcagaatggagcttgccttgtgcttagaaataatatgttgaactattttgcaatatactattttaaatctaaattctgtcacttcgctgcctttttaaaatagtgtggtatttcaaatattgctagagctattttcctgaaatacatttgcaaaataaggctgctttgtaatcaaggaatatttttattgattgaaggaaatgactgtactgcgattcaaaagtaaacttattttattatacagattatttcttaaaaactctatttataccttaacatgaaatccatgaccacaccaaacttggttattcataatttttcctgttaaatataaaacactgtaagttaaaaacagtaatgccaacattgaatttatttttgaggtcaaagaaccagttgttctctttatatttagatgaggatgattgagtccatatactatgtatgtttacatatactatacatgcacattaggtgttttcatttgtgttttgcttatgaaatgtcatttaaagttcacttcttgagcatcaataaaaagggaagctgtgtggttttggaatggtaaaaaaaa

SEQ ID NO: 5291 - DNA, 1674 bp, Homo Sapiens
  NM_024693
ggggcggggcgtgccggggcggggcgtagtacggactgggcctggcctggggcgtccccgcgaagcctgggcctgtcaggcggttccgtccgggtctcggccaccgtcgagttccgtcgagttccgtcccggccctgctcacagcagcgccctcggagcgcccagcacctgcggccggccaggcagcgcgatcctgcggcgtctggccatcccgaatgctatggccgccgtcgccgtcttgcgggccttcggggcaagtgggcccatgtgtctccggcgcggcccctgggcccagctccccgcccgcttctgcagccgggacccggccggggcggggcggcgggagtcggagccgcggcccaccagcgcgcggcagctggacggcataaggaacatcgtcttgagcaatcccaagaagaggaacacgttgtcacttgcaatgctgaaatctctccaaagtgacattcttcatgacgctgacagcaacgatctgaaagtcattatcatctcggctgaggggcctgtgttttcttctgggcatgacttaaaggagctgacagaggagcaaggccgtgattaccatgccgaagtatttcagacctgttccaaggtcatgatgcacatccggaaccaccccgtccccgtcattgccatggtcaatggcctggccacggctgccggctgtcaactggttgccagctgcgacattgccgtggcgagcgacaagtcctcttttgccactcctggggtgaacgtcgggctcttctgttctacccctggggttgccttggcaagagcagtgcctagaaaggtggccttggagatgctctttactggtgagcccatttctgcccaggaggccctgctccacgggctgcttagcaaggtggtgccagaggcggagctgcaggaggagaccatgcggatcgctaggaagatcgcatcgctgagccgtccggtggtgtccctgggcaaagccaccttctacaagcagctgccccaggacctggggacggcttactacctcacctcccaggccatggtggacaacctggccctgcgggacgggcaggagggcatcacggccttcctccagaagagaaaacctgtctggtcacacgagccagtgtgagtggaggcagaggagtgaggcccacgggcagcgcccaggagcccaccttcccctctggcccagccaccactgcctctcagcttcaacaggtgacaggctgctttcgtgacttgatattggtgtcatagcatttggcctacattaaaagccacaatttcatggggaaaggacaaaatggagagtgactgaggtgctgacctcagtgcaaggctggtgaaccctgcagcgggccagctatggtgggaagcctggcatttggggtgctccttgcaacgtcttaagcaagcgacccccctgacatagcaaaaggtggcaacccatggaggcagaaagaaggacgccagcctgacccttatctgaaacgtcctaagcagagttaatcctggctgctcaggagaggcgacacatttcaaatctccacgagatattctccacacagaaaatcttcttgattctatagagacttaatcatgcctatggctttgaataatcttatgtgatttaaataaattaaatctttataaaaaaaaaaaaaaaaaaaa

SEQ ID NO: 5292 - DNA, 2822 bp, Homo Sapiens
  NM_024698
cccccggcagcttccccttctgtgtgagtgctgggctggagtgtggaagagccatccagagtgagtgcctggggcagagtgagagcaggaccagcgggcaggtggcggagcgggggtcggtggtggatggcccagccctggaaagccgaggtgaaggttacgagtccctgaggatctgtgggtgtgagccagccgcgtggccctgggcaacggcgctgccggacagaagtggcggttgctgacgcctggaaattcccctgaaggtggagcaccacccaacccccctgggtcccaccctccctcaaggcctcctccacctccacctccaccccgcctggcctggcgtccacctctgcggctcctacctgggtgcaatcgagttaaatggctgataagcagatcagcctgccagccaagctcatcaatggcggcatcgccgggctgatcggtgtcacctgcgtgtttcccatcgacctggccaagaccaggctgcagaaccagcagaacggccagcgcgtgtacacgagcatgtccgactgcctcatcaagaccgtccgctccgagggctacttcggcatgtaccggggagctgctgtgaacttgaccctcgtcacccccgagaaggccatcaagctggcagccaacgacttcttccgacatcagctctctaaggacgggcagaagctgaccctgcttaaagagatgctggcgggctgtggggctggcacctgccaggtgatcgtgaccacgcccatggagatgctgaagatccagctgcaggatgcagggcgcattgccgcccagaggaagatcctggctgcccagggccagctctcggcccaggggggtgcccagccctcagtggaggctccagctgcccctcggcccacggccacccagctgacccgcgacctgctgcggagccgtggcattgccggtctctacaagggactcggggccacgctgctcagggatgtccccttctctgtggtgtacttcccgctctttgccaacctgaaccagctgggccgcccggcgtccgaggagaagtcgcctttctacgtgtccttcctggccggctgtgtggctgggagtgccgccgctgtggccgtcaacccctgtgatgtggtgaagacgcggctccagtcacttcagcgaggcgtcaacgaggacacctactctgggatcctggactgtgccaggaagatcctgcggcacgagggcccctcggccttcctgaagggcgcctactgccgcgcgctggtcatcgcgccccttttcggcatcgcacaggtggtctacttcctgggcatcgcggagtccctgctggggctgctgcaggacccccaggcctgagcccagcacccgctccaccccagccagctgggcagggccggtgtggggctggagccaggcagctagcccaggacggagcaagggaagacccctccccagccctcccgtcggcaggggcagcagggggcagggtgcagggtccacataggtggtgcacacgcaagccccccggggtgctgcctgcaccgttgggatcaatgtctcatttatgtagaaaatgcagaaatctttacattcctcaagctagcccctgccccaatcctgccctggcctgaacacccccagggacagagctggtctctgggctgggggcccccgggcctgggccgggcaggctggaccatacccccagtccaccagctccagtctccacagccatcctggcccacacaggcaccccacacaaacctatttattgaatctgctggacccaagcggctctccagcccttccgtccttccccagccgctcttgtcgccttggcaggacttgactctgcctccctggccagccttgcaagaggactggggtctcctgccctctctgttgagccaggaatcccaagtgaggggttgccctgaggtctgactcttggggcaagcccgccacccactgtgggactttctggtgggctcctcagctcccaccccaggctggggcccagattgtgaggtctgtgtgcatgtgtgtgtgtatgtgtgtgtgcatgcgtgtgtgtgttgtggggatctggcctggcccttggggatggggctgctggggactgccccccttcccgccgtggccaggcgctctgtgtgctgtgtgtgccccaggctctgttgaccccgtccaggaactaacttacccagcttggtctctcctgagtcctccaccctggcctgggattggccagggagcagggcgggcattgggaccagtgtggagcctgagggtgcctgccctgctctggagggagggccaggagctgccacacccccaagtcctctcagggcccaccctcctttttcagcctctgcataaggcccctgggtacactgcagaagccccatccttcccgcctccgggcataaggcccctgaccacacttcagaagccccatcccccctgccaccgggcgatccctgctgtgagccgaagctctccctgccccgccctggccatgtgatcgtgttggtgacagaccctgatgtgctggtgctgtgtccccaaaaccggggccctccacagaggccccttcccagcgacactacctggggctcaggcctggacccccccagttcacggttgctcctgggagctgcccctcccgtcacatcagaaccttggaagctgctgctgctgcttacagaattatatttttttcttttgaagagttttaagaagttgtaactttttgtgtcttgtcatgtcagagaataaataaatattctaagtagaaaaaaaaaaaaaaaaaaaaaaaaaaa

SEQ ID NO: 5293 - DNA, 2210 bp, Homo Sapiens
  NM_024699
ccgccccttacggcgccggagagatggcggagttggacatcgggcagcactgccaggtggagcattgccggcagcgagattttcttccatttgtgtgtgatgattgttcaggaatattttgccttgaacacagaagcagggagtctcatggttgtcctgaggtgactgtaatcaatgagagactgaagacagatcaacatacatcttacccatgctctttcaaagactgtgctgagagagaacttgtggcagttatatgtccttattgtgagaagaatttttgcctgagacaccgtcatcagtcagatcatgagtgtgaaaaactggaaatcccaaagcctcgaatggctgccactcagaaacttgttaaagacattattgattccaagacaggagaaacagcaagtaaacgatggaaaggtgccaaaaatagtgaaacagctgcaaaggttgcattgatgaaattaaagatgcatgctgatggcgataagtcattaccacagacagaaagaatttactttcaggttttcttacctaaagggagcaaagagaagagcaaaccaatgttcttttgccaccgatggagcattggaaaggccatagactttgccgcttctctagccaggcttaaaaatgacaataacaaatttacagctaagaaattaaggctgtgtcacattacttcaggagaagccttacccttggatcatactttggaaacctggattgctaaggaggattgtcctttatataatggtggaaatataatcttggaatatcttaatgatgaagaacaattctgtaaaaatgttgaatcttacttggaatagtcattcaaagattcaagtcagaaatcacagggaaaattctattacatgtttaagtccatttattttactacaaatactatttttgtaatttttaaaagttgctttttaacttatttccccttatgtcacattttaaattatgagttttctattagagttttttggttttaagtttaattgtgtacggatcctcaattattagcaaattcttatatttaattagctttcattagtttatgctgtagtgacaacaacaaagatgtatttcctggtgggggatgtcagctgttgattggctgtgacactgctttgtgtcatcttcttaccatgatcaaaggcaaaggaagggatctcttttgggacattgtgattgttttagcagagagagaaagagatgaaatacacttcggttttctcttaaaagatgcatgtatcatacgtgctttaagcaagtcatgtggccaagcctagcatcatggagccagaaagtatagccttgctgtctgtctacatcatgatgtataaattgatatatctacatgaattatagaaacttagaagtgatctttattcagtcttataatttttacatgaagaatcttaggcctaggaggagaaaatgattttctttctattacctaactagattggggcatatttctgataaagacccacctctagtgagattcatcttttttgtttgtgtgactatattccatagagaagaaagatgggatagctcaacttcattatataccaaagcaaaacacatgccaaatgatgactacattttaccaacatatttagacgagtattcttgactagtgtttactatctatacccccaaaactactactatatagacagaatggaaagtatttctatttgtcctttttttgttttctgttctaattgtcagggacatatgtagtggctataggtttacttaaaaggaataaatttggaatgctcatttggtttatttcctttctaattcttcatattatttttatgtgaggaatggagataatttccaacttttattatgttcttgtactttcattcattagcatagttatttgagttcccactaaatgtagggatttgtcctaattgccatgattaatacaatgatgatatgtatacatacaggtataccttggaaatattgtgggttcagtttcagactaccacacaaagcaaatattggagtatattgagccagacaaatttttttttgtttcccagggcatataaaaattatgtttacactatactatagtctatttaatgtgcaatagcattatgtctaaaaaatgtatatactttaagtaaaaaaatactttattgctaaaaaatgctaaaaaaaaaaaaaaaaaa

SEQ ID NO: 5294 - DNA, 2531 bp, Homo Sapiens
  NM_024700
gttaaactcgtcatttcctccagctagaggagctcaactgatctgttttctttcgcccagccaaaatcacagaatgaaggcggtgaagagcgaacgggagcgagggagccggcgaagacaccgggacggggacgtggtgctgccggcgggggtggtagtgaagcaggagcgtctcagcccagaagtcgcacctcccgcccaccgccgtccggaccactccggtggtagcccgtctccgccgaccagcgagccggcccgctcgggccaccgcgggaaccgagcccgaggagttagccggtccccacccaaaaagaaaaacaaggcctcagggagaagaagcaagtctcctcgcagtaagagaaaccgaagtcctcaccactcaacagtcaaagtgaagcaggagcgtgaggatcatccccggagaggacgggaggatcggcagcacagggaaccatcagaacaggaacacaggagagctaggaacagtgaccgggacagacaccggggccattcccaccaaaggagaacgtctaacgagaggcctgggagtgggcagggtcagggacgggatcgagacactcagaacctgcaggctcaggaagaagagcgggagttttataatgccaggcgacgggagcatcgccagaggaatgacgttggtggtggcggcagtgagtctcaggagttggttcctcggcctggtggcaacaacaaagaaaaagaggtgcccgctaaagaaaaaccaagctttgaactttctggggcacttcttgaggacaccaacactttccggggtgtagtcattaaatatagtgagcccccagaagcacgtatccccaaaaaacggtggcgtctctacccatttaaaaatgatgaggtgcttccagtcatgtacatacatcgacagagtgcgtacctactgggtcgacaccgccgcattgcagacattccaattgatcacccgtcttgttcaaagcagcatgcggtctttcaatatcggcttgtggaatatacccgtgctgatggcacagttggccgaagagtgaagccctacatcattgaccttggctcaggcaatggaaccttcttaaacaacaaacgtattgagccacagagatactatgaactaaaagaaaaggatgtactcaaatttggattcagtagcagagaatacgtcttgctccatgagtcgtcggacacttctgaaatagacaggaaagatgacgaggatgaggaggaggaggaagaagtgtctgacagctagcaaactaagaacccaaactattgatacacggtttccttcttggaagtctttgattgactcagagagcactatggtggtgggtccagcactatggtgctctctgtaatgcctcttactgccttaagtctttcctctgttgctgaccagattgtgttaccatttgaatacactgactaatgtttgttaaactttttctgtggcaccttggccacatgcctgcaggcatttgttttcagaacagtctcaccaattacaacacaccgtgttttagtagaagtgttgtggttttagttggtgctttcagaactgctgcctaggaaactataaacccttggttaaggggaaatcatggcttgttctctttgtacagttactttatttatataggtgttaagctttgtggaccaggtgtttttcttttggggcgaacccctgagcagagaatcttactaggctttggttatcaccaaaacaacctccagtatataccaaagctttgacttgtttgagctcttgagcttagaagttgattttgcacttatttttttggggggtgggaatgtactgcagtcagtaaacattattgactgtttaacttaaacagatgctttatggcacctgctcaagcccgtgactgtacagaaggatcctggttgctaccagtgggtgctgattcagcatcacaagtgactgaaattggctgtggatctgttctttgtgaaagaattcctgatttctccatggagcatgtacacaacaattttgatcatattaactgtacttcagttttgcatttttattcaaatgttatctctttttttctttgagaaataaactgtcactgatgtgacagcgttctttctttattctaataacatgtatagatctaaagcaggttgtgttgtttacatgtttctacacatttcatcctttaaaaagttgttgagagaggttgtatttaccttcccaaggttggaaagcaggggaatttcccagtgtcctagttttccaccagaggaatatgtgtaagtagcaaagtatttgctgcttacatatagtgtgtatgtatgtatatatgtaaattgtgtgttaaagagctgatactgattttcatatgacaatgttaggcaaaggcctccctgcatttgaagagcaggttttcatttatatgtatttttgggataaaaaaataaaatttgtaaatataaaaaaaaaaaaaaaaaaaaaaaaaaaaaaaaaaaaaaaaaaaaaaaaaaaaaaaaaaaaa

SEQ ID NO: 5295 - DNA, 2736 bp, Homo Sapiens
  NM_024701
aggtcccggcgcccagagtcgccgcgcggccgccggtgagccgcatggagccccgggcggcggacggctgcttcctgggcgacgtgggtttctgggtggagcggacccctgtgcacgaggcagcccagcggggtgagagcctgcagctgcaacagctgatcgagagcggcgcctgcgtgaaccaggtcaccgtggactccatcacgcccctgcacgcagccagtctgcagggccaggcgcggtgtgtgcagctgctgctggcggctggggcccaggtggatgctcgcaacatcgacggcagcaccccgctctgcgatgcctgcgcctcgggcagcatcgagtgtgtgaagctcttgctgtcctacggggccaaggtcaaccctcccctgtacacagcgtcccccctgcacgaggcctgcatgagcgggagttccgaatgtgtgaggcttcttattgacgtcggggccaatctggaagcgcacgattgccattttgggacccctctgcacgttgcctgtgcccgggagcatctggactgtgtcaaagtgctgctcaatgcaggggccaacgtgaatgcggcaaagcttcatgagactgcccttcaccacgcggccaaggtcaagaatgttgacctcatcgagatgcttatcgagtttggcggcaacatctacgcccgggacaaccgcgggaagaagccgtctgactacacgtggagcagcagcgctcccgccaagtgcttcgagtactacgaaaagacacctctgactctgtcacagctctgcagggtgaacttgaggaaggccactggcgtccgagggctggagaagattgccaagttaaacatcccgccccggctcattgattacctctcctacaactgaattgcaggtggggtccggaccgtggctgcccccgttgtgcccagcattgcccgggtgagggctctgcctgttcctctgaagcagcgtgattgctgtagatagaacaacgctccttcgagtcccttcctgcgatcctgtttaggcttctctcctggatcctggataatgtttccagggtgttgggaaggcctgcgtctcaggtcacagttgtgggtgtggccctgcgctgttctacagaacctaccctctcaatgggcatgggcccaaccatccagttttcctcttttacggaccatcctcaaaggcactctcaggacagacggcgtggggagcacagaggaggctggcagagctggggactgagggcattgttgctgattctcactcaccggggcagcctgccgcagatgcacaggccccaggtgcaggccaccacctccgggtcggcaccaggactgccctcggtgctcatagggaatggctgggcccacggaaggtcggcctgggatgtggcctgggactgctgctctgctggctgctgtgtggatgcttttcctggagcactttccaaggcatcccccagccccaagcctgcgcgcatctgtcactcagggactttctatgggtctttgtgggggaaggccctggctttgtattccccacaagtagcactgagtttcttaggaaatttgtcttcagtattaggtctccaactcttgtaaaaagtttatatgtaggataaaaaccttttagaggacacgtaggcggtaccactaaggttttggtaatgagccattcaaaccgacagcagtgtgaaggtgtgtcaaggtgtatattctcgtggctcggcattctcagtgcaaaggcctgtttggagactctgtgggaattgtttttcatctgtttctatggttgtcaaatgaattcttcacccaccctacagtttgctaactccttgaagctatcaaattagtaagaccatctatcacatccagcattgtcccagtgctttgagttggacgggaatgggactctgcagccaaggcaggataagaaaatcttgcaatcccgtcctgcagtgatagaaacaggtcgttctgcattataagccataggtggagcattcggtagcgtattcagactgcatgggccggcctaggagtctttgccttcataaattttaagaaccccgcccacaacagggagttaaactggaggactttgcatgattagttcagggatgagtggtttctggggcatctgaggtcaggagtttgaaaccagcctggccaacttgatgaaaccccatctctacccattctggagaacaggtcacgcctgtcctggagacagtgtgccgggaaaagggaacgtggtactcactggatgcacccaggccggcccgagcctcccaccgcagacagtgtggaacagagtgagcctgagctgcccaaggcgatgccctttgtgctgtatgactggaggcctctccgcgtgggtacttgggggtggggccacaaatctggcgaaaaacttcatgctggccgccgtgaggttttactccagcgttcccgccattgtcatggcgggtcttcgtcctaaactgagaagaaaagcattcctgtttgatcaccgccttagttaccagttctggatcagtcagtgtttctgcatggaataacaaccattaaaaaaagcactgggttctgccctttcatctttgtaagagattcttgcctctagcaatgacaacctgtgatgtctcacagtagagcacttagcgcagaatcaggtccccacggctgttgctcaataaaagtggcggaataaagtgcatccctgtgttaaaaaaaaa

SEQ ID NO: 5296 - DNA, 2769 bp, Homo Sapiens
  NM_024706
acttccggcgctaagttctaggtctgcacggctgactccgcccacgtaggtcacaacgcggcgtctttgcacgctaagctagccacacttccggcaagagcagctagaatcgttccggtgcatattgaataggcgcagaaagggagaaaaagattctacagccctggccacagtactttggtgacacttttcgtggggctctctggaggacttttcccaaggcagatggagaaaacttcgtgaaacccactccttgctattaaaggaaatgttgtggaatataattggacttaggttttgcagagcttgagcatggcctttttgtcctcccaccttctggttcttgaagacattgccggtgacctggccccagactaacacaaggcgggcgtataccgtcagcctgcctggcgtccccttgcctcagcacacacagagacctcttgcaagatgcttctctgccgccataggctggaggttccccgggaactttcccttccttcctagctgaggaagatccctcacttccgctcgccgcgccaccggtcccacctccccgccccccgctgggtcctagcgccggcccctgtttggcagggtccgggctccgtcggtgcgaggagccgacgccgacgccacggagtcagcacaagtctcatcagagaaaccccgttcaccaaggccatggaagtggaggctgcagaggcccggtccccagcccccggctacaagcgctcgggccgccgctacaagtgcctgtcctgtaccaagacatttccaaacgcgcccagggcagcgcgccacgctgccacacatgggccggcagactgctctgaagaggtggccgaggtgaagccaaagccagagacagaagctaaggcagaggaagccagtggggagaaggtgtcaggctccgcggccaagcctaggccctatgcgtgtccgctatgccccaaggcctacaagacggcacccgagctgcgcagccacgggcgcagccacacgggggagaagccctttccgtgccccgagtgcggccgccgcttcatgcagcccgtgtgcctgcgcgtgcacctggcctcgcacgctggcgaactgcccttccgctgtgcgcactgcccgaaggcctatggcgcgctctccaagctcaagatccaccagcgtggccacacaggcgagcggccttacgcctgcgccgactgcggcaagagctttgctgacccttcagtgttccgcaagcaccggcgtactcacgctggcctgcggccctacagctgtgagcgttgcggcaaagcctatgcggagctcaaggacctccgcaaccatgagcggtcccacaccggcgagcgccccttcctctgctccgagtgcgggaagagcttctcccgctcatcctcgctcacgtgccaccagcgcatccacgcggcacagaagccctaccgctgcccggcctgcggcaagggcttcacgcagctcagttcctaccagagccacgagcgcacgcactcgggggagaagcccttcctgtgcccgcgctgcggccgcatgttctccgacccctcgagcttccgtcgccaccagcgcgcccatgaaggggtgaagccataccactgcgagaagtgcggcaaggacttccggcagccggcggacctggccatgcaccggcgtgtgcacacaggcgaccggccgttcaagtgcctgcaatgtgacaagacgttcgtggcgtcctgggacctcaagcggcacgcgctggtgcactctggccagcggcccttccgctgtgaggagtgcgggcgagccttcgccgagcgtgccagcctcacgaagcatagccgggtgcactcgggggagcgccccttccactgtaacgcatgtgggaaatcctttgtggtgtcgtcgagcctgaggaagcacgagcggacccatcgaagcagtgaggccgcgggtgtgccccctgcacaggagctggtggtggggttggcgctgcctgtgggcgtggcaggtgagagttcagccgccccggcagcaggggcggggctgggggaccctccagcagggctgctagggctgcccccggagtcaggtggtgtgatggccacacagtggcaggtggtgggcatgacggtggagcatgtggaatgccaagatgctggtgtccgggaggctcctggtcccttggaaggggcaggcgaggcggggggtgaggaggctgacgagaagcccccccagtttgtgtgccgagagtgcaaggagaccttctccacaatgacgctgctgcgtcggcacgagcgctcacacccggagctccggcccttcccctgcacccagtgcggcaagagcttctctgaccgggctgggctgcgcaaacacagccgcactcacagctcagtgcgcccctacacctgcccccattgtcccaaggccttcttgagtgccagcgacttgcgcaagcatgaacgcacccaccctgtgcccatggggacccccacacccctggagcccctggtggctttgctaggaatgcctgaagaggggccggcctgaagcccatgaccccccagcaccacactccgggagcccagcccccatcgggggcttcctgtacctccttttgcctggctctgctctttagactccagatccctacccctcagcaactagctcccctgtcggccagctaagagagctgggacagtggaggctggcagaagctgagacgtgactgtctaggagtaacactcattaaagctttcattttggcaccaggtc

SEQ ID NO: 5297 - DNA, 3924 bp, Homo Sapiens
  NM_024717
atggagccccgggctgccgcggcgggcgagccagagccgccggcggcgtcctcctccttccaggcccggctctggaagaacctgcagctgggggtgggcaggagcaagggcggcgggggcgggcgcgctgggggtccagagcgccgcactgcggacaccccgtcgccctccccgccacccccggtgggcacagggaatgcaccggccagggggagtggtgcaggcagcaggtggagcggcttcaagaagcggaagcaagtgctggaccgagtcttctcctcctcgcagcccaacctgtgctgctcgtcgccggagcccctggagcccggcggcgccggcagagccgagcaggggtccacgctacgccgccggatccgcgagcatttgctccccgccgtaaaggggcccgcggcggcctcgggagcagcgggagggacgcctcctggcggacgctcccccgactcagctccttcctcttcctccgcctcatcctccctgtcctcctcgccccagcctcccccgaggggggaccgcgcccgagatgagggtgcacggcgtcagggccccggggcgcacttgtgccaccagaagagctcctctctgccgggcaccgcctgcctggagcagctgctggagccgccgcctcctcccgcagagccggcgcggagtcccgcggagtctcgggccccggagacgggcgaggagcacggcagcagccagaaaataataaacactgctggaaccagtaatgcagaagtccccttggctgatcccggaatgtaccagctggacattacattaagaaggggtcaaagtttagctgctcgagatcgaggagggacgagtgatccatatgtgaagtttaaaatcggaggaaaagaagtttttagaagtaagataatacacaagaacctcaaccctgtgtgggaagaaaaagcttgtattctggttgatcatcttagggagccattgtatataaaggtatttgactatgattttggactacaggatgactttatgggctcagcctttctggatctgacacaattggagttaaacaggcccacagatgtgacccttactctgaaagatcctcattatcctgaccatgatcttggaatcattttgctctcagtcatccttacccctaaagaaggagagtccagggatgtgacaatgctaatgaggaagagttggaaaagatcaagtaaggaactttcagaaaatgaagtggttggatcttatttctctgtgaagtctctcttttggaggacgtgcggcaggccagctcttcctgtcctgggcttctgcagagcagagcttcagaatccttattgcaaaaatgtacaatttcagacccaaagtttacgcctatcagacctacacagaaaatcgcatctttggagaggaatagtcagcatcaccttgattgaagggagagacctcaaggccatggattccaacgggttgagcgatccctacgtgaagttccggcttgggcatcagaagtacaagagcaagattatgccaaaaacgttgaatcctcagtggagggaacaatttgattttcacctttatgaagaaagaggaggagtcattgatatcactgcatgggacaaagatgctgggaaaagggatgatttcattggcaggtgccaggtcgacctgtcagccctcagtagggaacagacgcacaagctggagttgcagctggaagagggtgagggacacctggtgctgctggtcactctgacagcatcagccacagtcagcatctctgacctgtctgtcaactccctggaggaccagaaggaacgagaggagatattaaagagatatagcccattgaggatatttcacaacctgaaagatgtgggatttctccaggtgaaagtcatcagagcggaagggttaatggctgccgacgtcactggaaaaagtgacccattttgtgtggtagaactgaacaacgatagactgctaacacatactgtctacaaaaatctcaatcctgagtggaataaagtcttcacgttcaacattaaagatatccattcagttcttgaagtgacagtttatgatgaagatcgggatcgaagtgctgactttctgggcaaagttgctataccattgctgtctattcaaaatggtgaacagaaagcctacgtcttgaaaaacaagcagctgacagggccaacaaagggggtcatctatcttgaaatagatgtgatttttaatgctgtgaaagccagcttacgaacattaatacccaaagaacagaagtacattgaagaggaaaacagactctctaaacagctgctactaagaaactttatcagaatgaaacgttgtgtcatggtgctggtaaatgctgcatactacgttaatagttgctttgattgggattcacccccaaggagtctcgctgcttttgtgctctttctctttgttgtctggaactttgagctctacatgataccactggttttgttgttactattgacatggaactacttcttgataatatcagggaaagataacaggcaacgtgatacagtagtggaggacatgctagaggacgaggaagaagaagatgacaaagatgacaaggacagtgaaaaaaagggatttataaataaaatctatgccatccaggaggtatgtgtcagtgtccagaacatcctagatgaagtggcttcctttggcgaaaggataaagaatactttcaactggactgtcccattcttaagctggctggccattgtagccctctgtgtgttcacagccatcctgtactgcattccgctgagatacattgtccttgtctggggcatcaataaatttacaaaaaagcttcggagtccatatgcaattgataacaatgaactacttgacttcctttccagagtcccttcagatgtacaagtggtgcaataccaagaactgaaaccagatccttctcatagcccatataaaagaaagaaaaacaatcttggctagccagctcccagcactgaggagaccagcatctgtttgggaagataaaagaaaaagccctcagcctcagcagcatttcctttctttctgctttttatttattttgcctttttatcatgatcgagagaatctgtaaatagtgtacaaaggcatatgtctttgaatatatacttctattgtacagactcaacttgataaaggttttgctactgctgtgtcaaaaccttgttagctgtggataataatataacacactgaaagaacaaatataagaatgataacactggaagatatattcttatctaattactagtggattaaatactcacctgtgctctgattaaatctacatcaattgtaaatgtcgatttgattttaaagtttttttttaatgcgactattttttatctgaaaagtaatccattacacttttctatgttttatacatttcaaaagggagggaaattccaaagcctgaataatggaatggatacatttcaatttaacatatattctggctttagatcccgacattcactcctgtgcaaattacttaggtatgacttaggctaattttaagctaataagtgaaggtacattcactccctcaagagaatcaatactcagaaggttacaaagttttctttatagaatttcaatcaatcattccatctaaaaccttaaaatctctacaggactacataacataaatactgccagtttataaacgattgcctatctgaatttttatacctaccactactttaatttatacagttagttagcaaattagcaacccagtaagtacagttatcaaaaatactaggaaactatatccatatcgcttttggtgtcagattgtatctgtgcatctaaaaatattttaataaatactcaagtgctctcagagaaaaaaaaaaaaaaaaa

SEQ ID NO: 5298 - DNA, 3148 bp, Homo Sapiens
  NM_024718
cctcccgtcccgccgagccggcgccaagatggcggcgctgactcctggagagcggtcgcgccggaggccgcgggggccggagcggagcagccgcggctgaggttcccgagtcgccgctcggggctgcgctccgccgccgggaccccggcctctggccgcgccggctccggcctccgggggggccggggccgccgggacatggtgccagtcgcaccccttccccgccgccgctgagctcgccggccgcgcccgggctgggacgtccgagcgggaagatgttttccgccctgaagaagctggtggggtcggaccaggccccgggccgggacaagaacatccccgccgggctgcagtccatgaaccaggcgttgcagaggcgcttcgccaagggggtgcagtacaacatgaagatagtgatccggggagacaggaacacgggcaagacagcgctgtggcaccgcctgcagggccggccgttcgtggaggagtacatccccacacaggagatccaggtcaccagcatccactggagctacaagaccacggatgacatcgtgaaggttgaagtctgggatgtagtagacaaaggaaaatgcaaaaagcgaggcgacggcttaaagatggagaacgacccccaggaggcggagtctgaaatggccctggatgctgagttcctggacgtgtacaagaactgcaacggggtggtcatgatgttcgacattaccaagcagtggaccttcaattacattctccgggagcttccaaaagtgcccacccacgtgccagtgtgcgtgctgggaaactaccgggacatgggcgagcaccgagtcatcctgccggacgacgtgcgtgacttcatcgacaacctggacagacctccaggttcctcctacttccgctatgctgagtcttccatgaagaacagcttcggcctaaagtaccttcataagttcttcaatatcccatttttgcagcttcagagggagacgctgttgcggcagctggagacgaaccagctggacatggacgccacgctggaggagctgtcggtgcagcaggagacggaggaccagaactacggcatcttcctggagatgatggaggctcgcagccgtggccatgcgtccccactggcggccaacgggcagagcccatccccgggctcccagtcaccagtggtgcctgcaggcgctgtgtccacggggagctccagccccggcacaccccagcccgccccacagctgcccctcaatgccgccccaccatcctctgtgccccctgtaccaccctcagaggccctgcccccacctgcgtgcccctcagcccccgccccacggcgcagcatcatctctaggctgtttgggacgtcacctgccaccgaggcagcccctccacctccagagccagtcccggccgcagagggcccagcaacggtccagagtgtggaggactttgttcctgacgaccgcctggaccgcagcttcctggaagacacaacccccgccagggacgagaagaaggtgggggccaaggctgcccagcaggacagcgacagtgatggggaggccctgggcggcaacccgatggtggcagggttccaggacgatgtggacctcgaagaccagccacgtgggagtcccccgctgcctgcaggccccgtccccagtcaagacatcactctttcgagtgaggaggaagcagaagtggcagctcccacaaaaggccctgccccagctccccagcagtgctcagagccagagaccaagtggtcctccataccagcttcgaagccacggagggggacagctcccacgaggaccgcagcacccccctggccaggcggtgtctctgttcgcacaggtccggagaagcgcagcagcaccaggccccctgctgagatggagccggggaagggtgagcaggcctcctcgtcggagagtgaccccgagggacccattgctgcacaaatgctgtccttcgtcatggatgaccccgactttgagagcgagggatcagacacacagcgcagggcggatgactttcccgtgcgagatgacccctccgatgtgactgacgaggatgagggccctgccgagccgcccccaccccccaagctccctctccccgccttcagactgaagaatgactcggacctcttcgggctggggctggaggaggccggacccaaggagagcagtgaggaaggtaaggagggcaaaaccccctctaaggagaagaagaagaagaagaaaaaaggcaaagaggaagaagaaaaagctgccaagaagaagagcaaacacaagaagagcaaggacaaggaggagggcaaggaggagcggcgacggcggcagcagcggcccccgcgcagcagggagaggacggctgccgatgagctggaggctttcctggggggcggggccccgggcggccgccaccctgggggtggcgactacgaggagctctaggccggcgtgggcagtggccgccctggggcggggggcgtgcctgtcactgcctggggaggcatttgcctctgtaccatcgcctttgccgctgccccgtggctgccgtgtgcgcttctgagctggaagaggccgggcattggtggtccccaggctgggccctgcaggtgctgggccttcaggcccagtgtgagcctgctctgcaagaagggaggggacagctggcttcagccaggctcggtggacaccctggccctctcggggcagagccgccagtgtttctcagggatgtgactgaggcccaggagggacctgtgagggtctgtttacagaggctgggcaggggccgcttggctgtggggtgtgcgctgccccggcacctgcttgccctccgcgctcatctggggccgcagcatgcctatggttccgcttccggccgggagccctgaacacgggtgtgcagactcaccctaaagggcggcccaggccccacgctagaaggctggcgagaccgaaggcagcatgtgaggcctctcctgggagtgggggttgtgtttcccacagtggcctcagctgcgcccccgctcaggtgagcccgaaggcaggagccgggaggcactcctcccaaacactccactcagaccataaagcactcctgtttcactctgaaaaaaaaaaaaaaaaaa

SEQ ID NO: 5299 - DNA, 2211 bp, Homo Sapiens
  NM_024731
tcctggcggagccatggctgcgcagcgggctggccgggggtctcctgaacccgggccccgccgccccgaccgcccggccccgccgccggggctgtccccgccgcgtccgtagcgcgtcctgccagggctgaaatctctttaatgatggagggaagcaggcagacgcgagtgtctcggccatacaagatcagcgaatcatcaaaggtataccgctgggccgaccactcaagcacggtgctgcagcggctgaacgagcagcgtctccgcgggctcttctgcgacgtcgtcctggtggccgatgagcagcgtgtgccagcccatcgcaacctgctggccgtgtgcagcgactacttcaactccatgttcaccatcggcatgcgggaagctttccagaaggaggtggagctgatcggcgcctcctacattgggctcaaggccgtggtggacttcctgtacggcggggagctggtgctggatggcggcaacattgactacgtcctggagacggctcacctgctgcagatctggacggtggtagacttctgctgtgagtacctggagcaggaggtgagcgaggacaactacctgtacctgcaggagctggcctccatctacagcctcaagcggcttgatgccttcatcgatggcttcatcctgaaccacttcggcacgctgtcctttacgcccgacttcctgcagaacgtctccatgcagaagctgtgtgtctacctgagcagcagcgaggtgcagcgggagtgtgagcacgacctcttgcaggccgccctgcagtggctgacgcagcagcccgagcgcgaggcccacgcccgccaggtgctggagaacatccacttcccgctcatccccaagaacgacctgctgcaccgcgtcaagccggccgtgtgctcgctgctgcccaaggaggccaactgcgagggcttcatcgaggaggccgtgcgctaccacaacaacctggcggcccagcccgtcatgcagaccaagcgcacggcgctgcgcaccaaccaggagcgcctgctgtttgtgggcggcgaggtctccgagcggtgtctggagctcagtgacgacacctgctacctggacgccaagagcgagcagtgggtcaaagagacgccgctgcccgcccggcggagccaccactgtgtcgcggtgctggggggcttcatcttcatcgccggcggcagcttctcacgggacaacggaggggatgcggcctccaatcttctttataggtatgacccccgctgtaaacagtggatcaaggtggcctccatgaaccagcgccgtgtggatttctaccttgcctccatcgaagacatgctggtggccatcggcggccggaatgagaacggagcgctctcttcagtagagacgtacagtcccaagactgactcctggtcctatgtggccggcttgccaaggttcacgtacggccacgcgggcaccatctacaaagacttcgtgtacatctcggggggccacgactaccaaattggcccctaccgcaagaacctgctatgctacgaccaccggacagacgtgtgggaggagcggcggcccatgaccacggcgcgcggctggcacagcatgtgcagcctgggtgacagcatctactccatcgggggcagcgatgacaacatcgagtccatggagcgcttcgacgtgctgggcgtggaggcctacagcccgcagtgcaaccagtggacccgcgtggcgccgctgctgcacgccaacagcgagtcgggcgtggcagtgtgggagggccgcatctacatcctgggcggctacagctgggagaacactgccttctccaagaccgtgcaggtgtacgaccgcgaggccgacaagtggagcaggggcgtcgacctgcccaaggccatcgctggcgggtccgcctgtgtctgcgccctggagccacggccagaggacaagaagaagaaaggcaaaggcaagaggcaccaggaccggggccagtgaccctagctgcgcctcttgggaccatcctcaccgtcacctcccagggctctgtagaccagcagcaacttcttagtattccggaaacattatgtacaacttagcagctttttttacttttatgattcttggtatttctatgatatcacagtaaccaattaaatactatctgtaactttaaaaaaaaaaaaaaaaaaaaaaaaaaaaaaaaaaaaaaaaaaa

SEQ ID NO: 5300 - DNA, 3636 bp, Homo Sapiens
  NM_024735
tggagcgtgcgcacaggcggcagcagtggccgtcactgggcggcatggcggtgtgtgctcgcctttgcggcgtgggcccgtcgcgcggatgtcggcgccgccagcagcgccggggcccggccgagacggcggcggccgacagcgagccggacacagaccccgaggaggagcgcatcgaggctagcgccggggtcgggggcggcttgtgcgcgggcccctcgccgccgcccccgcgctgctcgctgctggagctgccgcccgagctgctggtggagatcttcgcgtcgctgccgggcacggacctacccagcttggcccaggtctgcacgaagttccggcgcatcctccacaccgacaccatctggaggaggcgttgccgtgaggagtatggtgtttgcgaaaacttgcggaagctggagatcacaggcgtgtcttgtcgggacgtctatgcgaagctgcttcaccgatatagacacattttgggattgtggcagccagatatcgggccatacggaggactgctgaacgtggtggtggacggcctgttcatcatcgggtggatgtacctgcctccccatgacccccacgtcgatgaccctatgagattcaagcctctgttcaggatccacctgatggagaggaaggctgccacagtggagtgcatgtacggccacaaagggccccaccacggccacatccagattgtgaagaaggatgagttctccaccaagtgcaaccagacggaccaccacaggatgtccggcgggaggcaggaggagtttcggacgtggctgagggaggaatgggggcgcacgctggaggacatcttccacgagcacatgcaggagctcatcctgatgaagttcatctacaccagtcagtacgacaactgcctgacctaccgccgcatctacctgccgcccagccgccccgacgacctcatcaagcctggcctcttcaaaggtacctatggcagccacggcctggagattgtgatgctcagcttccacggccggcgtgccaggggcaccaagatcacgggcgaccccaacatccccgctgggcagcagacagtggagatcgacctgaggcatcggatccagctgcccgacctcgagaaccagcgcaacttcaatgagctctcccgcatcgtcctggaggtgcgcgagagggtgcgccaggagcagcaggaaggcgggcacgaggcgggcgagggtcgtggccggcagggcccccgggagtcccagccaagccctgcccagcccagggcagaggcgcccagcaagggcccagatgggacacctggtgaggatggtggcgagcctggggatgccgtagctgcggccgagcagcctgcccagtgtgggcaggggcagccgttcgtgctgcccgtgggcgtgagctccaggaatgaggactacccccgaacctgcaggatgtgtttttatggcacaggcctcatcgcgggccacggcttcaccagccctgaacgcacccccggggtcttcatcctcttcgatgaggaccgcttcgggttcgtctggctggagctgaaatccttcagcctgtacagccgggtccaggccaccttccggaacgcagatgcgccgtccccacaggccttcgatgagatgctcaagaacattcagtccctcacctcctgaccggccacatccttgccgccacatcccgggtggctctggggctctgaactctgacctgtgaatagaagcagcatgcactttggaaatccggccttttgaccagaacgcacacctcgtcggggggcccagtccagccaccccccagcactttatgtagagagtgtgacatagacctgcatatttgtcagtgccatgatggaagaagctgagcatgtcttaccaaaaacagagagaacgagcctgaatacagcagatgtaggggacagccgtgggaccgcgtgagaattgaagcggtggggttcccgcaccctgggctggctggtggttttctcgggaagcaggaccctcctgactggtgctcttcctgtgagcggatagagtgatagactgggtcgtgtgtgagacgcatgtgctccaccccactccttttgggggaagccaggcaacagtggcctctgggagggggtcaggaagaggcgaacagctcaggcagcgcaggtgtgatgggcacagtacgcagagcaagctcgggaagttggtaggatctcaggcttggggccgggactctggagtgaatccccatttctctaccggcttgcttggagtttggacagaagcatttcacctctgatctcagcttccccacctgtggagtgggtttagtgacctgagtcactagggaatgtcacctgaatgcacagcccagcccatgcacctgccccagcccctccagctttggagccaaggccatcgttccagccacttgactgtcctcgacggcctgttccagacagggcgtttgttttgtccatgccttcctccctgcacgcacacggcgtcaaaaccaagctgccggccactgtctccagaacgcaaggctccaggcccgtgtgtctgaagcagtgagtggtccacacaggtgccaggagtgcccatatgagatgacgaggaaacccctttgcaggtgaggggacagctttctagaaaagccacacctgcatctggggacacactttggaaagtgggaccctccagcctggagaccccatggactgatgcctccactgctgtgtgccccatgttgtgttaacacctgcgtgtggggaccccatctgaggtcttggctgaggttggcatctcctgaagaacagagagcacggtgtccagagctggcccttcccccagcccacagccagctccgtgcccgagtgggcgtccccagcgagccttccctctctgccgcttgtccttgtgtctgggctgctccaagtccttgtgctgggcaccctggacacgtcctgctggtgagggacctcgggaaggtgacagtctgtgtgccttggtgtggagaccaacctgaggatgtcctgggaaatgttttcctgatgaatttctccttgactggcctttaaagaacataagaattcccattgcccagcctcagtgcatttggcaaatgcttactttgcttcccagagtcagagaattggcaaaggttcctaaatggtaatctggccggcctgggagaaagactcacgagaaaagccagtggagaaagcgcccttccagggcggcagcagcgggagccacgcagaccccgaggcgcacctgctggctcttgtgtgtggccccagtttctagcggcttttgcagcattagcctacaagctttgtcactccctgccctctgtggtggtcactgtttttctctcttgccaaatgaggcagtctctgagtgacggtgactgtggccttgaagcctggaggactgttgggcatgtagactggcaccttgaagattcaccattgtttaaataaaatcaagcaaatgcttttttaccaagagcccgagcctcgctctaagggacgcagtcctagaggcgtgccctttggggcttgaagagcacactgtgggacgcacgtgcttctgattaaaggaatctcagatctcaaaaaaaaaaaaaaaaaaaaaa

SEQ ID NO: 5301 - DNA, 4707 bp, Homo Sapiens
  NM_024742
tcctctgaccgagcgagggctccccgtctgcggcgcggtcaggaccccgcactttcggcccggctcggggttctcggagtccgtcccaaggccgggccgcaccaccgctggggggcagcgaagcgagcctagaggagaaaaggcggtccccgccgagtgcacgccgggggcggggcacggcacgaaggctccgtggtcggacttctgggctgttcggaggccctggcccacctggagggccctggaagagtttccagcgcttcccgaggtaggcgtgagaagctcgacgcggaccacatctccctcatgcaccgcccgcacgtcccaggatgcgctgcgattaaggtactgccgcgcctcgtgtgcaaggacagacttccggggtcgagaactacaacttccgacttgcatcactgcggtggcgctaaacagcgtcagcgaggcggtgcccgacgatttccctgtcttccagttccgctccctgggatcagcggcgagaagcggggcggagtctgaggcccgagccaagatggcggctgcgaagccaaccctcacggactcgctctcgttctgcctcgcgcagctcgcggcggcggccggggaggctctgggtggggaaaaggacccagcgaccaacgagacacccctgagccgcgcgctcctagccctccgcacgcgccacatcaaggcagcggggggaatcgagcgcttccgggcacgcggcgggctccgccccctactcgcgctgctacggcgagcggctgcagcgggttccgccccgtcccaggcaggccccggctccgccccctcgtcggccgcgtcgggagcttctagccccgcccccgcgtcgggccccgccccctccgctgtgtcgtcgtctagtcctacgccgccagtgcgcctgcgcaagacgctggacttggcgctcagcatcctagccgattgctgtacggaaggggcgtgccggaccgaagtgcgcagactcggaggcatactccctttggtgaccattcttcagtgcatgaagacagacagcatccagaaccgaacggcccgtgccctggggaacttagccatggaacctgagagctgtggggacatccactgtgctggtgctgttcccctgcttgtggagagcctgacagcctgccaggactcgcagtgcctacagagcgtggtgcgtgccctccgtaacctggcagactcaccccagcaccgcctggccttggcacagcagggagcagtgcgtccgctggccgagctcctggccactgccccagatgctgcactgaccttagccctcgtccgtgccctcctggaactcagccgaggctgctcccgggcctgtgctgagcagctaagtctgggtgggggattgggcccactcgtcagcctggcttcccaccccaagcgggcagtacgcgagggaaccattctgatcctcgccaacctgtgtgcccagggcctgattcggcctgcactgggcaatgctggtggcgtggaggtgctggtagatgagctccggcagcgccgggatcctaatggagctagcccaacctcccagcagcccctggtgcgggctgtgtgcctcctatgtcgtgaggccatcaaccgggcccgactgcgggatgctggtggcttggatctactgatgggcctgctgcgggaccctcgtgcaagcgcatggcaccctcgtattgtggctgcccttgtggggtttctgtatgacactggggccctgggccggctgcaggctctgggacttgtgcctctcctggctgggcagctgtgtggtgaggctggtgaggaggaagaagagggaagagaagctgcttcctgggactttcctgaggagaggacccctgagcgggcacagggtggaagcttccggagcctcaggtcgtggctgatctccgagggctatgccacaggccctgatgacatctcccccgactggtctcctgagcagtgtccgccggagcccatggagccggccagccccgccccgaccccgacctcgctgcgggcaccacgcacccaacgcactccgggccgcagccccgccgccgccatcgaggagccttggggacgcgaagggccagccctgctgctgctgtcgcgcttttcccaggcccctgacccaagtggggcacttgtgaccggcccggcgctgtacggcctgctgacctatgtgaccggcgcaccgggcccgcccagcccacgtgcactgcgcattctgtcacgcctcacctgcaaccctgcctgcctcgaggccttcgtgcgcagctatggcgcggcgctgctgcgggcctggctggtgctgggggtggcgcctgacgattggccggcaccacgtgcccggcccactctccacagccggcaccgagagctgggtgagttcccatacccacccgtctccttgcccccatgtgagtccccatcctcccccatggcttccatgggcccagaacctcaccttcccactcacctgtcctccccagcccgtcctccagacaacctgtcaccagagtggggtggggagcagggcgttccagtccctccatgggcccacaggcagagttctgctgtgtcctctgccctagccctgggacccagataccctaactctagatgcagccccgcgcccaggatctgggctggtctgtgcttctttcctggctctgccattggttcagcactgtcctgactgctccccaccagcacgctgacctgtgaaccccagcctcaccatcacccccagcactgccagggactgccctgtctgctgtgccctgaccacaggctgcttcatggcgttactgctagaccaaggagcccttctgctggccctgtccgggcataacagaaggctcgcactcttgtcttctggtcacacctcactatgtcccctcagctcctatctctgtatggcctggtttttcccaggttatgattatagagcgaggattattacaatattgggataaagagtaattactacaaactaatgattaatgatattcatatatctctaagatctatatctggtataactattcttgttttatattgtattatactggaacagctcgtgtcctccgtctcttgcctcggcgcctgggtggcttgccgcccacacttcaggggcccagacttacaccctgactgtcccaccttctgtccttgtcctggacctcaggttcccagcgtcccgagcccagcactgtctcttcagtgccctgatttctcacccagaggtttcaccctccttcatctcacgggcccagagccctgtctcactcaccccacctgtcttagaccccagttcccagcctgacaagctttccactcacaggggagaggctactgcagaacctgacggttcaggctgagtcgccctttggggttggggccctgacgcacctgctgctctctgggagccctgaggaccgagtggcctgcgcgctgaccctgcccttcatctgccggtgagtgggaagtgggtgccttgcggggttgggggaggagtgctgtgtttcccaggcccgttgcccaccttttgaaaggccctctcttccctgtaggaagccctctctgtggcgccggctgcttctggagcagggtggtctccggctcctccttgcggcgctgacccggccggccccacacccgctcttcctcttctttgccgcggactccctttcctgcctccaagacctggtgtctcccactgtgagcccagctgtcccacaggcagtccccatggacctagactcaccttccccttgcctctatgaacctctgctgggcccagcccctgtcccagctcccgacctgcacttcctgctggactcaggcctccagctccctgcccagcgagcggcctcagccaccgcctcccctttcttccgggccctgctgtcaggcagctttgcagaagcccagatggacctggtgcccctgcgaggtctgtcgcctggtgcagcctggcctgtcctgcatcatttgcatggttgtcgggggtgtggggctgccctggggcccgtgcccccaccaggccagcccctgctgggttcagaggccgaggaggcactggaggctgctggccgtttcctactgcctgggctggaggaggagctggaagaggccgtgggccgcatccacctgggaccccagggtggcccggagtcagtgggtgaggtgttccgcctgggccggccccggctggctgcccactgtgcccgctggacactggggtcagagcagtgcccgaggaagcggggtctggccctggtggggcttgtggaggcagcaggtgaagaggcagggcccctgacggaggctttgctggctgtggtgatggggattgagttgggggcaagggtccctgcctagactgttgacgtcccctgggaaggggacccaaggatgaattggctgtgaaggatcctccctgagactggcaagggaggaggctgagcagaaggagtcatcatggaggagcggtgagaacatggaaccggactccaagatgacgatctaaagacccgggagcgagaagccaaggccaggttctgggtgtagggcccagagaagcagaacagcccagagccccaggtgcctggcctggcctagacctctggaattgagattaaacaatttggagttggataaaaaaaaaaaaaaaaaaaaaaaaaaaaaaaaaaa

SEQ ID NO: 5302 - DNA, 2690 bp, Homo Sapiens
  NM_024747
cgggagacggaagtcttggccctgctccgctcccccgagaatcgggcctcgccctgctgggcggctggacctgggcaaagcctgggcgcgctcccgcgcagcggcgccatgaagcgctcggggactctgcggctgctctcggacctgagcgccttcggcggcgcggcgcggctccgggagctggtggccggggactcagcggtccgagtccgtggcagtccggacggccgccacttgctgctcctgcgaccccctggggcggtagccccacagctgctagtcgcgtcgcgagggcccggcgcggagctagagcgggcctggccggccggccagccctccccgctggacgccttcttcctgccgtggccagcgcggccggcgctggtgctggtgtgggagagtggcctggccgaggtgtggggcgcgggcgtggggcctggctggcggccgctgcagagcaccgagctgtgtccgggcgggggagcccgcgttgtggcagtggcggcgctccgaggccgcctggtgtggtgcgaggagcggcaggcccgggccgagggcccgtcagggtcgccagcagccgctttcagccactgtgtgtgcgtccggactctggagcccagcggggaagctagcaccagcctgggccgcacacacgtcctgctgcaccactgccctgccttcgggctgctggcctcctgcagacaactcttcctggtgcccactgccaccacctggcctggcgtggcccacgttctactcatctggagcccaggcaagggcaaagtgatggtggctgccccacggcttggtctctcctacagtaagagtctgaatcctggacgaggggacacatgggacttccggaccctgctccgaggccttcctgggttgctgtcccccagggagccactggctgtacacacctgggccccaactccccagggcctgctgttgcttgacttcgggggcactgtgagcctattgcagtcccacggtggtacgcgggctgtgggcaccctgcaggaggcacctgtaggcccgtgggggtctgcagccctaggcacatttcagggcactctggcctgtgtgctgggctccacattggaactgctggacatgggcagtgggcagctgctggagaggaaggtcctaagtacagacagggtacatctgctagaaccgccagcccccggcatggaggatgaggaagagctggagacccgagggaatcttcgtctgctttcagccttgggtctgttttgtgtgggctgggaagccccacagggtgttgagttgccttcagccaaggatctggtgtttgaggaggcctgcgggtactaccagcggcggagcctgcggggtgcccagctcactccagaagaactgagacacagcagcacattccgggcacctcaggctctggcctccatcctccagggccacctgcccccatctgcactgctgaccatgttgaggaccgagcttcgggattaccgaggcttagaacagctgaaggcccagctggtggctggggatgatgaggaggctggttggactgagctggcggagcaggaagtggcacgcctgctgaggactgagttgataggagaccagctagcccagctcaacaccgttttccaagcccttcctacagcagcctggggtgccaccctcagggccctgcagctccagctagatgggaatggcaagctgaggtcccaagcaccccctgatgtgtggaagaaagtgttagggggaataaccgctggaaaggaaccccccaatggaatactgcccccctttgaactcctgtgccagtgtctgtgccagctggagcctcgatggctgccaccctttgtggagctggcacagcagcagggcgggccgggctggggggcagggggcccaggactgcccctgtatcgccgagctctggcagtgctaggtgaggaggggaccaggcctgaggctctggagctagagctgctcttgagcagtgggcggcctaaagctgtgctccaagctgtcgggcagctggtgcaaaaggaacaatgggatcgggctctggatgctggcctggccctcggcccctccagtcccctgcttcgaagtgaaatcttcaaactgctgctggccgagtttgcccagcaccgccggcttgatgctcacctccccctcctttgccgcctgtgcccaccagaactggctccagctgagctcctgcttctactgaggacatacctcccagatgaggtggggcccccaaccccattccctgagcctggagcagagccccctctcactgtgggcttgctcaaagccctgctggagcagactggggctcaaggatggctgtcgggcccagttctaagcccatatgaggacatcctatgggaccccagcactccacccccgactccacctcgggacctatgactacccttcaggcatcagaacactcagggcctggaggcttgcttgggactggaggcttgcttggacagttcctctgtgtcactgacacaggaaatcatttctaggacacagtgatcagggaagggtgcctgggacttggagggtcccatgtatggacctgtgtatgcaatactgttctgtcatctggagctatttttaagatgtgtgtgttaaatatatacatagtttaatatataaaaaaaaaaaaaaaaaaa

SEQ ID NO: 5303 - DNA, 2103 bp, Homo Sapiens
  NM_024754
agtagttggtatggtccgagacagtatggctgctgcatttcggccctcgaatcgagttctcctgcaggcgctgcagattttggtgtatcctggggtgggaggctccggctctgtcagctgccgctgccctctcggagctaaaagatacctacttacagataatgtggtgaaattaaaagaatttcaacaaaagaaagtggctgttgcatgtaatctttctggcactaaagaaacgtattttagaaacttgaaaaagaaactgacccagaacaagctcatcttgaagggggagttgataaccttactacatttgtgtgagtctcgggaccatgtggaactggctaaaaatgtcatttacaggtaccatgcagagaacaaaaatttcactttgggggagtataaatttggaccgctttttgtgaggttgtgttacgagttggatctcgaggaatctgcagtggagctcatgaaagaccagcatttacgaggtttcttctcagactccacatcattcaatattttgatggatatgttatttatcaaaggcaaatataaaagtgctttgcaagtattgatagagatgaaaaaccaagatgtgaagttcaccaaagatacctatgttcttgcttttgcaatttgctacaaactgaatagccctgagtctttcaaaatctgtactacattaagagaagaagctctactcaaaggagaaattctctccaggagagcatcctgtttcgctgtggcattagctctgaatcagaatgagatggcaaaagctgtgtccattttttctcaaatcatgaatccagaaagcatagcctgcattaatttaaatattataatccatatccagtcaaatatgttggaaaacctgataaagactctaaaaaatgctgcagaaggaaatttatcaaaatttgtgaaaagacatgtgttctcggaggaagtgctggccaaagtgagggaaaaagtgaaggatgtgcctgcccttgtggccaaatttgatgagatctatgggacactgcacatcactggccaggtcaccactgattctttggatgctgtgctctgccacacccccagggacaggaaatctcacacgttgctattaaacaagaggatggtcagccgtcgcaccttccagccactcagccagtccctgttggctgagtaaccctggtttcagtccacctatggatctgaggggcctgcttctagtgagttattacctttcctaagaagccaggtatcgcacttcagcagacagtgtgctgacacttggtcttctcctgaaattcccaaattcactgaatggtaccatgccgatctctgagaagttatgttgcaccactgtgaaggtctagatgcaagcttggctccctcagaaaggcgcttcccttttgcatggctgaggatccttgaaggaacctggtcagtctccggttcagcttccgacaccagagtggaacccagtaagcaccatcaggaatgaatttcactacaagtgtggataactctgattttcaaaggagtagttacttgcaaattacatccttgctgaattcaggaggtatgaaaccctattttaccatgttagaaaacagcccaggattttctcattgctctgccatcatatatgtctatgacttgagcccttatttttccatctgcaaaacaataatgcctatgtgtctttgcatatagatttgaaatcttcattcaaggtttagtaggatcatattttctcaaaaataagagaaataaggttcataaggaaacttgctgggattgtggttgttttgttttctcagcagcacaaacaaaaccagaatttagcctttaggactgctgagtaagccaaatttaaatgactactgctttgttcatgggtaagccatgtgcttttcaaaataagtgccactaaaaaccacataatgctttggtttctatgtggataataaatatttagtcctatagtttatcttatttgttaatgatttttctctcttgaatgcctcatattaaaaaaaaatgtgccatgagagcagttcaaagctgcttcatacttatggtctcaaatatagtatgtgttgaatttta

SEQ ID NO: 5304 - DNA, 2196 bp, Homo Sapiens
  NM_024758
cttgatcccagggcgcccctgacctttgagccggctcgggttccggctctggcgcgtgcacactcgcctcgccgttcgggaccagccagatcgcggcggcctcgcgggcggtttggtcggtgaggtcttggccgcgcgcggcaatgctgaggctgctggcgtccgggtgcgcccggggcccggggcccggcgtgggcgcgcgtcctgccgcagggctctttcatccggggcgccgccagagccgccaggcttccgacgcgccccggaaccagccccccagccccgagttcgtggcccggccggtgggcgtctgctccatgatgcgcctgccggtgcagacctcccccgaggggctggacgctgccttcatcggggtgcccctggatactgggacctccaaccggcctggggcgagattcggacctcgccgcatccgggaagaatcagtgatgcttgggacagtcaatcctagcacgggggccctccccttccagtccctcatggttgcagacctaggcgatgtgaatgtcaatctttacaaccttcaggacagctgccggcgaattcaagaggcctatgagaaaattgtagcagctggctgtattcctctgaccttgggtggagatcacacaatcacatatcccatattgcaagcgatggcaaaaaagcatggcccagtggggctgctgcacgtggatgcgcacacggacacgaccgacaaggccctaggagagaagctctaccacggggcgcccttccgccggtgtgtggatgagggtctcctggactgtaagcgtgtggtgcagattggcatccggggctcttccacgaccttggatccctacagatacaaccggagccagggcttccgggtagtcctggctgaagactgctggatgaagtcgctggttcctctgatgggggaagtcaggcagcagatgggaggcaaacccatttatatcagctttgatattgacgctctggatcctgcctatgcgccagggacagggacacctgaaattgctggtctcactcctagtcaggctctggagatcatcaggggttgtcaaggcctgaacgtgatgggctgtgatcttgtcgaagtttcaccaccgtatgatctttctgggaacacagccctgctggcggctaacctgctgtttgagatgctatgtgctctccccaaagtgacaaccgtctgagtcttgtgctcttcaagacaaaacagattgcgtcgctgacaagttctcaagaagaacttatgagtaagcagtctgagaactaaagagtttatgccaagaaaactttctgctgaaagtgtcattgctggctgtgaagtcgggataatcagtagaattctcacccaaacagcaacatttctaaggaacttggattaattgggggaaaaaaaaaggagtacttgtactgctttgattttttttcctttgatgaaagatggaggataaaggggaagtgaggagaatttctttcaagattatctaaacattagaaacatgacatttaaaaaaactatgaaataatactgtataagcattccatatttctatatcttccttttaaacatttttttttttgagatggagttttgcttgtcacccaggctggagtgcaatggcatgatctcggttcattgcaacctccgcctcccgagttcaatcgattctcctgcctcagcctcctgagtacctgggattacgggtgcctgccaccacgcctggctaatttttgtatttttagtccagacagggtttcaccacattggccaggctggtcttgaactcctgacctaaggtgatccgcccgcctcagcctccttaaagtgctgggattacaggcatgagccaccgcacccagccgctttttaaaattttgatgatctgcttcctagagtattgagtatcttcctttaaactacagctcctcctcggacgctgcagtgagctgagatcgcaccactgcactccagcctgggtgccagagcaagactccatctcaaaaaaaaaaaaaaaaaatacagcttctcctatgaggtgcttagggctgcatcttggttttaggaccactgtgaacgtaagtaaaaagtataaagtaacacggagagcctaatgaagaaacttcttgctcagaggcctagaagggtacacaaaatgtcttctaaactagaaaacctaaggc

SEQ ID NO: 5305 - DNA, 6528 bp, Homo Sapiens
  NM_024761
cggccgccaggggtccccgctcggcgtccccgcgagacagtcgagccccggccggctgcgcggcgcgctgggtgcatgagggggctgctccggagcgacggcggctgcagctggagccaggcgctcgcccgtccgccggttggctcgccgggacctcgcgcaccggcggcagagtcccttgcgtggattggcaagcgacgccccacctgccccgagctcaccattttctttcgcgctggctgcagctgacccggcgaagggagccgaccgggccctgggctggaggtaaaaccccacggaaagaacatgaggttcccttggaaatcattcaagaggaagatggaaggggctgtttagaagagcttaaaagctacaggctgtaagactggggcctgagtgctggcagtggaaaacactgttgggctgtgatctctccctgaaaagttccaggtgccttttcgcttcctgcaaaagaaaggaagcgaaagagaagaccatgtccatagccctgaagcaggtattcaacaaggacaagaccttccgacccaagaggaaatttgaacctggcacacagaggtttgagctgcacaaacgggctcaggcatccctcaactcgggtgtggacctgaaggcggctgtgcagttgcccagtggggaggaccagaatgactgggtggcagtacatgtggtggacttcttcaatcggatcaacctcatctatggcaccatctgtgagttctgcaccgagcggacctgtcctgtgatgtcagggggccccaaatatgagtatcggtggcaggatgatctcaagtataagaagccaacagcgctgccagctccccagtacatgaaccttcttatggattggattgaggttcagatcaacaacgaggaaatatttccaacatgcgtgggtgttcccttcccaaagaacttccttcagatctgcaagaagatcctgtgccgccttttccgggtctttgtccacgtctatatccaccacttcgaccgggtcattgtgatgggtgcagaggcccatgtcaacacctgctacaaacacttctattactttgtcacagagatgaacctcatagaccgcaaggagctagagcctttgaaagaaatgacgagcaggatgtgtcactaatgctccacctcaccctttggaagaaaggaaagctgtttcctcctggtgccctgagcgggcaggaggtggaccaccctggctgaaatgacacacctactcccaggaacagcagaggtggaggcaagcagtgactcctgagagacattccccactcactttgtgtgctcttaaccttctgagtgctgctagcccagacctgtggacgaggcagaccacaacgtgaaagaaggaccagccccttgaccgttctggctggggaattgtccacgaggaagcctctgcacttccacacatggcacagttctgcctgtgacctgccgcctaagctttactggaattcaggttttgagactgagatgcgtgttcgtatttttccacttatctgtcttgtcagctggccgacttctctgtgattggttttttaagtgccgggtgaattttggacctctggatgtgcagcaagtttttatgcaataagccttcctttcaggtctctaaaagctcctgctctgatctgtggtttaacactgtgcagggctgtggagctctgagacacctgaacccctacccatcccctgcacctccctactctccctgccgaggcgtccatagcatttccctaataaatagttttatcagggacactccatggggtggcttgtctctgccccaaacagggtcttcacgttctaactgcagggaagagactggttactagcgtaaagctgacaagttaccagttcacctgatcagaatgtattttttataaccaccatcattccttgtctcttcagtggaagatattctttcctgtttcccagaagagagaaataaaagtcctaaataactaagaatgatcagcgggagcgttgggcatgattactgcagtgtttgttctttattaaagacagggagtcgtggctgtctctacataatactaacatttcagtgaaaaaagtacaattggttatttggtacgtgtagatttaacacccagacggctgacttgtaaccctccccactagccttctgagcatttaaacccagccgtcattctctccccactccacgctccccactcctctgccacgttatgttacggcacaaaattaatttctgcccctgtgattgggccacggttgccaaggtaacagtggagctggagctaacttccttctttcatcctttccaatttttctattccagaagacagtcagaataatgcattctgtactacatcctgccttttgaaacctaaatgagttttcgttgatgaaatgttgccttctctgattcattcacaaaactgtggtggttctgaccacctgtgacgaggggggtcataatacttccagtgatccttttaatttagcaaaatatttgtcggtggagggaagtagataagaatgtattagtgtattttaaagtaataatgattaaagaataactaaatgactctgattttgttttatcaatcataatgtgttaaagccctctgtggctgccacaaaagactagaatcatgaaatctttgtccaagctaagaaagggctgtctctgtgggtacagtggcattctctgttgacctaaccaagcagcctgaaccttgctttgtgtctcgtaaaggtcatctcacggaatccaattgctgctacctcaccatgttgctgtgccctggtcaacaataaacatacttttgtcccccttcctaagtaactttgagaggacaagataggcaaagttttttccctacatctcttttggccaaaagaatatctgaccatcacagagatccagagaacagaaacaagagcccctaagtcccagcctctgcaatacacagttaccagatgggaatgcagcacagtggcacagagaggtaactacggagcccatgccctggaggaactctgtagctgtgcatcatggaacgccacaggatttttacattaaaaagttgaatatgttcctgcatttcagcagtgcataatcgagcaggaggctggaatctggagacctttgttattcattctttttaaggttattttttattaactgtgcatatgaaatttccactcaatttaaaaatccaaatctttttaagcttcttggaagaatttcctcctgcttatattgttaattgcactaatgaactcttctagggtaaattctggcaaactaccctttttttttttttaatcacagaatattcctgttcccacagaactttggcacattctgaagaaaatctctgcagtcaatttttatctcctctgcttgactgcatctaactgttcatctctgttataaatggagcttcagccctctgggtcagagactgacaaccctccttcttcttcctaacctgtcctactctccttctttttctgctttcattttaattttgggaaattttaaagtaaaagtttcaaagttgaaagattatagtgagtacccttatgtcctttagtgcatcagttgttaatgttttgccttgttttcttttcttccttttttttttttaagagaaggggtctctccctattttacccaagctggccttgaaccccttgcctcaagtgagcttcaaccttagcctcctgagtagccaggactatggcatgtaccaccgcacctgcctcacattttctttctcactgtaaatacacattcttattcttgaaccttctgaaaataagttgcagacatcatgaaaatgtaaaatacttcatcatattctttcttttaataagagcattgtcctataaatctgcaatattttcacgcccatgaaactgaacactgatactgcataaatctaatatatgatccatattcaaaattctccagttgtccccaaaatatcctttatagctgtttatttttaaatccaggatccaatcaagaattatacgttatatgtagttgtcattctcttttgtttcctttaattgattagagttgcccttttgtgtgtgtctgagtggtgggtggtggggtggtgtttgtgtatgatgtgcagtgtgtgtgtgtgtggtgtgtctttcatgacactgacattattaaagagttcaggcaagtttgtggaatgtcccacaatctagacttttttactgattgtttcctcattacgagatacaggttacattttttttcccaagactgctacatgtgtgatgttgtttccttactactgcctcacctcaggaagcacataatgtctacttgtctcttttctgatattaggactgatcaggtgttgtctgcctgatccaatcattatcaagttccataattcattattaagctctgaaattcaggacacatacatttatagagtgtgaggctgtgcatacgtacattcatcccttaatgttctcaaggaggcccaggatccccaaaatattataagcattgcagtcagatgatatagcactagcaaagcattcatccctttccatataacaggagggaggggaagaaggaagtttccatgtgcaggcaatacgtgagagcatgggcaagtgaggatttgtatgctccctgtagccagaggtgaaatattcaacgcttttattttttctcccgtcttcaatgacctcccatttggacccatagtttatttatagagagcacacactccctaattgtcagatggtttttttgggaaaactcttagatagtacagtgagttgtgaccctccaaaggatcacaagtacataaacagatacaaagtatttatgtggtattaaaatttcatggtgatggtgcaagggagagatgattaggaagaaaatgtcttacacggctgtaattgagaaatactgatctagagtcatttcctgcttcttaaattgttcgttttctcttccctgggtattttctcatttccaaagacccagagtctcagagccaggttaagtggaagaaactttgagaggtttcttaatcaattccttctatctctcaaaccatgccagtaacttccttggtgaaaaaatctatactcctctcacagttcttcgggcatggaaattctatagcattctttggtataaccaacccactgaaccctccacaacatcttgaattccattcaactcgagctgaagtattctttttgagtttcagtatatcttttctagtgtcccacttttagaaaggtccaaagatgatatataataagtgaaaatacaattaatcagagctttatttgcatatccattaaatatctgaaggctattaccagttgtgcttcagcctcctttcccttgcaattctcccagggtggcatcctctacggagtcttgttgctccattgttgaccactgatgtaactcaacgtgaaaccttcccaaagctctccacatcactctctgttatggctgtgaccagcagtgaacatgaaaagaacttatttcatgccttctccaaactatattgtttctttgctaagtccagacctgctttttctacatttataggttttctattttaatcgccatgcaaaattctttatcatactcaatcattttggtttatcttcctgacttcttacctttaacatccctgttaaagattacactgttgttgtttcaaaaaaaaaaaaaaaaaaaccttaattggcaaaacattaagggacttgaatagaattacacttatctttttgtgctgatttatgtcaatccatcattctggttattgatggaagcaaattgcttcctatgttctctaaaccttatgtcccttccatactccatgagtaccacactgggagaaaacaaaagcaaaaagattgtgggaaaagtatagccattatctttgaggaaatgtgtaccaaggcacaatcattaaaaggagttggaggcatcatttggttgacactgttgtcattcttgttctgatcattttggaccttgaagaaattggtgattctctcctagaattagacaaacaaagtgtgtttggaaataatgattgttttcctgccttaaaaaatatattaacagaaagcttttataacaggctgtttccctctggacaggtattaattctgagtaagaattttcagtgactacataaggatttgtgtaacttatgaaggaagagtccatttctaatcaaataattcgcctgttttactagcttatagtgatctgatttcagaattttcctgtatcttttttacatacatcagaaaaagaaatgtttactatatttttggttccatttatgattgtattaagcatttgactataaggaaaactaacaattaaatcaattagaaaagcaacataaaattaaatgatatttaggaaatcagttatatgtgagcttgggtattcaaatgtcacaaataaaaagcatataaccattaaaa

SEQ ID NO: 5306 - DNA, 1611 bp, Homo Sapiens
  NM_024766
gagggtgccgggcgtcacaggtcctgacagggaagaagttggcaggtcctggcaggggacgagctgcggcggtggcacctccgggtgtggaaggctccagtgagatggagtcgcgagtcgcggacgctgggaccggcgagaccgcgcgagcagcgggcgggagtccggcagttggctgcaccactcgggggcccgtagtctcggcgcccctgggagccgcccggtggaagctcctgcggcaggttctgaagcaaaaacacctggatgattgcctgcgacatgtatctgtaagaagatttgaatcatttaatctgttttcagtaacagaaggcaaagaaagggaaactgaagaggaggttggtgcatgggtccaatatacaagcatcttctgtcctgaatacagtatctccttaaggcataatagtggatccttgaatgttgaagatgtccttaccagctttgacaatacaggaaatgtttgcatctggccatctgaagaggttttggcttactactgcctcaagcacaataatatattcagggcccttgctgtgtgtgagctagggggtggcatgacatgcttggctgggctcatggttgctatttctgcagatgtcaaagaagttctgttaactgatgggaatgaaaaggccatcagaaatgtgcaagacatcatcacaaggaatcagaaggctggtgtgtttaagacccagaaaatatcaagctgcgttttacgatgggataatgagacagatgtctctcaactggaaggacattttgacattgttatgtgtgctgactgcctgtttctggaccagtacagagccagccttgttgatgcaataaagagattactccagcccagggggaaagcgatggtatttgccccacgccgagggaatactttaaaccagttttgcaatctagctgaaaaagctggtttctgtatccaaagacatgaaaattatgatgaacacatttcaaacttccactccaagttgaaaaaggaaaacccggacatatatgaagaaaaccttcattacccgcttctgcttattttgaccaaacatggatagaagattaagcttctcaaagacgaagaaacgtatcaagtgcatagggaatatttttacaaaaacggaaatctgtaaggggtataatcgcctgcctgcgccctttgcagcatttcacgtgtgggctatggactccacctgtcctcacccacgttattccccagctgccctctccagctccctccccgcctctttttacactctgcttgttgctcgtcctgccctaaacctttgtttgtctttaaatgtgtataagctgcctgtctgtgacttgaatttgactggtgaacaaactaaatatttttccctgtaattgagacagaatttcttttgatgatacccatccctccttcattttttttttttttttggtctttgttctgttttggtggtggtagtttttaatcagtaaacccagcaaatatcatgattctttcctggttagaaaaataaataaagtgtatctttttatctccctcccaaaaaaaaaaaaaaaaaaaaaaaaaaaaaaaaaaaaaaaaaaaaaaaaaaaaaaaaa

SEQ ID NO: 5307 - DNA, 2484 bp, Homo Sapiens
  NM_024767
tcctcagaggcaggaaatactttccaggcaatctgggcctggttgtggaggccccttttgcaaaacctcagtctgaatttagtagacagaagtcactaggaatgccttgacaggatcctgccttagctaaggctccctccagctgcagagggtgtttttgttagactcacacactgcgtgaaactgctcagaatagagccatgatctcaaccacgaaatgggaacttagattttggagaaactaacggggacggacttctttcctagcctgagtgttgagcagtgtcatgccttggcgtttcagctcctcgttgtctaggtggtgaaatgacagaactcattcgcttctttgattggtgattttgaaataatctttcatcaagttccatctcctttaccctcatatggaatatatctctctgtctgttgttaaactacgatgacatgtctgtagctatcagaaagagaagctgggaagaacatgtgacccactggatgggacagccttttaattctgatgatcgtaacacagcatgtcatcatggactagtagctgacagcttgcaggcaagtatggaaaaagatgcaactctaaatgtggaccgcaaagagaagtgtgtttcactacctgactgctgtcatggatcagagctgagagattttcctgggaggccaatgggtcatctttcaaaggatgtggacgaaaatgacagccatgaaggtgaagatcagtttctttctctggaagccagcacagaaacactagtgcatgtttctgatgaggataacaatgctgatttatgccttacagatgataaacaggttttaaatacccaagggcagaaaacatcaggccaacatatgatccaaggagcaggctccttagaaaaggcactgcccatcatacaaagtaaccaagtttcttctaactcctggggaatagctggtgaaactgaattagcactggtaaaagaaagtggggagagaaaagttactgactctataagtaaaagcctggagctttgcaatgaaataagcttaagtgaaataaaagatgcacccaaagtaaatgcagtggatactttgaacgtgaaagatattgcacctgagaaacaattgcttaactctgctgtaattgctcagcaacgaaggaaacctgacccccctaaagatgaaaatgaaagaagcacctgcaatgtagtacaaaatgagttcttggatactccttgcacaaacagaggactgccattattaaaaacagattttggaagctgccttctgcagcctccttcctgccccaatggaatgtcagctgaaaatggcctggagaagagtggtttttcacaacatcaaaacaaaagtccaccaaaggtcaaggcagaagatggcatgcagtgtttacaattaaaggagaccctggccacccaggaacccacagataaccaagtcagacttcgtaagagaaaggaaataagagaagatcgagatagggcgcggctggactccatggtgctgctgattatgaaactggaccagcttgatcaggacatagaaaatgccctcagcaccagctcctctccatcaggcacaccaacaaacctgcggcggcacgttcctgatctggaatcaggatctgaaagtggagcagataccatttcagtaaatcagacacgagtaaatttgtcttctgacactgagtccacggacctcccatcttccactccagtagccaattctggaaccaaacccaagactacggctattcaaggtatttcagagaaggaaaaggctggtaagttgacattttggttctgttttctcgccaatctattttagaataaatttcaccttaaaataggcattttattaaatatataaaatgtatacatctcatgaatatatgggaaaatgttgtttaaattctgtaaaagaaatttgttttgctcaatatgtaagaaaaatatacgtggttttctgacataatgacattgtgttagaataagatatgtgtttcttggggtcttccttgtaactgcaaccacaatttttttttcttaagcaaaagaattaaatgttgatcaaggttctggggaatgaatttggaaattagttattaataattaccaaggtttatttttactcttaatgacttagtagccacagaaaaagatgtaattgatgcttaaagctgatgccatactatcaaaaatatagtgatgaagcaatgtgaataattgtattgaagaaaaaaattatagtatttttctgtgttctgtgctttaattataattatttaacagtattatgggaaatggacaaggactgatgagaaatgaaaatatgaaaaattagacatggattggtagatctatgtgtttttaaaaaatcatactatcttatgtgttctgtgtaataaaaacgaaaacagattaaaggtatattatctaacttgaaaaaaaaaaaaaaaaaaaaaaaaaaaaaaaa

SEQ ID NO: 5308 - DNA, 3352 bp, Homo Sapiens
  NM_024771
gaagctgcgaggcgcatgcgcgttgcagggccgtccgctctgctgccgccgctgttgcagccaccgccgttgccgcctccctgccggcaagtgtgtgaagaagaagctgagcgttgtcgccgccgctatggggagaaagtcaagcaaagccaaggagaagaagcagaagcggttggaggagcgagcagccatggatgccgtttgtgccaaagtggacgctgccaacaggcttggagaccctctggaggctttcccagtgttcaagaaatatgatagaaacgggttgaatgtctccattgaatgtaagcgagtgtctggactggagccagccaccgtggattgggccttcgacctgaccaaaacgaatatgcaaaccatgtatgagcagagcgagtggggctggaaggaccgagagaaacgggaggaaatgacagatgaccgagcctggtacctcatcgcgtgggaaaacagctccgtccctgttgccttttctcacttccggtttgacgtggagtgtggggatgaagtcctgtactgctatgaagtgcagttggaaagcaaggtgcggcggaaaggcctggggaagttcctcatacagatcctgcagctcatggccaacagcacacagatgaagaaggttatgttaacagtatttaaacacaatcatggtgcctaccagttcttcagagaagcgttgcaatttgaaattgatgactcttcccccagcatgtccggttgctgtggggaggattgctcctatgagatcctgagccggaggaccaagtttggggacagccatcactcccacgcgggtgggcactgtggtggctgctgccactgaactctcagagccactttcaagtcacaatgctctctcctaaggcctttcctctttcctggtctcactgttcaccgggtgtcctcagagctgtggcctccccagccctgcacgtgccaggctgcgccctgagagcacagaaccctggggagaagtggtatcagctgctcctcctctcctaggagaccagagtgctagaagggaatgaaagggagagggaagagtaggtggggccgggcagtgaagctcatcctccacagtggctgcctcctcatttggctcctggggcctgcagtggaggttctcgcacctctgcagcccctagattcctggcaacctcccctcccctgacacatacacacttggacaaatggaatgtttatgtccacctttatgaaagttctggagtcctgggtctggggtttgctggtccccaaagaggaacacactgggtgtaagatctgggtgtagagggcggcttcagagagactcacgcttgcgcagttggaattgctgttaacggagactgggaagatcttttgtgccaagatgcagggaaatgaagaaagctctttccagctgtttttatggattcatggagtgggctcatgttgggaccagctgactctgggaggaagactgcctctccatcgctgtcagagagcctgaaaggaccaacaatgaggtgttcttgggacccgccatggggatgattgcttctctaggctcctggatgttgctgcattctaagcttaacctcctggtctcatggcagtgacttgagcttttgattcatagaagaaagccagaggttctgcttgttcttgtctgccagccctcgtcgttctttctcctctgcctctcacctctaccccaaatacctctgttcttagtctcaaggggagaataacatcagggagcccctcatcttccccagaaggacttctcgttcctcatgtagttaactccattgattttcctatcttggtgctgatagctctctaagggtagggcacacctccccacagccaccctccctcttcagagagcccccagccagcagcaggcccctctgcctgcactcctcaggcttgcccctcgctgcctcagtgaggcactagtgccactgccgtggcccagccgggccatagctcaggctgcagcagaaatgcctctcagtggccaacagttgcttttctctctggtgtcaccctgtggcaacaggctggagcaggggaaggagaaagccttcctcttctctcataggatagaaaggcaggctcagaactaatgctcatcctgatctctaggccttgttcctcttccagggaagaaaagccaaatccttatcaaggaaaaagcacctaacagctccctttggatatccctgagctctgctgtggggagtatcataaaggttctagccttcgtgaagttgttctcgtggaggtctgttggtccctctgacctcagcatctgctcacatcccaccctctgcccaactctggcagtctctcctggcagatctccccagagtggtccttgcttctcacctggattcctgcttgtgcaggagcctgtgtacacagggcctccctcacccagcctggcccctctgctgagcactttgcgctgctcttgatgggcagcagtgggactgggaactccttagagagggccttgcagctttacactggaataagtctgcctctgcctctgcctcaccctgctggctcctggtgggtttcatcccaggcagagttgacattgctggaggggtttggtggactcctaagaatcatgaaaccacaggagcatgtttaggaagagatttgtctctggtccctgtctctgaaaggacacagatgctaaatatttattgtcttagatcatggattcctgatacctctcactcaaggggaccaaaagggacccccccgtgttcatcccttgtaaggtgagttcagtctacgttgtctctttccagtcactggatacgtggcaccaactggtcaatgggtgcttggtgccataccctgctcaccctagtctctgcaggccatgtcctgaagggttcctcaggaggtcgggactagggtgggagaggcactatctgagacctgcaatcactcttgttggtcttgagcccattcatttccaaaacatccatctttctccacttcccccaggtcttggttttgagaaacagcaggcatggctgagtgcggtggcttacacctgtaatcccagcactttgggaggctgaggcaggcgggtcacctgaggtcaggagttcaagaccagcctggtcaacatggcaaaagcccatctctactaaaaaatacaaaaattagccaggcgtggttgtggcctgtaatcccagctactcgggaggctgaggcaggagactcgcttgaacccaggaggtggaggttgtggtgagctgagatcacgccattgcactccagcctaggcgacagagtgagactccatctcaaaaaaaaaaaaaaaaaa

SEQ ID NO: 5309 - DNA, 4172 bp, Homo Sapiens
  NM_024772
ggggtcggcggggccgtttcgcttcgaagattgtttcagaagcgttgggcggcgggcgtccctgagagaaattagaatctggaaactgttcttcaggaagaaacccattagtttggaactggagaattcctttgcatcagatactaaaatgaaagaaccacttttaggtggtgagtgtgacaaggcagtggcatcacagctggggctgctagatgaaattaagacagaacccgacaatgctcaagagtattgtcataggcaacagtccagaactcaggagaatgaactgaaaataaatgctgtgttttcagagagtgcttcacagttgactgcaggcattcagctttctctggcatcatctggcgtgaataaaatgcttccttcagtttcaaccacagctattcaggtttcctgtgctggttgtaaaaaaattctccagaaggggcaaactgcttatcagaggaaaggatctgctcaacttttctgctccataccatgcatcactgaatacatttcatctgccagttcaccagttccttctaagagaacttgttcaaactgctcaaaagacattttaaatccaaaggatgtgattagtgtccagctggaagacactacctcttgcaaaactttttgcagcctatcttgtctttcatcatatgaagaaaaaagaaaaccatttgttaccatatgtactaatagcattttgaccaagtgcagcatgtgccagaagactgctattattcagtatgaagtaaaataccaaaatgtgaaacataatctttgcagtaatgcctgcctttcaaagtttcactctgctaacaacttcatcatgaactgctgtgagaactgtggcacttactgttacaccagctctagtctgtcccacatacttcagatggaaggacagtctcattactttaatagttcaaagagtattacagcatataagcagaaacctgccaaaccacttatatctgttccttgcaaaccattgaagccctcagatgaaatgattgagactacgagtgatttggggaagacagagcttttctgctctattaattgtttctctgcatacagtaaagctaagatggaatcttcttcagtaagtgttgtttctgtggtgcatgatacttcaacagagcttctttctccaaagaaagatacgactccagttataagcaatatagtgtcattggcagacaccgatgttgccttgcccatcatgaacactgatgtcttacaagatacagtttcttcagtaacagcaacagcagatgtcattgtggatctttctaagagttcacctagtgaacccagtaatgctgttgctagtagtagtacggaacagccaagcgtttcaccatcttcatcagtattcagtcagcatgcaattggttccagtacagaagtacaaaaagacaatatgaaatctatgaaaataagtgatgaactatgtcacccaaaatgtacatccaaagtacaaaaagttaaaggtaaatcacgaagtattaaaaaatcttgttgtgcagattttgagtgtttggaaaacagtaaaaaagatgtggcattctgttattcatgccagttgttctgccaaaaatattttagctgtggaagagagtcatttgcaacccacggaacttctaattggaaaaaaaccctggaaaaattcagaaagcatgaaaaaagtgaaatgcatttgaagtcattggaattttggagagaataccaattttgtgatggagctgtcagtgacgatttatctattcattcgaaacagattgagggaaataaaaagtacctaaagcttataattgaaaatattttatttcttggaaagcagtgtttacccttaagaggaaacgaccagtcagtttcatctgtgaataaaggcaattttttagaattgttagaaatgagagcaaaagataaaggagaagaaacatttcgacttatgaattcacaagttgacttctataacagtacacaaattcaaagtgatattatcgaaataataaagactgaaatgttgcaggatattgtgaatgagatcaatgactcctcagcattttcaatcatatgtgatgagacaatcaatagtgccatgaaagaacagctttcaatttgtgtaagatacccacaaaaatcatcaaaggctatcttaattaaggaaagattcttgggttttgttgatactgaggagatgactgggacccacttacataggactatcaaaacttatctgcagcaaattggagttgatatggataaaatacatggccaggcctatgatagcaccactaatttgaagataaaatttaataaaatagcagcagaattcaagaaagaagaaccaagagctttatacatacattgttatgcacactttttggatttatcaataattaggttttgtaaagaagtaaaagaactccgaagtgctctaaaaactctcagttctttgttcaacactatttgtatgtctggggaaatgttggcaaattttcgaaacatttataggctaagtcaaaacaaaacatgcaagaaacatatatcacaatcatgttggacagtccatgatcgtacattactatctgtgattgacagtcttccagagattattgaaacattggaagttatagcaagccattcttcaaatacaagtttcgccgatgaattgagtcatttgctgacattggtttccaaatttgaatttgtcttttgtttgaaattcctgtatcgagtgctgagtgttacaggaattctttccaaagagcttcaaaataaaaccatagacattttttctttgtcttcaaaaatagaagcaattttggaatgtttatcatctgaaagaaatgacgtatactttaaaacaatctgggatggaacagaggaaatatgtcaaaaaataacctgtaaaggttttaaagttgaaaaaccttctcttcagaaaagaagaaaaattcagaaatcagtagatcttggcaattcagataatatgttttttcctacttcaacagaagaacaatataaaattaatatctattaccaaggattagatactatattacaaaatttaaagttatgtttttcggagtttgattattgcaaaataaagcaaatttcagaactgttatttaaatggaatgaaccattaaatgaaacaacagcaaaacatgttcaggaattttataaacttgatgaggacattatcccagaacttagattttatcgacattatgcaaagcttaactttgtcatagatgatagttgcataaacttcgtcagtctcggctgtttgtttattcagcatggtcttcacagtaatattccttgtctctcaaagctattatatattgctttgtcttggccaattacttcagcaagtactgagaactcattttctaccctgcctcgtcttaagacatatttatgtaataccatgggacaagagaagcttactggcccagccctaatggctgttgagcaggagttggtaaataaactaatggagcctgaaagactcaatgaaattgtggaaaagtttatcagtcagatgaaagaaatataatacatgctcatttgaacttacctaaaagacttgtatttccattgggatgttttcatttcaaaattgttcaaaattcaaaagacacagaacgataaacagtgaagtctccttccctcctttagaactcattttctcttcccaaaaagtgttatcttttccttaaatatccctctagaggtatttttcctaagtggtattgtacggtgtatactgttcttcagcttgtcttctctgtgtaacatatttttgagattgtcccatgtcgttacatgaagagtttcttgattcttggtctataattgcagatgttattgtatgaatgtaccataatatatttgagcagtccctgctgacatttttttcctaaccttttgctattataaataatgattcattttataaccttttatataggtcacattgcacatgagtgagtttactgtaagctggaaatctaaagttagaattactaggttaagatatgtgcatttttacttttgatagatattggcaagttgccatctataaggattgtgccagtttacagtcccacccacaatgcatgagagtgcctattaaatctttgtaagtgtta

SEQ ID NO: 5310 - DNA, 2618 bp, Homo Sapiens
  NM_024786
gtgaacgggttgtgggacctgtcgctgtgtgggggctgtcgagcactccccagaacgtaacaaatcctcaggggaactgatgggcggtcgcgcgggcactgggtcctccacaccctggagagccgttttccgttgccactcggctctggccggggtcacattctgcagcatgtctgttcattcccctgggcggggccctgcaccgactccagcccagcccctgctccctctgcggggaacgtggccccaggcagtgctgggccattggctgtcagtgctggtcctggcggctgcattcccagtccccttggtctctgtgacagtgggcggggccggccctcccaggatctgacggcgcaggtcctccccttctgtgtcctgcagatggacacccgctccgggagccagtgttccgtcaccccagaagccatactcaataatgaaaagctggtcttgccgccccgcatctccagagtgaacggctggtcgttacccctgcactacttccaggtggtgacctgggctgtcttcgtgggcctttcctcggccaccttcgggatcttcattcccttcctgcctcacgcgtggaaatacattgcctacgtggtgaccggggggatcttctcgttccacctcgtcgtccacctgatcgcgtcctgcatcgacccggccgactccaatgtcagactcatgaagaactattctcagcccatgcccctcttcgacagatcaaaacatgcacacgtgatccagaatcagttctgccacctgtgcaaggtcaccgtgaacaagaaaaccaaacactgcatttcctgcaataagtgtgtgtccggcttcgaccaccactgcaaatggatcaacaactgcgtgggaagccggaattattggttcttcttcagcactgtggcctcggccacagctggcatgctctgcctgatcgccatcctgctgtatgtcctcgtccagtacctcgtgaaccccggggtgctccgcacggaccccaggtatgaagatgtcaagaatatgaacacgtggctgctgttcctccccctgttcccggtgcaggtgcagaccctgatagtcgtgatcatcgggatgctcgtgctcctgctggactttcttggcttggtgcacctgggccagctgctcatcttccacatctacctgaaggccaagaagatgaccacctttgagtatctcattaataaccgcaaagaagagagttcaaaacatcaagcagtgaggaaagatccatacgtgcaaatggacaaaggagttctccagcaaggagctggcgccctgggctcatctgcacagggagtcaaagccaagagctccctgctgattcacaagcacttatgtcacttctgcacttcagtaaaccaggatggggattcgacggcacgggaaggggatgaagacccgtgtccatctgcacttggagccaaggccaggaactcccggctgatttgcaggcgcctgtgtcagttctccactcgtgtacacccagacgggggctcgatggcacaggaagcagatgatgccccgagtatatctacacttgggctgcaacaagaaacaacagagcccatgaaaactgacagtgctgaaagtgaagactgagattcaggagctcaggtgcccctgtgatccaggtcttctaccctgaaaccccaccctccatcaaggtcctgcctgtagagtctaccttgcaaagcctcctgctcctacccatgctacaggccaggaaccagagcccatcatctcagaggcccctggatgtccttcgaaggaaccaggaccctcagagcccagcatccatctctgtcatcatcttcatcacacccaaagaagagccagccttgcaggagggtttacatctccaggaagatgggctgccagcaactgcagaggatgcagccacctgcttaactgtgctgtccagccagccagccagctgcagggcctcttgctgcttaagagctgatgggccgggcatgttggctcacacctgtgagcacagtactgggaaatgggagcacagtactaggaaatgggagcacagtactgggaaatgggagcacagtactgggaaatgggggctcacagcactgcaaaatgggagcacagtattgggaaatgggagcacagtactgggaagtgggagcacagtactgagaagtgggagcacagtactgagaaatgggagtacactactgagaaatgggagcacagtactgggaaatgggcatacagtactgagaaatgggagcacacagtactgggaaatgggagcacagtactgggaaatgggagcccacagtactgggaaaggggagttcacagtactcggaaatgggagcatagtactgggaaatgggagcacagtactgggaaatgggagcatagtactgggaaaccccagacctggattctgagtttttcagcctagcccagacttcttatcttagtagacaaaaagagtcaataccagagaaccagaggcatcctctgtattttaatgaactctgcattttaatctgtttagtagtcattttttaaaagataatcagttttccaaatatatctataagttactacgtgcaaaaaaaaaaaaa

SEQ ID NO: 5311 - DNA, 2834 bp, Homo Sapiens
  NM_024789
gccagccgtgggattaggcttcgccggctacgattgcggcccccatcttctgacttttcctcgtgtgacccatcttttcaaattcccttacctgaggaaggagcccgattacaaggatatttacctgctcctaccctgatctagggacgaggatgggaagaccgcctgtggccatgagccctccccggtgctcctggggctaaggctggggctgcagccatggggctgggtcagccccaggcctggttgctgggtctgcccacagctgtggtctatggctccctggctctcttcaccaccatcctgcacaatgtcttcctgctctactatgtggacacctttgtctcagtgtacaagatcaacaaaatggccttctgggtcggagagacagtgtttctcctctggaacagcctcaatgaccccctcttcggttggctcagtgaccggcagttcctcagctcccagccccggtcaggcgccgggctctcctcaagggctgtggtgctggcccgggtgcaggccctgggctggcatgggccgctgctggcgctgtcgttcctggcgttctgggtgccctgggccccagctggcctgcagttcttgctgtgcctgtgcctctatgatggcttcctgacgctcgtggacctgcaccaccatgccttgctggccgacctggccctctcagcccacgaccgcacccacctcaacttctactgctccctcttcagcgcggccggctccctctctgtctttgcatcctatgccttttggaacaaggaggatttctcctccttccgcgctttctgcgtgacactggctgtcagctctgggctgggctttctgggggccacacagctgctgaggcggcgggttgaggcggcccgaaaggacccagggtgctcaggcctggttgtggatagcggcctgtgtggagaggagctgcttgtaggcagtgaggaggcggacagcatcaccttgggccggtatctccggcagctggcacgccatcggaacttcctgtggttcgtgagcatggacctggtgcaggtcttccactgccacttcaacagcaacttcttccctctcttcctggagcatctgttgtccgaccatatctccctttccacgggctccatcctgttgggcctctcctatgtcgctccccatctcaacaacctctacttcctgtccctgtgccggcgctggggcgtctacgcggtggtgcgggggctcttcctgctcaagctgggacttagcctgctcatgttgttggccggcccggaccacctcagcctgctgtgcctcttcattgccagcaaccgcgtcttcactgagggcacctgtaagctgctgaccttggtggtcactgacctggtagacgaggacctggtgctgaaccaccgcaagcaggcagcctcggcactcctctttggcatggttgccttggtgaccaagccaggccagacctttgccccgctgctgggcacctggctgctctgtttctacacaggtcatgacctcttccagcagtccctcataacccctgtggggagtgcccatccctggccagagcccccagctccagcccctgcacaggccccgacgctccgccagggctgcttctacctgctggtgctggtgcccatcacctgtgctctgctgcagctcttcacctggtcccagttcacgctgcatgggagacgcctgcacatggtcaaggcccagcgccagaacctgtcacaggcccaaaccctggatgttaagatggtgtgagagctgtggcaaggtcaccccactgaggatgctgctggcagcctggggaaggagccagttttttttggttttttttttaaggatttcatagttttttttttttttttttggagctgttgcccaaaaaaatggatctgttgcagtggtgcaatctgggctcactgaaaccaccacccaggttcaagcaattatcctgcctcagcctcccgagtaggtgggattataggagcgtgccaccatgcccggctactttttgtatttttagtagagacagggtttcatcatgttggccaggctagtctcaaacccctgaccttaggtgatcagcccgcctcggcctcccagagtgctgggattacaggcgtgagccactgtggccaacctaatttttgtattatttagtagagacagggtttcaccacattggccaggctggtctcgaactcctgacctcaagtgatctgcctgccttggtctcccaaagtgctgggaatacaggcatgagccaccgcactcggccaggagctagttttaccagcaccctgctccactgccttcctctagtgcagcctggaagacatggcagcgggtagctcctggggctgagccagaagcatcactgcagtgaaagtctctgcttacctgtctggctcagcttgggcaagggctgggccatatgtgctcagggacgtgcttctcttgtaaggcaggaggacagaagaggaccaagaagggagggggctgccctgtggtgcacacaggcctgccatggggcgtgggagcccatcccgctgcctgactggagctggccgctgtggtggactcaggaaccacttttaatactgcaactgctcccttttgcccagtcagggaaagctgactgtaagtcccacctcccactccgtccacccttctagtggtttctctgagaggtttctctgcttcagctgtgcttgaagtggcatgcctcctctgctgcagggctcccccacccccacacggcctctaaagatgtttatttccttatagactgattaaagtcagccattctttttcctcaa

SEQ ID NO: 5312 - DNA, 4735 bp, Homo Sapiens
  NM_024790
gaggggcggagccccggcccggaggtctgtcatgctgttcccgctccaggtggccgctgtaacctcttcggtccgcgacgatcctctagagcactgtgtgtctccccggacgcgagcccgctcccctgaaatctgcaaaatggctgataatttggatgaatttattgaagagcaaaaagccagattggccgaagacaaagcagagttggaaagtgatccaccttacatggaaatgaagggaaagttgtcagcgaagctttctgaaaacagtaagatactgatctctatggctaaggaaaacataccaccaaatagtcaacagaccaggggttccttaggaattgattatggattaagtttaccacttggagaagactatgaacggaagaaacataaattaaaagaagaattgcggcaagattacagacgttatcttactcaggaaaggttgaaacttgaacgtaacaaagaatacaatcagtttctcaggggtaaggaagaatccagtgaaaagttcaggcaggtggaaaagagtactgagcccaagagtcagagaaataaaaaacctattggtcaagttaagcctgatctaacttcacaaatacagacatcttgtgaaaattcagagggtcctagaaaagatgtcttaactccttcagaggcatatgaagaacttctgaaccaaagacgactagaggaggacagataccgacaactagatgatgaaatcgaattaaggaatagaagaattattaaaaaagcaaatgaagaagtgggcatttccaacctaaaacatcaaaggtttgcaagcaaggctggcattccagatagaagatttcacagatttaatgaggatcgtgtttttgatagacggtatcatagaccagaccaagatcctgaagtaagtgaagaaatggatgagaggtttagatatgaaagtgattttgatagaagactttcgagagtgtatacaaatgacaggatgcacaggaacaaacgagggaatatgcctcctatggaacatgatggggatgttatagaacagtcaaacataagaatttcatctgctgaaaataaaagtgctccagacaatgaaacatccaaatctgctaatcaagatacctgtagtccttttgcagggatgctctttggaggtgaagatcgagaacttattcagagaaggaaagagaaatacagactagaactgttggaacaaatggctgagcaacagaggaacaagagacgagaaaaagatttagaactcagggttgcagcgtctggagcacaagaccctgagaaatcgcctgatagactaaagcagtttagtgtggcaccaagacactttgaagagatgataccacctgaaagacccagaatagctttccagacacctctccctcctttatctgccccatctgtcccacccatcccatcagttcatcctgttccttctcaaaatgaagatttgcgcagtggactcagcagcgcccttggtgaaatggtgtctcccaggattgcacctctgcctccacctcccctactaccacctttggctactaactatcgaactccttatgatgatgcatactatttttatgggtccaggaatactttcgatcccagtcttgcttattatggttcaggaatgatgggcgtacagcctgcagcttatgttagtgctcctgtcacccaccaactagcacaacctgttgtgaatacggttggacagaatgaactgaagattacaagtgatcaagtgataaattcaggattgatttttgaagataaaccgaaaccttccaaacagtcacttcagtcttaccaagaggctttgcagcagcagattcgggaaagagaagaaagaaggaagaaagaacgtgaagaaaaagaagaatatgaagctaaattagaagctgaaatgagaacatataatccctggggaaaaggtggaggtggtgctcctctcagggatgcaaaaggaaatctgataactgatttgaataggatgcacagacaaaatatagatgcctaccataacccagatgcaagaacatatgaagataaaagggctgttgtatctctagacccaaatttagccacttcaaatgctgagaacctagaagatgctgcaaataaaagctcaggtcatatgcaaacacagagctctccttttgctcggggaaatgtatttggtgagcctccaactgaacttcagattaaacagcaagaattatacaagaattttcttcgtttccagattgaggaaaagaaacaaagagaggaagcagagcgagagagactgagaattgcagaagaaaaagaagaaagacggcttgcagaacagagggcacgaattcagcaggagtatgaagaggaacaggaaaagaaaagagagaaagaggaggagcaaaggctaaaaaatgaagagcatattcggttagctgaagaaagacaaaaagaagcagaaagaaagaagaaagaagaagaagaaaaatataacctgcaacttcagcactactgtgaaagagacaatttgattggggaagaaacaaagcacatgagacagccttctcctatagttcctgctcttcagaacaaaattgcaagcaaactccaaagacctccttcagttgacagcatcatacgttcctttattcatgaaagttccatgtccagggcacagtcacccccggtacctgccaggaaaaatcagctccgtgcagaagaggagaaaaaaaatgtaattatggaattatcagaaatgagaaaacagcttcgtagtgaagagaggcgtctacaagagcgattgctacacatggacagtgatgatgaaattcctatcaggaaaaaggaaaggaatcccatggatatatttgatatggctagacatcggttgcaagctcctgtcagaagacagtcccctaagggcttagacgctgccacttttcagaatgttcatgattttaatgagctgaaagatagagattcagaaacacgagttgatctgaaatttatgtacctggatcctccaagagatcatcacaccttagagattcagcagcaagccctgctaagagagcagcagaagaggctgaacagaataaaaatgcaggaaggtgccaaagttgacttagatgccatcccaagtgctaaagtacgagagcaaagaatgcccagagatgacactagtgatttcttgaaaaactcattattggaatctgatagtgcttttattggggcttacggtgagacatatcctgccattgaagatgacgtcctccctccaccatcacagttgccctctgcacgggagcgcaggaggaacaaatggaaaggactagacattgatagcagtcgtcctaatgtagcaccagatggtctctctctaaaatctatatccagtgtaaatgttgatgagcttagagtgagaaatgaggaacgaatgcgaagactgaatgaatttcacaataaacctattaatacagatgatgagagttcactggttgaccctgatgacatcatgaaacacataggggatgacggatcaaactctgtagcaactgagccctggctccgccctggcacttcagaaacgctgaaacgtttcatggcagagcagctgaaccaggagcagcagcagattcctggaaaaccaggcactttcacttggcagggcctgtcgactgcacatggttaaaataaacctgtactggacccagtagtgccttttaaggtgaaaggaatggtaaatctgtacctttaatatgtcctacttttggcccctacctgaaagttactttttttccatcatctgtatataaaattatttttatcatgatgtatattatgtacataaataaaaggccatgattattgatttatataatagaattgtatagattatttttgcacagttttgtcataaattagggtggtaatgaactggattgaactactatatgtgcattatattgaattctgcttgtcattaagataaggtgaataagtgtcttaaacgtcctgtaaaaccggactcccctttgttacatgcacattttccattgttacctcgatgcaaaagaattcatttagtaggtacatctattgtagctgtgattattccagtttctgtgtgatgcaatcaaatgtcctattaattaattattatttcatgtcatttgtagctactgatacagcagaaatgaagggaactgtaattacttgtatttttgtaagccatacgttaaatgtttgttacatcatctttctgcttctatttttatgccaatgaaggcatttgtcttgttactaattacatgatgtaactacttcttgatataaataaatttttattttaattactaaaatctttttaactactatggagctttctagactagttttctagaggttgaatagaggtggggacacccgggagtcaaggacagagagactggagtcttcttcttccaccatggaaccttggataagtgagtccatgtgagttttctaatcactcagtaagtgatacttctaaaaaaggaaagagtcattcaaataattgtgacattctgactcagattagaatctcagaaccatgacagctgagaacatccccaggcactgcttctctctctaataatacttcctctgatgtaattaacggttggtagacaatatcagacaaatttgccacaattaaattactgatattttgaaaaaaaaaaaaaaaaaa

SEQ ID NO: 5313 - DNA, 2221 bp, Homo Sapiens
  NM_024793
cttggctcgctgcgcctctgcctcccaggttcaagagattcttctgcctcagcctcctaagtagctgggattacaggaaatgagaacagaagccattgccagacctctggaaataaacgagactgaaaaagtgatgagaattgcaataaaagagattttgacacaggttcagaagactaaagacctgctcaataatgtggcctctgatgaagctaatttagaagccaaaatcgaaaagagaaaattagaactggaaagaaatcggaagcgactagagactctgcagagtgtcaggccatgttttatggatgagtatgagaagactgaggaagaattacaaaagcagtatgacacttatctggagaaatttcaaaatctgacttatctggaacaacagcttgaagaccatcataggatggagcaagaaaggtttgaggaagctaaaaacactctctgcctgatacagaacaagctcaaggaggaagagaagcgcctgctcaagagtggaagtaacgatgactcggacatagacatccaggaggacgatgaatccgacagtgagttggaagaaaggcggctgcccaagccacagacagccatggagatgctcatgcaaggaagacctggcaaacgcattgtgggcacgatgcaaggtggagactccgatgacaatgaggactcggaggagagtgaaattgacatggaagatgatgatgacgaggatgacgatttggaagacgagagcatttctctctcaccaaccaagcccaatcgaagggtccggaaatctgaacccctggatgagagtgacaatgacttctgacccttttgccaagggaccctggcagattaaaaccctcagacttgtaggtaaatgggaacttagaaggttaggaaggtaacccctgttttgtttactaagctggctggactcatgatcactgaagcaatacttatttctgctttagcctcctatgtttgcattccatgaagcttaaataagaattgaagcaaatccctaagatttatttttttccaccttatttatcttctaaaacttgaggaatgcatgtgttcttagtgattcacatccacgggacaaaaactcaagaagaaataagagctgacgccacacaagtcttggctgcttttgttactatacattttctctgagactccagcagagttggggctggaacttggcactggggactcatgtttggaatcgtaggggaacatctggctgttaatcacttgcacagttgagaacatttcctatacatcggcttttaattctagctcttatttcattttgtaatcttattttctttcgtctgcatgttcacaataccaagcattaaatgtattttaataactaaacttttctgaaagaaggttagctaaagttaaatgaaaacttggtttctttgaaaatcaggcaatagagacaggctccagatgaggaatcctccattttctgtccgaagctgacattcctctggcagtccagttcaccttggattacagccaccttcatgtttccacggttggtactaaatctggaaactctggtgacctgggctgccctctcagaaactccagactcccatggcaatgacagccgggacacttttcttccctccagccagggtttctctaaaggagctttgttttgtctaaagtgtggcaagacatagtgcacaacacagggacaaaggcaggtttcctgcagctcgctacctaagtgtttctgtaggggaaggagccaattaagaaaaagtgttggtacagattcatgtttctgatttaaaaaaacaacaacacaggattgaattaagtagagtaatagcactagaagaatttttctgttgtgaaattagaagtggagttggtttttttcttttttcttcttctttttttttaatatgaaaagtacttagctgggagtggtggcaagcgcccttgggtccagctactcaggaggccaaggtgggaggatcacttgagcccaggagttttagactagcctggacaactaagtgagactccatctctacaaaaaatttaaaaattagccaggtgtggaggggcatgcctgtggtctcagctattcaggaggctgaggcaggagaatcacttgagaccaggaagttgaggctgcaatgagccgtgatcatgccactgcactccagcctgggtgacagagtgagaccctgtcttt

SEQ ID NO: 5314 - DNA, 5679 bp, Homo Sapiens
  NM_024805
atcgccccgcccacacgccgcctgccaggcgtgagtcttcctcccgctctgcgccgtcgccccgcccacacgccgccaccctcgcgtcagttgtcgctccgcgcctgcgcccgttgtctccctgctcgctccgggtcccggcgccgcgccatgtgggctgcggcgggcgggctgtggcgctcccgcgcgggtctccgggccctgttccgtagccgcgatgctgcgctatttccaggctgcgagcggggacttcactgctctgctgtctcctgcaagaactggctcaagaaatttgcctcgaaaaccaaaaaaaaggtttggtatgaaagtccttccttgggttctcactcgacttacaaaccatccaagttggaattcctcatgaggagcacctcaaagaaaaccaggaaggaagaccatgcgcgcctgagggccctgaacggcctcctctataaggcactgacagacctgctgtgtacccctgaagtgagtcaggagctgtatgaccttaacgtggagctctccaaggtttccctgactccagacttctcagcctgccgagcgtactggaagacaacgctctctgctgagcagaacgcacacatggaggctgtcctgcagagaagtgccgcgcacatgaggcaccttttgatgtcccagcagaccctgaggaatgtgccaccgatagtgtttgttcaagacaagggaaatgcagctctagctgagcttgatcagttactggcagtcgcagactttggaccccgggatgaaagagacaactttgtacaaaatgatttcagggaccctgatgccccacaaccctgcggcaccacagagccgaccacaagctccagtctgtgtgggatcgatcatgaggcgctcaacaagcagattatggagtacaaaaggaggaaagataaagggctcgggggcctggtgtggcaggggcaggtggctgagctgacaacgcagatgaaaaagggaaggaagagggccaagccccgcctggagcaggacagctccctcaagagttacctgtcaggcgaggaggttgaagatgacctggacctggttggtgccccggagtacgaatgctatgccccggacacagaggagttggaggcagagagaggaggtggcagaacagaggatggccacagctgcggagcaagcagggagtagatggagaggctctgcccatcccacatttgcagggaaaagcattggcacgcaacgcagcatgtggcttcattgaggcagttgatggagttaaaccatctgctcttctgctacttcaacattttctagcttttccgtgtatctaaacacaatttgctacacaagtcactgtttttttttccatgcactgtgtgtaatttaaaaattaaatggccatcttatcacagattctcacaaaaagaaaatggtaaaatagtgtctctgagatgctggcatggccacctccacctgcagagccctgccaggtgccagtgagtgcttggcccgaggggtcaggccacagcagtggccggggtaagaactgaacctgcaaacctggggagaacagagggtccccagagcctcccaaccccctggagctgggctccgtccctggggctgctgggctggcacgtggcgccgggggctccatccctggggctgctgggtcggcacgtggcgccgggggctccgtccctgactggcctcttcacagctttgtgcagcaggctccaccttctggttcaggccaaggttgggcagaaagtgagttgggtttgctggggcttcctgggcgaccccggctctgaccgtggttccatcacgcctgaagtagtaacacttttcccttggtgcccgtggccagctagtgtattttctaatccatccaaaggtgaaacagacttggtctttgccttctgaagagtgtgcgactctgagtcatactgaattctttgtgtcacctccgacgcaaagattcgttttgctgtttatcagaagagaaaacacagattccataccttgtcagctcctatttagttcggcttccctcttaatgtcccagcccctgtgagctgtcaggttctaaattcagaattctctcaattctgtcaggttctgcactacgagtcagtgtcatccctccaagccctggctctctgccagtgcagcagggctgtgagaatcaagacggcacagggaaggcatctgtcccagcatttgcacatgacaggtgcccacggtgcaggagtagaatctgtggaagcagcagtggctttagttgctgtgccctgccacctcctccccaaaaaggagaagtgtccaagggatagcagacccgtagcactgagcggcctgccgtgctgaccactggatccaggccacgtgctgcagacagcggctgtgggcgagtgatgaggccactacccagaaagctgcatgtgcactgtgtggggtaaggacagtaggagatgctgctgcaagatgctgactcccttgtttttcttttcatttgtgctctgggactaagctgtgtataagtcatcaaatggcagaagcaagatttttcttttgagatctaggaaattatttgtttatactctacactcttatttcctatatcaggatggggaggccactacctcaggccagttaaactaagaagaaagaatttaaggcaatttgtaaggatagacaaaaccccacatgatggtatgagtaggagagagaaaaaaaaaagggagccagaaattaggttacaaagtgtacaccacacataaaggctgatgcctctgttacaccgtgagccaaatgtttatctctagggtttctggtagccagttgcggggtgtccagtgaaggggtgtacatgtctgtggttaatcatataggtcaggataatgaggtgatactgcagtgacaaatggcaaatctccctggcttacaacaaccagtttgcctcttattcttctaggggaccatcatgggctgaggtcaggccaaggccttttgtatctggtgttactggaacatggctatgtgaattcatttatgtacaagagacctccccatcctgatgtaggaaatgaatggtgatgatttacgagcgcaacatcctaaaaaacgtttttgtatttccctagcaagataacttcaggttacaaggctctggtacttgaccatgatgactccatgagaaaacagcagaacgccagctttgcaggtacctccacagcactgccgggctgggaacagggccagtgcttgcaccagcgctggagggggccacagcagagtaaagacagagtctgccatgcaggagtgcttcgcaggtcaggcactgctctgagtgctttgtgttaacctgccccccgccccctaacttgggaaaggtgttaaagaaggagagaacgccctcaatggtgtgtcctttgcatacacacctttgcatgcatctgatgtgcccaggctgtgttttattgttctagcaatttattgttacaaaacagattgctgccatcaatttgtctcaggtccttctagcacatctgacagggactagtgtctagagccatgaggacagagaccagaagggacaagaaggagtgggcagagggaatggaaggtagagttaggcccagagagccccaggctgctgcccagacctccacgcctgtgccggatgtggtgttggcatccatagcagtctcgcaaagttgttctcattttccaaataaggaatctgaggcccagggagaggtgaagtgctgcaggagatccaaccaggcgccggctcagtgcctcctagaaagaggagtgtgggcacgtttgcaggggatccaaccaggcgtcagctcagtgcctcctagaaagtggagtgtgggcatgtttgcaggggatccaaccaggcgtcggctcagtgcctcctagaaagtggagtgtgggcacgtttgcaggggatccaaccaggcgtctgctcagtgcctcctagaaagtggagtgtgggcacgtttgtaggggatcccaccaggcatcagctcagtgcctcctagaaagaggagtgtgggcacgtttcagagaaaactggcttaggcctccctgtttctggcgtggccttccctgggagcgagttagggacacggaagctcacccgcttctgaatgggtccactcctggggatttccgcggccttccctgggagcgggttagggacacggaagctcacccccttctgaatgggtccactcctggggatttccgcggccttccctgggagcgggttagggacatggaagctcaccctcttctgaatgggtccactcctggggatttccacggcctttcctgggagcaggttagggacatggaagctcacgcccttctgaatgggtccactcccggggatttccatggccttccctggatgatccactcctggggattttccgcagctctccagatgacgtgcacgcacactaaacacccagaagttagggaggcactgatccagtgaagtcctcagatcaaccttgtgagctttttacaagtacctgtcactgttaaactgctgatgaaatgtgaaacgacttcacaggttttcagtctgataagctctcctgtgtcactgtcccttaccttgttagtaaaggtcaatggttctcaaagttccgggcacatcccctgggggctcataaaaccagactgtcggccacttcagccttctggttcgctgttccttggtaatgcagatggcccagtaagcaactctacaaacattagaacattttgaggtagacaggggaacttaatcaccccttgtaggcccccagaagactggacccaacatccagcacaatgcctctcagccttggctgtgcatctgaaacacctgctgtttgaagacacctgggcctggagacgggccagagccaccttggtggtctgagtatgaggccagcattagaacctctgctctacgggtgactgccctgggttgatttttttccagtattatctttagtacagaatcttttcctctctaagggcctgagaccctctcttaggaatagaagtacagttttcttccccactccttttgtccagaaggaaaacctggttttacatcagaaacttgaggtactttgaaaatttgccagctgccttgaaggagagagggcttgagtgtattttgggggaagaatgaggggacaacagggcagggagaagggacagagctagaggaaggacaggcctgtgccacccaggccagggtaaggggagcagagaccttttggttcctggtttgtgacacaggaagggagggaactggggaggacaggtcatgatcagtgtttcctgattaaaaattttttatttttatttttaattatcatgggcacagagtaggtgtatatatttgtggggtacatgagatgttttgatacagacatgcaatgtgaaaaagcacatcatggagactggggcacccatcccctcaagcatttatcctttgtgccacaaacaatccgattatattgttttagttatttttaaatatgcaattaaattgttattgactatagtcacccttctgtgctgctgctctactgtggcctcaaagatcataaatgctgtgggtgctggcaagatactgaaataaattaattctgtatttctaaaaat

SEQ ID NO: 5315 - DNA, 3758 bp, Homo Sapiens
  NM_024807
caatgaatccctgcggttggctgggggcagtgggtcccacactgcctcacttccctaaatgggcagcttcacttttagaaccccgggtccttccctggcaggcccaggtggcacatcctgtgtcgggtgggccctcaccttggatctccaggcctgacactgcccagctggatggaaccatggccccagccttcctgctgctgctgctgctgtggccacagggttgcgtctcaggcccctctgctgacagtgtatacacaaaagtgaggctccttgaaggggagactctgtctgtgcagtgctcctataagggctacaaaaaccgcgtggagggcaaggtttggtgcaaaatcaggaagaagaagtgtgagcctggctttgcccgagtctgggtgaaagggccccgctacttgctgcaggacgatgcccaggccaaggtggtcaacatcaccatggtggccctcaagctccaggactcaggccgatactggtgcatgcgcaacacctctgggatcctgtaccccttgatgggcttccagctggatgtgtctccagctccccaaactgagaggaacattcctttcacacatctggacaacatcctcaagagtggaactgtcacaactggccaagcccctacctcaggccctgatgccccttttaccactggtgtgatggtgttcaccccaggactcatcaccttgcctaggctcttagcctccaccagacctgcctccaagacaggctacagcttcactgctaccagcaccaccagccagggacccaggaggaccatggggtcccagacagtgaccgcgtctcccagcaatgccagggactcctctgctggcccagaatccatctccactaagtctggggacctcagcaccagatcgcccaccacagggctctgcctcaccagcagatctctcctcaacagactaccctccatgccctccatcaggcaccaggatgtttactccactgtgcttggggtggtgctgaccctcctggtgctgatgctgatcatggtctatgggttttggaagaagagacacatggcaagctacagcatgtgcagcgatccttctacacgtgacccacctggaagaccagagccctatgtggaagtctacttgatctgaggccacttaagcatggggtggggagcttctcccagagtggccccagggggttagaggaggggtgaagattggggccagtatcgatcttatgaagctggaggacttgtgcagtgctggactcacccaggacttcccaaacccagaggctgccatcctaagcagccccacagcccagtgttctccttgggggcaggaacctggggaggggcccagagcaaagggcatcagggagaaagtcccgaggaaatgtgaccagtggtttctgctcggagctgcagaccccagggctcttggtggaggcaggggaaccctgagagtgctgtttacagagaacctcagctcccgtctgcctcagaaaccctattgggctgagctgccctccccaccagggccactgtgtcctctgcttccctccgttctgcttcagcttcccctaaggttagggaagaaagaatcgggctcacgaatgccagaggcagtgatgtcccatcctggaggagaggaaacagtgactaaaagctggggacccacagaggggttggcagcttctcttgtcgggacaggtgtcctttgctgggcctctggatggccctgccctgactggggctgctcctccctcctgtcctgggaccgcgcagagcccacgctctcactgctgcctcctgctggccgctgcctccttagaaagctgtgaccaggcagctaagagcctctgggctgcagggtcagcctctcccaagactgaagtgcagaggctggacttggggctctctcccccagcttctacacctgggctccaagtctgagttcccacaggggacccagcagcctccaggaagtccataccctggggtggctgagaccttggctctgtatggaggctgctcaccccacagacactggtggggagaccatggctcagaggaagggtggagcaaccctcctcctacccctcaggatagagagagaagacacacttgggacacagtgaagacagtaacttggaactgaccacggcctggaggactggcccaggcagggggacagggaaaatggagcccaagtagcctctggccagggacccaatgtcccgaggaatctgcctcccacccactgactcagggctcagactcagcctctattgtccagagcactggcttggcgtccagcaatgaaggctggagaatgcagcctggattcccctacacacacacacacacacacacacacacacacacacacacacacacacacacaggtgtctactgacctggagtgactggaatagcacctggggataaatgtgacaactgtgcattgaaccctgggtcagggacgttccaatggccaagagagtgacacagccaggaccctggtggacagccagaggggccacttcaggatggatgtggggagagtggaagaggcagggagtaatcctgggggacagcagggaggaggcacttcttccctatgtccaggagagggcaatagagggaagactgaggctgaagaattgacggctctggacccaggacagacagacagacagacagacagacagacagacagacacgcacacacacccatctctgtctagcaagcagcctcctaagatagctgttctccctatcatgacggtgtagccaccatcctgttgtatactaggagagaacttaacccacctgggggaaaatagctccccaagagctggcaccagtaccactgatggccctgcttcctctgagtgagatgcccaggaggaggagccctagggaagaagtcagggacagggaccaggataccactctgtcactgtgtgaccctcagcaagtcactaacccttggcctcatttttcctgtcttgtgaaagaggacaataattcctacttctcaagattgttttcaagataaaataacattagcattgtacaatgatgcaaatgcctcattaccattattccttaagttgttttccagctctaatgttgtttccaacattacatttaagaccttaggattctgtttcttgcttttgtcatatctcttcccaagtgtcatcactatatggatgttgagggcccccgatgacagtccctttggtaaggtcctcttttgaggaggggagggtacagggtggactcatctcagtgtgaacttggcaagtcactgtccctctctgatcttgtttcctcatctggagaaggagtgagagaggagaaaggaagaaaccagtcaggcaggcagttagggtgggttctcggtagaattcttttaaacaaaagaacagcctgaaaaatcaagctgcaggcacagatatgggaacttgcacaggggggcttgcctaagacatgcccacagcctcatagataagacagactacacaggtgacttgcccaaacatgcctgcaatggaaaatttcatcccctgacatgtgcagtaaggggaacaaagcaatatggagtaagtaactcaagccaagggcccacatgtacattagaaggacagcagggagctaccagaaattcatgccttatgcagatgagctgcccagtcctcatcggtttcttataaaagcctttacattcaactgtaaaaatggcaaccctctt

SEQ ID NO: 5316 - DNA, 2803 bp, Homo Sapiens
  NM_024808
agcgcggaagcggggagttaaagagtctatgcctgtcgtggaagctggcctggcccccggagctccctggagtcggtactgggggcttcgttttgtacgcaccgttttctctctgtgctatgggagatgtcaaggaatcaaagatgcaaataacaccagaaactccaggaaggatccctgttttaaatccttttgaaagtcctagtgattattctaatctccatgaacaaactctcgccagtccttctgtttttaaatcaacaaaattaccaactccagggaaatttagatggtctattgatcaactagctgtaataaatcctgtagaaatagacccagaagatattcatcgtcaagctttatacttaagtcattctcgaatagataaagatgtggaagacaaaagacaaaaagccattgaagagtttttcactaaagatgtcatcgtaccctctccttggactgatcatgaagggaaacagctttcacaatgtcattccagtaaatgcactaacataaatagtgactctccagttggaaaaaagctgaccattcattctgagaaaagcgatgctgcttgtcagacattgctgtctcttcctgtggattttaatttagaaaatatattaggtgactattttagagctgatgaatttgcagatcaatctcctggaaacctcagttcttcatccctcagaagaaagctgtttttagatgggaacggaagcatctccgactccttaccttcggcttctcccggaagtcctcacagtggtgttcaaacatcactagagatgttttattcaatagatttgtctcctgtaaagtgtaggagccccttgcagacaccaagttcggggcagttttcttctagccctattcaggctagtgcaaaaaaatacagcttgggaagcataactagtccttcgcctatttcttcacccactttctcaccaattgaatttcagataggagagactccactctcagaacaaaggaagtttactgttcattctcctgatgcttcatctggaacaaattctaatgggataactaatccgtgtatcagaagtccttatatagatggctgctcgccaattaaaaattggtctcctatgagacttcagatgtatagtggtggtactcagtatcggacctcagtgattcagataccttttactcttgagactcaaggtgaagatgaggaagataaagagaatattccttccacagatgtctcatcacccgccatggatgctgctggaatacacctacggcagtttagtaatgaggcttctacccatggtacacatttggttgtgactgccatgtctgttacacaaaatcagtccagtgcttctgagaaagaattagcactgttgcaggatgttgaaagggagaaagacaataacactgtggatatggttgatcctatagagatagcagatgagaccacttggattaaggagccggttgataatggcagtttacccatgactgattttgtaagtggcattgccttcagtattgaaaactctcatatgtgcatgtcacctcttgctgaaagcagtgtcattccttgtgaaagcagtaacattcagatggatagtggctataatacgcagaattgtggaagcaatattatggatacagttggggcagaaagttactgcaaagaaagtgatgcacaaacatgtgaagttgagagtaaatctcaagcatttaatatgaagcaagaccacacaacacagaggtgttggatgaaaacagcaagcccttttcaatgcagcagtccatagaatgcctctgtcagaatcaaagactaagcttaagagttcctcgcatatatcgttgtgcacaggatcaacatgatggtgactgggaaaaaattacttcaagtaacatgcttagctttccctccttaatgtgaaaaatcaagggcttactgacataggaacaacagaaatgctcctggaacttcaagttgctgaattataagtttattttttatcaataaatatttttatacttacattgagtgatgtgtttaacaacaaattgtgacagagctgagtgctcctatcttacagggtcaatgaactacttattaagccttactggtagcactgaatttagcagttctgagaacatgtgaaactatgttaaaactgaaggcactatatatttttacataaaagcttgaacatacagatgaattataacctatgtgaagaaatcttagatataaaactaacttttcaaagatacaaaagaaattaaacaggtttcctgaaattttagttcttggtctgttcacctctgtggggaaaattcttagttccagtgataactgttctagttactacttttaagtatgtaaatactagaaaggtagtactagtgacatcatcacgtgtattgttatctatggggcaaatgtgtggtgcccagaataaaatatacctcatgcctagggtagggacatcctttccagctcaaacgtgggtagggatgtgggagaataagaatgtgggagaaccaagagaaaaagtggggctgggagagtggagttcccgtagggcataggcctgtgaagtaacactggggcagatatgtatgttatatacaactatttttttaaaaaacttatatccatgttgggagtagatgggtatataacagtttggaaatactatctttggagaatgtatttttgtatttataaatcaacttttaaaaactgtctcattcaaaagggaataaagacctgtgtaaaaaaaaaaaaaaaaaaaaaaaaaaaaaa

SEQ ID NO: 5317 - DNA, 3112 bp, Homo Sapiens
  NM_024813
ccggcgtcttagcccgctcttctggccccgccccgcgctacgcgtagggaggcggggcctcggggcgagacgccggagcgtgtccccgtccggcagactactctcccccatggcggacttcgctgggccgtcttctgccggccgcaaggccggggctccccgctgctctcgaaaagccgcaggtactaaacagacaagtactttgaaacaagaagatgcttctaaaaggaaagctgaactagaagcagctgtgagaaagaagattgaatttgagagaaaagctctacatattgttgaacagcttttagaggagaatattacagaagagttcctaatggagtgtgggaggttcattacacctgctcactacagtgatgtcgtggatgaacgttctattgtcaaactctgtggttatcctttatgtcagaagaagctgggaattgtaccaaaacagaaatataaaatttctaccaaaaccaataaagtctatgatattactgaaagaaagtctttttgcagcaatttttgttatcaagcatctaagttttttgaagcacaaattcccaaaactccagtatgggttcgagaagaagagaggcatcctgattttcaactgctaaaggaagaacaaagtggccattctggagaagaagtacagttatgcagtaaagccattaaaacatcagatatcgacaatcctagccactttgaaaagcaatatgaatctagttcttctagcactcacagtgatagtagcagtgacaatgagcaagactttgtttcctccattctaccaggaaacagaccaaattcaacaaatattagaccacagctgcaccaaaaaagcataatgaaaaagaaagctggtcacaaagctaactccaaacacaaagacaaagaacagacagtagtagatgtcactgagcagttaggcgattgcaaattagatagtcaggagaaagatgctacatgtgaacttcctttacagaaagtaaatactcagagttcttcaaatagcactttgcctgaaagattaaaagcgtcagaaaattctgaaagtgaatacagtaggtcagaaataactctagtaggcataagtaagaaaagtgcagagcattttaagagaaaatttgccaaatcaaaccaagtgtctaggtcagtgtctagttcagtgcaggtgtgtcctgaagttggaaagagaaacttacttaaagttttgaaggagactttgattgagtggaagacagaagaaacattgaggtttttgtatggccagaattatgcttctgtgtgtctgaaacccgaagcctctctggttaaagaagaacttgatgaagatgacataatctcagatccagatagtcatttccctgcctggagggaatctcagaacagcttggatgagtctttaccttttaggggctcaggtacagccattaaaccactgccaagttacgagaatttgaaaaaagaaactgaaaagttaaatctgaggatcagggagttttacagaggacggtatgttttgggtgaagaaaccaccaaatcacaagactcagaagagcatgattccacctttccactgatagactcaagttcccagaaccagattagaaaacgcatcgtacttgaaaagttgagtaaagtgttgcctgggcttctggttcctcttcagattacattgggagatatttacacacaacttaaaaatcttgttcgaactttcaggttaacaaatagaaatattatacacaaacctgcggaatggactttaattgctatggtgttgctgtcattactgaccccaattcttggcattcagaaacattctcaggaaggtatggtgtttacacggtttctagacaccctccttgaagaattacatctaaaaaatgaagaccttgaaagtctaaccatcatatttagaaccagctgtttaccagagtgatatattccatgaagacaaaatagaagatgaacttctattcaccgtttctggaattctagccgccatgatggtctggtggtgactgataactagttttattccaagacatacctttacctctttaagtttcaatctcccatctcccagtccttcagtccccaactgcagaggatgacctccccagatagaggagaatcattactccaacaagaataaccaagtctttgtatccctagtacaagacatagtatttttattcgaaaatgaatgtttaagtattaaattgaaacttgaatgaatattcaagaaaatataatgatctctactttttctggatgatttccagccatcatatcagtttgccaaaaaaattgagaaagttatgattttgacctcccaacctaaactctaaattctaaagatcagtaaacaattaggtcaataaatacatacaatttaagatgaagccctttggaagtctagtccaaaacaggaaaatctcagaactttctggactcaaggaaatgctttaaatggaatctgtagtttgtttgcaggagagacaatttctagaatttagattgcttttcaaaatgtttatcaggtaggcaagttagcagttgaggcggaacacagacaacttggggagctttactggaaggccaagaaaatactcttggacactggaggaaatgacagctactaaagcccaatcatggaaaaggaccagaaagcagcccactggaatggggagcttagtgggcaaggaggtagggatataatttctcttcttggctccaccagtaattagctctgtggcccagtcacctaaactttctggacttcagttcaggttgtatggcagtaggccatagaattggctactgccatacaatctctatgggaaaggactgcaaaaactaaattttatctctgtatgggcaaaggctactgtcatcctgttgttggtctggggccactctgacaattttttttaacctcatttgattgtgtaagggtctaaccacaacaaaaaatcatagtgtaatagaattaatcaagttcagcaaggtcacaggctagatcaatatacagaaaatcaattgtatttttctgttcagaaaactccaaaaatgaaataaagaaaattgtgttcacaatatc

SEQ ID NO: 5318 - DNA, 4266 bp, Homo Sapiens
  NM_024814
atttttaccactgctctccccttccccggtccccctggtgtcctttccacagttaaaggctactttctcttgaagcacatgaggagaagccttagcaacctcaataccgaagttcttcgcgcgctcgctctttctgcctccgcccgaactatgcctgagtccctcacaggagttggatagtagaggcgagagaaggaagtctttgcaggccaaaattgggacaacctgcttggacttccgcctcccggcctccggaaggcagtgcgcacgcgctcgctgcgactccggcgcggttgacttccgctcccactgtgctctgcgagccgaatcatggatcacactgacaatgagttacaaggcactaatagttctggatccttgggtggtcttgatgttcgcagacgaattcctataaagctcatctccaaacaagcaaacaaagcgaaacctgcaccgcgaactcaaagaactataaacaggatgcctgcaaaggctccacctggtgatgaagaaggatttgattataatgaagaagaacggtatgactgtaaagggggtgagctgtttgcaaatcagcgaagatttcctggacaccttttttgggactttcagataaacatcttaggtgaaaaggatgatacaccagttcatttctgtgacaagtgtggattgcctattaaaatctatgggagaatgattccatgcaagcatgttttttgctatgactgtgctattttacatgaaaaaaagggagataagatgtgtccaggctgtagtgatcctgtgcagcgaattgagcagtgtacacgaggttctctcttcatgtgtagcattgttcaagggtgcaagagaacatatttgtctcagagagacttacaggctcatatcaaccatcgccatatgagagctggaaaacctgttacccgtgcttcacttgaaaatgttcatcctcctattgccccaccaccaactgaaatccctgagcgttttataatgccaccagacaagcaccatatgagccatattccgccaaagcagcacatcatgatgccaccacctcctttgcaacatgtgccacatgagcactataatcagccacatgaggatattcgtgctcctccagcagaattgtccatggctccacctccacctcgatcggtcagtcaggaaacctttcgtatttcaacaagaaaacacagcaatttaataaccgtccctattcaggatgactcaaattcaggtgctagagaaccaccacctcctgccccagcacctgctcaccatcatcctgaatatcagggtcaaccagtggtatcgcaccctcatcatattatgcctccacagcaacattatgcaccacccccacctcctccaccaccaataagccatccaatgccacatcctccccaggctgcaggtactcctcacttggtatatagccaagctccacctccaccaatgacctctgctccaccaccaataacccctccccctggacatattattgcccagatgccaccttatatgaatcatcctcctccaggacctcccccacctcaacatggtggtccacctgtaactgcaccccctcctcaccattataatcctaactcattaccccagttcactgaagatcaaggaactctgagccctccatttacacaaccagggggaatgagtcctggtatatggcctgcaccaagagggccaccaccacctccacgattgcagggtccgccttctcaaaccccacttcctggaccacatcatccagatcagacaagatatagaccgtattaccaatgataatagtattttgaatggaagatatgagggggaaaaaaacttatgtgtagtcaatcttttaagctttgactgttttgggaaggaagagtacctcttatcgaggtagtataaaacacatagggtcttgtttcttaaaatggttttaaatcttgaccttaagattgatttcaagtaccatactgtagtacagataagtggctcagttgagcacagctatattttaacatctctttgttcccctagtttagtaaattgacccagaggtgaccatttgtaaaaaatttgaaaaaatttttcattgttttacttcaaaagtattgttttgttaaacccaacgtttagtttttcttgtgatacattttgttaacctgtgtaaaaggattaaatttcaatatggttgtaaaaatgctatttttatgtgaatttaagtgcagccacatactgttttttaaaccatatgttttaccactaatttcccaaagttataataaaatcctgaaagtaaaaatctactagaatttgctgtaaggcagactgttaaatgatagagaattatttcacattttaggcactgaaatgttgaggtttcgaggtatagtaagtatacaatgcacttcacttggatgccttttcatttttaggcagcctcaggagcaccaaaatacattggaattctagtactaagatatatttgttcgtaatgttaaaagacattactaattatttggaaagagatggccaaaataatcaactctacaggcttcaagctggtgggggaatgctgttactcattaatgcttttttactgaatggtcggaatcacatatgcaccacacatactgatcttaagtaacattattttatagaactgtttaaatgggtttaaatggtgttctttagatgaaatgtgttctgttttgttcattgtcttaaactgaatagggctgaataggctttatgtaattcttcatttcatggtagagtttgatgctgtgtttaagtgggttcttgtttataggattttcaactacagtttgaatgccatggaggaatttgaataatatattaatgaaggacatattcttgtaatcacaaatttgcatttgctcaggtttcattgctgtgtgataggatttttcctctaacttgaaatttaaaaacttttatttcctattccttttgtcggtaaagcagtctgaatttggaacattttatcatggagtcaacagtgaagactaccagataattttgtattggagaagaggaaataacagctaaattgtggatttcagtgctttacatggtgcctttcgagtcagcttttacattataggggcttgttatagtttagctaagatgaccacttaacagtttatacagaactcatatgtataaatcaacattcttaggatattatttatatcctttgaataaatccctgtgaagtttttcctccccactaaaatggtgcataataaaacatgaaatatgtagtatgcagatatcatttattagatagtttgtagtgtatacatttagaacatacttcttttgacaaagggtgatctgattgctaatttaccattttattctgtcaggtacaggtgaaacaaattctcatcttgaatgatcagatgcaaaatcatttctgaaccctagagcagaagttagaaataacaaaatggccgtttcaaccttgactggccaaaaataactaataaacttttttgttttaagtcaggcaagtgattttctacatttagcagtttgaaagtccagtgttaatgcaatatttctagtgagaaatgcttgttattaaaagcatgggagtgatagtgtgaaatggtggtgagtgcttctatcatattactgtaggtacttggactggtgcaaacttgattccttttcatccccctgtttaggagctattaaaatattactgttaaaaatccaaaccattctttgttccatgtaataagaaaatagccaaaatcactttagagcttctcaactatttatgaagagctatcctgcttttattgaaagtcactagagttgaatgtggtaagaaaccacttagcctatgtattggacgagaaaatcagtatcatgataaaattttgaattaagagaacccttgtagagtttttaaaaaatgatttattttcaattaggtttaagaaatctatgttatgcagggaggcatatcagatgaatgttgtagcagacaaaagttttaaatcgtgttagacttgaattcatcaattgtttgaatgagggtgggtgggtagaaggataacaaaattactgttagtgtttctttccttacggaaaaagatgtgaatcccagccttatttcagggaagcctttgaagctatgatggacataagtctaaattaaatgtatgtatgtttcattatattgctcttaagactactgaggtggcagtttaattctta

SEQ ID NO: 5319 - DNA, 2133 bp, Homo Sapiens
  NM_024819
ggccacgctttgaggaaagaaggggcgcaaggttggtgggaccgacccttgggaaccgggcggccgcctggcatgatgggagttgtagttcgatgctggtttagggtttcaggcgtggaggttccaaaatccgaggtttgatttcagcctgcccttgccagtgcctgggccgctgggagccgttattggctgccgttaaggaccgttacgtttcccgggtccttctggcactcctctggtggaccgcccccatcggccacacttgccctgctctccagtgattctgtagctcctggctccgtagtctcgcggacagctctctttcctggaagatgtttctggtgggcctgacagggggcattgcctcaggcaagagctcagtgatccaggtgttccagcagctgggctgtgcggtgattgacgtggacgtgatggcccggcacgtcgtgcagccaggataccctgcccaccggcgcatcgtagaggtcttcggcactgaggtcttgctggagaacggcgacataaatcgcaaggtcctgggggacctgatctttaaccagcctgaccggcggcagctgctcaacgccatcacccaccccgagattcgcaaggagatgatgaaggagacgttcaagtacttcctccggggataccgctacgtgattctggatatccccctgctgtttgagaccaagaagttgctcaagtacatgaagcacaccgtggtagtatactgcgaccgggacacacagctggcacggctgatgcggcggaacagcctgaaccgcaaggacgcagaggcccgcatcaatgcccagctgcccctgacagacaaggcccgcatggcccgccatgtcctagacaactcgggcgagtggagtgtcaccaaacgccaggtcatcctcttgcacactgagctggagcgctccctggagtacctgccgctgaggtttggggtcctcacagggctcgctgccattgccagcctcctctacctgctcacccactaccttctgccttacgcctagtggggcactcaaggcagggagccccaggcctccatctatctccttggaggctgaagccaggtaacacatcctgtttcctctcagccccctccccacacacacacacacacacacacacacacacacacacacacacacacacacacggactctccgaatcagggctgggcctctgtgccaggccatcccgtctttggagtgtatcctatttgaggtcaagaaatagcctgctgtccttcccaccttccctgagcagcacctacagaacagcaaccgtgatggtgtgtgaaagcaacagtcagagactgctatacatttctgtgggtgggggtagggaatactggctctgtggccctcctcagagctgggaggccaagggttcactgggcttgaatcctctctaagcacctaccccattgtggcctaaacctcctcagtggaccacgggaaatcatgttggaccaagggtttccatgttcaaacagtcaacaaggccctcccctaggttgagatattttttatactgaaggcccaggccccccagtatggcttgctgccagcaagcagcaaggattctctcgtgggtaacgctgtagccaggcaggaccagcctcttctgggagacccctctccccacgtagggtttgtgtagtgctcccacatcctgcttattgcctgccacccctgcttctcgcctggacctcttggtattccgtgtacaccatccttgctgtttcttgcctctgtgccttcaacctgctgctcctggcctgggataccttttattttcttttatttcttcttcctttttttttttttttttttttttaacctacaactagctctcagttcaggcactgtctaaagccccaggctgggttaggtggtctaggataccaactccccctcaacattttaccttaatccaacagtacagtaattagccgaaacttgcctggtttttcctactagactgtaagccctctagggacagggacagtgtcttattcatctctgtgttcttagtgcagagcctggcccgctgttggtgtttaataaagtgtgttgatctgaaatgccccagaccaaccaagaaaaaaaaaaa

SEQ ID NO: 5320 - DNA, 4208 bp, Homo Sapiens
  NM_024824
tgagcacaggtttcgcgggtagaaggcgtgcgcaggcgcggacacgggcgcatgcgcgttcactccggcgcgcagtgccggccggggcggggatacgccgtgtgcgcggccgggggcggaacggaggaggaggcggtggtgtcccggctgcggggtaggagtccgcggcagcctccgggtaagccaagcgccgcgcagtgctgagttcccgcacgccgcagagccatggagatcggcaccgagatcagccgcaagatccggagtgccattaaggggaaattacaagaattaggagcttatgttgatgaagaacttcctgattacattatggtgatggtggccaacaagaaaagtcaggaccaaatgacagaggatctgtccctgtttctagggaacaacacaattcgattcaccgtatggcttcatggtgtattagataaacttcgctctgttacaactgaaccctctagtctgaagtcttctgataccaacatctttgatagtaacgtgccttcaaacaagagcaatttcagtcggggagatgagaggaggcatgaagctgcagtgccaccacttgccattcctagcgcgagacctgaaaaaagagattccagagtttctacaagttcgcaggagtcaaaaaccacaaatgtcagacagacttacgatgatggagctgcaacccgactaatgtcaacagtgaaacctttgagggagccagcaccctctgaagatgtgattgatattaagccagaaccagatgatctcattgacgaagacctcaactttgtgcaggagaatcccttatctcagaaaaaacctacagtgacacttacatatggttcttctcgcccttctattgaaatttatcgaccacctgcaagtagaaatgcagatagtggtgttcatttaaacaggttgcaatttcaacagcagcagaatagtattcatgctgccaagcagcttgatatgcagagtagttgggtatatgaaacaggacgtttgtgtgaaccagaggtgcttaacagcttagaagaaacgtatagtccgttctttagaaacaactcggagaaaatgagtatggaggatgaaaactttcggaagagaaagttgcctgtggtaagttcagttgttaaagtaaaaaaattcaatcatgatggagaagaggaggaagaagatgatgattacgggtctcgaacaggaagcatctccagcagtgtgtctgtgcctgcaaagcctgaaaggagaccttctcttccaccttctaaacaagctaacaagaatctgattttgaaggctatatctgaagctcaagaatccgtaacaaaaacaactaactactctacagttccacagaaacagacacttccagttgctcccagaactcgaacttctcaagaagaattgctagcagaagtggtccagggacaaagtaggacccccagaataagtccccccattaaagaagaggaaacaaaaggagattctgtagaaaaaaatcaaggaactcaacagaggcaattattatcccgactgcaaatcgacccagtaatggcagaaactctgcagatgagtcaagattactatgacatggaatccatggtccatgcagacacaagatcatttattctgaagaagccaaagctgtctgaggaagtagtagtggcaccaaaccaagagtcggggatgaagactgcagattcccttcgggtactttcaggacaccttatgcagacacgagatcttgtacaaccagataaacctgcaagtcccaagtttatagtgacgctggatggtgtccccagccccccaggatacatgtcagatcaagaggaggacatgtgctttgaaggaatgaaacccgtaaaccaaactgcagcctcaaacaagggactcagaggtctcctccacccacagcagttgcacttgctgagcaggcagcttgaggacccaaatggtagcttttctaacgctgagatgagtgaactgagtgtggcacagaaaccagaaaaacttttggagcgctgcaagtactggcctgcttgtaaaaatggggatgagtgtgcctaccatcaccccatctcaccctgcaaagccttccccaattgtaaatttgctgaaaaatgtttgtttgttcacccaaattgtaaatatgatgcaaagtgtactaaaccagattgtcccttcactcatgtgagtagaagaattccagtactgtctccaaaaccagcagttgcaccaccagcaccaccttccagtagtcagctctgccgttacttccctgcttgtaagaagatggaatgtcccttctatcatccaaaacattgtaggtttaacactcaatgtacaagaccggactgcacattctaccatcccaccattaatgtcccaccacgacatgccttgaaatggattcgacctcaaaccagcgaatagcacccagtcctgcctggcagaagatcatgcagtttggaagttttcatgtactgatgaaagatactctacagaacttgtcaaatctttgaaacttggaatatattgctttcataatatgaagttttattgcctatctatctgaagtgtctaatttttcaagtttgtaagtttattatgtggttttaacattgggtgtttttgttttgtttttactatgaaaagacagcttaaggaagagctaaattctgttaaaatatttggggcatgtttgtgcactgctgttgtgaggatcagcatatgaaattgacatcatggttagtcatggtactgcagcttagggggctacacggttgctgtgtgagtggagagatgcagtgaggcagttgtcattattctaaaaattgtactactttcacttttcccaaagattatataatgttcataatccaccatgaaaacagcattggccaaaggtactgaggctgcttaaaatattcaattctgctttttaatttttaagtgaatttagtttgaaaagcatgattatacaggcctctcaggctgagtgctactttggtaaagttcccagttttcctgccttctgtgacaggatgaatgaggtgggtatggacagtggaggcagctggaatggcaagtgcagaaaataggaacagttctatacagtgctctcatttactaataacataatgccttctaaataatttttttgggaaactacattatcacaaaattatacaaatttttttacaagtatttacatactgtatctgaaaacagactttaaagtcacaagattataaatgtacatatatattctcacattctgaaaaataacattctcagaatccacagaaaatatacttagttactactgaagataatttttgaaatgtaaaaattagatttaaatagtatattttaaatgacagaactataattacagagatcagatcagataggtaaactgcaagatagataggatgaaacttttggcctactgtattacttacagagtttttttgtgtgtggtttttaaaactgttaaggcaagaagtgtcaaatgctttagagttaaataacagatcactgatttcaaagacttggtgtatagtgttaaaaattaaagcttaaaaggtggttagaaaagtggattaatgcaaaaggggtaataaagactgcaacattctcaggaccaaattaaactgctaaaaaaaaaaaaaaagttcattgacttgcttagtcgtatactcaaatgatgataaacctacatgtgcaaaggctcacgtttaagattgtcaagccagcagtctactgttgtgttgccattgcttttccattgggagaagaaagaattaaccagtcattaaaccatttggtaagttgcactttgctgtgctgatcccacaggaaaggcttgaaacacgagaagcagcaaagacagagcacacaagtgcataaggctgttgtcttcggcttgggtgaaatgacagttcctcttcattctaaaggtttactccattgaatttaaggcatttgttcattccagtgttgagatgctttgcatctctgcagaagaaatttattttaaattgtttaaatatctggaaatacttttagctatcatttataaagatagttttgttctcagtttcactataaattatagaacaaatgggaaacaagggtttaatttagttcagccattttacaaggaaataataaaatactaaaatctgaaaaaaaaaaaaaaa

SEQ ID NO: 5321 - DNA, 1951 bp, Homo Sapiens
  NM_024829
gagcccggagcaggccgggctcaagaaagaggaaagttgaggacgccccacctcggagaggcggcgcccctgagtaggccaggagcctctcttgcaacttctgccaccgcgggccaccgcggccgcctgatcccgcagaggaaggtcgcggccgtggagcgatgacccgcggcggtccgggcgggcgcccggggctgccacagccgccgccgcttctgctgctgctgctgctgctgccgctgttgttagtcaccgcggagccgccgaaacctgcaggagtctactatgcaactgcatactggatgcctgctgaaaagacagtacaagtcaaaaatgtaatggacaagaatggggacgcctatggcttttacaataactctgtgaaaaccacaggctggggcatcctggagatcagagctggctatggctctcaaaccctgagcaatgagatcatcatgtttgtggctggctttttggagggttacctcactgccccacacatgaatgaccactacacaaacctctacccacagctgatcacgaaaccttccatcatggataaagtgcaggattttatggagaagcaagataagtggacccggaaaaatatcaaagaatacaagactgattcattttggagacatacaggctatgtgatggcacaaatagatggcctctatgtaggagcaaagaagagggctatattagaagggacaaagccaatgaccctgttccagattcagttcctgaatagtgttggagatctattggatctgattccctcactctctcccacaaaaaacggcagcctaaaggtttttaagagatgggacatgggacattgctccgctcttatcaaggttcttcctggatttgagaacatcctttttgctcactcaagctggtacacgtatgcagccatgctcaggatatataaacactgggacttcaacgtcatagataaagataccagcagtagtcgcctctctttcagcagttacccagggtttttggagtctctggatgatttttacattcttagcagtggattgatattgctgcagaccacaaacagtgtgtttaataaaaccctgctaaagcaggtaatacccgagactctcctgtcctggcaaagagtccgtgtggccaatatgatggcagatagtggcaagaggtgggcagacatcttttcaaaatacaactctggcacctataacaatcaatacatggttctggacctgaagaaagtaaagctgaaccacagtcttgacaaaggcactctgtacattgtggagcaaattcctacatatgtagaatattctgaacaaactgatgttctacggaaaggatattggccctcctacaatgttcctttccatgaaaaaatctacaactggagtggctatccactgttagttcagaagctgggcttggactactcttatgatttagctccacgagccaaaattttccggcgtgaccaagggaaagtgactgatacggcatccatgaaatatatcatgcgatacaacaattataagaaggatccttacagtagaggtgacccctgtaataccatctgctgccgtgaggacctgaactcacctaacccaagtcctggaggttgttatgacacaaaggtggcagatatctacctagcatctcagtacacatcctatgccataagtggtcccacagtacaaggtggcctccctgtttttcgctgggaccgtttcaacaaaactctacatcagggcatgccagaggtctacaactttgattttattaccatgaaaccaattttgaaacttgatataaaatgaaggagggagatgacggactagaagactgtaaataagataccaaaggcactattttagctatgtttttcccatcagaattatgcaataaaatatattaatttgtcactttaaaaaaaaaaaaaaaaaaa

SEQ ID NO: 5322 - DNA, 3869 bp, Homo Sapiens
  NM_024832
agaagggagcgagagccccagagcgcggcggcagcggcggcctggcccttccagagggccagagccagggacatgcgggcgcccgggactccgcgttccgcgcggcccggcgcctgagcgcctccgttccccgtcccggagctgccggcggcatgatccgacacgccggggcgcccgcgcgcggggaccccacgggtccggttccagttgttggcaaaggagaggaagaggaagaggaagatggcatgcggctttgtctgccagccaacccgaaaaactgccttcctcaccgccggggcatcagcatcctggagaagctcatcaaaacatgcccggtgtggctgcagctgagtctgggccaggcagaggtggccaggatcctgcaccgggtggtggctgggatgttcctggttcgccgggacagcagctcgaagcagctggtgctctgtgtccactttccttctctgaacgaaagctcggccgaggtgctcgaatacaccattaaggaagaaaagtcgatattgtacctggaaggctcggctcttgtgtttgaggacatcttcagattgattgcgttctactgtgtcagtagagacttactgcccttcacactgcggctaccccaggccatccttgaggccagcagcttcacggaccttgagaccatcgccaacctgggtctgggtttctgggactcctcgctgaatcctccacaagaaagagggaagccagcagagcccccaagagaccgggcccccggattccccctagtctccagcctcaggcccacagcccatgacgcaaactgtgcctgtgaaatcgagctgtcggtaggaaatgaccgcctgtggtttgtgaatcctattttcatcgaggactgcagcagcgccctgcccaccgaccagccacctcttggaaattgccctgcacgccctttgccgcccacctctgatgccacctcacccacctccaggtgggccccacgccgcccaccaccccctcccccagtgctgcccctgcagccctgcagcccagcccagccccctgtgctccctgctcttgcccccgcccctgcctgtcctttgcccacctctcccccagtgcctgccccccacgtcacaccccatgccccaggtcccccagaccatccgaaccagccgcccatgatgacctgcgagagactcccatgccccactgcaggcctgggccccctcagggaggaagcgatgaagccaggggcagcctccagtcccttgcagcaggtccccgccccgccactgcctgcgaagaagaaccttcccactgcccctcccagacgccgcgtttccgagagggtgtccttagaagaccaaagtccggggatggcggcagagggggaccagctcagcctgcctccccaagggacctcagacggccctgaggacacgccccgggagagcacggagcaaggccaggacacagaggtgaaagccagcgatcctcacagcatgccagagctgcccaggacagccaaacaacccccagtcccgccccccaggaaaaaacggatctctcgacaactggcctcgaccctcccagctcccttagagaacgctgagctctgcacacaggcgatggccttggagacacccacgccgggtccacccagagagggccaaagccctgcttctcaggctgggactcagcaccctcctgcccaggccactgcccattcccagagctctccagagttcaagggctccctggcctccctctcagacagcttgggggtgtctgtcatggccaccgaccaggactcctactccaccagcagcacggaggaggagctggagcagttcagcagccccagcgtgaagaagaagccctccatgatcctgggcaaggctcggcaccggctgagctttgccagtttcagcagcatgttccacgctttcctctccaacaaccgcaagctgtacaagaaggtggtggagctggcgcaggacaagggctcgtactttggcagcctggtgcaggactacaaggtgtacagcctggagatgatggcgcgccagacctccagcacggagatgctgcaggagattcgcaccatgatgacccagctcaagagctacctgctgcagagcaccgagctcaaggccctggtggaccccgccctgcactccgaggaggagctcgaagcaattgtagagtctgccttgtacaaatgtgtcctgaagcccctgaaggaagccatcaactcatgcctgcatcagatccacagcaaggatggttcgctgcagcagctcaaggagaaccagttagtgatcctggccaccaccaccactgacctaggtgtgaccaccagcgtgccggaggtgcccatgatggagaagatcctgcagaagttcaccagcatgcacaaggcctactcacctgagaagaagatctccatcctgctcaagacctgcaaactcatctacgactccatggccctcggcaacccagggaagccctatggggcggatgacttcctgcctgtgctcatgtatgtgctggcccgcagcaacctcacggagatgcttctcaatgtggagtacatgatggagctcatggaccccgccctgcagctgggggagggttcctactatctgaccaccacctacggggccctggagcacatcaagagctacgacaagatcacggtgacccggcagctgagtgtggaggtgcaggactccatccaccgctgggagcgccggcgtactctcaacaaggcccgggcctcccgctcctccgtacaggacttcatctgcgtgtcgtacctggagcccgagcagcaggcgcggacgctggcgtcgcgggcggacacccaggcccaggcgctgtgcgcgcagtgcgcggagaagttcgcggtggagcggccgcaggcgcaccggctgttcgtgctggtggacgggcgctgcttccagctggcggacgacgcgctgccgcactgcatcaagggctacctgctgcgcagcgagcccaagcgcgacttccactttgtctaccggcccctggacggtggtggcggcggcggcggcgggagcccgccctgcctggtggtgcgggagcccaacttcctgtgaggccctcccggggcgcctcccctcacccccaggcgcacgtctggccccgcctctggctgcgcactcccgaccgcgacgtccacgcagcagagggacatgggccattccatgacgtgcccaggccaacgtcgcaggacagttgtgaaaataacatgacgctcgtccaaggccacttcctgagggcaagtcctaatagccctgagacaccgagacggcatgttcttcattagacggaaagggaaactgaggctcaggagagaggcgctccaggccgctgcagccaacaaaccggcgccctcttcacacgtagctcctcaggccattccccatgagtcccccacacccaccccatcctcggtctttgcaaagaagggcccgagcttagtttccccaggactggcctaggaaggagcaccggccacagctgctccccgtgccactcagggtggacccagcatctcaggagcacctcagggtgtcggttaagagacaggcctccacccctgcaccagagcctgctcttagctcccggtgcccccagaccccgcagctctgtgcccggcaagaagcagctagacacacgccagggcgccaagcacggccagctccgcggacccatggacaagcccagccccgcctcagggaaaacagggcctttccctacaggacacgccccagagctgtggcagattgcaggagccatcgtgtggggagaatttaataaaagcccttttgaaaaaaaaaaaaaaaaaaaaaaaa

SEQ ID NO: 5323 - DNA, 2477 bp, Homo Sapiens
  NM_024833
cttgtagcggacattttgtttctgtcaggctgtccctggccggggttctgtaacgcttgtgtgggccgcaggtggaggtgttgggaaagcgcggaggagatgttgtccccagtgtcccgagacgcgtctgatgctctgcagggacggaagtgcctgcgtccccgatcgagacgcctgccgctcccggcagctgtccgcgcccacggtcctatggcggagctaacggactccgcgcggggctgtgtggtctttgaggatgtgtttgtatacttctctcgggaagaatgggagcttcttgatgatgctcagagacttttgtaccatgatgtgatgctggagaactttgcacttttagcctcactgggaattgcattttccagatcacgtgcagtcatgaaactagagcgaggagaagagccctgggtgtatgaccaggtggatatgacttcagccacagaaagagaggcccagaggggacttagacctggttgttggcatggagtggaggatgaagaggtatcttctgagcagagcatttttgtagcaggagtgtcagaggtcaggactctcatggcagagctggagtctcacccatgtgacatatgtggcccaatattgaaagataccttacacctggctaaataccatgggggaaaagccaggcagaaaccatacttgtgtggggcatgtggaaagcaattctggttcagtacagactttgaccagcaccagaaccagcccaatggagggaaacttttcccaaggaaggagggcagagactctgtgaaaagctgcagagtccatgtgccagagaagaccctcacatgtgggaaaggtaggagagacttttcagccacatctggccttcttcagcatcaggcctctctcagcagcatgaagccccacaagagcactaagcttgtgagtggctttctcatgggacagaggtatcacaggtgtggtgaatgtgggaaagccttcacccgcaaagacacacttgctcggcatcagagaatccacactggagaaaggccttatgagtgtaacgaatgtgggaaattcttcagccaaagctatgacctctttaaacaccagacagttcacactggagaaaggccatacgagtgcagcgaatgtgggaaattctttagacaaatctccggcctgattgagcacaggcgagttcacacgggtgaaagactctatcagtgtggcaaatgtgggaaattttttagcagtaagtctaatctcattcgacaccaggaagttcacacaggagccaggccttatgtatgcagcgaatgtgggaaagagttcagtcggaaacacacacttgttctgcaccaacgaactcacactggagaaaggccttatgagtgcagtgaatgtgggaaggcctttagccaaagctcccaccttaatgtacactggagaattcacagcagtgattatgagtgtagcagatgtggtaaagctttcagctgcatctccaaactcattcagcaccagaaagttcactctggagaaaagccttatgagtgcagcaagtgcgggaaagccttcactcaaagacccaacctcatcaggcactggaaagtccacactggggaaaggccttatgtgtgtagtgagtgcgggagagaattcatccggaaacagacacttgttctgcaccagagggttcatgctggagaaaagctttaagagtgtagcaaatgtgggggaaagtcttaggccaatgcccctgacttactatatggtggggaactagcagtagttaatgagtgcagcagatgcaggaaagccttcccctggaggctgaaccttacccgccattgggaatttcacaccggacacaggccttagcagtctaagcaatgtgctgtctctgttcagcccaacagctcaccctagagtggaactctgggagcagccattgggagggaaccatcagtaagaagtgaaacttcatagatatggacattcccactggggagattccctgtgagtgtcaagtatgtgagatgctttcagcagctgtgttgcactttttaaatggctattggcctttgctggggcaggagccatctgctcctaccatctggcagaatcatactgcgtttaccatttaccccagcatgcttgtgacgggcagacctctcttctctccccagtccctaaaaggtgttgtgagtggtctcacagcccactaggggtcttaatttcctctcttttgatgtaaatggcatggaaataatcagctttgttcaagaggacacagaaggattctgcaaatagcctgcagagacttacctgtgttgattgatttcatatgatgctcgttatggatatatccaatatccaagtcacccagctctggaactgcctgcttcacattgctcatgataataaaggcctgttctttaagccaccaaaaaaaaaaaaaaaaaaaaaaaaaaaaaaaaaaaaaaaaaaaa

SEQ ID NO: 5324 - DNA, 4241 bp, Homo Sapiens
  NM_024834
ggtcgcaggcagcgcggtcggcggcggctatttcccgccattgtgcgaagtgaaggctaggggcccgtacgcgcccgcctgactgtcgccagcagctcctcggcggccccaccgcagccgccgctccctgaggcgcgggaggcccgcgccccgcggctcgctgtgcgtgggagggcgcgagcgaacgcgggcgaggagcggccgagccgctgaagaggagctgggcgccggccgcccggccgcgctcggcccgcggatcgcctccgcccggtcttcgccggccccggcccctggcgagatgccgtgtggggaggattggctcagccacccgctgggaatcgtgcagggattcttcgcccaaaatggagttaatcctgactgggagaagaaagtaattgagtattttaaggaaaagctgaaggaaaataatgctcctaagtgggtaccatcactgaacgaagttccccttcattatttgaaacctaatagttttgtgaaatttcgttgcatgattcaggatatgtttgaccctgagttttacatgggagtttatgaaacggttaaccaaaacacaaaagcacatgttcttcattttggaaaatatagagatgtagcagagtgtgggcctcaacaagaacttgatttaaactctccacgaaataccactttggaaagacagactttctattgtgttccggtgcctggggaatctacgtgggtaaaagaagcctatgttaatgcaaaccaagctcgagtcagtccctcaacatcctacactcctagtcgccacaagaggagttatgaagatgatgacgatatggacctacagcccaataagcagaaagaccaacatgcaggtgccagacaagcagggagtgttggtggtcttcaatggtgtggagagccaaaacgtttagaaactgaagcttctactgggcaacagctgaactctctgaacttgtcttctccttttgatttgaattttccattgccaggagagaagggccctgcatgccttgtgaaggtttatgaagattgggattgtttcaaagtaaatgacattcttgagctatatggcatactgtctgtggatcctgtgctgagtatactgaataatgatgaaagggatgcctctgcactgctggatccgatggagtgcacagacacagcagaggagcagagagtacacagtcctcctgcttcattagtgccgagaattcatgtgatcttagcccagaagttgcaacacatcaacccattattgcctgcctgccttaacaaagaggagagcaaaacctgtaagtttgtttcaagtttcatgtccgaattgtctccagtcagagcagaacttcttgggttccttactcatgcccttctgggggatagtttggctgctgaataccttatattacatctcatctccacagtatatacaagaagagatgtccttccactaggaaaatttacagttaacttgagtggttgcccacggaatagtaccttcacagaacacttgtatcgaattattcaacatcttgttccagcatcttttcgtctgcagatgactatagagaacatgaaccatttgaaattcattccccacaaagactacacagccaatcgcttggtcagtgggctcctccagctgcccagcaatacttcccttgtaatcgatgagactctcctggaacaggggcagctggataccccaggtgttcataatgtgacagccctgagcaacctcataacgtggcagaaggtggattatgacttcagctaccatcagatggaattcccctgcaatattaacgttttcattacttcggaggggaggtcactcctcccggcagactgccagattcacttacagccccagctaattccaccaaacatggaggagtacatgaacagccttctctcagcggtgctgccttccgtgctgaacaaattccgcatttatctaactcttttgagattcttggaatatagcatatctgatgaaataaccaaggcagttgaagatgactttgtggaaatgcggaagaacgaccctcagagcatcactgctgatgatcttcaccagctgctcgtggtggctcggtgtctgtctctcagtgctggtcagacaacgctgtcaagagaacgatggctgagagcaaagcagctagagtctttaagaagaacgaggcttcagcagcaaaaatgtgtgaatggaaatgaactttaaagatgtaatacctatgaagagtaatgggcaaactgtagccacataattgtaaaattcagatattcatttataccacattgttttataggtaatttctatcacaaaccagtgacatttcctgaaatcaagcctggtaacacctgatgtttatatgatattcagtaaggacttttaccttactgatttcatggagcttttgaagtttgttttataataattatataaattagtaatgatgtaaaaaaagtatttgatattaaaagtttaatattgataatgttgctgattgtaccatttccttagcttcagctgagtcataggccagactgttgaaatgctgaaatgaagaaggttgttgcagtttcaaagtcagaggaatcgtgcttcggatttcttatgttttctagttctctgtttttccagttcacagtgggttggggtgcattcagtagtccatctttggggaacggaggcgtacttgccattgattcacatgactacatgaaattctgtactgtcatttcccagatgtttggccacagaaactttttcccacttaacatttgttaacagcctgcaaaactaaacttgtacatggcagtggttcccagacttttgtattttatggaccggtagtaatatttccaaaaatctggggtactataaggttgccaatttaccttgccaagtaatccgaataaatcactgtattatcaccatttttttcataaaaggaaaggacaatctatctctgaataagaggagtcctttaaacggaatgaatgtggcttttgggggcaaaagaaaccaagacactacattgtctttattttctcctatcccagtgcatttgagaaccatgcataagggaatgctgtgctacaaagctgtgcccaaatatgaaaacaaaataggaaacttaaaaagcaataccccctttagaaagtttttattttcttaaatgtcattgagttgctttgattctattggatttttggcattttttatgggatcatcagttggttccaagtatgttagatcagctaacatctgctactccagtaacagcctcgtacaactgcaggtaggttttctccagaccaattagttttaatagagcaaactaacaacagactgtagtagcatggttatggcaaccagaatcttcagaaaggttaggacattactttttaagctgtcagtggtatcaaataacttacctagttggaggcagataaaggatcccttacgttttttcctataaggcctaaattgaaattgttaaccaaggaaacagggtcagccttgaaaaatcaaggaattcattgtacctaataactgaagtaaaaataactagttgttcaacttttcctaaactcaaatctatttttataaacaaatgtaaataatgtttatattagagttgaactggttttcatttttataactggtagactagaccttccttaaacttttagaaataaaatgaaggcttcactggatttgtgaggataaaatacattttctttaattgtcctagagcaaagtacattagtcaccatgtgttttttgtgccaatgtaaattgtaatttaccaaagaaaaatacatacattgcttggtcttgcagaaaagttcccttgaaagaacctttccaataaataaaacgtcccaaattagcagtaccttgggctgtttttcatgagtaagaagattcaccatcccatgtgatctgtgtggaaaaagaccatgtcctcttggtggaagacatgagagagctgaactgaagtggaggaggtggtgcaagagggaccttcctgctcaaggcccgcccaggcagcggaatggagtgcagtgcttggctgcagaaaccctttgtccctcacctatatatacacggacagtcaagtttgttgctctaacgtaaggcacagcgttaatcctgtatggccaggaaactgagtagactcctgtgtaaccctgtttggaactttgccttcttaaaatgatttttc

SEQ ID NO: 5325 - DNA, 5679 bp, Homo Sapiens
  NM_024837
gcttttctccttggcatggtcacggaatggatacctgtttgatcttcctgcactgctgagaaatcttccttttgggggagaggattaagtctgggttgaggtaggccacctgttgagacctggtgaaagatcaggtataataatgttctgcagtgaaaagaaattgcgtgaagtggaacggatagtgaaagccaatgaccgtgaatataatgaaaagttccagtatgcggataatcgtatccacacatcgaaatataatattctcaccttcttgccaattaatttatttgaacagttccaaagagtggcaaatgcctattttctttgccttctgattttacagctaattccagaaatttcctccttgacctggtttaccaccattgtgcctttggtcctggtgataactatgacagctgtcaaagatgccacagatgactattttcgccacaagagtgataatcaagtgaataatcggcagtctgaagtgctcatcaacagcaaactgcagaatgaaaaatggatgaatgtcaaagtgggagacatcattaaattagaaaataaccaatttgttgctgctgatttacttctcctatcaagtagtgagccacatggtctctgttatgttgaaactgctgagcttgatggggaaacgaacctaaaagtccgccatgcactatcagttacttcagaacttggagcagatatcagcagacttgcagggtttgatgggattgttgtctgtgaggtgcctaacaacaagttagataaattcatgggaatcctttcttggaaagacagcaagcattccctcaacaatgagaagataatcctgagaggctgcatcctgagaaataccagctggtgttttggaatggttatttttgcaggtcctgacactaaactaatgcagaatagtggtaagacaaagtttaaaaggacaagcattgatagattgatgaatactctagtactatggatttttgggtttctgatatgcttgggaattattcttgcaataggaaattcaatctgggagagtcaaactggggaccaattcagaactttcctcttttggaatgaaggagagaagagctctgtgttctccggattcttaacattctggtcatatattattattctcaatacagttgtacccatttccttatatgtgagtgtggaagtaattcgtctaggacacagttattttataaactgggaccggaagatgtattattctcgaaaagcaatacctgcagtggctcgaacgaccacgctcaatgaggaactggggcagattgagtacattttctccgacaaaacgggtaccctcactcaaaacatcatgacctttaaaagatgttccattaatgggagaatctatggtgaagtacatgatgacctggatcagaagacagaaataactcaggaaaaagagcctgtggatttctcagtcaaatctcaagcggatagagaatttcagttctttgaccaccatctgatggaatccattaaaatgggtgatcccaaagttcatgaattccttaggttacttgctctctgccacactgtaatgtcagaagagaatagcgcaggagagctgatttaccaagttcagtcacctgatgaaggggctctagtgactgccgctagaaattttgggttcatttttaaatcccggaccccagagaccataacaatagaagaattgggaacactagttacttatcaattacttgcctttttggatttcaacaacaccagaaaaaggatgtctgtcatagttcgaaacccagaaggacagataaagctttattccaaaggagcagatactattctgtttgaaaaacttcatccttccaatgaagtccttttgtctttgacgtcagaccacctcagtgaatttgcaggggaaggccttcggaccttggccatcgcatacagagacctggatgacaagtactttaaagagtggcataagatgcttgaagatgcgaatgctgccacagaagagagggatgaacgaatagctgggctatatgaagaaattgaaagagatttgatgctactaggtgccactgctgtagaagataagttacaggagggtgttattgaaacagttacaagtttatcactagccaatattaagatctgggtcctaacaggagacaaacaagaaactgccatcaacatcggttatgcctgcaacatgctgactgacgacatgaatgatgtgtttgtgatagcagggaataatgctgtggaagtgagagaagaactcaggaaagcaaaacaaaatttgtttggacaaaacagaaatttttccaatggccatgtagtttgtgaaaaaaagcagcagctggagttggattctattgtagaagaaaccataacaggagattatgccttaatcataaatggccacagtttggctcatgccctagaaagtgatgtcaagaatgatctcctagaacttgcttgcatgtgtaagactgtaatttgctgcagggtcactccactccagaaagcccaagtggtagagctggtgaagaagtacagaaatgctgttactttggccattggtgatggagccaatgatgtcagcatgattaaaagtgctcacattggtgttggcatcagcggccaggaaggattgcaagcagtcttagccagcgactattcatttgcacagtttagatatctccaaaggcttctccttgttcatggaaggtggtcttatttccgaatgtgcaaattcttatgctatttcttctataagaattttgcatttacacttgtgcatttctggtttggtttcttctgtggtttctcagcccagactgtttatgaccagtggttcatcaccctttttaacattgtttacacatcactgcctgttttagccatggggatttttgaccaggatgtgagtgaccagaacagcgtggactgtccccagctctacaaaccaggacagctgaatctgctttttaacaagcgtaaatttttcatttgcgtgttgcatggaatctacacctcattagtccttttcttcatcccctatggggccttttacaacgtggctggagaagatgggcaacatattgctgactaccagtcctttgcagttaccatggccacatctttggtcattgtggtcagtgtgcagatagccttggataccagttactggactttcattaatcacgtcttcatctgggggagcattgccatttatttctccattttatttacaatgcacagtaatggcatctttggcatcttcccaaaccagtttccatttgttggtaatgcacgacattccctgacccagaagtgcatctggcttgtaattctcttaacaacagtggcttcagttatgccagtggtggcattcagatttttgaaggtggatttatacccaaccctgagtgatcagatccgccggtggcagaaggctcaaaagaaggcaaggcctccaagtagccgaaggcctcggacccgcaggtcaagctcaagaaggtctggatatgcttttgctcaccaagaaggctatggagagcttatcacatctggaaaaaatatgcgagctaaaaatccacccccaacatcagggctggaaaagacacattataatagcactagctggattgaaaatttatgtaagaaaaccacagacaccgtgagcagctttagccaggataaaacagtgaaactgtgagtcaatatgaatttaaaccacgtagttatcttttcacttcaggtggagctgaaattctgctggctccagagtttgagatttgaggcaagaggtggggcaggcagattgcctcacttaacttaaatctgcggcagacaactgccagtgcccatcaaacaggagtgtgcgctatggaaaaccaggccagagggtcactgtctggtttgtgatttggtggacaaaacactcgctgttacaagtacagattttttttttttttaaatcaacctagataccaattgacctgaactttagaatcttatttatggagaaaaacttgtaaagctgcatattcactgaatggatcctcaggcggataaaagggtgcattttaaaggtatatatccaagctgaaaagcatgcctattgacagataaacatgtatctgtaagatcagcctttcccaaggtatacttttaaaatttaaagcgtgtactgtgttgctttcagactgagttgcatgtcactctttagtcttgatatctacctgtctgttcagccaggacaacaaatggcttccaagcctgaagaatacaaaagtgtgcttgtgtttctcatttttataccagtctagggacaaaggagactgaacatctttgcagcaggataggctggtaatttgatcaaatttattcaaaaagctctcagtctgtgtcatgtaaggacatgcttatgaaatgtgagagaggctcgccactaagtattctaaatacttttcaatggcttttctaacaacctcagtagtaatttgctgagcatcatccagaccattaatagaatcagcaaagcactggaatttcacactttaatgataatattccacatagtctatgggcaaatattttcaacatttccaatttttaaagcttcagaattgaagccaaacaaattaataaataattgttttaattactatttaaaaactcaggtttagattgtttaaaattagttgcttttgatactcagctgtcatgtttataattcaaacatgtagtaaacatatgtaggtaaggttgtttttttggagatgttgcagctcaaatttcagtccacatatgaatcatcagtgtattttccataaagtgattcgggcatatttgtgtgaaaacctcagttctgtcacttcttacctctataaacttggacgataatgtgccttctctgagactcagtttcttcctctgtaaaatgaggacatactacctacctcatgtggttggttgatgattgtctgtcaaagcacaaactctgaaattattaaaaacataattatttcataaacagatgagttaagttccagttaactcaacatcagtataacagagcaattggaagagaatatgaaaaaactggaatctaaatagtcagtgaggaaggctttgataaaatgaaattgccagaaagatataaaactggttagggtcctacagggaaataaaattataaccgtggaggtacatttctctaccagaaagcaaaaataaagcatcatgtcttaatggttttctacaaatcaacttctaattctacagagtccttaatctggtccctattaaattcttggtcagacaaagttacatttcccaagagagtcaggtgacacttgagtgagtttgatggataatgagctaatgtgatatctataggtcacaattttttaaaaccaaaattttcaagtctgggataatctttcctaaatgggatcaaatgaaataatatgtgtaaaagagtcaaatgcagtcctttaccatagtaactgcctatggacgttgtctttcccttacatgcctgcctacacttaaccagatgttggttttcaatgtctaatttgtcattagtttcaccacatttgctcactttttgtaacatttttgcaagatttgaaaactttcagtaaatgttttggcactattggtaaa

SEQ ID NO: 5326 - DNA, 3787 bp, Homo Sapiens
  NM_024838
acgtgccctgcgcgaggccgctcggggaagggcgtggagcggaggcacgctggccgccgcaggcacaggcgcagagtccactgcgcgggggcgggaccggggagctagctgcagactccacgttttgcaaagatcggttttgcctcagagtcaacaaactcttcagattggttccggtgtgtcctatgtttacaagtcagtggaaattaagcacaacacatataaattgaaaagtcaaataaggaaatgaattacctcccttgacggctctaattttacttggctaaagccaatttttaggttggcttgggcagaaaagtgaaaagagaatgctccactttaaccgatgtcatcatctgaaaaagataacacagaaatgtttttctagtatacatgttaaaacggataaacatgcacagcgatttctttcaagaacctttgcacttgcggaattgaggaagtcatggtattcaacccactctcttgttggagacaaaaatattatcctgatgggacctcctggtgctgggaaaacaacagtaggcagaataataggtcagaaactaggttgttgtgtcatagatgtggatgatgatatccttgaaaaaacctggaatatgagtgtgtctgaaaaattacaggatgttggtaatgagcaatttttagaagaggaaggaaaagctgtgttaaacttctctgcatctggaagtgtgatttcccttactgggtccaatccaatgcatgatgctagcatgtggcatctgaagaaaaatggaataattgtatacctggatgtacctctactagatctaatttgtcgtctaaaattaatgaagacagataggattgtaggtcagaattctggaacatctatgaaagacttacttaaatttagaagacagtattataagaagtggtatgatgctcgtgttttctgtgaaagtggggcttccccagaggaggtagctgacaaagtgctgaatgcaattaaaagataccaagatgtggactcggaaacattcatttcaacaagacacgtttggcctgaagactgtgaacagaaggtttcagcaaaattctttagtgaagctgtaattgaggggttggcttctgatggtggcctctttgttcctgcaaaggagtttccaaaattaagctgcggggagtggaaaagcctagtaggagcaacctacgtagaaagagcacagatactgttggaaagatgtatccatcctgcagacatacctgctgccaggttgggagaaatgattgaaactgcttatggggaaaactttgcctgctcaaaaattgctcctgtcaggcacctttcaggcaaccagttcatcctggagttgtttcatggaccaacaggatcatttaaagatttgtctttacagcttatgcctcatatttttgcacactgtatcccaccaagttgcaattatatgatacttgtagctacttcaggagacacagggagtgcagtcttaaatggttttagtcgtctaaataagaatgataagcaaaggatagctgtggttgcattttttcctgagaatggagtaagtgattttcaaaaagcacaaataattggcagtcagagagaaaatggatgggcagtgggtgttgagtcagattttgatttttgccagacagctataaaaagaatttttaatgattctgattttactggctttcttactgtggaatatggaacaatcttaagttcggctaactccataaactggggccgactacttccgcaggtagtttatcatgcttccgcatatcttgatcttgttagtcaaggatttatttcttttggaagcccagtcgatgtctgtattcccacaggaaactttggtaacattttagcagcagtgtatgccaaaatgatgggaatcccgattcgaaaatttatctgtgcctctaatcagaaccatgttttgactgattttataaaaacaggacattatgatctaagggaaagaaaactagcacaaaccttttcaccgtcaatagatattctcaaatcttcaaacctagaacgacatttacacttgatggctaataaagatggacagctaatgacagaattatttaatcgattagaaagtcagcatcatttccagatagaaaaggctctagttgagaaacttcagcaggattttgtagctgactggtgctctgagggagagtgcctagcagctattaactccacctataatacttcagggtatattttggatccacacactgctgttgcaaaagtggttgcagatagggtgcaagacaaaacttgccctgtgattatctcatctacagcccattactcaaagtttgcacctgctatcatgcaggctttaaagattaaagaaatcaatgagacttcatcaagtcagctctatttgctgggttcatacaatgcattacctccactgcatgaggctttattagagagaacaaaacagcaagagaagatggagtaccaggtctgtgcagctgatatgaatgtcttgaagagtcatgtggaacaacttgtccaaaatcaattcatatgaaagctttcagagtaaatttttttttctagctataagcatgcaataataaatctcaaacactgatttggagtacagtagcattttgtcttttatgtaaatatctctatatctgtttggaatttcaaaagtctgatctctagggctgacatgagaactccatgtcacctcctcagatctttaatctggaagtgacaaaaggtaacacagtgcacggacctttgagctatcatacttttgccttctgctcatgaggggtgtatcaatttccactcccacaccctcactgttatgtggaccaaaatgtctggtatactatttggcgattaaaatatttaagcccagttttcaggtactacatctgtaactagtgaatactctgttgattagaaagttaatttaccactcaaaatggctaacttgaatggaggaagtagtaaactcttctattaggatttgggccagtgttttttgtttgttttttggtgcagtttcagctcactgcaacctccgcctcccaggttcaagtgattctcctgcctcagcctcccaggtagctgggattacaggcatgcaacaccacacatggctaatttttttatttttaatagagatgaggtttcgccatgttttccaggctgatcttgaacctctgacctcaggtgatccatccacctcggcctcccaaagtgctaggattacaggcgtgagcctctgcacctggctagggccagtgtttttaaccctcctcaaattccattttggactacaactaatgtgtatctcacactgtccaaattaaagatgtactctgtccttcactctcctttggatgtgtacggttagggtgacgatgtttgaaaatcaacacataactgaaatccaggatgaaacagtaagcagaactacttagaagtgaatacagaaatgatctatttcaagaggaaggttttccaaaattaagagtacttgagtagtctcaataggagtgtatttgtagacagcagtttccctatattatttggagtcaattcttacgtaatttgttgtttatttcttcagtgaacattgtctttttctggcagctgaaactgcacacaactgatacacatatttaatttgtattcctttgtagtaatacattttaaccatgatttatgtttgtgaatttactggatgttttctttctgaattaaagattgtcaagaccaaaaaaaaaaaaaaaaaaa

SEQ ID NO: 5327 - DNA, 561 bp, Homo Sapiens
  NM_024839
gtgcgaggggtggggctgcgggaggccctggagcgcggcggtgatggcggggccggtgaaggaccgcgaggccttccagaggctcaacttcctgtaccaggccgcccattgtgtccttgcccaggaccccgagaaccaggcgctggcgaggttttactgctacactgagaggaccattgcgaagcggctcgtcttgcggcgggatccctcggtgaagaggactctctgtcgaggctgctcttccctcctcgtcccgggcctcacctgcacccagcgccagagacgctgcaggggacagcgctggaccgtacagacctgcctaacatgccagcgcagccaacgcttcctcaatgatcccgggcatttactctggggagacaggcctgaggcccagctcgggagccaagcagattccaaaccactacaacccttgccaaacacagcccactccatttcagaccgccttcctgaggagaaaatgcagactcagggttccagtaaccagtgatggattcaccccatctcccaaataaagtttacttgttttacattccataaaaa

SEQ ID NO: 5328 - DNA, 2247 bp, Homo Sapiens
  NM_024840
ctcggccgccgtaggccggcttggaggctgggggagggcccagaagtggaataattcaggaaagtgcaggttctgggaagtctcggtgggttccccgcaaaatcaggcttgagtgcagtggcgcaatcgtggctcactgcagcctccatctcccggggctcaggtgattttcccacctcagctttcccgagtagctgggactacagagatggcatctcactatgttgcccaggctgatcttgaactcctgacctcaagtgatcctctctccttggcctcctaaagtgctgggattccaggtgtgagccacttcacccagccacatttatccatcttgtaaaatattgctttgttttttggtgcatttcaaagaatcactgaccctggaggatgtggctgtggagttcacttgggaggagtggcagctcctcggccctgctcagaaggacctgtaccgagacgtgatgttggagaactatagcaacctcgtgtcagtggggtatcaagccagcaaaccagatgcactcttcaagttggaacaaggagagccatggacagtagaaaatgaaatccacagccaaatctgtccagaaatcaagaaagttgacaatcatctacagatgcactcacaaaagcaaagatgtctgaagagagtggaacaatgccataaacataatgcatttggaaacatcattcatcagaggaaaagtgattttcctttaaggcaaaatcatgatacatttgacttacatgggaaaatactgaaatcaaatttaagtttagtcaaccagaacaaaaggtatgaaatcaagaattctgtgggggttaatggagatgggaaatccttccttcatgccaagcatgaacaatttcataatgaaatgaacttccccgaaggtggaaattctgtgaatacaaattcacaattcattaagcatcagcgaactcaaaacatagataaaccccatgtatgcactgagtgtgggaaggctttcctcaagaagtctcgcctcatctatcatcagagagttcacactggggagaaacctcatggatgcagtatatgtgggaaagccttctccagaaagtccgggctcactgaacaccagagaaaccacacaggagagaaaccctatgaatgcactgaatgtgacaaagcattccgctggaaatcacagctcaatgcacaccagaaaattcatacaggagagaagtcatatatatgcagtgattgtggaaaaggcttcatcaagaagtctcggctcattaatcatcagagagttcatacaggagagaaaccacatggatgcagcctgtgtgggaaggccttctccaaaaggtccaggctcactgaacaccagagaactcatacaggagagaaaccctatgaatgcactgaatgtgacaaagcattccgctggaaatcacagctcaatgcacatcagaaagctcacacaggagagaagtcatatatatgccgtgattgtggaaaaggcttcattcagaagggaaatctcattgtacatcagcgaattcatactggagaaaaaccctatatatgcaatgaatgtggaaaaggcttcatccaaaagggcaacctccttattcatcgacgtactcacactggagagaaaccctatgtatgcaatgaatgtgggaaaggcttcagccagaagacatgtttaatatcccatcagagatttcacacaggaaagacaccctttgtatgtactgagtgtggaaaatcctgctcacacaagtcaggtctcattaaccaccagagaattcacacaggagagaaaccctatacatgcagtgactgtgggaaagctttcagagataaatcatgtctcaacagacatcggagaactcatacaggggagagaccgtatggatgctctgattgtgggaaagctttctcccacttgtcatgccttgtttatcataagggaatgctgcatgcaagagagaaatgtgtaggttcagtcaaattggaaaatccttgctcagagagtcatagcttatcacatacacgtgatctcatacaggataaagactctgttaacatggtgactctgcagatgccttctgtggcagctcagacctcattaactaacagtgcgttccaagcagagagcaaagtagccattgtgagccagcctgttgccagaagttcagtctcagcagatagtagaatttgcacagaataaaaaccatatgaatgcagtgaaaaaaaaaaaaaaaaaa

SEQ ID NO: 5329 - DNA, 3965 bp, Homo Sapiens
  NM_024841
gcttggcagtttcccattgcggggcagctgggccgggggcgggggtcggctgcagatctcccgttgtgtgagagaaacgcaagcacggagctcccttgacctgctgcatcctcctcggcaattttttttttttaagtcaaaaagcttggatttcctgaaattgttgaactggatgcgcgcggagtctggggcggaggcgagcggcgggtgtgcgcgactcggggtgattcacgccggggaccccaaggaggtgttggctacgtttgtggttttaagaaagcctgagggcctgaaggcagcccctggagaagccctttccgagggcattcggaaccttctggtcctagaggtgaagctgaactgtcaccaggacttatgacccgcggcttcgctcccattctgcccgtcgagttccacaagatgggctccttccgcaggcctagaccgcgcttcatgagctcccccgtgctcagcgaccttccccgattccaagcagctcggcaggctctgcagctgagctccagctcagcctggaacagcgttcagactgctgtgatcaacgttttcaaagggggtggcttgcaaagcaacgagctctatgccctgaacgaaaacatcaggcggctgttgaagagtgaacttggatcattcattacagactattttcagaaccagcttcttgcaaaaggactgttctttgtggaggagaagatcaagctgtgtgaaggtgaaaatcgcattgaggttctggctgaagtctgggaccacttcttcactgagactctccctaccctgcaggcaatattttatccagttcagggccaggagctgactatccgccagatctccctgctgggcttccgagacctagtcttgctgaaggtgaagctgggtgacctgctgctgctggcccagtccaagctgccctcgtccattgtccagatgttgctcatcctgcagagtgttcacgagcccacaggcccaagtgagagttatttgcaactggaggagctggtgaagcaagtggtttctcctttcctcggcatcagcggggaccgtagcttctcaggccccacgtacacgctggccaggcggcactccagggtccggcccaaggtgactgtcctgaactatgcctccccgataaccgcagtcagccggccactgaatgagatggtcttgaccccactgacagagcaggagggggaagcctacctggagaagtgtggcagcgtgcggcggcacacggtggccaatgcccactcggacatccagctgctggccatggccaccatgatgcactcgggcctgggggaggaggccagcagtgagaacaagtgcctgctcctgccacccagcttccccccgccccaccggcagtgctccagtgagcccaacatcactgacaaccctgacggactggaggagggggccaggggcagccaggagggctcggagctgaactgtgcttccctcagctgagtcgccacccctgggcctttccatctcctgttttgcaaccaggatgaggacccctccatctccgtggattactgaggggggctcttgctttatgcgatgctgccttatttcctttagggtactgtcctggtcaaaatgacctaaggggaaaccgttgttgtaaacctctttattttggtgactgtgaccacttctttgtagccaccaattgtagtgaccagttgcctaatggtcactttctgactccagccttgccagcctgactcagatcctcatctctgggcctttctccctccgatgttggactgcctgatgctcccaatgacatatccaatgctcctggcatttctggagcaggaggttgtcaggacaacacatataaccaccaaggatgtgttggcctttggagttcccctttaggttcctagtgatgtggaggtttatgggtgaaaaattagtggagagggaactcctctcccccattttgtgtagagtgaaaatagcctgaagcccctactcagcagggctctgggaatgtgccttccttattttagtttcagaattgctgggaaagttaccccactggtgggtgaggatctatcctcaacctacatccagatcctatgtgctgcttgcacagaggcctttggcttttgacccaggagggccgcgaggctggagctgccctgtctttcattgagccttagcatttccctctcaggcttcctctcaagctcaaggaactcacccccagataagaagctggtgcctcttgtctctctcatttcagaaacggactttctcatcatgctttcctatggtgggtatgaggggccagctgataccaaccaactggcctgtatctatctatctggatttgacttgaatttttaaaatgtgtatcgtttaaaaaaaaaaatgtttgcaaattttgcacataggatcttgcactgttcattttcagtggggtgagtcttcacactaaaaacacaagcagagctcctgggaaaagagactggaagtggttcaggataaagagatccatggtgggcagggctgttaggtcacagagctctagaagcagctggacttgaacccacaatggcttgtgtaaattcgtaaatttcatggtttctaggaaaagctgcattggggtggggagacccagtttgcctcataggcagaggattctccaggaagcatggaaaatggaatgtttccatgctttacagtgctgggagagaggggagatgtgggcaggaccttttggaaggatgtttattctctgtggttaaagaaatgctgagaatttctagcatgtgaagcacttgggggcagcaggccttggcacggtgctgcatccttctactgctccctccaggtctgggggcttttatccaccttgaatccctatcctcctctttgtagttgtcggtctcactgataacagctccagaaaaaaagacaaggctccccctctgacccttcctgttggtatttatgaaatctcaaagagatgagccaccttggcttccaatatggcaagagggtgctgggagaaggtgaagatcagtctaagctgccacggtgatgagaccttctcattatgtaactcttgatggcatttcccttctgagtgaagatttgaaatatgattgattagaattgtgctcttgatggctgggaatttagaaattttattttaagagttatttcattttcatcctaagagtgatgggagagaaatgtccaaaagagatctgctgatctgctgagagtttcaaacaaacaaaaaaataatctctatgtatgtgttggataaagtctacagactgactaacatgcattagcaaatggagcatcagtaggtagcaacatgataatttatgtaactgatagcttctgtccttattagtacacttaacatttgagactagtatttattgatccaggcaaagtaattaattaatcatgcttgggcttactttttcagtttgtaaggttaagcatatgtgcatgcgtgcgtgtgtatataaatgccttttccatatcttaaatgtccctgatgaggagagcagtcatcaattaaatatataagctcttaaaatgagaatggaagtgtcagtatagacccagtgtacttaagtgctgatgactgttagccagtttacaactttttaccatcgatgtacacatttgatatttgtgcagtaaatagactgtacctataaaaaattttattgatgtttatggtcatgttagctatcagagagctattggagtgagagctgaggtgtccttaaccactttttctctcctagattcattttcattatttatgctaggattttcttatggttgacatttgatgacaggaagcaatcatgactcttcaagtgagctcacagaaacctttcatgttgtctgtttccaaaatggattcaataaacaacattttgtccatgttaaaaaaaaaaaaaaaa

SEQ ID NO: 5330 - DNA, 2311 bp, Homo Sapiens
  NM_024844
cggtactctgagtgcagtcagtcctcggcgctgttttccctgatttgctgtcgacgccaggaaggaaggacgcgtgcagaggaccgcagaggggtggccgtggctgagaggagacagcgccgcagcactgagggtttgggcttgcaggcgctgcaggagacgcccaggcggagtcttgtctcgcagccagctctgagcgggaggcctgagcgggaagcattggcgtccgagcgacttctaggagcctggggttcggcgctatggaggagctcgatggcgagccaacagtcactttgattccaggcgtgaattccaagaagaaccaaatgtattttgactggggtccaggggagatgctggtatgtgaaacctccttcaacaaaaaagaaaaatcagagatggtgccaagttgcccctttatctatatcatccgtaaggatgtagatgtttactctcaaatcttgagaaaactcttcaatgaatcccatggaatctttctgggcctccagagaattgacgaagagttgactggaaaatccagaaaatctcaattggttcgagtgagtaaaaactaccgatcagtcatcagagcatgtatggaggaaatgcaccaggttgcaattgctgctaaagatccagccaatggccgccagttcagcagccaggtctccattttgtcagcaatggagctcatctggaacctgtgtgagattctttttattgaagtggccccagctggccctctcctcctccatctccttgactgggtccggctccatgtgtgcgaggtggacagtttgtcggcagatgttctgggcagtgagaatccaagcaaacatgacagcttctggaacttggtgaccatcttggtgctgcagggccggctggatgaggcccgacagatgctctccaaggaagccgatgccagccccgcctctgcaggcatatgccgaatcatgggggacctgatgaggacaatgcccattcttagtcctgggaacacccagacactgacagagctggagctgaagtggcagcactggcacgaggaatgtgagcggtacctccaggacagcacattcgccaccagccctcacctggagtctctcttgaagattatgctgggagacgaagctgccttgttagagcagaaggaacttctgagtaattggtatcatttcctagtgactcggctcttgtactccaatcccacagtaaaacccattgatctgcactactatgcccagtccagcctggacctgtttctgggaggtgagagcagcccagaacccctggacaacatcttgttggcagcctttgagtttgacatccatcaagtaatcaaagagtgcagcatcgccctgagcaactggtggtttgtggcccacctgacagacctgctggaccactgcaagctcctccagtcacacaacctctatttcggttccaacatgagagagttcctcctgctggagtacgcctcgggactgtttgctcatcccagcctgtggcagctgggggtcgattactttgattactgccccgagctgggccgagtctccctggagctgcacattgagcggatacctctgaacaccgagcagaaagccctgaaggtgctgcggatctgtgagcagcggcagatgactgaacaagttcgcagcatttgtaagatcttagccatgaaagccgtccgcaacaatcgcctgggttctgccctctcttggagcatccgtgctaaggatgccgcctttgccacgctcgtgtcagacaggttcctcagggattactgtgagcgaggctgcttttctgatttggatctcattgacaacctggggccagccatgatgctcagtgaccgactgacattcctgggaaagtatcgcgagttccaccgtatgtacggggagaagcgttttgccgacgcagcttctctccttctgtccttgatgacgtctcggattgcccctcggtctttctggatgactctgctgacagacgccttgccccttttggaacagaaacaggtgattttctcagcagaacagacttatgagttgatgcggtgtctggaggacttgacgtcaagaagacctgtgcatggagaatctgataccgagcagctccaggatgatgacatagagaccaccaaggtggaaatgctgagactttctctggcacgaaatcttgctcgggcaattataagagaaggctcactggaaggttcctgagaactgcttcaatgtggtatctttgtatggcaatgtatatagatttttttaaaagaataaatgttgttttgcaaatgtag

SEQ ID NO: 5331 - DNA, 2479 bp, Homo Sapiens
  NM_024855
ggcggggctggacgcgcgctccaagatggcggcgaacgtgttcccgttccgcgacgcccgtgccgcaccggacccagtgctggaggccggcccggtggcacacgggccactgccggtaccgctggtgctggacaacgggtcgttccaagtccgcgctggctgggcgtgtcccgggcaggacccaggtcccgagccgcgcctgcagttccgcgcggtgtgcgcccgcggtcgtggcggggcacggggcgcgtcgggcccgcaggtggggaacgctctgggcagcctggagccactgcgctggatgctgcgctcgcccttcgaccgcaacgtgccggtcaacctggagcttcaggagttgctgctggactacagcttccagcacctgggtgtctcctcacagggctgtgttgatcatcccatagttttgacagaagctgtgtgcaacccactgtattcacggcaaatgatgtctgagcttctttttgagtgctacgggattcccaaggttgcctatggaatagacagcctcttcagcttctaccacaataagccaaagaactcgatgtgcagtgggctaatcatttcatctggataccagtgtacgcatgttttacccatcttagaagggagattagatgctaaaaactgcaagcgcatcaatcttggaggaagccaagcagctggttacctccagcgtctcctccagctgaagtaccctgggcacctggcagccatcaccctcagccgcatggaggagattctgcatgagcacagctacatcgctgaggattatgtggaagaattacacaaatggcggtgtcctgattattatgagaataatgtccacaagatgcagctcccattttccagcaagctcctgggcagcactctgacctctgaggagaaacaagaaaggcggcagcagcaattgcggcggctgcaggagctcaatgcccggcggcgggaggagaagctgcagctggatcaggagcgtctggaccgactgctatatgtgcaggaacttctagaggatggccagatggatcagtttcacaaagctctgatagagctgaatatggactccccagaagagctgcagtcctacatccagaagctcagtatagcagtggagcaggctaagcagaaaatcctccaagcggaagtcaacctcgaggtggatgtggtagacagcaagccagagacccctgacctggagcagctggagccgtctttggaagatgtggaaagcatgaatgattttgatcccttgttttcagaggaaacacctggagtggagaagccggtcaccactgttcagcccgtgtttaacttggcagcatatcatcagctatttgttgggacagaaagaattcgagctccagagattattttccagccatctctcataggagaagaacaggctgggattgcagagactcttcagtacattctggacaggtacccaaaggacattcaggaaatgctggttcagaacgttttcctcactggcggcaacacgatgtatcctggcatgaaagccagaatggagaaggaactgttggagatgagacccttccggtcttcttttcaggttcaacttgcctcgaaccctgtgctggatgcctggtacggtgctcgtgactgggccttgaaccacctagatgataatgaagtttggatcaccaggaaagagtatgaagaaaagggaggagagtacctcaaggagcactgtgcttccaacatctatgtccccatccgcctgccgaagcaggcctcccgctcctcagatgcccaggcatccagcaagggctccgctgctggtggaggtggtgctggtgagcaggcatagcagaggccctccagagagactgccctgcacgccatgccttgggccacgttggcagtgtgacaggactgtgattgtgctagatgtacctgcccaagtctgctggtcacatttggcagcaaaatggatttctcctggggagaacaaagttaagggacactgagacctgcccttcagaattcggttcacttgggggcttctgtggtagagactaactggccttctgatgtctttgttcaactgtggccagctgtggcatcagcttcctggagcagtaaatgaagacagagtggaggacacaaatgtacaaaatgcacaagactgatttcttaccacattttagtctttcttgttttaaaaaaaattctttaaaatttatcttgtccgtgtagatactttattcttctggatgtattcagaaattgcatgaatgcccagtgaggggaggtctttcatgcatataaaaaggtaatgtttattgccgggcacagtggcacgtgcctgttaaggcccagctttgtgggaggctaaggcaggaggatcgctggagcttaggagttcgaggctatcgtgtgctgtgatcgcacctgtgaataaccactgcactccagcctgggcaacataggaagacat

SEQ ID NO: 5332 - DNA, 4246 bp, Homo Sapiens
  NM_024866
ccgcgactccgctccaggcaggacccccaacccgcccagcccgctccgccttgcgccccggacccgcggccgaccccagacccgctgcccgcttcgcgcccgaggcctgcgccccgacggacgcccgtgcccagcttgccacgcccacgcccggcgccccgaccgcggaggactccccgaggtgccggcggagggggtggctcgcggctcaggctgcccccgacgtgcccggctcaccgccccctcccctgcagccccgcccgccatggcccggatcccgacggccgccctgggttgcatcagcctcctctgcctgcagctccctggctcgctgtcccgcagcctgggcggggacccgcgacccgtcaaacccagggagcccccagcccggagcccttccagcagcctgcagcccaggcaccccgcaccccgacctgtggtctggaagcttcaccgggccctccaggcacagaggggtgccggcctggcccctgttatgggtcagcctctccgggatggtggccgccaacactcgggcccccgaagacactcgggcccccgcaggacccaagcccagctcctgcgagtgggctgtgtgctgggcacctgccaggtgcagaatctcagccaccgcctgtggcaactcatgggaccggccggccggcaggactcagctcctgtggaccccagcagcccccacagctatggctgaggtggggccgggccacacccctgcccatcccagccagggtgctgtgcccccgtccagagctgcagctgagccccatctgaagcccagtccctcggagctgcagacagcaggtcctgcagcaacaatacctgcacggctttgcacacgtaaacctaggctggtctacacgcagtgctggtacgtcaaggagcctaaacaccctgaaattgtgaccccctgggggacagctgccagacacagctggcggcagcaccagatgctaagcgcttcagagaggaggtgtctgcccagagatgtggagcagaagctgggccctgaacacacggggccatgtctggacgagcaggggagagaggctgaactggccagaagtggcccctccgctgctggtccagtcagactgaagcccggccttgtgcctgggctgttcctgctctcatgcacaaccagcccttccacgtgcctgcctgtgggacaggagggggagcgtgggatgctgtagcccccggggttgggcaagggaaggatggtggccctccagaggtcatgaagggacctctgtggctccagctgccaaccctggagcccagaccgaggtggccatggagactccacctggatcccctgtaggaggccagggaggggaactcagcagttcaggagccaccccaaaccattctgggacagggacacccctttctaccccagggcagggcagggctgggtggggcaagatcccccagcccgactagacccacctcacctgaagggggtgagacccttgttggcagccagacaagggtggggctccacaggcagcacaggcgccccaccaccacccagtttggggacccagtgggaccaggtgcgggggcagagggtgacttaccaagagccagggagggcagcccaggcccaagtgacagcaagaacaagaaccactgccggcgtgcacagacttggtgtgtgtccttccctggggggacgggggactcacatgtgcctgccactggagcctctcaaccgtccagcagaacacggggttcagaaagggctccttctgctatttagcgaacactgagcatttaatttacaaatgtttgctagggtcaccctctcggccatcccacgagggtcgccatgatcaccccaactctagaggccgcagcagagctcaggacattcccccacagagcttgcccctcagttcctacctccaagggggagggtcctggaagcgcccacccaggcgccgcccctgtgcttgctccccgagctcagggattgccgagtccacgtaactgacctgtactccacgaggccctgtgggaacggtccaggctggtcctgccctgtggaggcctccgtgcactgagagatgtactaggattgcagcaaaggtggtcagggtgatgggccgcacagcgaggcagtcaaggccagctccctgggagaagcactgggtcaggtgaggtctgaggacagcaggccttccctaggggaaggagctgggagtgccaaggccccaggtgcacaggaggcgtggctgctgagaggctgcagggtggaggggcctcggcctcagagtcatgtgccctgtgaccactgaagggtgtcagcagagcacacggcatgaggacagagggaggggcacggggagtgaaggagggggccctggggcaaggctcgggggtcaggagctcagcgtccgctactcagcccagccaaaaccctcccagacgtctcctctcctgcctgggcaaagtccagcttggcaccccgtctggggcctgcctgtggtcagggccaagtgttccctcctccaggaaagcctttaccctcctcatgccctgtagtcaggaggccgcctgctgtaaccctccgtgtcgcctcgggtgcgaaatcagacccacctgacaccatcacgcggaggcccagcagcacctgcacccacttccagctgctctggccaaaatctccgctcggccaggccccgtggctcacacctgtaatcctagcacattgggaggccaaggcaggcacatcacctgagttcaggagttcaagaccagcctggccaacatggtgaaatcccgtctctactaaaaacagaaaattatccgggcgtggtggcacatgactgtaatcccagctactcaggaggctgaggcaggaggatcacttgaacctgggaggcggaggttgcagtgagctgagattgcgccattgcactccagcctgggcaacaagagcaaaattctgcctcaaaaaaaaaaatagtaataatacaaaaattagctgggcgtggtggcacatgccagtaattccatctactcgggaggctgaggcaggagaatcgtctaagcccgggaggtggaggttgcagtgagcccagatggcgctgctgcactcaagcttggatgacagagcaagactccgtttcaaaaaaaaaaaacctcctctcttccttcacaccttcctctgaatcccacccggtcccacctcctgaacctatccagacaccttctcctgacccaggcaccacctgctttcggggcgatggccgtagcctcctcccaggcacctgtctgcatccctctggccagtgcatgctgagcacgtgacctacccgtgttgggacacgtgaggatacagccttgacccccaggggctgacattctagggggagatagaaggagacaaacgtagaaggtagaataagtgggtggtggagtggcagggagtgctgagtgccacaggaagtcagacaaggaaggagagtgtggggcaggtgccgtttaaatggggggcgctggggtctcctcacagttgcttctcagctcagctgtgccaggatcttgttgagtcaggtcagctgcccacagccctcttgcctgacccctgaagcccagaactctgatcttcacagccctaggtatggccccagcaccccactgccctctctcctgccccagccgactgctgttcccagacttccctggccacgctccaagacgccagctctgccgcgggcactttgttctcacggtgtcctccatgcctgcagggcccatgcatgggaagttgcgttggcggcctgggtgttggcggttccgtgcctgctccaactctccgtgaggcccctctcccagagcctgacacactctgtggccgaactctaggcaggtgcccctgagtcctttcctcgacgaggcctgaccccatccccatcctcgctgggcccgccgaccccggtgttagcaagaatcctctaaatcagtttatggagaattacccaccctcgatatctgatcccattcctcatctcccacccttgatctcatcaccctgccggcctcctgcaagatcctcattgagccactccagtgagaatccccctaccctcgaaggccgccctaacaacttcccatccgctgacccctccaacgccatcaatctccagctgtggttgttgaactcggaggtgagctcctctcaccactctcttgaataaagcttttctcaccattttaa

SEQ ID NO: 5333 - DNA, 2154 bp, Homo Sapiens
  NM_024871
ggaggcgcggccgggagcgccgcgcgccgggagcggggcggcgggcgccggggctggcatggcgtggccctgtatcagccgcctgtgctgcctggcgcggcgctggaaccagctggaccgctccgacgtggcggtgccgctcactctgcacggctactcggacctcgacagcgaggagccgggcacgggcggcgccgcctcgcgcaggggccagcctcccgcgggcgcccgggattccggccgggacgtgccgctcactcagtaccagcgggacttcggcttgtggaccacgcccgccgggcccaaggatccgccgccggggcgcggaccgggggcgggcggccgcaggggcaaatcctccgcgcagtcctccgcgccacctgcgcccggcgcccgcggggtctacgtgctgcccatcggcgacgcggacgcggctgcagcagtgaccacgtcgtacagacaggaattccaggcttggactggagtgaagccctcaagatccacaaagacaaaaccagcccgagtcatcacaacccacacttcgggatgggacagcagccctggggccggcttccaggtcccagaggtgaggaagaagttcactcctaacccctccgccatctttcaggcctcagctccccggattctcaacgtgtgactgcctgcaccgtgacaccatggctgccgacaggacagggctggggagcggcctcaggacccactgccgcggggctgggcgagagcatggcatgggcccctgcgggagggcacagcccctctcaaagctgtcaccagggccaaagtgctggtgtggagcagatgcaccgatggacttggcacacccagctcagcctcaagcatcctcttgagaagcctgtggaaggctcctgcgttcgttaactgccatctggccgtctctcagttttgaaatctctgaggagcctgaggatcaagtcagttgggaaccgaattggtccatggaagctgaggaatgtggacacatccggcccttgaaagaaccagttatgtccacttttggtggatttcccaggatgcgtgagcacttgattaatttcataacctacagtgagacccttggctcttcctacaaatggcccctgcagttgaagctgttggaatcttgggccgtcacctgcatgactcatggtgatgctgagtatccaggaggaaatttccagaagaaacagaccgtcagtcacgggcttccacttcacagacctccttatggccaagatgagcctcatgttttaacaaaacagttcttgggattgaatgactcacatttaccttgtgctaggttctaaagattgaatccacattttgttactaatgattttcccgctaacataaggatgatgagcagggcactatcatacacactggctgagaactggaactgtttttgggaaggtggcatttgtctcattccctgaaataccttaaaatgtcctctacaccaacccttccgtctaccctgctcacatgtacagtgacggggaactcaccaccttttgaagaggcagttcattttctttgcaaagctctctcctaacttcctccgtaaattccagccagcatggccacatgggtcacgcctggtgccttcacacgtttgaggggtcttcgtctctttttaaagcttagaggtacaagctcaggacagtcttcagtaaggaaatttgtggatttccctttggatctttcttcctctccagcccacaagtggctctagtgagacgagcatttaagctgcaggtggtggcactcgggtctcagagccaccagacgtgcaggtgggacagtggttccagctccgactgcctgtcagcgtccctcccaggtgctagccctggcaggcacagccctcccctcatgccagcaaaggaaatgctcttgatgagaggctcgctttaaagaagcccaaagcgtgtgcttatccaaggggttcagctattcctgacttcacggcttgcatgtttgatttttctaagagaaaagaggctgcctgctgggtgtctgtggaaatgagattaaaaactgtacaatctcagattttactaaaatgcaaaaatgtagtttcagtttcttaaattataagcacgagtcttctcacgcttaaaaaaaaaaaaaaaa

SEQ ID NO: 5334 - DNA, 1747 bp, Homo Sapiens
  NM_024872
aactcatgactcggggagccagactgcgatcagacgcgcgtgcccagctgaaccagctgtctctagacggagggacgggaagtggccagaaggggaagtgtgaggagttcccgtccagcctgtcatcagtctccccaggtcttgaagcggcggccctgctcctggccgtgaccatggaccctctggagacccctatcaaggatggcatcctctaccagcagcatgtcaagtttggcaagaagtgctggcggaaggtgtgggctctgctgtatgcaggaggcccatcaggcgtggcacggctggagagctgggaggtccgggatggtggcctgggagcagcgggtgacaggtcggcagggcctggccggcgaggggagcgacgggtcatccgcctggctgactgtgtgtccgtgctgccggctgacggcgagagctgcccccgggacaccggtgccttcctgctcaccaccaccgagcgaagccatctactggctgctcagcaccgccaggcctggatgggccccatctgccagctggccttcccggggacaggggaggcctcctcaggatccacagatgcccagtctcccaagaggggcctggtccccatggaggaaaactccatctactcctcctggcaggaagtgggcgagtttcccgtggtggtgcagaggactgaggccgccacccgctgccagctgaaggggccggccctgctggtgctgggcccagacgccatccagctgagggaggccaagggcacccaggccctctacagctggccctaccacttcctgcgcaagttcggctccgacaagggcgtgttctcctttgaggccggccgtcgctgccactcgggtgagggcctctttgccttcagcaccccctgtgcccctgacctgtgcagggctgtggccggggccatcgcccgccagcgggagcggctgccagagctgaccaggccccagccctgccccctgccacgggccacctctctgccctccctggacacccccggagagcttcgggagatgccaccaggacctgagccacccacgtccaggaaaatgcacctggccgagcccggaccccagagcctgccgctactgctaggcccggagcccaacgatctggcgtccgggctctacgcttcagtgtgcaagcgtgccagtgggcccccaggcaatgagcacctctatgagaacctgtgtgtgctggaggccagccccacgctgcacggtggggaacctgagccgcacgagggccccggcagccgcagccccacaaccagtcccatctaccacaacggccaggacttgagctggcccggcccggccaacgacagtaccctggaggcccagtaccggcggctgctggagctggatcaggtggagggcacaggccgccctgaccctcaggcaggtttcaaggccaagctggtgaccctgctgagtcgtgagcggaggaagggcccagccccttgtgaccggccctgaacgcccagcagagtggtggccagaggggagaggtgctccccctgggacaggagggtgggctggtgggcaaacattgggcccatgcagacacacgcctgtgtccaccctggcctgcaggaacaaggcaggccgcctgtggaggacctcagccctgccctgccctcctcatgaatagtgtgcagactcacagataataaagctcagagcagctcccggcaggggcactcacggcaaaaaaaaaaaaaaaaaaa

SEQ ID NO: 5335 - DNA, 6111 bp, Homo Sapiens
  NM_024884
gctaaagagcgcgggtcctcggccgtggagggtcaagtggcttcttctgagcgctgagggaggggagcgtgcgtaggggatggtgccagcgctgcgttatttggttggtgcctgcggacgggcccgcgggcttttcgccggtggctcccctggggcgtgcgggttcgcgtctgggaggccaagaccgctgtgtggaggtagccgcagcgccagcaccagctcatttgatatagtcatcgttggtggcggaattgtggggcttgcctctgccagagcactcatcctgcgacatccatcactttctattggtgttctggaaaaggagaaagatttagctgttcaccagactggacataacagtggtgtcatacatagtggaatttattataaacctgagtctctgaaagccaaattatgtgtacaaggtgcagccctcctctatgagtactgtcagcaaaagggaatttcctacaagcagtgtggcaagcttatagtagctgttgaacaagaagaaattcccagacttcaggccctatatgagaaaggcctccagaatggtgtcccgggcctgaggctgatccagcaggaggatataaaaaagaaggagccatattgtaggggtctaatggctattgattgtccacatactggcattgtggactatcggcaggtggctttgtcatttgcccaggatttccaagaagcaggtggctctgtcttgaccaattttgaagtaaaaggtattgaaatggctaaagaaagtccttcaagaagtatagatggaatgcaatatccaattgttataaagaatacaaagggagaggaaattcgatgtcagtatgttgtgacatgtgcaggactttactcagaccgtatttcagagttgagtggctgcactcctgatcctcgaattgtaccattccggggagattacctgcttttgaagccagaaaaatgttatcttgtaaaaggaaatatttatccggtcccagatagccggtttcctttcctaggagttcacttcacaccaaggatggatggcagtatttggctagggcctaatgcagttcttgcctttaaacgagagggttacagaccctttgacttcagtgccacagatgttatggatataattatcaatagtggcttgattaaactggcatcccagaatttttcctatggagttactgaaatgtataaagcatgttttcttggtgcaacagtgaagtatcttcaaaaattcatccctgaaattactatcagtgatatacttaggggcccagctggagtaagagcccaggccctggatagagatggaaatctggtagaagattttgtatttgatgcaggagttggggatattggaaatcgcattcttcatgtgagaaatgcaccttctcctgctgctacttcttccattgcaatttctggaatgattgcagatgaagtacaacaaagatttgaattataaataatgaaaggagctaggtatgcactgtaatcttcatgtcagcaacaagaatgtactaattgcattctttaatttaaaaaatggtttttaaactttagtttttaggtcaaagataaccactgcattgttaaaatgatgtaacatagaaataataattttctacaaaaattagccaggcatggtggcgcatgcctgtaatctcagctactcaggaggctgaggcaggagaatcaattgaaccgagcagacggaggtgagctgagagctgagattgcaccactgcactccagcctgggtgacagagcaagaaaataataataataataattttcaaaatgttaggctgggggccgtggccagcactttgggaagccaaggcaggtagattgtagcccaggagtttgagaacagcctgggcaacatggcaaaaccctgtttctacacaaagttagctgggtctggtgcctctgtagttccagctcctcagtaggctgaggtgagaggatcacttgagcccaggaggtctaggctgcagtgagcttatgttcatgacactgcattccaggctggatgatagagcaagatcttgtctcaaaaaaaaaaaaaaaaaaaaaaaaaatccagcctgggcaacatagtgaatgaaaccccatctctacaaaaaatacaaaaattagctgggcatgatggtgtgtgcctgtagtcccagctacttgggggctgaggcaggaggatcgcttgagcccgggagatcaaggctacagtgagctgtgttcatgccactataccccagcctgggcaacaaagtgagtccctgactcaaaaaataaaaacaacaacaaaaaataaattccatgcttatttactttgcgaataaagaggcaaggtacagttttatctgtccgaatccctgacttttatttattttttttttcagacggagtttcactcttgttgcccaggcttgagtgcaatggtacgatcttggctcactgcaacctctgcctcccgggttccagcgattctcttgcctcaacctcctgagtagctgggattacaggcgcccaccaccatgcctggctaattttttgtatttttagtagagacggggttttgccatgttggccaggctggtctcgaattcctgacctcaggtgatccacctgcctcagcctcccaaaatgctgggattacaggtgcgagccatcatgctcagccctgaatccctgactttgttaatgacctgtccttaccaaccatgacctagagaagatttggctttttaagagttttggagaaagatggcataaaaatagattatttccttaaatcaattttttagcattacgctacctaagctcgtttggtctctcatagacaagaaaatacattatattgtaggttacattcttttaattttgaagagtcacaaaactcacattatttagagcaacaatatttgtatttggaaattaaaaattcatgatttcaagaaaatacataaaatttacatttttgagtagtttgaataagtttctatcttaattataatatttgtaggaaataacaaaacaaactcaaagcctttattatttccagtctctttgtaactgatgtggtatggtatcatcatgaaatctaaacagtggtacactgagtggttgtcctgttcttcaatctctgtggctgagaactgaaataacttagaagagacagatttttatgagagcagttttagaatcctgacactgatgtatagaactccaatttaaaaaagttatttatctattatatctctgatctttagtcacactaaggctctcaaaatgttggccaagattggtaatgattcatacgtacttgatttttcagggctcctataaacttgtatagggatatttttccatttttgataaatatctaactttgaggcattcacttttgtaaaccgcgaaagtgccttacattcacctcatgagtattttaagttgatgcccagtgctgtggtatatcctgtatatatgtgttttgtggtatctatcgaaattattcttataatttagaaagttagaaaatagaaattgtaaatgaaaatgtggcgacctgactgcagaactttgagtactgaaccacatttaggtgaggcattttcatccattctctctgatttgctctctcaggattcatcttctactgtgtatgtcttctttcctcttagctctccaaagctgtatgatggatgggtgagaaggatgtgcattttggttgataggaaaaatgtttctgttttcttccttttcccctcacttcaagcattgatgattacattgattgagctacctcatccattaatttgaaaggctacacttcatcagctcatgtttaagaagtagcacatcccaggtaaacagagtaggccattattcaactcttaggatgagtatattaaaagcattcagatatcaatgacagaagaaacaagccctaatgtttctttataacagctgattcctgcaagaaatgcaaacacaggatatttttctgttccattacaagattactaagagatggaaaatattatcattctgtattttgtcagtagtacgattgcatacatactaagttgtaaacattgaattacaaaaaatgattgtcctaattgaagcagtcctcaatccatttgagtctgtacaataccctgaaaaggaaacaacaggtgctggagaggatgtggagaaataggaacacttttacactgttggtgggactgtaaactagttcaaccattgtggaagtcagtgtggcgattcctcagggatctggaactagaaataccatttgacccagccatcccattactgggtatatacccaagggactataaatcatgctgctataaagacacatgcacacgtatgtttattgtggcactattcacaatagtaaagacttggaaccaacccaaatgtccaacaacgatagactggattaagaaaatgtggcacatatacaccatggaatactatgcagccataaaaaatgatgagttcatgtcctttgtagggacatggatgaaattggaaatcatcattctcagtaaactatcgcaagaacaaaaaaccaaacaccgcatgttctcactcatagatgggaattgaacaatgagaacacatggacacaggaaggggaacatcacactctggggactgttgtggggtggggggaggggggagggatagcattaggagatatacctaatgctaaatgacgagttaatgggtgcagcacaccagcacggcacatgtatacatatgtaactaacctgcacattgtgcacatgtaccctaaaacttaaagtataataataaacaatatatatatatatatatatataaaataccctgaaaaataaaaatgaaaaatttgttgaaagtgttttgaatatgtaggttattctgcttgtaaaacgttttatatgtatgtcaatagggtttttttgtttaatactgatataataaagttttatgtatttctgacagaagaaatgtatattaatatttaaaatattttaatgagccttggtgttgtagagaacatattttttagttccataaaaacttttatgcaaataaatttttttatgtgtaaaacataaactgtttgctttagatagatagcagccaacctttttaaaaaactcatttctgtgttagtatataatacaaaatgaggttgagtcatttatattttgggtaaaaagtggagcattttagattttaacttcagagtgtttgtgaggaactcttgatgtaccagcaagtatatttttggtgtttcatgttacgtagcttaactcttttatccatacatatatgtgtatatcaaagtccttcccttgatcctctcagcattagcactgtttggggagttgcctttactgttggcagaattccactttccctgaggccatttggaaatctacctagtagcctgtgggataaccttaactcttagaactttcttcaaaggatggtggtgagaatggggtatactgccaggccctggcctacgggagtttgtagggcctacttttggaggcaatccaaccctgatggctgtacctatgagctatccctgtaaacacaggagacatggtgtctatattgtttaaggactggctctgccctcctgggcccttaatctgtgtctagacttcttggtcagaggtttcctcatctttctgcgcatacactattatctaaagatcttgtaaacatttttgagttgtaatcgtaaagtcagtttctaagcttttctaacacactcaaagggagtttttgaaatctcttcatcagggcttaaggtagaaggacagggtgaaatggttgggaaagcaaaagctgcctcgagatgttttcaaatagtttgtactcattaaatagcttaagaatggaaataaaccctgaagccctgaagggaagaacagtgttgataccaaccaactctacttttctggcctcaaatcctagaaagtattgtgggtttgttgttgttgttgatgttgttaattgcttgtattttctgcttatgggaaggatctcacattaaagttatcttattttaaaaaaaaaaaaaaaaaa

SEQ ID NO: 5336 - DNA, 3315 bp, Homo Sapiens
  NM_024887
gcgccacgtcatgaggaagtgccggcccactgaagccgtggggacgcgcccagcggagctaatcagattacctggctggtgtttgcttgttctggagtgatcttctgactggaaaagaactatgtcatggatcaaggaaggagagctgtcactttgggagcggttctgtgccaacatcataaaggcaggcccaatgccgaaacacattgcattcataatggacgggaaccgtcgctatgccaagaagtgccaggtggagcggcaggaaggccactcacagggcttcaacaagctagctgagactctgcggtggtgtttgaacctgggcatcctagaggtgacagtctacgcattcagcattgagaacttcaaacgctccaagagtgaggtagacgggcttatggatctggcccggcagaagttcagccgcttgatggaagaaaaggagaaactgcagaagcatggggtgtgtatccgggtcctgggcgatctgcacttgttgcccttggatctccaggagctgattgcacaagctgtacaggccacgaagaactacaacaagtgtttcctgaatgtctgttttgcatacacatcccgtcatgagatcagcaatgctgtgagagagatggcctggggggtggagcaaggcctgttggatcccagtgatatctctgagtctctgcttgataagtgcctctataccaaccgctctcctcatcctgacatcttgatacggacttctggagaagtgcggctgagtgacttcttgctatggcagacctctcactcctgcctggtgttccaacccgttctgtggccagagtatacattttggaacctcttcgaggccatcctgcagttccagatgaaccatagcgtgcttcagcagaaggcccgagacatgtatgcagaggagcggaagaggcagcagctggagagggaccaggctacagtgacagagcagctgctgcgagaggggctccaagccagtggggacgcccagctccgaaggacacgcttgcacaaactctcggccagacgggaagagcgagtccaaggcttcctgcaggccttggaactcaagcgagctgactggctggcccgtctgggcactgcatcagcctgaatgaggctggccacctgccactttgccctgccctctgcctccagggctccactccccttccttttcttggtgaaaggcacctcctttcctgataatgaatggtgttccctttgcttggctggggagccccccaggccaggtttgctggccatagatacctttgggctgcctgggacaggctcctgaggaggattgagggtgaaagtctcccacgagtacactaaacctaggtctggtcaccaatagggtttggagagcaaagggccacaactcatcagctgcctgtctcttagatgcactttctttttccaccagcacatccttcaacacacagaatttcagggaagagttctccccaaaaccctagctctttacccttccattttagccttccacccagcttccacaaaagatttggctctaccttggatctgctagtaaataactaataggcaggcagttatttgggtaaggaaaaaaggggtgggagagacagaaaatttgcccatctgctgctcctcccccttggctctccacctgggatttgctattgaatctctaccctctcccaccacacagtactgattgctcactgaaagactcagcacccccaatggtgcgcggaagccaggcgggcgattacaatccaattacctattgtcgactcagcccacacaagcttttctcctcctcttgcagggcatggggccaggctccactcccaaatgagactggccccctccatggttcagggtaacagaagggcctgtaggccctggtgaactgaatccagcacaggcctcccctgtaacacaacaggactgagcagaaccaaacacttcttccaactgactctgctccctgccctcaccatctcaaactctgattcccactccactcttcgaggtttctctcagctttttgacctggctccctaagtaggccctagatgatttattcttggcatggcaaagcttgttctaggtcctctgcttgtgagggtcaaagctgtgtcctttcccttacctccctctgccaggacttgctgcagagctgctgagaggattagtgcctttgaagagctgtctgcctgagcaactctatttcaggtgccccacaccggcaagtaccagccagcaacaccaaccaaatgctactctctttaaagtccattttccttcttctttttttttttttttttggagacagcatctcaccctgtcctggctggtctcgaactcctgacctcaggtgatccgccggcctcaccctcccaaagtgctgggattacaggcatgagccaccatgccagacttcccattttactttctgcaagctgtttccctagcagctccctctaggggagaggtgaaatcttgcaagttgtagcaagagcacacaggaaacccctaactttcctataccccacccgcctcttcccctttctgtcccgggatacctggcggcaagagacttcttggctattgtccatgctcccagaatcaagcataaatgccagacacggcgattgagaagccaatcagtgaaccctttggcaaagcccccatccacacctggcactcccctctaccaatccctggcacagggttcctggagagcaggtgctgtacattttacagctttacaatggggctgttgacagccataattagggaggcatgaattatgcggctataatgcagagccctacaattaaggcgggaatgaggggctggaggcagcaaacggaatctgccctatgagcgtggctgttgagtcctgtctcctgggtctgactttccgtaatatgattggggtacagtagaggtgattaatggggctggcatctctctttggcctgaggttctgtattctgggaaaggtacacagggtggagtagggagaagctgccccaggaggcgatgtagtggtggaaagaagaggcagagaggtcgtcgtcgtcgcccagcagcaagggctgcaaaatagtagaactcgtggttgctttggacaggtgtgatttgtgcaagccaggttcaacccttgcctcaagaaatcagatgggaccaatttagtgtccttccacctgtgagccaagcccccatttgaggacatctatcgtattcttgtgtgctgggtctcaaatagaatttttaaagattcttagatgtaaaaaaaaaaaaaaaaaa

SEQ ID NO: 5337 - DNA, 1494 bp, Homo Sapiens
  NM_024891
catcccgggactgaacccctcctccctttcacagattacctcatccgagcaagattcctccctccctccctcctagagacctgatcccgccacatccccgcctccctctctgggcagatgtgttactcctagggcagttttcctctcgggcgtctctcgggtgatggcctcatccagggccacgttctcctggcccttggggatcgtgtcccttccagcaccttgctttcgaaaacccgatgaaccctcgcgccatccccgggccaggtccctatactgccagccactcccccttccttcacctccaccctctacccccaccccaagcagaccgatcctcccccatcccgcccttctcttctcgtcatttcattattgatccaccttttcctaggccaatcctggggcttggaaggggtgggggaagccaggttggggtgaggagagtagataagggacagttatactttagtgtggtggcggtggttgctttgggatgggagaaaaaggattatcaagcaaagttattccttagaaaggacttggggttgtctctgattcttgtaaggggacccaaggtggatgaagggtcagagcgttgccccttccccattagtactggggcaagaacggagttgcttctataaacattattcggcccccttcagcaaaaaggaaagttgcccaaggaagggaagttgagttcaggttcagccagtggcgttgcgcatttgttttccattggatgcagaaggggggagttcgaattgtagaggggggaggatggcatgggggatgctaggaggaggaagagcagctgctaggggctgaagcgaaggggggtagggggttgctgctctggagtgctcttgattgaaacagaaagggaaagataacaaccagccgtttcctgcgtgctctgccgttggtgcacacaaaatatcctgggcaaaccccttgtcccctattgtgccccgcacccctttagatttacggaaagatcctgggaagaaggggagggaggagatcccaaggaccctggcccctcctttcaaggagctggcattttttagttgttagtcttcctgcctcctttttttttaatcgtttctaaggcagcctgatcaggagactgacaacaacccgccttctgacagagcaaggaggacatgatgggggcgtgttccttgctatgtagctagctgcagcgtcccctttccctgcctctttctgctctatctccacctccttttcccagccttcagaaggcagctgcagtcagcagggttgtttgagactatttattggttgctgtagattattatttttttttgaaaggccaattctgtattttttaagctaacaacacagatcccatgtagttggagaaccaaaggccacatacatgacaaaaagactgaaccgttcaggttacttgcatggagttggtgcttaaatgtgagttgattttgcttttttaaaagatacagcagc

SEQ ID NO: 5338 - DNA, 5355 bp, Homo Sapiens
  NM_024896
ggccggggctgtcgcgggttggggcggttgggctggcagctgaggctcgtggccatggagtggggttctgagtcggctgctgtgaggcggcaccgcgtcggagtagagcgtcgagagggagcggcggccgcgccaccgccggagagggaggcccgagcgcaggagcctctggtggatgggtgcagcggcggcgggaggacgcggaagaggagccccgggggtagcggcggcgcgagcaggggcgcggggaccgggctgtctgaggtgcgcgccgcgctggggctcgcgctctacctgatcgcgctgcggacgctggtgcagctctcgctgcagcagctcgtgctacgcggggccgctggacaccgcggggagttcgacgcgctccaagccagggattatcttgaacacataacctccattggccccaggactacaggaagtccagaaaatgaaattctgaccgtgcactaccttttggaacagattaaactgattgaagtgcaaagcaacagccttcataagatttcagtagatgtacaacggcccacaggctcttttagcattgatttcttgggaggttttacaagctattatgacaacatcaccaatgttgtggtaaagctggaacccagagatggagcccagcatgctgtcttggctaattgtcattttgactcagtagcaaactcaccaggtgccagtgatgatgcagttagctgctcagtgatgctggaagtccttcgcgtcttgtcaacatcttcagaagccttgcatcatgctgtcatatttctctttaatggtgctgaggaaaatgtcttgcaagccagtcatggtttcattactcagcacccctgggctagcttgattcgtgcattcattaacctagaggcagcaggtgtaggagggaaagaacttgtattccaaacaggtcctgaaaatccttggttggttcaagcttatgtttcagcagctaaacacccttttgcttctgtggtggctcaggaggtttttcagagtggaatcattccttcagatactgactttcgtatctacagggattttgggaacattccaggaatagacttagcttttattgagaatggatacatttatcacaccaagtatgacacagcggacagaattctaacagattccattcagagagcaggtgacaacattttagcagttcttaagcatctagctacatctgatatgctggctgctgcttctaagtatcgacatggaaacatggtcttctttgatgtgctgggcctgtttgtcattgcctacccctctcgtattggctcaatcataaactacatggtggtaatgggtgttgttttgtacctgggcaaaaaatttttgcagcccaaacataagactggtaactacaagaaggacttcttgtgtggacttggcatcactttgatcagctggttcactagccttgttaccgttctcattatagcagtgttcatctctcttattggacagtctctctcatggtataaccacttctatgtctccgtttgtctgtatggaactgcaactgtagccaaaataatacttatacatactcttgcgaaaagattttattacatgaatgccagtgcccagtatctgggagaagtattttttgacatttcgctgtttgtccattgctgttttcttgttaccctcacttaccaaggactttgctcggcgtttattagtgctgtctgggtagcattcccattgctcacaaagctctgtgtgcataaggacttcaagcagcatggtgcccaaggaaaatttattgctttttaccttttggggatgtttattccttatctttatgcattgtacctcatctgggcagtatttgagatgtttacccctatcctcgggagaagtggttctgaaatcccacctgatgttgtgctggcatccattttggctggctgtacaatgattctctcgtcctattttattaacttcatctaccttgccaagagcacaaaaaaaaccatgctaactttaactttggtatgtgcaattacattcctccttgtttgcagtggaacattttttccatatagctccaatcctgctaatccgaagccaaagagagtgtttcttcagcatatgactagaacattccatgacttggaaggaaatgcagttaaacgggactctggaatatggatcaatgggtttgattatactggaatttctcacataacccctcacattcctgagatcaatgatagtatccgagctcactgtgaggagaatgcacctctttgtggttttccttggtatcttccagtgcactttctgatcaggaaaaactggtatcttcctgccccagaagtttctccaagaaatcctcctcatttccgactcatatccaaagaacagacaccttgggattctataaaattgacttttgaagcaacaggaccaagccatatgtccttctatgttcgagcccacaaagggtcaacactttctcagtggtctcttggcaatggcaccccagtcacaagtaaaggaggagactactttgtcttttactcccatggactccaggcctctgcatggcagttctggatagaagtgcaggtttcagaagaacatcctgaaggaatggtcaccgtggccattgctgcccactatctgtctggggaagacaagagatcccctcaactggatgctctgaaggaaaagttcccagattggacatttccctctgcctgggtgtgcacctacgatctctttgtattttaatcttgtggatgagctctaagtacatgcccagtggatactccatgtgacatggtttctccctatgttacgtggatgtttgtaacgtaagtcaatgaattttaatgatcatatgttcaaagagctttctgggttaacgcttttcagggccaagcactataagggtttagctgtggcgcagtgatgcatggcctgttgacacttgaaaatgccagtcttttggcacttcagcacatgtgggtactgccactacacacacgtcattttatatgaccttaaggacaaagccaacaatccacttcaatagctgcccctttaggatcaagaaagatgtacactgtcagagcattgttaatgagacaaaagttgtttccaatttaagccccaaaaccatttgttgtattagtggatggtgggtaaaatatcattcactgaggtaatgattccccttgagaatataactctgtgtaggtcactggaaagtgattgccatagggctgggagagaagcattgcactcttgaggctgtagcctgtgtcaagctgtttcttcaggcagcctctcaaatgtgctttgtctctctgtgctgaggcctggaccctgtgctgagctggtgactcactgtcctgacaagtggacacacagatgcactgctgtgctgctttcctgaggtggttttctatgcctgttttcctctgaaacatgtctgttacccctctccatcttaccaagttgaaaaggggaatatttggccacatacccctctggttttcgtaggttcttttggttcagaatattgtttgtgccagtacatgaccttaacttccttcctcagagcactgagctgccatctgggctattctggggtagaaggaaggctgggagtggtgggaattttataaatatttattctcttttctttgtttcataggagtcttgtgttatacaaggttagtccttcatggtataatcttactgatgcactgggcctatctttttgttttccagccagttgaatagattagtttttctcagtaacttactatccagcagactggctttcctgagacttgaggttgtggcttatactggaatgagaccactgtacgtgtaggtggttcagatcctgcgtaatggcagcatgaggacttaaaaggtggttttcattttgaagatggctatgtagcttgtaaggtgtatcacagcagtacctctcatggctttttggttccagcagtgagggcattggtgagatcaatggtaaactgtgcaagctttctttttatcattaggaaatgtgaaacgttggacaaattttgagttttaacaaggacaaaaagttgaaagaaaaggcacagttaacaaaaaagggtggctagatttatcttgggtgatggaggaaatgagagaggaatgctcttgaaaggtggtctgtggatctgtctgaatagaaagagcacagtaagtatgcattgccggagaaaacgtccttgaagctgcttgtctcatgtgtatgatgtgctttttaaatcatgcccctcgttgcctgcctaatctgtgactccctaaaaactaactgggcccatgtagatggggctgcaaccagagctgaataacatgttaggctcacacatgcatcagcactgcacactggaatcattgctcttcctggactttgtagaaatcagtctcaagtgcttcaagagtctggctcctgctacttttatctgtcaggtagcacataaggtttgcagggtttatattttgtatagaatcacagttgtggagaaaaagtaataatttctcaatgaattttaaaaatgggcctattttctatccccgtggttcatctgatataattagtgttccctgtgaattccccccctctatgggaaggatgcctttactctttatcagtaataaattatgactgttttcatattgccttagggttatttccctgtgtaaaccattgtcttttgttttggttttctttagcattatgaagctttggtattgtacaaggtcagtagtaagatgctcactagtctcagggcttgtgtaatattctgggaggtcatttaaatgccagaaatggtcaagcaattatacacagtatttatgactctgttaagcataccgtttgtctgtcacattagtagattctgagattaaaaaaaatttttaaagagtgatcatttaaataatttctaaaagggtcttttcaagctctaacaaagtcactaacaaatgcattattttctacagaattagatgttagtagtacagtactgcatattcagggaaaaagtgtgaggaattgatttcaaaatagttcgttcttgtgtttgacctaagaatgattgtcgcatgaagtgtttgtttttacagtttagcatatataaacaaacatgataggattccttaagatgttaccacccagggggccacaagccagcctgctgtctcaggaagctgtagaaggagtgtttgtcaatttcttgtcactggtttgctgacttactgaggattaattgttgccttacaatgttactgaaataaactgtttaatataaaaaaaaaaaaaaa

SEQ ID NO: 5339 - DNA, 4190 bp, Homo Sapiens
  NM_024900
gttttggcaagggattaaagtgctcccccctgtggcagcagtgacccagaaatgagtttgattcacatagtccttcctccataacaagccaaacgccagaccgagagtgcctccgtgcgcgagtgcccggtgtgtgcgcgccggcgagagcaggggcccgcccggctccccgcccgccgcggcccgaactcatgcagctccgagcgagcgagcggcgcccagcccagcgcctcggccgaacccctccgcagcaggctgcctgctgtttcccggggagatcatgaaacgaggtcgccttcccagcagcagtgaggattctgacgacaatggcagcctgtcaactacttggtcccagaattcccgatcccagcataggagaagctcctgctccagacatgaagatcgaaagccttcagaggtgtttaggacagacctgatcactgccatgaagttgcatgactcctaccagctgaatccggatgagtactatgtgttggcagatccctggagacaggaatgggagaaaggggtccaggtgcctgtgagcccggggaccatccctcagcctgtggccagggttgtgtctgaagagaaatccctcatgttcatcaggcccaagaagtacatcgtgtcatcaggctctgagcctcccgagttgggctatgtggacatccggacgctggctgacagcgtgtgtcgctatgacctcaatgacatggatgctgcatggctggaactgaccaatgaagaatttaaggagatgggaatgcctgaactagatgaatacaccatggagagggtcctagaggaatttgagcagcgatgctacgacaatatgaatcatgccatagagactgaggaaggcctggggatcgaatatgatgaagatgttgtctgtgatgtctgccagtctcctgatggtgaggacggcaatgagatggtgttctgtgacaaatgcaacatctgtgtgcaccaggcctgttatggaatcctcaaggtaccagagggcagctggctgtgccggacatgtgccctgggggttcagccaaaatgtctgctgtgtccgaagaagggtggagctatgaagcccacccgtagcggaaccaagtgggtccacgttagctgtgctctgtggatccctgaggtgagcattggcagcccagagaagatggagcccatcaccaaggtgtcacacattcccagcagccggtgggcgctagtgtgcagcctctgcaatgagaagtttggggcctctatacagtgctctgtgaagaactgccgcacagccttccatgtgacctgtgcttttgaccggggcctggagatgaagaccatcttagcagagaatgatgaagtcaagttcaagtcctattgcccaaagcacagctcacataggaaacccgaggagagtcttggcaagggggctgcacaggagaatggggcccctgagtgttccccccggaatccgctggagccctttgccagccttgagcagaaccgggaggaggcccaccgggtgagtgtccgtaagcagaagctgcagcagttggaggatgagttctacaccttcgtcaacctgctggatgttgccagggctctgcggctgcctgaggaagtagtggatttcctgtaccagtactggaagttgaagaggaaggtcaacttcaacaagcccctgatcaccccaaagaaagatgaagaggacaatctagccaagcgggagcaggatgtcttatttaggaggctgcagctgttcacgcacctgcggcaggacctggagagggtaatgattgacactgacaccttatagtgacttagagaagaagatgcaaagaggcgaacgctcgcccagagcaagaaatgatagccagtcatatactctcagacccttgtacacaccacagcatgaggttgtgttggttaaaaatatttatgggctggtaaactcattgtacatatgtgcaaaactgctactgagtggggagcttctttgtggtttttttttttttaaaaacactttcccattaatctttactgttttgtaagatcaaatggggtgtgtcttccccacccccattccttcattctagagctagagtgaatgagccccaagaaaatgacccaaggagttgactcaggatggtttacagactgatttagaaaaccagaacggatttcatttctaatggagggggccagagatgggaaaatttcttgttcagtccggggaaacacacctaggtgctggtgatgggcttatgaaggaagctaagcacggctgctcactggcccccactttgtttcttgggtaattcacaggggaattcccagtactgtcatggagcagagcaggcagtgggtgctgatgtgtgtgcatgagctgtatgtacacatgcatatatctgttacagaagatactcctggcagtgaggtgctaagtcatcactgaggctgtgtgtgtgtgtgtgtgtgcgcgtgcccgtgtccatccatgtctctgttgtgtgtctgtgtgcgggtatgggtgggattcctggtggacaggggtgtcagatctgtctgaggagccccagtcatgctcagcacgctacagatgtgttgtttgtcacactgagattgctgaatgtcgtggctgttggctgccgagcctcagctgctggcatttccttctgctgtttgctgcttttgtgcctcccccactttccatcacctctggagtcccgtctggacgtcccttcctgctacaggaataatgaggcgtgggctgcctcccgctagggcctcctgctccctgtaggtagtttctggctgaggcttgctaattggggatgcttcttagagcatcttccacatcaactcccctggctgctggctaccgattaaattcattagtgtgaaagaggtgggagtgaggttttctggcctgaagcagtctgcactgaaaggtacccaagtggcctgaaacagtgtagggaaagacctgggaaacactggaccaaaaaagcctgatctcatggagacctgcatggccctgttagagatggcgtagaagtgaaagtcttaaagggagcattagagatccttttaatacacgactgagtgccagcttatttgtgatgccccttcccagaccaggttaggattcctgggaaggccgcggattccggccctggaagaggcaggatcctggagcagttttgtgaggcttttgtgctcccatacgccccctggtggtgagtgtaaagaagactttgcctctcacaactacatgtatgtgtggcatttttgttagagatgagaaaaggattgagaaggataaactggaatcctggtaagaagcctttatgccagcccgacacctgctgtaattggggtgcatgagctatggagtcagatagttgttgggagggggaggacaagaagtctattgtttggactgtgtttgtctcacaatcaccacaaaataaaagtgtagaaaatgcttgtggtgtactaactcttttctgtacttaagttactcagattaacatgcacttctaattctaaacattttttttggagtcatcactgtcgctgtttaagtagaacaatgccaacgatgtatgagaaacagggaataaatcaggatttgtgtgtgtatgtgtgtggcattacttacatttactttattaaaaagcctaaggaactttaaagaatttgtattcagtttatttttattttttcaagacagagtctcactttgttgcccaggctggagtgcagtggcgtgatctcggctcactgcagcctccgcctcccgggttcaagtgattctcctgcctcggtctcatgagtagctgggattacaggcgtgcgccaccatgcctggctaatttttgtatttttagtagagacggtttcaccatgttggtcaggttggtcttgaactcctgacctcaagtgatctacctgtcttggcctcccagagtgttgggattacgccactgtacccagccttagactcagtttaaaatgggcttattgtaatgaaaaaaaatacgctacccaaaatttgccatgatgcctgtgatggtgaaggcattaaacaattgaaatctttgccttgcccagagagttgcagttatttgtaattataaacagtaagtgtatcagggcaggggtgacaataaaaaaccaatcattactaccaa

SEQ ID NO: 5340 - DNA, 2062 bp, Homo Sapiens
  NM_024901
cctgggtcccgtcacatccttcttgctcaaccactgggtgcacaggatggaaacttctattccctctctggaagacagcgcgtggcttggcttcacagagttgtggctggagaccgaagcagcccctttctcaggcttactgtcaccagtctgtctgtgttaggggagaggggagtccgctctgtcctgaaggcccagagatggaaggacaagtggtaggccgggtgttcaggctcttccaacgccgactgcttcaactccgagcaggaccaccccaggacaattcaggggaagctttaaaggaaccagaaagggcccaggagcactctttgcccaactttgctggggggcagcacttctttgaataccttcttgtggtttctctcaaaaagaagcgttcagaggatgattacgagcctataatcacctaccaatttcccaagcgggagaacctgcttcggggtcagcaggaggaggaggagcggctgctcaaagctatccccttgttctgcttcccagatgggaatgagtgggcatcactcaccgagtatcccagggagaccttctccttcgttctgaccaatgtggatgggagcagaaagattggatactgcaggcgcctcttgcctgccggccctggccctcgccttcccaaagtgtactgcatcatcagctgcatcggctgcttcggcttgttctccaagatcctggatgaagtggagaagagacatcagatctccatggctgtcatctacccgttcatgcagggcctccgagaggcagccttccctgctcctgggaagactgtcactctcaagagcttcatccccgactcaggcactgagttcatttcactgacacggcccctggactcccacctagaacatgtggattttagttctctattgcactgtctcagttttgaacagatacttcagatctttgcctctgccgtgctggagagaaaaatcatcttcctggcggaaggtctcagcaccttgtctcagtgcatccatgctgctgccgcactgctctaccccttcagctgggcgcacacctacatccctgttgtccctgagagccttctggccaccgtctgctgccccacccccttcatggttggagtacaaatgcgcttccagcaggaggtcatggacagccctatggaagaggtcctgctggtcaatctttgtgaaggaaccttcttaatgtcggttggtgatgaaaaagacatcctgccaccgaagcttcaggatgacatcttagactctcttggtcaggggatcaatgagttaaagactgcagaacaaatcaacgagcatgtttcaggcccctttgtgcagttctttgtcaagattgtgggccattatgcttcctatatcaagcgggaggcaaatgggcaaggccacttccaagaaagatccttctgtaaggctctgacctccaagaccaaccgccgatttgtgaagaagtttgtgaagacacagctcttctcacttttcatccaggaagccgagaagagcaagaatcctcctgcaggctatttccaacagaaaatacttgaatatgaggaacagaagaaacagaagaaaccaagggaaaaaactgtgaaataagagctgtggtgaataagaatgactagagctacacaccatttctggacttcagcccctgccagtgtggcaggatcagcaaaactgtcagctcccaaaatccatatcctcactctgagtcttggtatccaggtattgcttcaaactggtgtctgagatttggatccctggtattgatttctcaggactttggagggctctgacaccatgctcacagaactgggctcagagctccattttttgcagaggtgacacaggtaggaaacagtagtacatgtgttgtagacacttggttagaagctgctgcaactgccctctcccatcattataacatcttcaacacagaacacactttgtggtcgaaaggctcagcctctctacatgaagtctgtggacatgtaaggacgagagtaaagaggaaaatcttataaaaaaaaaaaaaaaaaaaa

SEQ ID NO: 5341 - DNA, 3520 bp, Homo Sapiens
  NM_024910
aactgcgggcggcgcagggcaggggcagtcagggagcagcggcggcagagacagggccgggcgggcgccgcctgcggagagcaccgggaggcgggccctgcgtggggccgcgcgcagcagcggcgacgactttatctgggccgcgggggacagcgcagggccatggaggaggcggccgcagctccgatttctccgtggacgatggcagccacgattcaggccatggagaggaagattgaatcgcaggctgctcacctgctttccctagaaggtcaaaccgggatggccgagaagaagctggctgattgcgagaagacagccgtggagttcgggaaccagctggagggcaagtgggccgtgctggggaccctgctgcaggagtacgggctgctgcagaggcggctggagaacgtggagaacctgctgcacaacaggaacctctggatcctgcggctgcccccgggcagcaagggggagtcccctaagactacgccatctccaagtccgaggtcctctcccagattgaacaagggaaggagccctgcaactggcgccgccctgaccccaagattccagatgttcctgtggaccccagtccagatgcagaaactgaggcccagcagagattgagtaacttatgcgagttgtcactcacctcacacgccccagcaagcatccaggagagcctgcctcttggaatagaaatcagacatcccacaggaactctgaggttttcccactgctgccagatgtatgcaaggaacacgtgatcttcgtaattccagagcggggcaaactgcttggcacctcttcaataggtgacattcaatgatagatctctggcttcctgctctgtttgttctggttgccctggaaagcctgctgctcagcccatgccccgggacttcctccaccctcaccaggacattctttccatctcttgtctcctgtgtgcaagtccctttctcctggattccatgtcttgaatgtttcttaatttacttcctcattttggcagaggatgtcctccagttgttttctgggaatgctaatatgcaagtgaaccagtgacctgcagttctgcccacacagggttaataaccaatcagattctctcttttcaagatggttaacataacagacaccaagaaagggaagaggagccgacagcagagggggaagctgaaaagacgcacaaagaatggccataaaagatatgagcaaccccagctttccagacagtcacttttcccagtggtcatacctggtctggaagattccccatcatctcgaataaagctgttgttgcttttaactccatggagagaccgaatggagtgagcccagcagggcatgctgggcaagagaggtcccccgagtcccaaataagaatttcaactagtataaaacgaggcagcgaacccacacgtggaagtctgataccgcttgcagaagggaattgaatagatgtctccctattggtaaggatgtggttttattgacttgaaataacaaagcccgcaagcaacaactgatcatccgcgggatgctgccacaaggaataattgagcactcattcagacacaggggaaaccactgcctctttcagtctttctcccagattccaacagtcagtgttacagcatttcaccttgttcacctccctgagaagacgttgcagctcactcaccccagtgggcactgggagcctctgctcaggtgggagacagatgccccccacacgcacatctggtgtttatgaagcagatactggggcttcataaacacagaaggggcagggaagtagccccagggcatagtgtggggcctcctgactaaaagtagcttgcaaacccctgcctataacagccacttcctggcggtcattgtgccacttaggagccctcctcaccgctcttcctttagttccttcactctgtatagaccctgccagagcagctcagggtggagcagctgcagccatgggacctgctccaggcaaggccctatgctacacagtccctgggggtgaggattccagaggagtcaattccctacccgcccttccaggggatggccgagatgagcgttcccacagggaaagtgaaagttgcaaggctgttgcggaaacaccaggggttccatctaggtcttgctgctcatctcacagaaagccagtcactgagacaagtattgtcagggaagaaggctttatccaggtgctacagacagggtgaacaagagatcagtctcaaatccatcatcatcaactgactaaaattaggggtttatatagcagggaagaaatgtaactacatgtgggaaaacagggattaacgaggggcaaggaagaggagttggccaacaggcagcaggtggtcacctggagaatcatgatgggtgaggggtctggcttctcactttccagatgtggggatctggtaaatttcagtttcttgataccgtctgggaggattgctggctggtttcctgagaaaggaattcagatgacataaatgtaaatttctccttgggtttcaagactgagagggtcaatttctaggtttattcaagaaaaaccataaacatcagttctatgggacaattgggcccatttcaaggctctgaggataagggttaatgaggggacagagtcgcctggagaagttcactggggcctacaagaaactagagaggcttcctggcaaagctctatgctgtctatcctctcttctctccttgcaggaagattccagtataatagacccgaggtgaaaaggcttttgttcaataagtagaaaactgaaggggggtgggaggcacatggatttgaaccagagaccgcttggcctgcaggcaaatgctgtaccttcagttgcacccctcacttgttacagctgtttctgataagcacttgtgcagccccatcagcacctcgatttcttcttggtgagtccatgggaacagccccactgcaaacaacccattcctgctctcctctttcctctaaacctcaacctcctcctacctggcagtccacaggcctacagcttctcctcagtgggaaagacatcagcttggaaaaccacttggaaagccaacgttatcctagaaaagctttttaaatgacccagcaggacaagtctccggatggccttggccaacccggtgcttccctcttttcttggttgtagttctcagaataactagagaatgtactgggagtgttgtcctgagataaggaggaactgtcctaaacctggactctgttcccatcacacctagaacaggatgtcctgcaacgctttagcccaatgatccaagttgcccttggggtataaaacttgacagcagagggcgttcagggtccctcagctgcagtgtgaagtgggacacacaggtgagactccatctgccctgggcaggttcctgagccttgggggaccagttcaccctacatcccaggcttctgttgtcccttgcctgcctgtaaggaataaagttgctttgcttaacttgc

SEQ ID NO: 5342 - DNA, 5339 bp, Homo Sapiens
  NM_024913
gcgatgccgaggtcctctgctcccgccgggcgtgcagcgggcgcgcgcgcgtgtgtttatgtgtctgtgtgcgtgtgtgtgtgtgtctctctctgtgtgtgtgtgagatgaattggagtcatacgactgggtgtttccttccgagtggttttcatcagcaatccattaggaaatcatggaaactttttttttcctggctaaaaggatgaaaactgagtcatccacttttgactgtcatccatggaagagctcttattaaaagcctcagactttcgggacctatgattctttggcacaaccttttggaaaattcttaagcagggatgaagcaaacttgattggagttggggaaaaagaagacagattagtatttttcatgctgacaaaaaatagctgctatgacttttcccgcaacgtggacaggggccaagtgaagctgaactggtcatggtctgtcgcccagtgttcccttgtcgtcggcgattttgcccccgacccttcttggtgggcttagtggtggcaatctgtctcttctaccagactctgaccctccgagggtcgaggaagctcacagccgctgcccctggggctgtcccacacacatccactgaaacccaggcaagcagatgcaagaaaggattctctcaggacaaacagtgcttccttctctctggtaatgcccaggaaaccagaaaggtcaaagaatcaatggagacacactttggcagccatggccgaagggccatactctacaggcctcctttctacagcaaaacagagcttcagctacaccagcacattctgactcaacatggctatacggttgtcatcgctgaagaaaggctcaatgctggcctagggccggggctactagaacaaggtgatctgggctcttgggatctgctcatttgcctgtcttctaagaaagcagaaggaacaccctgtatatccaaggaagtcatgtgccagttaggtttacatcaaaaggcaaacagattaccagaaatacagcagccactttgcagaaaggaaggattatgtcaaatagttagaagattcccagaactgcaacttccagtgagtccctctgtgtgtctggatcagggaatgcaattaaagccgagtacttcgagtcaccttttaaaaacagtgaagccacgtgtgtggaaaccaggggactggagtcgtgaacagctgaatgaaacgacagtccttgctccacatgaaacaatctttcgagccgaagatctatctgtgattcttaaagcgtatgtgttggtgacgtccttaacccctttgcgtgcattcattcattcgacgggcacagtttggaatccaccaaagaaaaaacgcttcactgtcaagctgcaaacattttttgagacattcctgagagccagttcacctcaacaggcttttgacattatgaaggaagcaattggcaaactactgctagcggctgaagtattcagtgaaacatctactctgggaccaaagaccttccatagatgcagattctgctttcaacttctaacttttgatattggttatggcagtttcatgtaccctgtagtgctccaggtacacgagcatttaaattttcaagattatgataatatggattttgaggaccaaaatacagaagaattccttttaaatgacactttcaattttctcttccctaatgaatcatcactttccatattttctgagatatttcagagactttatagatcagatgttttcaagggtgaaaactatcaaaaggaactaaatcagtgtctgtccttagaagaaattaactcaattatgactttcataaaggaacttggaagtctgggacaattccaactgctcttcccatctactactcctgggattcagtcactgatgcatgaattttatgatgtggcaaatcctgtgggaaatcctggctcagtcctgacccaatactggtctcttttaaatgtatttgaacaatttcagttcatgaataaaaagacacagccacatccactggaatggaattctttcacagaagataagaacattgaaaaaccacaagtgccatttgatgcaatagaaaataaaaaagctgcagttccacaaattaaaaatgaaaataaagaaatacattgcagtgatgatgaaaacacaccatgtcatatcaagcagatcttcacacatccacatttggaactaaatcctgactttcatccaaagatcaaagattattactgtgaagtcccatttgatgtggtaacagtgacaattggagtggaaactcctaagtgtctgtgcaaggtgcacctgtacgagcaggcagggccaagctttgccagctaccctctgggcttaggaatgaacaaaatctcaatatttgttgtggatgaatctccagcacacggtgagactctgatcacgtacaaactcaccatctatagagaagaccgcccaagtctgcccttgtttgaggccttcacagcatgtggttttgtgcaggattgtggtttgctgattcatccagaggaaacctgtgggttacagcctatttcttctgactacattgaagccattttacagtctgaactaaaaagatgtccatctggggacatgaaaggccagtggattgtgccttgccttagttgttcggacaacaggacgtgtgactggagagaaataacctggcagccccacaactgccaatatggtgtcctaactaagcctcaactccagcagtgcctgggaggaaggaagattctgttcattggagattcaaccaacagagggatcatgtactatcttattgaaaggctgaatgaaacgttgcaggaatggcagaaagtacatggcactaaattctatcacaacgtcaatggtgggaagactttgatcagttattcctactatccccagttctggataagcccttcattgagaccaacatttgaaaatgcacttgaacacctcttgcaaagatcacgtcccctagagaatactggccagactgtattggttgttggtggtgttcagtggcttaattccaatcacctgcaaattattcacaaagttttgaagagggaaaatttactcaatatcctagtgatcatcaaaactttgggaattggatttcatctgccagtggatggagtacatttcttaacacagagtgaagtacagaacttatggaaagaaaatttgattattctggatactgcaaaaaaacatggctatgaagtagttgacacattcactataacaatggggcgttacaaagagtttctacaggggaagtgtggatgtcatttccatgaggtagtgaaatcaaagttatccaaagaatataactttattaaaatgaaaagatcaagaaatcatatcatgggaagatatttcagcaatcaaagcaaactacaacaaggcactgtaacaaattttcgatcgccatatcatgtcagaggtccaataaatcaggtttgttctgaaatccttctcagcaggatgtgtgcaaataaaaggactatgtaggctccctgcaggagagctgaatctggagctggagacgagctagtcacccggacaatggtctaggagccaagcgctgcacatcgcacacatttgggatcgaccacacacacttgtgcacaccagcacatgcatgcacaccagtacacacacagttaaataatgataacacttcttacagctttatgaattcaagatgtgaccttgaacaccagtccatttcacagtgaaagatatacctagagaaacgttacttgaagcataattattaaccagaaccactgtgggccaggtatggcattgtgataataaagagaaatatagacacttaaaattatgtgaaaaaaaggataatgctctttcatgttgtcttaccatatctataggtacatcaatattgaaaaggagaaaaaccaatgacattccactggcaagtagaagttgtcctttcattctttaccaggagaaaatgtgatgtttatgatggcttaggctttgtgaatctaatgcttatgaaaaacatttcttcctatactttttaaattttattactgaaaggaaaagaacaggaatgttccacaagggaatttgaagagattctgtgagagagatatgaaatattttatagttaaaacaccaatatattcaactttacacttcttgtgtttttcataaacattccctcttgtcttatctgtgtacttcgatgggtaactgcagtctgaattaatgaaatatgtaattttaaagtaagtaacaaaatgtagttcctcatgtattactgtactatgtttcattgatgatattacttaaatcttgtgtttgccattacagccctatgtaacttaaaattacaattatattttatgtaaatattttgcaaaggactatgcattctgaaatgcataggtgctttttcccaccaagcatttgcatatgtccacaaatagtattatgttactagtatctatattttgattttcctgagcaactgtatcaaatccaaatttagattagacaaaaaattattattttaattaaactgtggcatacatataatacatacctaattatagtagtgagaactatttcttttatctctttaggttcaaaatggtgaatttctttattatatgaatgctttgttgtgagataacatcacactgttacaatggattttagaggtttgtcttttttgggtggggtgggaagctgagagggttaattcaatacatggctgaaattaccaaatgtataaatacctcattttcactaccatacaagaaaaaaacacctattttgattgatcagttcttttgtatgaatatccacctcctttaaatactctatttttatatatatttttatatgaagataaacatgaatttatatttaactgtcttaaattatatttacataaatgcaaatatcacttgatataaacaatacaaatctgcatcttacagatgataatttttttagaagaatgatacagaattaactttaaaaataaaacttttctaatatacacttaaatgcaaacatcatttttaaattttcagtgatttttttaatgacataaaacgttaccaatgtgtgcagcctctccatcatgttttaacatactgtatactctatagcagtattacagtcagtatttcatataattttctttagacctaactgttaccatctgactgaggttactctggtatttatctcttcgctgctgaaataataatggattttagaaacaattgtaataatatcattaataaatgtcttactagtaataaaaaaaaaaaaaaaaaaaa

SEQ ID NO: 5343 - DNA, 3574 bp, Homo Sapiens
  NM_024917
aggggaggagaggagaacttagagaaggaaggcggcgggtgtcagggctatgagtgcttttaaggaaggtctccatagaaggttcccccagcaaagtagggaggggtactccccgagaggagtcgaggtgccggagcctgctgcctcgccgacgctgggaggagccccgtgtcccgccgcgcttgccaagggttggctgcgcgtgcggcgggagtagaggcgccttgcgcaccaggaagtgactgtttccccgccgcagcaaaccaggccatccgctggccttttagtttgccgcctcagaaaactccctactatgccaaactgtccgcggggcggggaatggaggaggcaggcggggctggagacgggacccgacggtgactgcgcaaggtcgtgtacggcccagcgtgggcctgtgccctaactcctcccactcccttactttctgtccttcccgggccctgcagaccggccaagtttagtggtagcctttcctagtgtctcctctttgttaacccttcctacagacacagtgggcagaacttgcctaaagaagaagggaatggaagggctagtggagtcttgttggggagacaaggacctgactgcctgtgggctgcattcgggacacgacacagcagtcaacccatttgcttgtttggtttagcaaggaatagtgtctggagccggtccagctgaaggaagggtgagcagagagtgcaagcaggacccttgtcggtgggtgaacattttgctccaaaagggatccttggccctgcgcaggtggatttcagtgtgttctttggatggcaggccttaagagaagagtcccactgcacagcctcagatacttcatctccatggtgggtctcttctccaaaccaggactgcttccctggtatgccagaaatccaccaggatggtcacagctctttctgggcacagtatgtaagggagatttcacccgtgtgatagccacgaaatgtcagaaaggacaaaaaagtcagaagaaaccaagccatcttggaccactagatggttcctggcaggaaaggctggctgatgttgtgacaccactctggaggttgagctatgaagaacagctcaaggtgaaatttgcagctcagaagaaaattttacaaagactagagtcttacatccaaatgctcaatggagtcagtgtgacaacggctgtacccaaatctgagaggctctcttgtcttctccatcctattataccctctcctgtcatcaatggttaccgaaataagtccaccttctctgtgaaccgaggtccagatggcaatccaaagactgtggggttctacctgggaacttggagagatgggaacgttgtctgtgtgcagtctaatcatctgaaaaacatccctgagaaacacagtcaagtggcgcagtactatgaagtattccttcgacagtctccattggagccctgccttgtatttcatgaaggtggatactggcgtgagctcacagtccgcaccaatagccaagggcacacaatggctatcatcactttccatccccagaaattaagtcaggaggagctccatgttcagaaggagattgtaaaggaatttttcatcagaggtcctggagcagcctgtggcttgacctcactttacttccaggaaagtaccatgacccgttgcagccatcagcagtctccctatcagcttctgtttggggaaccctacatctttgaagaacttctgagcttgaagatccgcatctctccagatgcctttttccagattaacacagctggtgcagagatgctgtatcggactgtgggggagctgactggagtgaactctgacaccatccttcttgacatctgctgtggaactggtgtgattggcctctctctggctcagcatacatctcgggtccttgggattgaattgttggagcaggcagtggaggatgcaagatggactgcagccttcaatggcatcaccaactctgaatttcatactggtcaagcagagaagattttgccagggctgctaaagtcaaaggaagatggacagtcaattgttgctgtggtgaacccagcccgtgccggactgcattacaaggtgattcaagccattcgaaacttcagggccatccacacgctagtttttgtttcctgcaagctccatggtgaatccactaggaatgtcattgagctgtgctgtcctccagaccctgctaagaagctcttaggcgagccctttgtcctgcagcaagctgtacctgtggatttgttccctcacaccccacattgtgagctggtgctcctctttactcgataagcagcctcctagaagacagcaggctatttgttaaggctgaagtttcagaaactttcaggtttggcatattgctacattgcagaccctgggagcattacagtggaaaccaatctttggtttgtgaataggaagaatctattaggcctctggtctgaggcagattttttttttgagatagagtctcactcttgcccaggctggagtgtcgtggcgtgatctcagctcactgcaacctccgcctcccgggttcaagtgattctcgtgcctcagcttccccagtagctaggattaaaggtgcgtgccaccatgcccggctaatttttgtatttttggtagagacagggtttcaccatgttggccaggctggtctcaaactcctgacctcaagtgatccacccgcctcggcctctcaaagtgctgggattataggcgtgagccaccacaccccgccgcggctgacttaaccttagatttcagattccctttcaatcatgcccgtttgcttgggtttgaccactccccactcctggatctggactgtttcttcctgttgctgtcagccttggttctagtttatagtcttgtctcctccgtttctgcttatggtgtggacaaatgaccttttttaagcagctggtaataattttacattgactggagcctgtgcatttgctcagagatgctacaatttttagatatttctaagacttctggattcttgaggtagttaaggattaaaaccagaaacagtcgaggttttttaaaagcagggtaagccatgaagtgaatacagggtgactgagtgatcatcagatgagattaattcttttgggttttcttggttttaaggcatctcgaatgccccttgaaaatgtagttttccctggtggtgggcacctgtaatcccagctactcgggaggctgaggcaggataattgcttgaacctgggaggtggaggttgcagtgagctgaaattgtgccactgcactccagcctgggtgacagagtgagacaccatctcaaaaaaaaaaaaaaaaagaaaatgtagttatccctaggagcaatagcaccaattaactctcacccgtggaggaagaattggttattggagagaccctaagggaaaggagattttcagagagactgaatacctataattgtgctgtgtagtgtggaggcaaaaagctccaaaatctagtataacataataaactggatattgaaaactgactgtaaaaaaaaaaaaaaaaaa

SEQ ID NO: 5344 - DNA, 4802 bp, Homo Sapiens
  NM_024920
gagaaggttttactcttttagaaagcagcagattgtaaaaagtgtgacaaacacatgtagctgatgaaaaggagcatgatgaacaacagtatgaatgaaaataattatatgaatgataatttctcattcaggtgtgaaaacttaggtgaatgggtatatttggagcattacttcaaatacatagtcttcaggctgtccattggtgatgatgactgtaacttctggcttctcaagaatttcttctctaatatatgatgaaaaatttagtgcagaggagatatggtggagctggatacagctaagagttagtgaaataactgtttttcatgtctggcccccccttttttttttgtttgtctgtggcaattcttagctttatgaccctatctagagcactgcaaattttcacctactttgtctacagtatccagctgtctttttaagttgaccaggcttttgtgctcagtaattataaacaagacaatttagaggcttaatctggaacataattaaacatcctacacactcaaaccaagtagtaatggctttaggattgttcagtgtttaatttaccttttattttttgcattcaggtagtgtctgccatattcgtacctctccaccttgtctcacagtctgtttcacttctattaactgcttctcttctattccaaatgatttttagtactaactacattttcatgacagcattcatcacatttgatctgaacgtgactttttagatcctcaccatttctgctctcaaattgaaagtcatttgtccatccatccaacatatatggtgaacaaaacataatccctgccttcaaagaatctgtgatctagaagtgttatcagacaagtaaagaggcaactgtagtacacttcggtaattgttgggataaggctaagttcagaggatgtggggaggatataagaggggcagcaaacctagtcctgaggaatttggattcttaggaaaaggaagagctaagtcagggtccggagaagttgtagaaactagctaaccaagaagagaggcagagaaggtgtgctcagcaccaaaagcaattgcaaagatctaggaggtaagagagtcagcttcaatactgatggtaagaaagaaataggaagatgataggtcactttgaagtctgaagggtatccttttttctgtattccagttctgagacagcaagattttcaagtcagataaacagatttgaattcttaactgtgaggccttcctttattacttatttgaaatagaaggcctgcccttcctttctctgtttctattagcttctttatttttctccagatatttatcaccatatgatgtacattatattttacttatatatttgtttattgcttgtttttctcccaattgtaaatttaatgtgattttgactgttttattcaccactgtagcatctgaaattgtgcctaacagaaagtaaatggttagtaaatttttgttgaagaaataagtccttattctcatctgttacttggttatgtgaatttaggcaatttacttaaccattcaaagattggtttccttattggttaaataggaataatatctaccaaatgaggagtaaatgagataatttgtgtaaaataatcagtataataaaattctacaattctttatgtgaaatctttgtgaccaaatgcaatttggaattcagaattcttcatattttagaaaggtactaatatagtcggctctccacatctatgggttctgcatctgtggatttaaccaactttgaattgaaagtatttggtgaaaaataacaatacaacaataaaaaataatacaaattaaacaaccaatatagtgtaacaaccatttacgtagcatttacattgtcttaggtactatttataacctagagattatttaaagtacatgggaagatgtgtaaaggttgtatgtaaatactgtaccattttatatcagggatttgagcatctgtagattttggtattcaaggagggaggatcctggaactaatcccctgtggataccaagggatgacagtgtattttatattatacatcttagagtctagggcagcagtccataacaaatagtaacatttctacagcaaaacatacaggtattcacaattaaatgggataaatgaagattctgtagtagcttcacatcttttcggtcagatttttgcctagaggcaaaatctacagttgaattcagttttttatgcagtcaaattagttatagaataactttgatttttcagagctttatggatattggaacattgatatgggatggtggacctgtacctaacacacacataaacaaatgtaaaaattactatgaagtacttggagttacgaaagatgctggtgatgaagatttgaaaaaagcttatagaaagcttgctttgaagtttcatccagacaaaaaccatgcacctggagcaacagatgcttttaaaaagattggaaatgcttatgctgttttaagtaatccagaaaagcgaaaacagtatgacctcacgggcaatgaagaacaagcatgtaaccaccaaaacaatggcagatttaatttccatagaggttgtgaagctgatataactccagaagacttgtttaatatattttttgggggtggatttccttcaggtagtgtacattctttttcaaatggaagagctggttatagccaacaacatcagcatcgacatagtggacatgaaagagaagaggaaagaggagatggaggtttttctgtgtttatccagctgatgcccataattgtattgatcctcgtgtcattattaagccagttgatggtctctaatcctccttattccttatatcccagatctggaactgggcaaactattaaaatgcaaacagaaaacttgggtgttgtttattatgtcaacaaggacttcaaaaatgaatataaaggaatgttattacaaaaggtagaaaagagtgtggaggaagattatgtgactaatattcgaaataactgctggaaagaaagacaacaaaaaacagatatgcagtatgcagcaaaagtataccgtgatgatcgactccgaaggaaggcagatgccttgagcatggacaactgtaaagaattagagcggcttaccagtctttataaaggaggatgaactggaatttttatttataccttttagcgtactctttattttttctgtaagtaagtttggtttcatcatgagggatgaaggaaaagatttgatactgaaaactaaactgaatagttggttcctgaaatcttggactgtttatgacctactggctcctttaaatagtaactgaaaactaaaatggaatattttagttaacgcttctacaagtattttcattttaaaagcttacatgattcctaactaaagtgtcatgagaaaggattatcacacctgtagcaatttccagttttagtgattctccattttttcccttgtcatgtaaatatttatggaatgatcattttgtgtacatacaggttactgcttttttatttaaattcttttagtgtttagctccatgagacacttcagtttaaattgatggaataaatgttatatgacacatttacattttccttatcaaggtgtcaaatatgtggactttaaacaatgaaactttttcaaaaagaaaaaacaaaaactttaactttgtgtaaaatcttatagtattatcagcttagagggaattgatatttttaatattgccgttatattccaaaatatatattgagataaatgaactggtgtagaatatcagtttgctatttagttttatgaattactatacatatacatgcatagaaatgaaatgctatactgataaattttaaagaaaatatgaggaagtggctataaatattaaactaaaagggtcttcaacagtaaagtgcagttatgtcatttaaaattccaatactttaaaggccaccaaattttgatgtatatgtccttgaagggctgctaaaatttatgaagaggactcacattttcccccatagaaatttgcagtttcttggtgatcatttaagcaggatccaaagaagttcctttacaaataagtaataagaaaaatgagtactaaaatacagctttgtgccttttaaccctatgccaactcctaaacatataagtagattacagtatacttatctgatcagagcatgatctgtttggccacatgcaagtgtgagcagaaatagagcagcacgtagaatagtaacttaaagcaagtcatcctttaaaaattctgagctaaaatctatttaccattgagtaattgaattaatcccataggaataagctccttgtaagtaaatccatgatatgaattagaaaaaaaaacagctggaaattgaagtttttgatgcctgtatactgggtatgaaactatttgatttctagtcttctgtgtttagcagttgtaatattttaatgattttgcttcatactcggttaatggaacataaacatatctttgatacttctttgtgagtgagagaatgctagatagggtggctttgttctttgtttaagttttttttcctgaatgtagttaatttatggcatctgttgaataaaactgctaaaatgacctcttaaaaatgttctgttgtatccccttttccaggtgaatcaatagaaatgcctgattgaattagtaggttaaactaaacaacatactgtcataggaaaactggagagcttaaccaacttgctcttagaaatgttaccttaaaaaaaaaaaaaaaaaaa

SEQ ID NO: 5345 - DNA, 7191 bp, Homo Sapiens
  NM_024923
gcgcgcgcgcgggcgggagcggagggcaacggggcggcgcgggcggccgggcgcagggtcgcgggaggtgacgcgcggcgaggatggcggcgcggggccgggggctgctgctgctgacgctgtcggtgctgttggcggcgggcccctccgccgctgcggccaagctcaacatccccaaagtgctgctgcccttcacgcgggccacgcgcgttaacttcacgctggaggcctcggagggctgctaccgctggttgtccacccggccggaggtggccagcatcgagccgctgggcctggacgagcagcagtgctcccagaaggcagtggtgcaggcccgcctgacccagcctgcccgcctcaccagcatcatcttcgcagaggacatcaccacaggccaggtcctgcgctgtgatgccattgtggacctcatccatgacatccagatcgtctccaccacccgcgagctctacctggaggactcccccctggagctgaagatccaggccctggactccgaagggaacaccttcagcactctggctggactggtcttcgagtggacgattgtgaaggactccgaggcggacaggttctcagactcccacaatgcgctgcgaatcctcactttcttggagtctacgtacatccctccttcttacatctcagagatggagaaggctgccaagcaaggggacaccatcctggtgtctgggatgaagaccgggagctccaagctcaaggctcgcatccaggaggctgtctacaagaatgtacgccctgcagaagtcaggctgctgattttggaaaacatccttctgaacccggcctatgacgtctacctgatggtgggaacctccattcactacaaggtgcagaagatcaggcaagggaaaattacagaactctccatgccttccgatcagtacgagttgcagcttcagaacagcatcccgggccccgaaggagacccagcccggccggtggctgtcttggcccaggacacgtcgatggtcactgcactgcagctgggacagagcagcctcgtccttggccacaggagtattcgcatgcaaggtgcttctaggttacccaacagcactatctacgtggtcgaacctggatacctagggttcactgttcaccctggtgacaggtgggtgctggagaccggccgcctgtatgaaatcaccatcgaagtttttgacaagttcagcaacaaggtctatgtatctgacaacatccgaattgaaactgtgcttcctgctgagttcttcgaggtgctctcgtcctcccagaatgggtcataccatcgcatcagggcactaaagaggggacagacggccattgacgcggccctcacctctgtggtggaccaggatggaggggtccacatactacaggtgcctgtgtggaaccagcaggaggtggaaattcacatcccgatcaccctgtatcccagcatcttgacatttccgtggcaaccaaagacgggcgcctatcagtacacaataagggcccacggtggcagtgggaacttcagctggtcttcgtcaagccacctggttgccacagttactgtcaagggcgtgatgaccacaggcagtgacatcgggttcagtgtgatccaggcacatgatgtgcagaacccactccatttcggtgagatgaaggtgtatgtgatcgagccccacagcatggagtttgccccgtgccaggtggaggcacgtgtgggccaggccctggagctgcccctgaggatcagtggcctcatgcccggcggggccagtgaggtggtcaccttgagcgactgctcccactttgacttggctgtcgaggtggagaaccagggtgtgttccagccactcccagggaggctgccgccaggctctgagcactgcagcggcatccgggtaaaggccgaggcccagggctctaccacgcttcttgtgagctacagacacggccacgtccacctgagtgccaagatcaccattgctgcctacctgcccctcaaggctgtggatccctcctctgttgccttggtaaccctgggctcctcaaaggagatgctgtttgaaggaggtcccagaccttggatcctcgagccgtccaaattcttccagaacgtcaccgctgaggacactgacagcatcggcctggctctctttgccccccattcctcccggaattatcagcaacactggatccttgtgacctgtcaggccttgggtgagcaggtcatcgccctgtcggtggggaacaagcccagcctcaccaacccctttcctgcggtggagcctgccgtggtgaagttcgtctgcgccccaccgtccaggctcaccctcgcgcctgtctacaccagcccccagctggacatgtcctgtccgctgctgcagcagaacaagcaggtggtcccagtgtccagccaccgcaacccccggctggacctggctgcttacgaccaggagggccgccggttcgacaacttcagctctctgagcatccagtgggagtccaccaggccagtgttggccagcatcgagcctgagctgcccatgcagctggtgtcccaggacgatgagagtggccaaaagaagctgcacggtttgcaggccattttggttcacgaggcatcaggaaccacagccatcactgccactgccactggctaccaggagtcccacctcagctctgccagaacaaagcagccgcatgaccctctggtgcctctgtcggcctccatagagctcatcctggtggaggacgtgagggtgagcccagaagaggtgaccatctacaaccaccctggcatccaggcagagctccgcatcagggaaggctcaggttacttcttcctcaacaccagcaccgcagatgttgtcaaggtggcctaccaggaggccaggggtgtcgccatggtgcaccctttgctcccgggctcatccaccatcatgatccatgacttgtgcctcgtcttcccggccccagccaaggctgtcgtttacgtgtcggacattcaggagctgtacatccgtgtggttgacaaggtggagattgggaagacagtgaaggcatacgtccgcgtgctggacttgcacaagaagcccttccttgccaaatacttcccctttatggacctgaagctccgagcagcctccccgatcattacattggtggcccttgatgaagcccttgacaactacaccatcacattcctcatccgcggtgtggccatcggccagaccagtctaactgcaagtgtgaccaataaagctggacagagaatcaactcagccccacaacagattgaagtctttcccccgttcaggctgatgcccaggaaggtgacactgcttatcggggccacgatgcaggtcacctccgagggcggcccccagcctcagtccaacatccttttctccatcagcaatgagagcgttgcgctggtgagcgctgctgggctggtacagggcctcgccatcgggaacggcactgtgtctgggctcgtgcaggcagtggatgcagagaccggcaaggtggtcatcatctctcaggacctcgtgcaggtggaggtgctgctgctaagggccgtgaggatccgcgcccccatcatgcggatgaggacgggcacccagatgcccatctatgtcaccggcatcaccaaccaccagaaccctttctcctttggcaatgccgtgccaggcctgaccttccactggtctgtcaccaagcgggacgtcctggacctccgagggcggcaccacgaggcgtcgatccgactcccgtcacagtacaactttgccatgaacgtgctcggccgggtaaaaggccggaccgggctgagggtggtggtcaaggctgtggaccccacatcggggcagctgtatggcctggccagagaactctcggatgagatccaagtccaggtgtttgagaagctgcagctgctcaaccctgaaatagaagcagaacaaatattaatgtcgcccaactcatatataaagctgcagacaaacagggatggtgcagcctctctgagctaccgcgtcctggatggacccgaaaaggttccagttgtgcatgttgatgagaaaggctttctagcatcagggtctatgatcgggacatccaccatcgaagtgattgcacaagagccctttggggccaaccaaaccatcattgttgctgtaaaggtatcccctgtttcctacctgagggtttccatgagccctgtcctgcacacccagaacaaggaggccctggtggccgtgcctttgggaatgaccgtgaccttcactgtccacttccacgacaactctggagatgtcttccatgctcacagttcggtcctcaactttgccactaacagagacgactttgtgcagatcgggaagggccccaccaacaacacctgcgttgtccgcacagtcagcgtgggcctgacactgctccgtgtgtgggacgcagagcacccgggcctctcggacttcatgcccctgcctgtcctacaggccatctccccagagctgtctggggccatggtggtgggggacgtgctctgtctggccactgttctgaccagcctggaaggcctctcaggaacctggagctcctcagccaacagcatcctccacatcgaccccaagacgggtgtggctgtggcccgggccgtgggatccgtgacggtttactatgaggtcgctgggcacctgaggacctacaaggaggtggtggtcagcgtccctcagaggatcatggcccgtcacctccaccccatccagaccagcttccaggaggctacagcctccaaagtgattgttgccgtgggagacagaagctctaacctgagaggcgagtgcacccccacccagagggaagtcatccaggccttgcacccagagaccctcatcagctgccagtcccagttcaagccggccgtctttgatttcccatctcaagatgtgttcaccgtggagccacagtttgacactgctctcggccagtacttctgctcaatcacaatgcacaggctgacggacaagcagcggaagcacctgagcatgaagaagacagctctggtggtcagtgcctccctctccagcagccacttctccacagagcaggtgggggccgaggtgcccttcagcccaggtctcttcgccgaccaggctgaaatccttttgagcaaccactacaccagttccgagatcagggtctttggtgccccggaggttctggagaacttggaggtgaaatccgggtccccggccgtgctggcattcgcaaaggagaagtcttttgggtggcccagcttcatcacatacacggtcggcgtcttggaccccgcggctggcagccaagggcctctgtccactaccctgaccttctccagccccgtgaccaaccaagccattgccatcccagtgacagtggcttttgtggtggatcgccgtgggcccggtccttatggagccagcctcttccagcacttcctggattcctaccaggtcatgttcttcacgctcttcgccctgttggctgggacagcggtcatgatcatagcctaccacactgtctgcacgccccgggatcttgctgtgcctgcagccctcacgcctcgagccagccctggacacagcccccactatttcgctgcctcatcacccacatctcccaatgcattgcctcctgctcgcaaagccagccctccctcagggctgtggagcccagcctatgcctcccactaggccgcgtgaaggttcccggaggatgggtctcagccgagcctcgtgcacccccaagatggaacatccctgctgcattcacactggaacaagcccctccagatgagtgccccggccccaggccagcttcactgccgtctcttcacacagagctgtagtttcggctctgcccattagctcattttatgtaggagttttaaatgtgtgtttttttcctttcaagtcttacaaagctaagactttttggctcattcctttttgcatggttgtctagggtttctggacaatgtgctgttgcatttttattttcctagccttgctaaaatctttcccttctcaagactttgagcagttagaagtgctctttagaagttgtctgtgggtgatgttactgtagtggtctcagggaaaggattgtccagttactttagggggtttttggtggggtttttccccctgtgaaaacttactttgcccctagtctggctgctgctaggacttctgaggagcaatgggacatgagtgtccctgtatctgcgccactgccgcaagggaagcctcaggaaccagcacctggaggccaggatagccaagccctgggtgagcgagaggctggagaacacaggagctcacccagggctgctgcccaaccatgggccactgtgaacagacttcagtcctctgtttttgtttcataagccgttgagacatctgatggacttggcttaggccctgctgggacatcccacgtgtgatccctttcactccatcaggacaccaggactgtccttaggaaaatgtccttgagatggcagcaggagtcatattttctgtgtgtgtgtttcggaaagccgctgtgtcctgcctcagcacaaagacccagtgtcatttgctcctcctgttcctgtgccactccagaacctcagcagatctgagccaccgcctgccagtgtgagaggcggccactttcatggcagctcatcaggcgcagggccccagacagcttcccagcaggccctagagcccggcctgggccaatgatggagggcggccgccagcccagggcctgcccatccagaagggactccccagggcctgggggaggagacccttggaaaagtcctctcttcccagctcctgattctggatctgagattctcagatcacaggcccctgtgctccaggccgaggctgggctaccctcagggagatccagagactcatgcccatggccatccatgcgtggacgctgtgtggagagtccaggatgacgggatcccgcacaagctcccttcagtccttcagggctgggccatgtggttgatttttctaaagctggagaaaggaagaattgtgccttgcatattacttgagcttaaactgacaacctggatgtaaataggagcctttctactggtttatttaataaagttctatgtgatttttt

SEQ ID NO: 5346 - DNA, 6483 bp, Homo Sapiens
  NM_024928
aaatgcgctggcggggagaccggggttggtccctggcggggcagggggcgggctcaggccggaactccagagacgacctcagccaactgctcctgcgccgggcggggtcgtcgccgccagcggctccgagcgccggaagggccaggtctcagggctcctggagctgcaggcggcgggaggggctacaaatgcttgactcagtgatgcagaacctttcagagttagctggaagccacagccctgcctcttgatgcagcctggatccagccggtgtgaagaggagaccccttccctcttgtggggtttggatcctgtgtttctagcctttgcaaaactctacatcagggatatcctggacatgaaggagtcccgccaggtgccaggtgtatttttgtacaatggacatccaataaaacaggtagatgtcttgggaactgtcattggagtgagagaaagagatgctttctacagttatggagtggatgacagcactggagttataaactgcatctgctggaaaaagttgaatactgagtctgtatcagctgctccaagtgcagcaagagagctcagcttaacctcacaacttaagaagctacaagagaccattgagcagaaaacaaagatagagatcggggacacgatccgagtcagaggcagtatccgcacatacagagaagagcgagagattcatgccaccacttactataaagtggacgacccagtgtggaacattcaaattgcaaggatgcttgagctgcccactatctacaggaaagtttatgaccagccttttcacagctcagccctagagaaagaagaggcactaagcaatccaggcgccctggacctccccagtctcacgagtttgctgagtgaaaaagccaaagaattcctcatggagaacagagtgcagagcttttaccagcaggagctggaaatggtggagtctttgctgtcccttgccaatcagcctgtgattcacagtgcctcctccgaccaagtgaattttaagaaggacaccacttccaaggcaattcatagtatatttaagaatgctatacaactgctgcaggaaaaaggacttgttttccagaaagatgatggttttgataacctatactatgtaaccagagaagacaaagacctgcacagaaagatccaccggatcattcagcaggactgccagaaaccaaatcacatggagaagggctgtcacttcctgcacatcttggcctgtgctcgcctgagcatccgcccgggcctgagcgaggctgtgctgcagcaagttctggagctcctggaggaccagagtgacattgtcagcacaatggagcactactacacagcgttctgagcagagacacgcagaccagctgaggaggacaaagataaggtggcattcacccccaggctctgactttcagcatcatgcaggggcttatctgtctggaggcagttacctcataataaactataaaatatagtcatcttgggaatgggatttggcataaatgttgttggctcccttctgtccactatgtccttggtgtacaatgactttgatctcagccatgacacaacaagaaaaccctccctgttgagctcctggctggactgtgcgttgttcgcagagcagaatggggaggaaacagtgttggcagcttaactgatgtgtgtggttggagtctcttccatggcaaagggacaccacagggtagtgaacattcaggaactgaggggcatatggcctgatcacacagttctaagcttttcaaaacttcaggttatcagagaccttcctgtgggcctctcttgctggctaagaaccggtttaggggagtagttctccctggatgagtgcttacagtttctgtggctcagttaccagcagtggggttgagacctgggtcgatgctctttacaggcctgcccagagatgggaataaacagggatccacagcgtgactatgtgtttgtcattttccttttatttccttgggaatcgaaaggtgtcccagtacatttccctgcacttacagaggtgcatgactaaatacattgtccctcgatgcccctgaagatcacggaggcagtcagccaattgcctggcaggtggtagatgttattttcagggttgccgctgagtgtgcaggatgtgctgacaccatccagacaaagactcggtatgtgcccagacaggtgatggagtcatgcttttgctcagaatgacaaggtaaaggaaaaacatctgaggtatgttgtaggcctgttctgacagcaaaatgacaaatccagccagcaaaaataaagtgtggagaaagatttggagttaattacagtcatttcacagaaggcactgccttcgtctgctgcatttgctcttgatgtgataagctcttcgtggctcagctggagatcctttaggcctggagagttgctcctctctccgtggaaacaggacagtctttatacgcagaagtccgctgcagctcgatacgtcaggctgagagctagaaccagtagattgcctcctgtcatagacttttgtaatgatgcaaacctttgctgatttctaacagtgattatgtagtggctgccctgcatcttctctgtgtacagaagggtccctagcatagagtctgcctggaatgatgtcctgggcagttcttccttgaggtcagcagctgttccacgttgaatgcatctgattagtggggctgcccaggaaggagttcagaatcagaaggtaaaaagggcatacccttgcctatagcaactctgctcttaggggtttatctcaaggagatggctacacaagtgtgaaaggatggttgcacaaggtgttcattgctgtataatctagaattctatattggggaaaatacctatagggaaaaagttaattacggttcttgggcacaatgaaatactatgcagctatgaaaaaaatgatgaaagcagacagacagtgttgccatggcacactgtccctagtagatttagtgggaagtagatagagttatagatctgtttctatagtataacaccattatctacagctccctgtgtgtatgtatatatccgtagagagagtgtatatttctgcatggaggtctttataaatgtagcacatgtacatatatatatatatacacacacacagtcgaccactcccttctcctggaagtactttccgcgtttggctttcaggacaccaagctctctggttgctccttctcaggttcctttgttcagtgctctgcctccctgaggactcagtcccagacctcttttctatctggcttgctcactggggtgtctccagcagccacatggattataccatctacatgctgtctaacacctcagtttaaacccagaatgggcctcttccctgaactgcagacccctatattcagtttgctactgacatctccacttaggtctctaatggacatctcagatttcacaggcccaaagccaggctcccaattactcctgaccccaggcttgctcctgatagtgacatgaggcagccaaatgcctaggcagagaggggagggtcccaaatgaaaccccacgttcaagcaaagatcagcctgaaggctaaaagaccagattgctggtcctggatgaaacccaccacgcagagtgggaacttctgttcctgtttgcccaccctttcccaattgttctttctgaataacgccttaaccaatcgaatgttgccttttccagtaatacctacagcctgcccctccccccattctgagcccataaaaagacccagactcccccatattaaggggactttcctgcctttgggtagggggaccacccccacgtctcctctctgttgaaaactgtttcatcactcaataaaactcccagctttgctcactcttccactgtcagcacattctcattcttctttggtgctgggcaagaactcaaccagtgtggaagccatacttggcccaggcgggtgaagtgggcgggccgtctcctgcagcaggtagcatggtcaagcgaggcccaggtgggccgtcaccagccagaggtccctggcttgcaaagtgaccgagaaaaaaatcctgtgccactcctttggaaaatgtccctgattcaggaagaggtagctccatccagttgctcaaaccaaatccattggcttctttctttctatcatacctcacatccaatctgtctgcaagtcttttggctctaccttcagaatatctccagaatcttaactgcttcaccctcctccccggcctcctcagtcctctctgcttccgccctggcccctcttgggctgttcacagcacagcagctgttgccaccctgttaatgctcccactctcctacagccttcggtcttgccccaggtaggagcctgaggctgcacagaggtcagcacggccccgcttaccctgccctcccagcccagccgcacgggccttgcacacatgcctcggcatattcctgccttagggctggtgctcctgctatttcctcttcccaggtaaccatgtgaagtgcctccctctgccctctttccagcctttacttgagtgtcaccttctcagtgaggcctgccctcattcctctttcgctgtttgcaacccatctcctgtcccccttcccagaactccctttcctacttcgtttttcttcacagtacttgatactgcctaacacactccatggtttcttacttgccctgtttattattttcccccaatagacagaatgttccatgatggcagaattctctgttttgtttccttccatgtccccagcacctagaacagtgcctgacgcatctcctaagcaatacgaccaataagtatgtgtctggctgccttccggctgccagtgtctgcctctttcctaggggcagtggttgcgggggtgctttctcacatgtcttagtaggctgtgcaggctggaagtgctcagaagtcacacccccagggagcagcctcagccaacagcaccttggctgtaaatgccccagctccctcgccctcaggtaagcattgctgaggcacacgttccatactcttttccacagttcctccgtgggactgagcaccacccagccacccacaggagcagctaacctgataaccaccagcctcaccctccctgccttacttccccgctcccctttaccacatgctgacctcccagatgcatttcttgctttccggtctctgtctcaggattggctcctggatgaacacaaactaacactatgttcacaaatatatttgggaaatgctggatgaataattatacacatcagacagattactagaaattctcaccaaagggatgcacatgttacctctgcatggtgagatctcaggtgctttttaccccacatagctatcctttggcatttttataattagcaagtgctcactcttccactgtcagtacattctcattcttcttgggcgctggacaagaattcaaccggtgtgtaagccagactcggcccgggcagtctcaaactcctgactccttatataatttctacaaaaattataaagctatttcccactccccaccccacattcatgtaacctgaagcatgagtaaaccaagaatgaggtaggcctctgtcttctaagcaacatcagaactctaagaacatgagggactcttagaaaactctctggagctaaccacagctgggtcactgctcatgtactgaagaccagccagagggttcccctgaaaaggagggaaactgagcaaacattctccagttctcttagtgtgcacatgtttcaggaggtgtgaaccccacatgtagcttgtgtaggcaagaagacaaatagtgctactgtctggtcaaggatttgtttgaagagccatgattatgcccatatggtaagccaccagtgctccccatccctgtaagacacttctttctcattattttctcctctgatggtgtgccaggatgctggccaagagaagccaagtggaaagaaggctgttcagtgacaaggaacctaagacttagtgccaaggactgaaaccaagtaaacttgtaattttccatgatggaaacatctacactttctcattagtggcctctacagcagttgccccaaagaagcgtctcattgtttttttactacatttatgtgaagcatacaggcaaactcagaaagactgtgataaggctcgccagagatgcctgcacaggtgctgggggaaaagcaggaccatcctgaagggagatggtgtctgtggacaaagaactctgcagtggttcttatttgcatgatttctgctggtggaggctgtaaatgtgagctcaaactcccacataagtgagttttcattgtaatccagaatgtttttaaatcaccctacttctattgaacttgcactatcatctgttaacctctactgtatttattaaataaacctgaataggtaaatcacagtacagcaaaa

SEQ ID NO: 5347 - DNA, 4021 bp, Homo Sapiens
  NM_024939
ggtagccgccccgccccgcggggcgccacgggcgggtcttggcagcgcccactgagccagccgggccgcaggtgccgcccccgatacacggtgtcccgcccaagctgatccgcgtctgcggtcggtcggtgcgtgcgtgcgcctcgtcggtccgcgtgtctggccgagagcccccttcctctgcggccatgactccgccgccgccgccgccccctcccccgggccctgaccccgcggccgaccccgccgcggacccctgcccctggcccggatcactggtcgtcctcttcggggctacggcgggtgcgctgggacgggacctgggctcggacgagaccgacttaatcctcctagtttggcaagtggttgagccgcggagccgccaggtggggacgctgcacaaatcgctggttcgtgccgaggcggccgcactgagtacgcagtgccgcgaggcgagcggcctgagcgccgacagcctggcgcgggcagagccgctggacaaggtgctgcagcagttctcacagctggtgaacggggatgtggctttgctgggcgggggcccctacatgctctgcactgatgggcagcagctattgcgacaggtcctgcaccccgaggcctccaggaagaacctggtgctccccgacatgttcttctccttctatgacctccgaagagaattccatatgcagcatccaagcacctgccctgccagggacctcactgtggccaccatggcacagggtttaggactggagacagatgccacagaggatgactttggggtctgggaagtcaagacaatggtagctgttatcctccatctactcaaagagcccagcagtcaattgttttcgaagcccgaggtgataaagcagaaatacgagacggggccttgcagcaaggctgatgtggtggacagtgagactgtggtacgggctcgtgggttgccgtggcagtcatcagaccaggacgtggctcgcttcttcaaagggctcaacgtggccaggggtggtgtagcactctgcctcaacgcccagggccgcagaaatggcgaggccctcatccgctttgtggacagcgagcagcgggacctagcgctgcagagacacaagcaccacatgggcgtccgctatattgaggtgtataaagcgacaggggaggagtttgtaaagattgcagggggcacatcactagaggtggctcgtttcttgtcacgggaagaccaagtgatcctgcggctgcggggactgcccttctcggctgggccaacggacgtgcttggcttcctggggccagagtgcccagtgactgggggtaccgaggggctgctctttgtgcgccatcctgatggccggccgactggtgatgccttcgccctctttgcttgtgaggagctggcacaggctgcactgcgcaggcacaagggcatgctgggtaagcgatacattgaactcttccggagcactgcagccgaagtgcagcaggtcttgaaccgctatgcatccggcccactccttcctacactgactgccccactgctgcccatccccttcccactggcacctgggactgggagggactgtgtacgcctccgaggcctgccctacacggccaccattgaagacatcctgagctttctgggggaggcagcagctgacattcggccccacggtgtacacatggtgctcaaccagcagggccggccatcgggcgatgccttcattcagatgacatcagcagagcgagccctagctgctgctcagcgttgccataagaaggtgatgaaggagcgctacgtggaggtggtcccctgttccacagaggagatgagccgagtgctgatggggggcaccttgggccgcagtggcatgtcccctccaccctgcaagctgccctgcctctcaccacctacctacaccaccttccaagccaccccaacgctcattcccacggagacggcagctctatacccctcttcagcactgctcccagctgccagggtgcctgctgcccccacccctgttgcctactatccagggccagccactcaactctacctgaactacacagcctactacccaagccccccagtctcccccaccactgtgggctacctcactacacccactgctgccctggcctctgctcccacctcagtgttgtcccagtcaggagccttggtccgcatgcagggtgtcccatacacggctggtatgaaggatctgctcagcgtcttccaggcctaccagctacccgctgatgactacaccagtctgatgcctgttggtgacccacctcgcactgtgttacaagcccccaaggaatgggtgtgtttgtaggagagaaagccaggaggtaagagccagctgatatcctcggcgaacatgtctctcctgagtccagaagaccagcaccctcaacctggtagcttctttctggcttgtcaaagctctcagaaggtacctagaggagcccaagccccagctccatcctccacttattctgcctgtttcccccaaagacaatggctggaccctgcatgcagggctgggggtggaatggggctaaccagctcctgatggcctgagccaggcatcttgactggcacctggagagcccttaagtctgtcctggctgtggcccatgccgacagatatcgtggggctgacaggtccacggcaggcttgctttcttttataaaatggaagctctggtaccttcaatgtatgactcctgggagaatcaagggtccatctgagcctctgagtaaagatcccaatgttctacctctccctgtccctcttgtaggggatagggaggcagagagagccagcccctaccctcagagtatctggacctcagagaccatgttgtgccaggggtggtcccacctaaagatgctagcccctctccaggtgggcataaggagtaacagatggcaaaaccacaaactattttgatggactgtgctgcagtatcaccagaagacattagggggcagtaggcccccacacaaaaccttcaggcttgaattttaaaggggaggactttctgccaacttttcttgtatgccttgggaaagccagttgccctgaacccagcagacaccatggaatgtcctttgcacgcattaaatggtacagaactgaagcctcggaagcaatttggaactcgatcttctcttccttaaatgaaaagttattgaccaaatggactttttaaaagacacaggacccttaactttgccccaaagtgaggggctccacaccaaccccaggcggaggaacactcagacagattaaggatactgttgacctgtcactgtttattatttcagcactaaaactgaggagcctcaactgctggctcttcttccctttgtatttgtgtaaggagcactgcactcccataaaaggttttaaaatacaaaatgtacaagaacacacaattccaagtgctgtaaacataactgagaaccagttcctttactaaacatccattttataaaacacaaggtttcaatttgagcccatctgagccttaaagatccattctgaataccaaaaacagggcttcacagccaggcccagaagaggtctggtgataatggctggccctgggtggggatagtttacacccgggcagcagcaccacacatgaacccaaagacatgttctttttaaagctgttttcagccatgtttctctgtgcatctccagtaagcagaaggctacccattccattcctcaacccaagagctagcacagttagagtaggagggggtgcgtactagcacgtgcccagttgctcagtgctgctagtagaaattgatttgcatagtccaatggatgtgtgctttaacaccactatgttgcacaaaaatttaagtctttatctacaaagccaaaaaatattgactcttaacaccaaagcttttacaaagctgatataaaactgcttacatagtatacaaagctctattttaaaatttaatgtttattttaaataggaaagcatt

SEQ ID NO: 5348 - DNA, 3102 bp, Homo Sapiens
  NM_024942
cgacctcctccccgcacactttgaacgccgcgcctgaggccagctggcacatgcgcatgcgtgtctctggtgcctgctctccccaccaaagcaagaagcggcgggtacttgaagcggagtgagccggaagtcgctttgcctgcccatttccacgctgtaccggcggaaattcaagcactggaagagaggttccggggctgggctggcctgactgaaggcggcggaatggagacgcggaccgaggacgggggcctcacccgccgccccacgctggcctcttcttgggatgttgcaggcggggccctgacccacagcctcctcctcacccgggccggtctcggccccggtgacttcgactgggaggagctgctggcaccgcctgctccaggtcaggatctggtgattttgaagagaaaccacaacaacaaagatgaaaacccctgcttcctttacctgaggtgtggccctgatggaggtgaagaaatcgcttctattggcattttaagttcagcaagaaatatggaagtgtacttaggagaggagtactgtggaaccagtaggggcaagaatgtttgtactgtcctggatgacagtgaacatgaaaagatcattttgtataaaaaaaatctaaaattggagtcctccacacatgcttgtaaaataaagttgctctcctttggcgaaaggcagtgtgtgttcatcagtaaagttgtggtacacatgagatcagtttttgcaaattcttcaacaagctctcctgctctaggatcaaggatagaccttgacaaggtccaaaccataatggagtccatggggtcaaagttatctcctggagctcagcagttgatggatatggttaggtgtcagcagcggaattgtattcccattggagagcagcttcagtcggtgttgggcaattctggatacaagcatatgattggactacaatcctcatctaccttaggaaccttaaacaagtcgtcctccacaccttttccttttagaactggattgacatctgggaacgtgactgaaaacttacaaacttacattgataaaagtacacaactgcctggtggagagaattctaccaagcttgatgagtgtaaagttatgcctcaaaaccattcctttcttgaaaatgatcttaaaaatgcaatggcctctttcttaccaaagaaagtaagtgacaactcaaatatacccaactccgagttgctgccttttctccagaatttatgtagtcaagttaatcatctccatgtgggaaataagaccgagtgtcaggaaaacatcaccaagcatggtgaacgcattcttggtgttggaatggaagagcaatctatttgctcctacttggaaaagattctttctaaaaatatggaactgatggaaaagaaacttatggattacattgatcagcgaatacatgaactccaggagcacattgatgataagattgctttgttactggatttgctgcaaaatcctaactccccgcccactgggatacctctaagacattatgactctggagaaagactttcaaatggagaaagataagctctcaacataaacagtgtactgcagatatttattacatatttattacaaagccaaaacccaaaaatatttataaaaagcaagtatttaatgtcctttgagggatcattgtcttacacaaagtgacctcagttttcgtttttactacacttgttattttaaatccagtactgtacactgagttaatatgatacagtcaaattatttttgctcacgatatttttcagtcttacagaaatgtatgtatatttgtgttaagagtttaaaatgcttgaggatttctaatacagttcattagtttgtattgtatatgtgtttaagtataatttttatttatacaaagatcttatagtcttagaagtatgaaaaataatgcttaagagtatttgatttttttctttttctaattatcttggaaaattggatacttaagacttggagcctttacttcagattaccagtttacattttgtattgcttgtgtgagataatgaataagatgtgatatttggcatgtgtaaacttagttcactctggggttgttaatattatttgtttcattacagagtagctgtaggtaggaaagtaaacatcagaactagcctagtccttgttacgattagtactttggatttgatttttcctgtaaaacagatgcagtcatcttgtttgacctcagtaaccccagacagtttaagaaaacctctccttttgagctgatacaggttttttccccagaatccttttctggcatgtttattgtatgaaataatgaggctctccatggaaggatgaacacatatgagtcaagggattgcaattctctctgatagacttagttttcagaccttataactattgtatatgcattgaagggtgatatatttgcatataaaaataaatgcacctgctctgggaactacttgtctttagttagtagaactgttttatttcaactaatctttacttcaaatgtcttattttttagaaaaagggtatctcatactcatttaatattttggcaaatttcttctttaaaaatgttacctgatgtaattcctgcgtgacatagctgaatttttaccctgccctaactctgcttatctttaagaaacaggatgcctgtgatgaaaagttccttttgtaaccagtccagaggagactggttacaaccacgatagctgaccaaacgactttaaaaagacctcagcctttttataatcttatttctgtgctaaataacgctcctgctagctccatgacagttgacaatcgccatgacagtgaccagaagaagccatgaaaggacaaaaaggaaggcagcactctggttttaggaagttcactgcccatttctgaaaaatccaggaatattcctccctttgcttgaatgtgaaacacctttattagaaaaattatattttaaccccctcactcctcattagttgaaaagttgatttgtgagccatactcctgcttctcaattcagtggcgattgaataaaacctgcagtgtttgtcactcaaaaaaaaaaaaaaa

SEQ ID NO: 5349 - DNA, 1880 bp, Homo Sapiens
  NM_024943
atgaggtgaactgcattaacctaaagtgctgcagagataaacttaaagcaggaagcaacataccatgaatgtactgcaagggaacacatttgtgtcatgtgaagagacatgacaaaaacagccctccttaaattatttgtggcaatagtgatcacattcattttaattttgccggaatatttcaagacaccgaaagaaagaacattggagctatcatgtctggaagtgtgtttgcaatctaattttacctattcactctcctccttaaatttttcttttgtgacttttctgcaaccagtaagggaaactcagattatcatgagaatctttctaaatccctccaattttcgtaacttcaccaggacttgccaagacatcacaggtgaatttaaaatgtgctcctcgtgtttggtttgtgagtctaaaggaaacatggattttatttctcaggaacaaacatcaaaagttcttatcaggagaggatcaatggaagtgaaagcaaatgattttcattcaccttgtcagcactttaacttcagtgtagctcctctggttgaccacttggaggaatataacactacctgtcatctaaaaaaccacactggaagatcaacaatcatggaggatgagccaagcaaggagaaatcgataaactacacttgtagaatcatggaatacccgaatgattgtatacacatttctttgcacctggagatggatataaaaaatatcacttgttccatgaagatcacttggtatattttagttctattagtttttatatttttgatcatcctcactatccgcaaaatacttgaaggccagagaagagtgcaaaagtggcagagtcatagagacaaacctacatctgttctcttaagaggaagtgattcggagaaactgagagcattgaatgtgcaggttctttcagcagagaccacgcagaggctgcctttggatcaagtccaggaagtgcttcccccaattccagaactataagttacttccacagtgcatcagtgagatcaatatacacgaatatccccgggcaagttggaccgagccctttgaagaatactcagaagtttattttgtgaatgagtagactggaaaatgtttgtgtccagctgaggatgcacagttggaaagcaggaggaatgctgactggttgatgaaaactagcttaagagcattcattcgctccatgagatcaagggaacaagagtgtttgcaagaagccattatgagtcatggaaaaaaagatgatgaaacccatggaaacagcaagagaattcccactctctctcttcttaaaaaaaatctatcattatacagcacagagtggagccaagtttttaattttgaggaaccaaaaacaggatcaaatatgaaaaccctttcttttattgggccacattgtagatgctgatttgataattgtttcctatgcagatagattatttttatttcacagattatttaaaagggaagagggcctggttgtttatttatatgtttgtttgcatttatgaatcttgctgccttttagcaccaggatgtttttaaaaaaattcaaagaggccaggcgcagtggctcatgcctgtaatcccagcactttgggattctgaggtgggaggatcatgaggtcaagggatcgagaccatcctggccaacatggtgaaaccctgtctctactaaaaacacaaaaattagctgggtgtggtggtgcgcgcctgtagtcccagctcctcaggaggctgaggcaggagaatcacttgaacctggcaggcagagtttgcagtgaaccaagatcacgccactgcattacagcctggtgcagagcaagactctgtctcaaaaaaaaaaaaaaaaaaaaaaa

SEQ ID NO: 5350 - DNA, 12687 bp, Homo Sapiens
  NM_024947
atgcgcagcccatgttagtgatggaggagagaagatggcggaagcggaatttaaggaccatagtacagctatggatactgaaccaaacccgggaacatcttctgtgtcaacaacaaccagcagtaccaccaccaccaccatcaccacttcctcctctcgaatgcagcagccacagatctctgtctacagtggttcagaccgacatgctgtacaggtaattcaacaggcattgcatcggccccccagctcagctgctcagtaccttcagcaaatgtatgcagcccaacaacagcacttgatgctgcatactgcagctcttcagcagcagcatttaagcagctcccagcttcagagccttgctgctgttcaggcaagtttgtccagtggaagaccatctacatctcccacaggaagtgtcacacagcagtcaagtatgtcccaaacgtctatcaacctctccacttctcctacacctgcacagttaataagccgttcccaggcttccagttctaccagcggcagtattacccaacagactatgttactagggagtacttcccctaccctaacggcaagccaagctcaaatgtatctccgagctcaaatgctgattttcacacccgctaccactgtggctgctgtacagtctgacattcctgttgtctcgtcgtcatcgtcatcttcctgtcagtctgcagctactcaggttcagaatttaacattacgcagccagaagttgggtgtattatctagctcacagaatggtccaccaaaaagcactagtcaaactcagtcattgacaatttgtcataacaaaacaacagtgaccagttctaaaatcagccaacgagatccttctccagaaagtaataagaaaggagagagcccaagcctggaatcacgaagcacagctgtcacccggacatcaagtattcaccagttaatagcaccagcttcatattctccaattcagcctcattctctaataaaacatcagcagattcctcttcattcaccaccttccaaagtttcccatcatcagctgatattacaacagcagcaacagcaaattcagccaatcacacttcagaattcaactcaagacccacccccatcccagcactgtataccactccagaaccatggccttcctccagctcccagtaatgcccagtcacagcattgttcaccgattcagagtcatccctctcctttaacagtgtctcctaatcagtcacagtcagcacagcagtctgtagtggtgtctcctccaccacctcattcaccaagtcagtctcctactataattattcatccacaagcacttattcagccacaccctcttgtgtcatcagctctccagccagggccaaatttgcagcagtccactgctaatcaggtgcaagctacagcacagttgaatcttccatcccatcttccacttccagcttcccctgttgtacacattggcccagttcagcagtctgccttggtatccccaggccagcagattgtctctccatcacaccagcaatattcatccctgcagtcctctccaatcccaattgcaagtcctccacagatgtcgacatctcctccagctcagattccaccactgcccttgcagtctatgcagtctttacaagtgcagcctgaaattctgtcccagggccaggttttggtgcagaatgctttggtgtcagaagaggaacttccagctgcagaagctttggtccagttgccatttcagactcttcctcctccacagactgttgcggtaaacctacaagtgcaaccaccagcacctgttgatccaccagtggtttatcaggtagaagatgtgtgtgaagaagaaatgccagaagagtcagatgaatgtgtccggatggatagaaccccaccaccacccactttgtctccagcagctataacagtggggagaggagaagatttgacttctgaacatcctttgttagagcaagtggaattacctgctgtggcatcagtcagtgcttcagtaattaaatctccatcagatccctcacatgtttctgttccaccacctccattgttacttccagctgccaccacaaggagtaacagtacatctatgcacagtagcattcccagtatagagaacaaacctccacaggctattgttaaaccacagatcctaacccatgttattgaaggctttgtgattcaggagggattggagccatttcctgtgagtcgttcctctttgctaatagaacagcctgtgaaaaaacggcctcttttggataatcaggtgataaattcagtgtgtgttcagccagagctacagaataatacaaaacatgcggataattcatctgacacagagatggaagacatgattgctgaagagacattagaagaaatggacagtgagttgctcaagtgtgaattctgtgggaaaatgggatatgctaatgaatttttgcggtcaaaacgattctgcactatgtcatgtgccaaaaggtacaatgttagctgttctaaaaaatttgcacttagtcgttggaatcgtaagcctgataatcaaagtcttgggcatcgtggccgtcgtccaagtggccctgatggggcagcgagagaacatatccttaggcagcttccaattacttatccatctgcagaagaagacttggcttctcatgaagattctgtgccatctgctatgacaactcgtctgcgcaggcagagcgagcgggaaagagaacgtgagcttcgggatgtgagaattcggaaaatgcctgagaacagtgacttgctaccagttgcacaaacagagccatctatatggacagttgatgatgtctgggccttcatccattctttgcctggctgccaggatatcgcagatgaattcagagcacaggagattgatggacaggcccttctcttgctgaaagaagaccatctcatgagtgcaatgaatatcaagctaggcccagccctgaagatctgtgcacgcatcaactctctgaaggaatcttaacaggaacatgaagccttgataaaacagcagttttacttttctcacaaaaacttgtaaggtaaaggcctaacttggtctagaatatgacacttattgtggtggatagccaagcacattgggatctccacatcaaatactgacatttcttctacaggtataataattcatcatgcattttcataattaataaacattggtaaaattaattttacaggttacatgaaacattgaaagacttgttacagagggccatgatatttttcaaagaaatgtgttatactagataatttttttaaaggtgatgtttatcattaatataaagaatccttttaaaagtaatttaatgatttacatttctcctcttttgattcaattttcttatacattttttctaccctattagttttctaaaggttgtcatgagaggtatattatggaataatttagtagtccagtgacagaatcgtatgaaatcagtgtacattttaaaaaacatgtcttttagacatatgctttatctataaaaaaggaattgtgttctagtatgaacaatactgatctggaagtgagaagagttagtttctattccaaacttgaccaagaatttggtttgactgagaacgttttcctctcagtttttgtacatttatttagagcagtggttctcagtggaggtcagttttgatcgccaggggacatctggcaatgttgagacattttggttgtcacagcttgggggtgggttcaggggagggttgctactggtgtctagtagttagaagccagagatgtttctaaacatcttataatgcacaggacagcacccctccactgtaaagaattattggttcaaaaatatcggtactgccaaggttgagaaactctgatatagaaggagtgataaatattgttttcacccaaaggaatacttttaaaggatgaagcttactaaacatatatgatggaagtattattcagataacattaatattctgctgaataattttttctagtttaatcatactagaaaaagaaaaaaaatctacaaattgtcctataaaataaggacaaacatgcaaataatttaactctcagaaagtactaattcattctgattatctttcatacctctgtgctcctctgcactgacgaagacataatatgattatacctatgaactagtgcacagccttttctggcaagaaaatagtttgtagcagatacgtggttgctctttggatttttttctattgttgaacatgctgggactagctagaatgcacattcctacttcctttaccaaacgtttgcatgcttcctgcaaagcacttaccaagtgatttctcttgaaccatcggatataattttgtatgtacatgtttgaggaaaaaaatgtaaagcaaaaccttttactgaacagtgttctatagaattatgacactaaaacaaaattgtttgtggaagccctgaaagctttatagtcctggacatcaaaaattttatttgagatgatgaatgttttgttttcatcttttcttatattaccacaattgagatattttagtaattgaaggaacatacacagatatttggcagaagtcgagtaaggaggggaaaaaaagagtccgtgagtttcagtcattttcactgctcttttcaaaaagattgtgttgagctggtagaagactaaagatgtcactgaagacatcacagatactatatttatcttttggctttgtgtacattagagaatgttgattatttttatacaaaaatacagcgggtaatttttttaatctttagatgcctcttgtttgaatgtatgctttgtggaattctttgtgtagtaatgttttaaaaaaagatgtttactgatagttacatgtaggattagaatatgtaatataatataaggctcatgttccagacctacgatagcttgtagtctatgttacgtatttctttatatcacatttttaatcattggattaaagtatcaaggaaagctaggtactctataatgagttttcatttattagcagttaatcatcatgacagaattgtcatatgcttgacttttccctcttcttggaatttcagaacacaaatacaggctaagcattagtaagagatggcccacagtatgagagagagaggtgcaacggaaaatctcgcctggaattaaaacttttcatagattatccacggttaatacaaaatttattatatggggatagactgctccagcaataatgattacatcctataactgtattacctatggcctttaaggtatcaattttgaactgtgttgtaggctctccttttatttgttctctttcctaatagcagccattctgtacttattgaaagcccctgtgcctactgctgtcttaagtattcaggaggggcttacaagagggttttctattggagaataccgtataatcttaaatctagtccagatctctgttgtccccactcaaaacatacacaaaatatgcacttgcttttttcaagtgagtttttatttaaaaatggcttgtttgctatcacattggtgcagctgtttctttcaagatgagttaatcatcttaatttcaaagcttcagctatatataatggatatatagacaacactgagcatccacctctctcctgagctttaaagcagagtttcagtatgatataggtggggagagtaaattgttttcatatcctttcatactactactaatagttttaggattttgactggggagagataatgacaaacagaaagggaacatggaggttcttcctacttttgctacctaagtttgcattttctgacttccttgcagtgttgcactctttgtcccattgggataaaaagcataagtttgaaattttgctttaagccttgtgttcctggggaagttaaacaactaagagagctgatttgtaaaaattattttttatatgacattaatattcatcaagccttgtgtaggcatgtgtaagacacagctatgcagctttgagtagtcaatatagtatgagatagagtgttgtcccaaatcctcctgtcactttttaagtagcatattatttccctgatggtcctgttactttgctgttgaatgctctaaacagaactttttaaaaggtgtgttttaagagcagtcacctaggagtagacaaggtggaatgggaggagagaaatggtaatgcaaaagcttgagcatgggaagagtcagaggaggaggccatcatccttgttagcttagcctacttcaacactgagcacatttctgcacttttgaagtgaaattcatgttttacttagaagaaataattttctttcattagggatcccagttgatttttgtttcctggtgtatcaaaatacttagaactatgaaacaagtattattgtgatcatgcctttgaataatttttgacgtagcttatcttcatgtatcaagtataaaattataatgagacatctattcacaaatacaagtcttagattgaattgaaatgtgttatagtgccctgtctcccactgacttgttcagttaaatgtcttaaagtacattatgtacatcttcaggcttttggtaccacaatggcacaagtatggtagggaggcaatatagtcttaggctatatgcctatattaagtgtgtataaacaatttttgaaagaatacactattatagatgtatgtgagtgatgctgacctgacagccatatccagtggatgaaactgactggacacactgttaaaatgttttaaagatgtattttcagccagaacagcctggttatagtttgtggttttcaccttggtggattgcaggaacacatgcagcctactggcattgagcattagctaatggcatgaaagggcctcatctcactacctctctaaggcctctagctccaagaaaaccatgaaaacttctttcttggagagatctttgtctcagaatccttagagaggatttcgtatgggggctaactttaggaagggaggcagctggggcaggactttctgatacctgacagtcatgttccagagcaacctttgggcagtggaaactggcgcatctatgcaaaatgattgctcaatctctatcttgtgtactacatatgtaactagctgggccctaaggaaggttttctagggggaaggatagggaagtagaggaggagacaagtaggaggaacaaagcattctagacccaagaggatagaagatatttaggatagatatggctttcatccatagttcaaaataatgcgttttgttagatgccagttatagcagtaaataggttatagtttttatatgtcaagatttacctgtaatcagactcattctttcactctctatacccactgtctccatgcttgggagcatggatattaatagttccagtgatgtagaagttagtgatttttgatttctgaaaaaggtgagaaccttttattacagttggagaatatttgtcaaaaattcaaaggttgttgtaattgagttgccagaattacagagtttccattttcagatatcacagttgaatcacctctgtagattgttataaagagaggcattttaagatagtattttatttgctaggttgtgtctcagtctaagaattgggaaaagaagagctataggtttctctttcctagtctggatttcagtaaacacaagcctacctctgcttctttggttcacagcagtgtggatcatgaaatgaactgtttacccacattcatcaatattggtattttacaaatctacttggagcatttaatttcatctcaaagattgtgatccactttagataagcacaaatacagtattaggaaaagtaaatatgcaatcttactaaaatttcaacttgttaagctgtatatcttaaaagaaattatttggggctgggcatggtggctcacacctgtaatcccagcactttgggaggctgaggtgggtagatcacctgaggtcaggagttcgagaccagcctgaccaatatggtgaaaccctatctctactaaaaacacaaaaattagctgggtgtggtggcatgcacctgtaattccagctacttgggaggctgagacaggagaattgcttgaacccaggtggtggaggttgcagtgagccaagatcacacccctgcactccagcctgggtgacagagcgagactccatctcaaaaaaacaaaacaaaaaattatttgggaagatacgtcctcttttattagaagttcataaaatgtatcatatagttttgttcacagtagttatataagctttcttcaaataaatttaaaattagattaccttctttggaaaaagaatttcctaaatttttaagaattttcaaagttttacatattagtttttagaacctaatccgttttaaaattgtactatgagaaagcttttttttgaaagttgtaaagcattaatacaaataatacaaatataattattaccatcacattccagagaatatggctttttctaaactttcaatttagaaaacatacattaagggagaatctctgccctccttttcagctctgaagatcagcttttctactcagacacatgcacacaccccttccaagtgtcatgtttatgggaacatttgggaaatgttttccagatgttttattttttcccttttatagtttgttgacatttaattttacttaaagatgacaattttaatcggaaatgttagaggtacaacatagtgaggttctagctagctttatacttttgaaaaatatttttgtttctactgctttttacaagtactagtcctctcagtgatactggtggtgttcagtatgaatccatagaaagaaaacaaaatttgttgtttaaaaaaagcagagtaatgaatgaatttcagttttgaaaacaacataatttgaaaacactgttatactaacatggcaaggtgttaattaaatataagagtaaggtagtaagttcttttagagcacctgtttaaatttactccagtaatcatcttaaggattgatagtcaccatcacttattggcttaaaagttatatttcatggaatattatcagtgttaaatccaagctttgtggagctttaagtgatggtggtgaaaaagttggtgtttatgagagagtggtggggtgtctagtcattagtgaagttaaacatcaacctgttttagaaagaattttttagtcttgcctaaagtaaaccagaagtgtctagtgtttaaatctttatttagaatgcttctcttaaaagtattttttgttttgggtagtattaaataatcagtaaataatctatttcagtagtaaataatgaattaagatgatgatgaatgaggattaacacactggtctggagactggggttttatttcagtgggttagctgtgtgtgacatgttgggcaattactcagctgttttaacagcttccagatatgcagtatggtgcctgtactactcaaaagttgattttggtttaattcatctttaaggtacctcccagctctaaaactatgattctaggctgtgtaatggggttattcctactttattctctttccttttttaagggttcattttatacttaataagcatccatttcttgggtcacctacagtctttgttctcctaaggattaaaatagaaaattcatacataacaagcaaatgatgacattttcctaaatgctccttattggttaaccactgaatatatgaacacatatgaatattgtcattcatgtacttaaattcatttagcaaactatttgaacacttacatgtgcagtgtttggtgaacatgacatgaggaactagtagtaagtaaaatcttccccccaaaattcattgtggcttaaataaatatgaacataatcattactacttaatatactgagagggaatcttaataaacttggaactgggagggaatatttgtatacattgggtaaagggttaggctagatgacatctaaggggtctgagtgaatcatatcataatttttataacacatttcacatactaaacatcagttggccccatacctgattaagttacaaaatttaggagacttaacattaaggacttacaggttgagacagcccgtatttcacaacattattttgacacttgactctattccagagttgttgctatacaaggcatgtggcagaacaaaaaaaaagctggtgttgatataagagctttttacccagtattgacagtgagcaactttctttctttttttttttttttcttttttttttttttgagatgggttcgctctgttgcccaggctggtgtgcagtggtgcgatctcagctcactgcaacctccacctcccgggttgaagcgattgtcttgcctcagccttccaagtagctggaattacaggtgcccgccgccacacctggctaatttttgtatttttagtagagacggggcttcaccatgttggccaggctagtctcgaactcttgacctcaagtgatccacctgccttggcctccctaagtgctgggattacaggcatgagccaccacacctgtccgacagtgtagcaactttctaaaactgaaaaatctcaaaggagatcattggaactgacttgttcatttattttttgtttttaaattaagaaagattacacaaaataagtgttactgtactttaagctattacaaatatccaacttttaaagatatgtaagaatcagtaatattctagaaagcacatatatagtaaaagggcatcctttaaatgtagaacgggtaaacatgaaacagttccatgcttgaattgttaagtatctagggggtaaacattgaatgggagaatcatttattgggttaaggtcccttccttgtcattctgggatctgtgaatcacattgtaattcctgttgacaaagctttacttgttaacatcagttgatactgacattctccataaagatatagaatgaaaatatctattaaaaatagtttatcattgttttagcttttttgttttgtttgttttgagacagagtctcactgtcacccaggcttgagtgcagcggtgtgatcttggctcaatgcaacctccacctcccaggttcaatagattctcccaccttggcctcccaagtagctgggattactggcatgcaccactatgcctggccagttttttgtatttttagtagagatggggtttcaccatgttggccaggctggactcgaactcctgacctcaagtgatccgcccacctcagcctcccaaagtgccgggattataggcatgagccactgcgcctagcctgttgcagctttttaaagcaggaaaatatccatataaactgttgggttagaatctatattagaatctttcaaactaattgaaaacaggaagactatcatctaagtagccagataatctgggtttcaaaaagttattccatggtactggtttaaaaaatacttttcaagtgttttaatttttaaagtgtaactaattcttcaaatatgttatgctgttaaaatatgtattccataagtactttttgtatatgtattcttaaattttaaaaagtcaactgaatgcgcaaagatgatataattttggatgtagacatttaaactagattcccagtcctctccttcaaaagcttggtctttgtttttcctatagggaaaaaagtcaaaataagttccaaaaactatcctcaaagtagtattgtgcttgtagtaaatgaaggttggatggatggatactgacaatggtggcaggcatttcaagccttttaaattagtactttttgtcgtcttgcttattaaaattttgttaattttagcaaagaccaattgttgtgataaactggtgttttttggatgcttcaagcacacgttaaccaattttttaattccccttttggttcctcccattgttctaaaataggactttcatattattaaaacctcaaaagatgatccacccaggatgaacaaagatcaccaaggggaaagaaaacattttttatctttacagaaaacatgttaagattatatatagatgtattctttacattggatattgtattagagtcctccttacaagaaatgaaatagtttttagcactcttagcattagagttcctagattggtgttgatagctacagttttaaaatgtataacctgaaaatgaaggttaattttgcattgtaagagcacatttgatctatgtaaaaagtgtccatttggtgtatttttttaaaaaagagaaagcactttcatattaagtagcatgtgtatgaatttagattttcatatttgttgtgtctgtattcagtgaagtaaattgagcatttaaatgtttgttgatggcaacattaactattaaattaaagcaccttatactctgctgcttaacttgcttgtaattgcacctttgttacctgcacattttcatatagaatattgttgtaacattgcttcatgtgggtctggatggaagattagtgggcctacaggatcatttatttatattgtttatattacaataatatattgtagatcagttgtaagttcatttctttacaaataaaagcctcttccatttgactggaaaaaaaaaaaaaaa

SEQ ID NO: 5351 - DNA, 2993 bp, Homo Sapiens
  NM_024952
aagaactggggcgggctagctgccgaggagaccacgctgctgcatgggccacgtgagctcaggctgtgggagcggatggagctgctacagtcagcgcttggggctggcctcagcttgtagacccgagccctgcagaacaaccccccgtggcgcaggagagcagaagaaagggggcctttatgcccttttgagggaagcacacattctgcaaggccgtggaaacaaagggaggaactgtttgtagccctcgtccagacgccccaaacaaacagtaagtcagaagggaacagagcacagcacagtccctccctccgccccaggcagtatccaccttgccccgccccacctaaggagcccaagggtattctgggagcccaccccaggacaatggcagggcaaaaccagtgagcaaggcagaaaattcctgaaattctccactgaggcccagctgttcctctccttgaaaagtcaaggcttggttcaagccagatagcacctgaggacagaacatatcaggagccaagttacaccctgtttaaccctgccttcaaagggacgactctgtaagattctctgctacttattcaagttgacacgatgcccttcacactccacctgaggtcccgccttccctctgccataaggagtttgattctacaaaagaaaccaaacatcagaaatacatccagcatggctggagagctccgaccagccagcctggtggtcctgcccaggtcccttgctccagcttttgaaagattctgccaggtcaacactggtcctctacccctgctgggccagagtgagccagaaaagtggatgctgccccctcaaggtgctatctcagagaccaggatgggccatccccagttctggaaatacgagttcggtgcctgcaccggcagcctggcttcgctggagcagtactcggagcagctgaaggacatggtggccttcttcctgggctgcagcttctccctggaggaggccttggagaaagcggggctccccagaagagacccagcaggtcacagccagacaacagtgccttgtgttacccatgctggcttctgctgccctctggtggtcacgatgaggcccattcccaaggacaagctggaagggctggtgcgggcctgctgctccctcggaggtgagcaggggcaacctgttcacatgggcgacccagaactgttgggaatcaaagagctttccaaacctgcctacggggatgccatggtgtgtcccccaggggaggttccagtgttctggccttctccgctgaccagtctcggagctgtcagcagctgtgagaccccactggcttttgccagcatcccaggctgcacagttatgactgacctgaaggatgcaaaggctccacctggttgtctcaccccagagagaattccagaggtccatcacatttcccaagatcctctgcactacagcatcgcgtcagtctctgcttctcagaagatcagagaactagagtctatgatcggcatagacccagggaaccgggggattgggcacctgctctgtaaagatgagctgctgaaggcctctctctcgctgtcccatgcccgctcagtgctcatcaccactgggttccccacacatttcaatcatgagcctccagaagagacagatggcccaccaggagctgttgctctggttgccttcctgcaggccttggagaaggaggtcgccataatcgttgaccagagagcctggaacttgcaccagaagattgttgaagatgctgttgagcaaggtgttctgaagacgcagatcccgatattaacttaccaaggtggatcagtggaagctgctcaggcattcctgtgcaaaaatggggacccgcagacacctagatttgaccacctggtggccatagagcgtgccggaagagctgctgatggcaattactacaatgcaaggaagatgaacatcaagcacttggttgaccccattgacgatctttttcttgctgcgaagaagattcctggaatctcatcaactggagtcggtgatggaggcaacgagcttgggatgggtaaagtcaaggaggctgtgaggaggcacatacggcacggggatgtcatcgcctgcgacgtggaggctgactttgccgtcattgctggtgtttctaactggggaggctatgccctggcctgcgcactctacatcctgtactcatgtgctgtccacagtcagtacctgaggaaagcagtcggaccctccagggcacctggagatcaggcctggactcaggccctcccgtcggtcattaaggaagaaaaaatgctgggcatcttggtgcagcacaaagtccggagtggcgtctcgggcatcgtgggcatggaggtggatgggctgcccttccacaacacccacgccgagatgatccagaagctggtggacgtcaccacggcacaggtgtaaccgtccatgttccgtgtgagcagagtccctaccaacgggcaggtctgcatccggggagaatgcagctgcttctggcgacaatcctgctagtaaacactggtcttcggtgagcaacgaacactcgcctggcctgggaaactgcatgcccactttctgggaggggttagtgcaggtgctgtggacaaaggacaacatttctctggggctttttaacttttattcctaagactctaaaggcgttgatttcaaccctccttcactctggcttcttcaggcaacccacgtggtctcctgtgagaatcttctcgacagttacttatggggacacttgtgaacaattaactgccaggcagagcatgagaacaaacattcccaggccatgtaggataggatactccagactccagtcatcctcccccatccatggtttctgttactcatggtttcagttactcatagccaactgcagaccgaaaatactaaatgaaaaatttcagaaataaacaactcttaagttttaaattgtaaaaaaaaaaaaaaaaaaa

SEQ ID NO: 5352 - DNA, 5825 bp, Homo Sapiens
  NM_024953
tagccctttcccggggtcctgccccgcgcgtgcgcactgtggttctgcgcttgtcatcatggcgacgcggggccatgtgcaggaccctaacgacaggcgcctccggcccatttacgattatcttgacaatggtaataataaaatggcaattcagcaagcagataaactgttgaagaaacataaggatcttcattgtgctaaggttttaaaggcaattggtttacagagaactggaaagcaagaggaagcctttactcttgcacaggaggtggcagcccttgaacccacagatgacaactcactgcaggcactgactatcctttaccgggagatgcaccgaccggagttagttacaaaactttatgaggcagctgtgaagaaagttcccaatagtgaggagtatcactctcacctcttcatggcctatgccagagtgggtgaatacaagaaaatgcaacaggctggcatggctctatataagattgtccccaaaaatccctactacttttggtctgtgatgagcttaattatgcaatctatatcggcacaggatgaaaacctctcaaaaacaatgtttctgccccttgctgagagaatggtcgaaaaaatggtgaaagaggacaagatagaagctgaggctgaagttgaactttattatatgatcctggaacgtttgggaaagtaccaggaggccttggatgtcatcagagggaaattaggagagaagttgacaagtgagattcagagtcgggaaaataaatgcatggctatgtacaagaagctgagcaggtggccagagtgcaatgccctttcccggcgcctcttactaaaaaactcagatgactggcagttctatctgacttatttcgattctgtctttcgactgattgaagaggcctggagtcctcctgctgaaggtgaacactctttagaaggagaagtacattattctgcagaaaaagctgtgaagtttatagaagatcggataacggaagaatctaaaagttctcgccatctccgaggaccacatctagctaaattggagctgattaggcgtttacgaagtcaaggttgtaacgatgagtacaaactgggtgatccagaagaattaatgttccagtattttaaaaagtttggcgataaaccttgttgttttacagaccttaaggtgtttgttgacctcttacctgctacacagtgtacaaaatttattaatcagttacttggagttgttcctttgtcgacaccaacagaggataagctggcactgcctgctgacatcagagctctgcagcaacatttgtgtgtggtgcagctgacgaggttacttggcttgtaccacaccatggataaaaatcagaaattgagtgtggtcagagaattgatgttaaggtaccagcatggactggaatttgggaaaacctgtttgaaaacagaattgcaattttctgactattactgtctccttgctgtccatgcgcttattgatgtatggagggaaacaggtgatgagaccactgtgtggcaggccctgactttgctggaagagggattaacccatagcccttccaatgctcagttcaaattgctgcttgttcgaatctactgtatgctgggtgcatttgaaccagtggtggatctttactccagcctcgatgctaagcatatccagcatgataccattggttatcttttgacccgatatgctgaatctctaggtcagtatgctgctgcgtcccaatcctgtaacttcgcactcaggttttttcactccaaccagaaagatacctcagaatatattattcaagcttacaaatatggtgcatttgagaagatcccagagtttatcgcttttaggaacaggctgaataattctcttcattttgcacaagtccgtactgaacggatgctgttagaccttctacttgaagcaaatatatcaaccagtttagcagaaagtataaagtcaatgaaccttaggccagaagaagatgacattccatgggaagatttgcgagacaacagagacttaaatgtttttttcagctgggatccaaaagacagggacgtttctgaagaacataagaaactttccttagaggaggagaccttgtggttaagaatccgatccttaacattgaggctgataagtggacttccaagtctcaaccaccctgtggagccaaagaactcggagaagactgccgagaatggggtatcctcccggattgatattcttcgtttgctccttcaacagctggaggcaaccctggagacaggaaagcgatttattgagaaggatattcagtatcctttccttggtcctgtacctaccagaatgggtggattctttaattctggctgttctcagtgccagataagctctttttatcttgtcaatgatatttatgagctggataccagtggtttagaggatacaatggagattcaggaacgaatagaaaatagttttaagtctttactagaccagttaaaagatgtcttcagtaaatgtaaaggtgacctcttagaagttaaagatggtaacttgaaaacacatcctactcttttagaaaatctagttttctttgttgagactatttctgttatcctttgggtatccagttactgtgagagtgtcctacgaccatacaaactaaatttacagaaaaagaaaaagaagaaaaaagaaaccagcatcatcatgccacctgtctttaccagtttccaagactatgttactgggcttcagactttaatttccaatgttgtggatcatattaaagggcttgaaacacatctaattgcacttaaacttgaagaacttattttagaagacacttctctctcaccggaagagagaaaattttcaaagactgtgcaagggaaggtgcagagcagttatctgcactcacttctggaaatgggggagctgctgaaaaaaagacttgagaccacaaagaaactaaaaatttaaggaagtatctatcatgggcactgatgactctgcaacagaatatgacaccatcttcccaggcaaaagcaacatctggttgaccatgattttaatccagaacttcctcataaaatgcatgaaggactttgatcgtgaatttttttaggtgttaaatatatacaactgattaaattattgtatataaaccagaagcgggaccctcatctgggtttgaccactttttatacatgttcatatgcatatggcagcaacaagagaaccctacttttcttcttcccatcaccagaaacatcttttcaggggagcggggggtctataaaaacagcaatagaaattaagcataaagcatcaacctcatagcaactgaatagcccttccattataaataacattgagagtttttggtctggtccttgagccacaagaagtggaggggagaccatgcctgggaacagacccccttttcacagcagtaagtttgttttgaggctttctcagctacttggctcccacagaacccaaggcaggtacacaaaggaccttagatgagatctggcatatgcacccgcaatagaagggcaccacttggatgaccacaggcacttagtttttggctagtttttgtctgatagttaagacatccccatcctagcttctgtgagagttaaaaatctcaggtaagaaggcaaggaaggctctgttaatttatagctgtttagaggggaaagcagtgcagaccacttattaagcccgctgaggactagctttctgtctttcatacatttgggaaagataggaatgactgtttcaaagaagagaggtgcacataatttatgcaggcaagtatgatacttatttcattggttttgtgagtcatatatatacatatatatatatacacatatatatatgacttgaaaattaagatttaatactttaatgttttaagtgtggggggtttgggaaggaaggaatgtaatattatggatttagccttaggctttaagttttaggctggcaaaagaaatgttattcagtgggtttgaggtttggactactttcttcaaacttagagaattataacaggatggtgtttactttgttcacctggatgtccccaagactctagcttcttctatcagtggttggtctgatagaagaggtaaaaattgctcttgaaaatgtcctacaatttatgcagtttctttgataatatttttctgtttaaatccctgcttctgtttttggtctgttacctaaatatagttcaagtttaattctgtaagagcaaagaaatgaatttgatgaggaaattaagcatccaatggaggattggtcttgaagaccttaaaggtgctttccaacctgcactgctccagtgaaatgtggtacttttttcttttaaaagcaaccaagagagctgggaatatctgtgtacgcaaagtaattgcattttgtcccttcattttgactttcttagattcataatttgatacagtgcttaaacttccaaggaaattttaaacaattactacattacctgttcaaaataaggcttgttggaaatcctagtccatcaactaatttcaaaaatttatttttgatatgagtagcaacagctggtcatataccctatcccaaaaggaagaactgtcttgaacaagatgaatggaaaattgtggttaattctgaatttcatgtaatgacaacatattctttcataaaactatggcctgtttaagatggaactttgtgtgtgtctgctggggagggtggggtacatgtgtatggcgtgtgttcttgaaatgatgtctctctgaatatccaaaaaagtactgtactgtagaaatgctctttgaaaaagtctatcgactgaccatgatcaatctagcatatgtatgttcagtgggctagccttggtcctcagggacagtgtgtgactctagtggtcttcctaaccagtctcttgcctaaagatatctgggacctctactggctttaatgacaaataatgttatgttgaggttatgcttcctttgttatttgctgattttcctactaaatgtagcatttcaattagatccagctttcacattttgagataattgtaaaaagaatgaaattatgcagaaatggccaatatctcttatcaatctgttcttttggaaaccctcatgtactataaattgtgtacagttaaaaaaatatatatatatatatattcttacatgagtaaaaagcaccctctcccagcaatcgtatgccattggtatttgaagagaattcccaaataacccattgctgctgctgctgtttttgatttgtatgggtttttttgttttgtttgtttttgtgtggtaaactgatatttaaaaaaggaaaggagaaaaatcacgactactgtttacagactgaaaaattattgctttttatactactgagatcctaagttaagactctccaaagcaaacatttggtttaaatcatttatctgatgtagataaaaggtagagaaacttgtagtgttctccacataatggaaaatgtacaaatgcctagttgtgttgcccatcaattttgtatattttcataattttaattgttgaaaattgcattatattttgcaatcactatgttcaatctggatttgtctttcattttaacttttaatataaaaaggggtttcaatgtatctacaggcttgttattgaaacttcctacttatttgatgtgatttattaatataggaagtatatattcttccttaagtaagtgaagcatagcaaatctactttaaactggatgggttaatttatataaacattttcattttaagttggcaaaaaaa

SEQ ID NO: 5353 - DNA, 1575 bp, Homo Sapiens
  NM_024954
ctgccacttccctctctcccctggcccgcaaagttttggcggagccatcgctggggctgagcgcgcccccggggggagatcggggagcgcccgatgccgggcggccggagccattgacccgggacgccgccgtccgctgagcagccgaccaccccgccgcctccggtgcatggggactggctgaggagccagcatgggcaactgcgtggggagacagcgccgggagaggccggcagccccgggacacccccgcaagcgagcaggacgcaatgagcccctgaagaaagagcggcttaagtggaagagcgactaccccatgactgacgggcagctgcggagcaaacgggatgagttctgggacacagcgcctgccttcgagggccgcaaggagatctgggatgccctcaaggctgccgcctatgctgctgaagccaacgaccacgagctggcccaggccatcctggatggagccagcatcaccctgcctcatggcaccctctgtgaatgctacgatgagctgggcaatcgctaccagctgcccatctactgcctgtcaccgccggtgaacctgctgctggagcacacggaggaggagagcctggagccccccgagcctccacccagcgtgcgccgtgagttcccgctgaaggtgcgcctgtccacgggcaaggacgtgaggctcagcgccagcctgcccgacacagtggggcagctcaagaggcagctgcacgcccaggagggcatcgagccatcgtggcagcggtggttcttctccgggaagctgctcacagaccgcacacggctccaggagaccaagatccagaaagattttgtcatccaggtcatcatcaaccagcccccaccaccccaggactgatgggcccacggacccctgggaagaggccccgcctggagcactaggcccccaccctgctgctgccttccagtgctgtcattttcttcaggggccctcccctcggtgtggctggtgggtgagccgtgaagggaccctgcctttcagggcactacgcgccaccagttcccggtacccagggagcaggcagccacacacgggccttgcaaccttgtcagagaaaaggcgaacagggccctcaccctgcctgtctcccgaagcaggttcgagccacaagggccaaccaggaggcccctggagcccagatctgtcatctggtgctgccagctgtgctcactctggttttctgctcagggtctgaagcagctgctgtctccctcctctgcccccatcccctggctctcccctgggcacagtgccactcccttggaagggagggaaccacccgtgagccccagggcttgggaagcctgaggcgggcctctgcttctccctgcccccagcacaattggcagagatgaggcgggtggtggacggctgggctgtcgtggcagggtctgcacagggccatgtcctggctgtaacccaggcagtgggaggtctgcagcctggtcatggcctccacagcaggtccctgtggacagacatatctgcatatttatcaataaagccttttgctccttaaaaaaaaaaaaaaaaaa

SEQ ID NO: 5354 - DNA, 1712 bp, Homo Sapiens
  NM_024960
atgctgggggaggggctggcggcctcgacggcagctgcggaactaggccgagggacaaaggctaagtttttccatggtttggactggatatcggtggaactctggtcaagctggtatattttgaacccaaagacatcactgctgaagaagaagaggaagaagtggaaagtcttaaaagcattcggaagtacctgacctccaatgtggcttatgggtctacaggcattcgggacgtgcacctcgagctgaaggacctgactctgtgtggacgcaaaggcaatctgcactttatacgctttcccactcatgacatgcctgcttttattcaaatgggcagagataaaaacttctcgagtctccacactgtcttttgtgccactggaggtggagcgtacaaatttgagcaggattttctcacaataggtgatcttcagctttgcaaactggatgaactagattgcttgatcaaaggaattttatacattgactcagtcggattcaatggacggtcacagtgctattactttgaaaaccctgctgattctgaaaagtgtcagaagttaccatttgatttgaaaaatccgtatcctctgcttctggtgaacattggctcaggggttagcatcttagcagtatattccaaagataattacaaacgggtcacaggtactagtcttggaggaggaactttttttggtctctgctgtcttcttactggctgtaccacttttgaagaagctcttgaaatggcatctcgtggagatagcaccaaagtggataaactagtacgagatatttatggaggggactatgagaggtttggactgccaggctgggctgtggcttcaagctttggaaacatgatgagcaaggagaagcgagaggctgtcagtaaagaggacctggccagagcgactttgatcaccatcaccaacaacattggctcaatagcaagaatgtgtgcccttaatgaaaacattaaccaggtggtatttgttggaaatttcttgagaattaatacgatcgccatgcggcttttggcatatgctttggattattggtccaaggggcagttgaaagcacttttttcggaacacgagggttattttggagctgttggagcactccttgagctgttgaagatcccgtgatcattacctggggaggggttcctgaaaccttccacaatgggatctgtggactttcatttttttaagagacttactcaatttcatgactgtactacctgaaacaaagtgagaaaggacaggtgtatttttctaagtcatcaagataaatccttaagaattcagtctaaattagcaaccaggaaggaaaaatatattaaaaacaacaaaaaagtggcacatgtccaggcagtgtgaggatttgctgtatataagttgcctgctttgtatttttgaaatctctgcatcactcattggaagtgcttctgaagagagctgctctgtgttcagttgactggttttgtgtcctgtttgaacttgctgaatgtaaggcaggctactatgcgttataatctaatcacaatttgtcaatatggtcttggcaatcatctgtgcattactctggtttgcattaagcctgtgtgtgaacttactgtaaaacatgttttatttcaaggttctgcaaaattaattgggcaggttaattgtgtacctgaaacttaacaagcagtttttggaagggca

SEQ ID NO: 5355 - DNA, 3468 bp, Homo Sapiens
  NM_024996
ctcttacaacattggctgccggcgtgactttgaccgcttcccggtgcgttaccggcagctgaacccacccggcgccacgggactttgacgcgtgctctgcgcttgccatgagactcctgggagctgcagccgtcgcggctctggggcgcggaagggcccccgcctccctaggctggcagaggaagcaggttaattggaaggcctgccgatggtcttcatcaggggtgattcctaatgaaaaaatacgaaatattggaatctcagctcacattgattctgggaaaactacattaacagaacgagtcctttactacactggcagaattgcaaagatgcatgaggtgaaaggtaaagatggagttggtgctgtcatggattccatggaactagagagacaaagaggaatcactattcagtcagcagccacttacaccatgtggaaagatgtcaatattaacattatagatactcctgggcatgtggacttcacaatagaagtggaaagggccctgagagtgttggatggtgcagtccttgttctctgtgctgttggaggggtacagtgccagaccatgactgtcaatcgtcagatgaagcgctacaacgttccgtttctaacttttattaacaaattggaccgaatgggctccaacccagccagggccctgcagcaaatgaggtctaaactaaatcataatgcagcgtttatgcagatacccatgggtttggagggtaattttaaaggtattgtagatcttattgaggaacgagccatctattttgatggagactttggtcagattgttcgatatggtgagattccagctgaattaagggcggcggccactgaccaccggcaggagctaattgaatgtgttgccaattcagatgaacagcttggtgagatgtttctggaagaaaaaatcccctcgatttctgatttaaagctagcaattcgaagagctactctgaaaagatcatttactcctgtatttttgggaagcgccttgaagaacaaaggagttcagcctcttttagatgctgttttagaatacctcccaaatccatctgaagtccagaactatgctattctcaataaagaggatgactcaaaagagaaaaccaaaatcctaatgaactccagtagagacaattcccacccatttgtaggcctggcttttaaactggaggtaggtcgatttggacaattaacttatgttcgcagttatcagggagagctaaagaagggtgacaccatctataacacaaggacaagaaagaaagtacggttgcaacggctggctcgcatgcatgccgacatgatggaggatgttgaggaagtatatgccggagacatctgtgcattgtttggcattgactgtgctagtggagacacattcacagacaaagccaacagcggcctttctatggagtcaattcatgttcctgatcctgtcatttcaatagcaatgaagccttctaacaagaacgatctggaaaaattttcaaaaggtattggcaggtttacaagagaagatcccacatttaaagtatactttgacactgagaacaaagagacagttatatctggaatgggagaattacacctggaaatctatgctcagaggctggaaagagagtatggctgtccttgtatcacaggaaagccaaaagttgcctttcgagagaccattactgcccctgtcccgtttgactttacacataaaaaacaatcaggtggtgcaggccagtatggaaaagtaataggtgtcctggagcctctggacccagaggactacactaaattggaattttcagatgaaacattcggatcaaatattccaaagcagtttgtgcctgctgtagaaaaggggtttttagatgcctgcgagaagggccctctttctggtcacaagctctctgggctccggtttgtcctgcaagatggagcacaccacatggttgattctaatgaaatctctttcatccgagcaggagaaggtgctcttaaacaagccttggcaaatgcaacattatgtattcttgaacctattatggctgtggaagttgtagctccaaatgaatttcagggacaagtaattgcaggaattaaccgacgccatggggtaatcactgggcaagatggagttgaggactattttacactgtatgcagatgtccctctaaatgatatgtttggttattccactgaacttaggtcatgcacagagggaaagggagaatacacaatggagtatagcaggtatcagccatgtttaccatccacacaagaagacgtcattaataagtatttggaagctacaggtcaacttcctgttaaaaaaggaaaagccaagaactaactttgcttactgtgagttgactgactctaattgaatctgcgtggttttgatactttgatggattccagtggaataaattcaggctgctgaaacaagaaattctgagcccaggaagcgggctcttctttcttcaaaagaagcccttcttgttcatattcaggagcttctgttatattcaaaggtaattctatgtctatctcaactctattgattggttttatagttcattgaaaatcctcaaataaaatataattattactgaaatatgtttaatatttaaggggaaaagagactaatttcagttatacttttaagcttagaatgtatgttcatttccaaattttgtatcataagagttttcaacatagagaaaagctgaaaaaatgcaaagaataaccacatactttccatctaccttcctttgttaacgggttgtttatcatataataatttgttttgtcatatttgctttcactgtctattatctgtttaagtctcataactctatttttagtttgctgaagacttgaaagtgaatcgcatatatcatgacacttcttggagtgtcattaatgggcaggcttttctgttgaagagtggattccgtatgttcttcatagagagtgtttttcagattcttcattgggatattaaaatattagccaaatttctctctgttttatatatgtctgtttatttcagtttgtggtttctgcaaatttgtaactgcctctgttttaggagtataagtattacttccttgtggtctattgtgaagtaaaaagtagacccttgcatatactattcttgtttgtgttcatcttaatgtttttgtacagctaaatcaaatgtaatttatagagttagtttcatcaacctaatgaatgctagttaaatttgaattccttggaatttatcgtatattgtattcactgagattatgaagggacaaatgttaatcttttgtttccagaaaaagttgggctttcccaagcagttctattacccggttcagaattgcttcatccaaaaatcatctgatggtatagatggatcctagtccttttcattacctgatggtagaaataaaataattgattttaaa

SEQ ID NO: 5356 - DNA, 3609 bp, Homo Sapiens
  NM_024997
gaatcctgctttttttttttctttgagacacggtctcgctctgtcacccttgctggagtgcagtggtgcaatcacagatcacggcagtgtctaattcctgggctcaagtgaaccttttgcatcagcctcctgaatagctgagaccacaggatatgaaagatggcaagtccagatagaagtaaacggaagatattaaaagccaaaaagacaatgcccctaagttgccggaagcaagtagagatgctgaataagtcaaggaatgttgaagcgctgaaaacagcaattgggagtaatgttccaagcggtaatcagagtttcagtcctagtgtcataactaggacgactgaaataaccaaatgtagcccttctgaaaatggtgcatcctcattggactctaataaaaattcaatatcagagaaaagtaaagtattctctcagaattgcataaaaccagtagaagaaattgttcattcagaaacaaaattggaacaagttgtttgttcgtaccaaaagccaagtagaacaacagaatcccccagcagagtcttcacagaagaggcaaaagattcactgaacacttctgaaaacgattctgagcatcagacaaatgtaacaagatccctttttgagcatgagggggcttgtagtctaaagtccagttgctgtccacccagtgtattgagtggtgttgttcagatgccagagtctacagtaaccagtaccgtgggtgacaagaaaactgaccagatggttttccatttagaaacaaactccaattcagaatcacatgataaaaggcaaagtgacaacattttatgttcagaagactcaggttttgtgcctgttgagaaaacacctaatttggtgaattcagtcacttctaacaactgtgctgatgacattttgaaaactgatgagtgtagtagaaccagtatttcaaattgtgaaagtgcagactcaacatggcagtcatcacttgacactaataacaacagccattatcaaaagaagaggatgttttcagaaaacgaggaaaatgttaaacgcatgaaaacttcagagcaaattaatgaaaatatttgtgtaagtttggaaaggcaaacagcattcctggaacaggtcagacatttgattcagcaggagatctatagcataaattatgaactatttgataagaaactgaaagaattgaaccaacgcattgggaagacagagtgcagaaataagcatgaaggaatagctgataaacttttggcaaaaatagcaaaacttcaaagacgtattaaaacagtattattatttcaaaggaattgtttgaaaccaaacatgttatccagtaatggagcctctaaggttgcaaattcagaggctatgattttggataagaatcttgagtcagttaatagtccaattgaaaagtcttctgtgaattatgagccttctaacccttccgaaaaaggaagtaaaaaaattaatttgtcatcagatcaaaataagtctgtttctgaaagtaacaatgatgatgttatgttgatttctgtggaaagtcctaatttgacaactccaattacatcaaatccaacagataccagaaaaattacatcaggaaattctagcaattctcccaatgctgaagttatggctgtacagaagaaacttgattctataattgatttgacaaaagaaggcctatccaactgcaatacagaaagtccagtatcccccctggagtcacattcgaaagctgcttcaaactcaaaggaaacaaccccattggcacaaaatgcagtccaggttcctgagtcctttgagcacctgccacctctcccagaaccaccagcaccactacctgaattagtagacaaaacccgagacacacttcctccccagaagcctgagctcaaagtgaaacgggttttcagacccaatggcattgccctgacttggaatataaccaaaatcaatcccaagtgtgctcctgtagaaagctaccacctcttcctgtgtcatgagaactctaataataagttgatttggaagaagattggagaaattaaagctttaccactccccatggcctgtactttatctcagtttttagcttccaacagatactattttactgtccaatcaaaagatatttttggacgatatggaccattctgtgatataaaatctatccctgggttttctgaaaatcttacgtaaaaggtgtttaataatgatatactactttttttttcatatttgtttgtttgcaatgttactgtaatactatttgccattgtaaaaggccagctcagattgtgagccctttctattgggacagtcctcttctatatgttttaagtggccagtaatttaatgaatttctggtttgtattaaatatgtccttccaatggataagttctaaaacatacgctatcattggcccatgttgctgaggtgcattgtgaacaatacctttagtgactgtggaactgctgcttctatcagaagacctaggatacaagcagccactgtttcctccgttaacaatcagcttttagtaacctgctgtggtcagcatagctacaggaaaagtcagcccttgactgagggccagatcatccctggagtgcacctctactaagattttatgaaaagatgacatgttgggctgcatgataaaagttaattataaaaattaaaagatttttttttttgagatggaatattgctctgttgcccaggctggagtacagtggtcactgcaacctccatctccctggttcaagcaattctcctatgtcagcctcccaagtagctgggactatagtcacttgccaccatgcccggctaatttatttttagtagagatgaggtttcaccttgttggtcaggctggtctcaaactcctgacctcaggggatccacccgcctcggcctcccgaagtgctgggattataggcgtaagccaccatgcctggccaaaaattaaaagattttatgaaacgaaatggcttcccattctttctattcagcttctaagtgggctattcatttgtgctctcctcttttttgttttgttttgcactttgtcaatcatttggggaaatagcctggaggtctttcctgaatctgtttgtagacataataaaatttgtgtgctgtgtacacaaaaacataatgtatcttatgaaagcattacccaacctgtttgagttgagaatgcatttgtccacctttgatttgaggctttagtttgctgatttcctaaatgctaccctttgatcatttcctggccaccatcacaatactaaggggctcagatgtgtcttgtgcccacctcttcctgagaagagatggaagtggagctgtgactagtacaagcagcccaagaaactctgaacggggcccaatggaggcaaacttgagcaaataattgggatgataagaaacaaaaataatcccaactgtttgaaagttcgaaagaggggcattcttttctggtacatggtgagagttcaggctccagagactcaaaacggaatggttttccttggcattttgtaaatgctctcacatctgtagcaataaagctgttattttctgcaaaaaaaaaaaaa

SEQ ID NO: 5357 - DNA, 2153 bp, Homo Sapiens
  NM_025045
caggcctccatctccaggtccctctccgaggcttcctcgctgccagctgagtcgtgggcacctgagggactacctaccactgctcccggctgtgccatcgccaccagctcccagcctcctgctcagacccgggacagcccctccatggcccccgagatggaccagttttacaggtccaccatggccatctacaagagcatcatggagcagtttaaccccgccctggagaacctggtgtacctgggcaacaactacctgcgtgccttccacgctctgtccgaggcggccgaggtctacttcagtgccatccagaagattggggagcgtgccctgcagagccccacctcacagattctgggggagatcttggtgcagatgtctgacacccagcggcacttgaactctgacctggaggtggtggtgcagacattccatggaggcctgctgcagcacatggagaagaacaccaagctggacatgcagttcatcaaagacagccgccagcactatgagctcgagtaccgccaccgagcggccaacctggagaagtgcatgtctgagctgtggcgcatggagcgcaagagagacaagaacgtgcgggagatgaaggagagtgtgaaccggctgcacgcacagatgcaggccttcgtgtctgagagtcagcgggcggctgaattggaagagaagcggcgctatcgcttcctagcagagaagcacctgctactttccaacaccttcctgcagttcttcggccgggcccgggggatgctccagaaccgcgtgctgctgtggaaggagcagtctgaggccagccgcagcccgtcgcgcgcccactcccccggcctgctgggccccgcgctggggccgccctacccctcgggccgcctgacgcccacctgcctggacatgcccccgaggcccctgggagagttcagctccccccgcagccggcacggctccggctcctacggcaccgagcccgacgcgaggcccgcgtcccagctagagccagaccgtcgctccctgccccgcacgccgtcggcctcctcgctctacagcggcagcgcccaaagctcgcgctccaactcctttggcgagcgcccgggcggcggcgggggcgccaggagagtccgcgccctggtctcccactcggagggcgccaaccacacgctgctgcgcttctccgctggggacgtggtggaggtgttggtgcccgaggcccagaacggctggctctacggcaagctggagggctcgtccgcgagcggttggttccccgaggcgtacgtgaaggctctggaggaggggcccgtgaatcccatgacccccgtgacccccatgacctccatgacctccatgtcccccatgacacccatgaaccccgggaacgagctgccttccaggtcctacccactccggggcagccacagcctcgatgacctcctggaccggccgggcaactccatagcaccctcggagtactgggatggccagtcccgctcccgcaccccaagccgggtgccaagccgtgcccccagccctgcacctccacccttgcccagcagccgccgcagcagcatgggcagcacagcagttgccactgacgtcaagaaactgatgtcctcagagcagtacccaccacaggagctcttcccgaggggcacaaatccttttgccactgtcaagcttcgtcccaccatcaccaatgaccgctcagcacccctcatccgctgaggcggggtccgaggtcgtaccccacagtgcacctgcccaggggctgttcagagctggcaatggcagcgacagcagcaacagcagcagatccaagaagcgggtccctgagacggggggtggctgccctccccagaccaccccggcagcctgagcagctccaaagcactggcttggggtccgagaccttcaaagtaaagcaggcggaatggggggacaggacaatttctccccctccaggggctccaggactctccctggggggcccacctcttgccccctaacctctttcccccttttctgcccccgtggggaggagccccttgtacctgctccgtgcccaacacatgccctctctgtacatcttttgtaaatgatgagaaataaaggaagtggacgcaaagtgatgcggcaaaaaaaaa

SEQ ID NO: 5358 - DNA, 3123 bp, Homo Sapiens
  NM_025057
gcgcgccgtcagcggcgcgggtggggcattgccagctcggcgtcccggttcccttggagacagagctggccagggcggccgcggctgggcaactacgacagcggagcccctggggaagccaagatgccgtcgaagggaaaggacaaaaagaaaggcaagagcaaaggcaaagacacgaagaagttaataaaaacagatgaatctgtggtggacagagccaaggccaatgcctccctttgggaggccaggttggaagtcacagaactctctaggattaagtatcgtgatacttcacggatactggcaaaaagtaatgaggacttaaagaaaaagcaatgtaaaatggagaaagacataatgtcagtattaagttacctgaagaagcaggatcaggagaaagataatatgattgaaaaactgaaacagcaattaaatgaaacaaaggaaaaagcccaagaggagaaggataaattggaacaaaagtataccaggcaaattaatgaactagagggacagttccatcaaaaagccaaagaaattggcatgattcacacagagctgaaagcagtaagacaattccagaagagaaaaatccaagtggagagagagttagatgatctgaaagagaatttaagaaacacagagcggatacatcaggagactcttagaagactggaaagcagattttttgaagaaaagcaccgactagaacaagaggctgaaaagaagataataatgctagcagagagagcccaccatgaggctattgtgcaattgaacgatgctggaagaaatgtttttaaagagaatgattatcttcagaaagctctggcatatcacctgaaggaaactgacgctctacaaaaaaactcccagaagttgcaagagagtcatactttacttttacatcaaaaggagatcaatgatctgttggttaaggaaaagattatgcaacttgtccagcagagatcacaaatccaaacccttcagaagaaggtagtaaacttggagactgctctgagttacatgaccaaagagtttgagagtgaagttttaaaactgcagcaacacgcaatgatagagaaccaagcaggtcaggtagaaattgacaagctgcagcaccttcttcagatgaaggacagggaaatgaatcgtgtgaagaagctggccaagaacatactggatgagagaacagaagtggaaagattctttttagatgctctgcaccaagtgaagcaacagatcctaattagcaggaagcattataagcagatagcacaagctgctttcaatttaaaaatgagagcagcatgtacaggaagaacagaatatcccaaaatcagaacatttgatggcagagagcacagcaccaatagtgtgaatcaggatcttctggaggccgaaaaatggacacatattgaaggaaatgtggatattggagatttgacctgggagcagaaggaaaaagtattgcgattgctctttgcaaaaatgaatggctgtccttctaggaaatacaaccagagttctaggcctccagttccagactatgttgtttctgacagtggggaaacaaaggaatttggggatgaaagtaagcttcaagataaaatcttcatcacccagcaaattgcaatatcagactcttctggtgaagtggtgctacccactattccaaaagaacctcaggagtctgacacaggaaccttctgagaagcactgattatgacctcacagatgctgctggcagtcccttccttgcagaatccttgctcctgaatatctttaagaaaatttcttaaaggaaaagacaaaaaatttaactcaaaagttacctgtttgccatagaaattggtgtctcccctgaaggaggatcgagagccggtgaatgagaacattggcaaaggcactggaatggggacattcactcccacctaaaacagaacaaatccgtgtcatatcctaaggacaaaggaactctccatttagaaacacaaaggcatcagagaccagttttaaatacccaccttctaccctatcctctaccccatgaactttcattcctgaggaagaaatggggcaatgtgggaggtcatgggggcaatcttaaaccaatgactcaccattatttactgtttcctcttaggaaatagtaaatggatataagaatctcttaaaaattctgttcacgaacctgtccaacatccaccaagtgggcatatttccgagcagtggctccattggtggtgaagatggcagttccatttccatatgggttgttatttacaatctggatggcttcatccaatgtttctgtctccagaaccacaagaactggaccaaaaatctcctctttgtaacaggtcatatttggctgccaggagtgatgcatccagaaaagaagtcagctttttggattctgagtattttatgcttatttggtactttcacttactacacatcatttacgtggacaactttcatattactaatctcttttcatttcaaatcacctatttaaaaaaaaagtcctctctcaagtgtattccgtcttccaagttaccaatcatataaacaacttggaattcctatcaacaataaccacacttcctttaagggactgtatctttagttcatgacccatcatcagctgcctttttaatacctgaacgactagtttcatccaattgttatcaaaaagttacatgaaaatttattttttataaatccaatctatagtaaatataccaggataatttttctctttacagaaaccccatgctgttttctgtaacataaataatccattcttattcactcctttgcctcccaaatatgtctgtatgtttatattttgatatcaggtcgcagacactcaaaacatccttcaccatgcaattaatgtttgttgctgataaacggatttttctgtatggttctgtggcaagagatttcataatttctactgcacttacattcaacacttgatgattcactattatagtaaggatatatgaatttcaaaaaatgcctcataacctcaatttttaagtcatgttagctgagagactttcaaagttttgataaataaaaattgacaagtcaaaaaaaaaaaaaaaaaaa

SEQ ID NO: 5359 - DNA, 3142 bp, Homo Sapiens
  NM_025058
cccactgggctcctgcattaagcccggggttcgcagccgcagccgggatcgggcacccaggggcgggcgggcacggtagggccatggcagagggtgaggatatgcagaccttcacttccatcatggacgcactggtccgcatcagtaccagcatgaagaacatggagaaggaactgctgtgcccagtgtgtcaagagatgtacaagcagccactggtgctgccctgtacccacaacgtgtgccaggcctgtgcccgagaggtcttgggccagcagggctacataggacatggtggggaccccagctccgagcccacctctcctgcctccaccccttccacccgcagcccccgcctctcccgcagaactctccccaagccagaccgcctggaccggctgcttaagtcaggctttgggacataccctgggaggaagcgaggtgctttgcacccccaagtgatcatgttcccgtgcccagcctgccaaggtgatgtggagcttggggagcggggtctggcagggcttttccggaacctgaccctggagcgtgtggtggagcggtaccgccagagtgtgagtgtgggaggtgccatcctgtgccagttgtgcaagcccccaccactagaggccaccaagggctgcacagagtgccgcgccaccttctgcaatgagtgcttcaagctcttccacccctggggcacccagaaggcccagcatgagcccaccctgcctaccctctccttccgacccaagggccttatgtgcccagaccacaaggaagaggtgacccactactgcaagacatgccaacgcctggtatgtcaactctgccgggtgcggcgcacccacagcgggcacaagatcacaccagtgctcagtgcctaccaggccctcaaggacaagctgacaaagagcctgacatacatcctgggaaaccaggacacggtacagacccagatctgtgagctggaggaggccgtgaggcacaccgaggtgagtggtcagcaggccaaggaggaggtgtcgcagctggtgcgggggctgggggctgtgctggaggagaagcgggcatcactgcttcaggccattgaagaatgccagcaggagcggctggcccgtctcagcgcccagatccaggagcaccggagcctgctggatggctcaggtctggtgggctatgcccaggaagtacttaaggaaacagaccagccttgctttgtgcaagccgccaagcagctgcacaacaggattgcccgagccactgaagccctccagacattccggccagctgccagctcctccttccgccattgccagctcgacgtgggacgtgagatgaagctgctgacagagcttaacttcctgcgagtgcctgaggcccccgtcattgacacccagcgcacctttgcctatgatcagatcttcctgtgctggcggctgcccccccattcaccacctgcctggcactataccgttgagttccggcgcacggatgtgcctgctcagccaggccccacccgctggcagcggcgggaggaggtgaggggcaccagtgccctgcttgagaaccccgacacgggctctgtgtatgtgctgcgtgtccgcggctgcaacaaggccggctacggcgaatacagtgaagatgtgcacctgcacacgcccccggcacctgtcctgcacttcttcctcgatagccgctggggcgcaagccgagagcggctggctatcagcaaggaccagcgagcagtacggagtgttccagggctgcccctgctgctggctgctgaccggctgctgaccggctgccacctgagtgtggatgtggtcctgggcgacgtggctgtgacccagggccgcagctactgggcctgcgccgtagacccagcctcctacttggtcaaggtgggcgtcgggctggagagcaagcttcaagaaagtttccagggtgcccccgatgtgatcagccccaggtacgacccggacagcgggcacgacagcggtgccgaggatgccacagtggaggcgtcgccacccttcgctttcctaaccattggcatgggcaagatcctgctggggtcgggggcaagctcaaacgcagggctgacagggagggatggccccacagccggctgcacagtgcccctgccaccccgcctgggcatctgcctggactatgagcggggccgggtttccttcctggatgctgtttccttccgtgggctcttggagtgccccctggactgctcagggcctgtgtgccctgccttttgcttcatcgggggtggcgcagtacagctccaggagccagtgggcactaagcctgagaggaaagtcaccattgggggcttcgccaagctggactgagccttccaggcccctcatgcagacctggggtcctcctgggccctggcccccaaacctcttggcacccggttgttaccccctggcagcttctcccccaaactctcctaccatgtggccctgctccttctcccgtgtctgtcttcccacagttttctcttgacccaggggctctcttctgcccacctctctggatggcccccgttctctccattgcttgttagccaggcccccacccccactgagtctgccctatgacctgcctttggcatgttacccaagccatggagagagccccttctccatccctgtcctgtgccccccaggctgattgggagggagggcacctggaacactgggcatgatctccagctctgcccttgccctgccaagctccctgccctgttgatgctgaactacagccttgggacaggcaggctttggggctggacgctgtccaggcattcctggtgaggggaaggggaccctgtcatcctgctttatttatttgggtcccaacaccccgcagccgcatgccccttatgtccctcttctccctcttgcatgctttacctgtcccacacccatgccaatgtgccaagtctcccttggggacccagctgagtctgggtgttcccattgggttgggccaggcaaggcctctggtgcccgctgccgtccccctgcagtgggctctgctaggcctgtgctgagcaacagctgttattgtcatggtttataaacaataaactgtgatgccaggcacatctctgccttccctg

SEQ ID NO: 5360 - DNA, 1028 bp, Homo Sapiens
  NM_025075
gcggccgcgggcgccgccgcctcctcctccatggctgtttacccggctgcattgtgggagtttgacctccgccgccgccaaccgccgcctcagcttgcgccgccgccgccgccgccgccgccgcgcacgccatgggagccgtgactgacgacgaagttatacggaagcgtctcctcattgatggagatggtgctggagatgatcggagaattaatctgctagtgaagagtttcattaaatggtgcaactctgggtcccaggaagagggatatagccagtaccaacgtatgctgagcacgctgtctcaatgtgaattttcaatgggcaaaactttactagtatatgatatgaatctcagagaaatggaaaattatgaaaaaatttacaaggaaatagaatgtagcatagctggagcacatgaaaaaattgctgagtgcaaaaagcaaattcttcaagcaaaacgaatacgaaaaaatcgccaagaatatgatgctttggcaaaagtgattcagcaccatccagacaggcatgagacattaaaggaactagaggctctgggaaaagaattagagcatctttcacacattaaagaaagtgttgaagataagctggaattgagacggaaacagtttcatgttcttcttagtaccatccatgaacttcagcaaacattggaaaatgatgaaaaactctcagaggtagaagaagctcaggaagcaagcatggaaacagatcctaagccatagacaggctaattgcccaccactcccaggaatattgaaatagctacatgaccataatgtgtttaaaatgtggtatgctcttgagatatttaaagttttggcagtaaaatactctgtttttaagtatgaatgtatttcattcatatttcctctcacaaaggaaaatgacttcagtatagatttgtttttattaaaatgcattttttattcttaagtggtaggaagcaacatccaaaaatgcttaataaaatgcttttaagctgcaaaaaaaaaaaaaaaaaaaaa

SEQ ID NO: 5361 - DNA, 2408 bp, Homo Sapiens
  NM_025077
cgctcttacaccctgggcagcctcctccgatggcccactccccgcctctttcactttctggagatcactgagctctccatcctctctgggaatttaccgatgcccagaacgcccttctttcccccacacgaccctctcctagtctaactcctgggcgtgctttaagctcagctcaggcagcgtcaccttctctggaaagcccaaacccagccaccccactacccgctacccgcggcccacgctgatgaagacagcagaacacggaggccccgcgttcccgccgcgagagcaggagagaaagattacctcccgcgagctctagcgcgcccggctttccggcgcactccagggggcgtggctcgggtccacccgggctgcgagccggcagcacaggccaataggcaattagcgcgcgccaggctgccttccccgcgccggacccgggacgtctgaacggaagttcgacccatcggcgacccgacggcgagaccccgccccatccccgactgcctgaaccgcgccaggagacggaccgcaagtccagcgtacccacagacgactcaggcgggagacgagcggtgtcatggccgccgacagtgacgatggcgcagtttcagctcccgcagcttccgacggtggtgtcagcaaaagcacaacatctggggaggagctagtagtccaggttcccgtagtggatgtgcaaagcaacaacttcaaggagatgtggccatccctcctgctagccataaagacagctaatttcgtggctgtggacacggagctgagtgggcttggggacaggaagagtttgctgaaccagtgcattgaggaacgttacaaggccgtgtgtcatgctgccaggacccgttctatcctttccctgggcctcgcctgcttcaagcggcagccagacaagggtgaacattcctatctggctcaagtgttcaatctcactctgctgtgcatggaggagtatgtcatagaaccaaagtctgtgcagttcctgatacagcatggcttcaacttcaaccagcagtatgcccaaggcatcccctaccataagggcaatgacaagggtgatgagagccagagccagtcagtacggaccctattcctggagctaatccgagcccgccggcccctggtgctacacaatggccttatagacttggtgttcctgtaccagaacttctatgcacacctccctgagagtctgggaaccttcaccgctgacctgtgtgagatgttcccagcaggcatttatgacaccaaatatgctgctgagtttcatgcccgtttcgtggcctcctacttagaatatgccttccggaaatgtgaacgggaaaatgggaagcagcgggcagctggcagcccacaccttaccctggagttctgcaactatccttccagcatgagggaccatattgattaccgctgctgcctgcccccagcaacccaccgtcctcatcccaccagcatctgtgacaacttctcggcttatggctggtgccccctgggaccacagtgtcctcagtctcacgatattgaccttatcattgacactgatgaggctgcggcagaggacaagcggcgacggcgacgacgtagggaaaaacggaagagggctttattgaacctaccggggacacagacctctggggaagctaaggatggtcctcccaagaagcaggtctgtggggatagcatcaagcctgaagaaaccgagcaggaggtggctgccgatgaaactaggaacctgcctcactccaagcaaggcaacaaaaatgacttagagatggggattaaggcagcaaggcctgaaatagctgatagagctacctcagaagtgccagggagccaagccagtcctaacccagtgcctggggatggattgcaccgggctggttttgatgcctttatgacaggttatgtgatggcctatgtggaagtgagccagggaccgcagccctgcagctctggaccctggctccctgaatgccacaataaggtatatttgagtggcaaagctgtacccctcacagtggccaagagccagttctctcgttcctccaaagcccacaatcagaagatgaagctcacttggggcagtagctgatgcaacttccaccttgctctcaggtggaacagaggtattttgggtctctctagcctgaaatgtcatcctcaactgctactgagtttaggggagggggaatgtcttgacagacatcactgcattgccctggaccgcctcctttatcccagtgtttgaggtacaagtaagaaggctgaccagcacctgtaacactgactttatttttaagtctgaaaatgtcttgggaaagttttacaaaaaaaaaaatcaacagaagcaagttatgaaaatatttgaaaaaaaaaaaaaaaaa

SEQ ID NO: 5362 - DNA, 2565 bp, Homo Sapiens
  NM_025078
ggactgacgccgagacgcgcgcgggtcagcggcgcggggacgcggggcgctgggcgcggggctgggggcgcaggccccgaggccgcaggagcgcgcggagcggcgatgagcaggcggccggtggcccgcggggcgcggagcccgtgacagcctcggccaggcgggcgctgcgatggaggccgagggcctggactggctcctggtgccactgcaccagctggtgtcctggggcgcggccgcggccatggtcttcggaggggtggtgccctacgtcccgcagtatcgggacattcgcaggacgcagaacgccgacggcttctccacctacgtgtgcctggtgctgctggtggccaacattttgcggatactcttctggtttggaaggcgctttgagtccccgctgctgtggcagagcgccatcatgatcctgaccatgctgctgatgctgaagctgtgcaccgaggtccgtgtggccaacgagctcaacgccaggcgccgctcctttacagctgcagatagcaaggatgaagaagtcaaggttgcccccaggcggtccttcctggacttcgacccccaccacttctggcagtggagcagcttctcggactacgtgcagtgcgtcctggccttcacgggcgtggcgggctacatcacctacctgtccattgactccgccctgtttgtggagaccctgggcttcctggctgtgctgaccgaagccatgctgggtgtgccccagctttaccgcaaccaccgccaccagtccacggagggcatgagcatcaagatggtgctcatgtggaccagtggtgacgccttcaagacggcctacttcctgctgaagggtgcccctctgcagttctccgtgtgcggcctgctgcaggtgctggtggacctggccatcctggggcaggcctacgccttcgcccgccacccccagaagccggcgccccacgccgtgcaccccactggcaccaaggccctctgacagtggggaggacgaggatgtgggaccgccagccgcgggcactggtgggccctgacctccccgcggggagggtgggtgctgtggcccctgcaggtgtggcagagatggggcatgggcattggggtctccatcagcctctgtggggtgtctcagggtgggcagtgggggtggggctgggacgctgtttgtgctcagcggggacagccagggttgatctggccccgagggttttggatgtttttaggatgacataaaaagcaagtgttttccccatttcctcttatgaaacaccgtctgagcccaaggtacacattgggcggcctgcaggaacctgctccaggtggacacacgggccagcagccgcgaaccttgaagctggggtgaccgcaggagaccctgtaaggcctgtgagcggagccctcgaccccgtgacaccctggccagacaccctgcttggactggggtggcctctgctacccaggggtctggcacgggggagggctggggctttctctgcctggtacacacggaaaggcggctgtgcggacgcagggtcaccgtgctccgggttttctgacagtcggtgtttcctgggcctttggagtggctgcgaggcctgaacgccttgtggatccgctgtgtccagcccggctgagcatcgccagggctagctcatgctgctcttgtcagcctctggttctcctcgagtccttggggacgtggcagatgccagcgaccatcagacaacgtggaggccctcatgggcaatggctgagggggccgggctgaggctgtgcacatgcagtctgcacgccactcttgggctctgctggcggagatccccttccttctgggtgcagactgcacctccggatgcagttttgatgtccatcttccaggagagacggtctcgggtccagggagtggagggggctgcccctgccgtgcaggtcctggccgatggcgccttaccctgctgccctgggcttttggcctgaagcaaattcctgagtggggggtactggggcctgccgcatcctgtcctgtccactgcccacccccgtgtgctggctccctcacttctggctgcagtgggagccgccagtctgacccttgtcaccgcacgctctgcccccaccccgttgcaagaggtcacaccatgtcagcagccttgcactgaccgcagccggcccccaggcctcagagttctggatgcttccgtgcggctccaacaggcatcgtcttcccttccgcaggtggaggggccgcttcccgcaggcatctgagctctgtgccggggccgtggccatgggaagatgttccacgctgcctcctcctcgagttttcctcggaaacactcttgaatgtctgagtgagggtcctgcttagctctttggcctgtgagatgctttgaaaatttttatttttttaagatgaagcaagatgtctgtagcggtaattgcctcacattaaactgtcgccgactgcaggcgcagtgactgctgaatgtaccctgtgtggcgacttggaatcaataaaccatttgtggatcctgaaaaaaaaaaaaaaaaaaaaaa

SEQ ID NO: 5363 - DNA, 2737 bp, Homo Sapiens
  NM_025079
agtgcctcaccaccacctgcccgcgcgccgccccatataaaggcgccgccgtccttacccccaggactcggccccatggagacgccgccggccgccgctggcgcatggcgggtaggagctgtggcgcggggccttccaggagtctgagctatgagtggcccctgtggagagaagcctgtcctggaagccagccccaccatgagtctgtgggaatttgaggacagccacagccgtcagggcaccccaaggccgggtcaagagctggccgctgaggaggcctcggccctggaactgcagatgaaggtggacttcttccggaagctgggctattcatccacggagatccacagcgtcctgcagaagctgggcgtccaggcagacaccaacacggtgctgggtgagctggtgaaacacgggacagccaccgagcgggagcgccagacctcaccggacccctgccctcagctccctctagtcccgcggggtggtggcacccctaaggctcccaacctggagcctccactcccagaagaggaaaaggagggcagcgacctgagaccagtggtcatcgatgggagcaacgtggccatgagccatgggaacaaggaggtcttctcctgccggggcatcctgctggcagtgaactggtttctggagcggggccacacagacatcacagtgtttgtgccatcctggaggaaggagcagcctcggcccgacgtgcccatcacagaccagcacatcctgcgggaactggagaagaagaagatcctggtgttcacaccatcacgacgcgtgggtggcaagcgggtggtgtgctatgacgacagattcattgtgaagctggcctacgagtctgacgggatcgtggtttccaacgacacataccgtgacctccaaggcgagcggcaggagtggaagcgcttcatcgaggagcggctgctcatgtactccttcgtcaatgacaagtttatgccccctgatgacccactgggccggcacgggcccagcctggacaacttcctgcgtaagaagccactcactttggagcacaggaagcagccgtgtccctatggaaggaaatgcacctatgggatcaagtgccgattcttccacccagagcggccaagctgcccccagcgctctgtggcagatgagctccgtgccaatgctctcctctcaccccccagagccccaagcaaggacaaaaatggccggcggccttcaccttcatcccagtccagctctctgctaacagagagtgagcagtgcagcctggatgggaagaagctgggggcccaggcatccccagggtcccgccaagagggtctaacacagacctatgccccatcaggcaggagcctcgcacctagcgggggcagtggcagcagctttgggcccacagactggctcccacagacgctggactcactcccgtacgtctcccaggattgcctggactcgggcattggctccctggagagccagatgtcggaactttggggggttcgaggaggaggccctggtgagccgggcccaccccgagccccttacacgggctacagtccctatggatctgagctcccagccaccgcagccttctctgcctttggccgggccatgggtgctggccacttcagtgtccctgccgactacccacccgcgccccctgcctttccacctcgagagtactggtctgaaccatacccactgcccccacccacatcagtccttcaggagcccccagtgcagagcccaggggctggcaggagcccgtggggcagggcaggcagcctggccaaggagcaggccagcgtgtatactaagctgtgtggtgtgtttcccccgcacctggtggaggctgtgatggggcgcttcccacagctcctggacccccagcagctggctgccgagatcctctcctacaagtcccagcaccccagtgagtaagctgcctgtggctggcaagggcagcacccccagcctccaagggccgtcaggctgggctttgggccattgagcagcccattcccagccctgaggcccaccccagaggctggacagagggaggattcaagtcgggaaggaaacccacaaaccaaagatactgtaggattggttctggcccatgcagcacctctagctgtctgcctcagtgggtcagaagcgatcaccctgttgatacacattgtatctctgtagtttaaggagacgctgccggtaacggcgtcggtccgtggctgaggcccaaaccgtcttttctctcagagggtggggagggaggtgggggcagcagaggcctgggctgggtgccctgtgcacgccaccccacttccgccctacccctgggacgttggccttggctggctagttgggcaccgtgtgcctgccctccaagggcctcctctacgccaatgaggcctcatctgtgctctcgctgggcacgtggcttcatgtcagtaagcaagatgcttcttaataacccaccttctgccccactctattccttatcctgctgcccctgtaggggtcaagggccctccgtctacaccctcttcttctcctccatcctttattcagagtcatctcgcccttccccatgggtgggggaacctgtgtttgtttgtgtgcacatgtaaattttaaatattttaagcagaaagtccttacctcctgtaacacatcaataaagtacaatcattgtgagccctttcaaaaaaaaaaaaaaaaaaaaaaa

SEQ ID NO: 5364 - DNA, 2347 bp, Homo Sapiens
  NM_025080
gttccccgcgtgccaccaggaagctcgggccggccaagagcgtagactcttgagaggagtgagacaggtgcgcgccagccggccttcggggctttatgggaactgggccgtgcggcggtcccgccctcgtgcgcaggcgcagaaccgttgtgaccagagcggttgcgggctgagcggtttcgagccggcgtcggggagcggcggtaccgggcggctgcggggctggctcgacccagcttgaggtctcggcgtccgcgtcctgcggtgccctgggatccgccgacatgaatcccatcgtagtggtccacggcggcggagccggtcccatctccaaggatcggaaggagcgagtgcaccagggcatggtcagagccgccaccgtgggctacggcatcctccgggagggcgggagcgccgtggatgccgtagagggagctgtcgtcgccctggaagacgatcccgagttcaacgcaggttgtgggtctgtcttgaacacaaatggtgaggttgaaatggatgctagtatcatggatggaaaagacctgtctgcaggagcagtgtccgcagtccagtgtatagcaaatcccattaaacttgctcggcttgtcatggaaaagacacctcattgctttctgactgaccaaggcgcagcgcagtttgcagcagctatgggggttccagagattcctggagaaaaactggtgacagagagaaacaaaaagcgcctggaaaaagagaagcatgaaaaaggtgctcagaaaacagattgtcaaaaaaacttgggaaccgtgggtgctgttgccttggactgcaaagggaatgtagcctacgcaacctccacaggcggtatcgttaataaaatggtcggccgcgttggggactcaccgtgtctaggagctggaggttatgccgacaatgacatcggagccgtctcaaccacagggcatggggaaagcatcctgaaggtgaacctggctagactcaccctgttccacatagaacaaggaaagacggtagaagaggctgcggacctatcgttgggttatatgaagtcaagggttaaaggtttaggtggcctcatcgtggttagcaaaacaggagactgggtggcaaagtggacctccacctccatgccctgggcagccgccaaggacggcaagctgcacttcggaattgatcctgacgatactactatcaccgaccttccctaagccgctggaagattgtattccagatgctagcttagaggtcaagtacagtctcctcatgagacatagcctaatcaattagatctagaattggaaaaattgtcccgtctgtcacttgttttgttgccttaataagcatctgaatgtttggttgtggggcgggttctgaagcgatgagagaaatgcccgtattaggaggattacttgagcccaggaggtcaaagctgaggtgagccatgattactccactgcactccagcctgggcaacagagccaggccctgtatcaaaaaaaaaaaaaaaaagaaaagggaaaaaagaaagaaagcagcagcatgatcctgacatgacagatgtgggagacccacagcctgcagacactgtgggctggaaggtgggaagggaggggccggtggaggtggagctgtttgaaagtgacacagcagcagtagaagcagtggtgggcgaagcccaggtgaccctcagaacgttgcacaagaacatcagggaaaagaaccagaatcctttaaggaaaatgttcttcatgtatgagagactaaagtgatttttctaagaaagttcagcccttctctgacttacctggacatttctagatacttccaaaggaccctctgggaatccatagcttcctaatctggagatgggaggtcataagggagacgctgtggggttccttgaagtttcttgggttcacagaggagccccctcacttggtgttctcccgtgagccagcctccacctgccaaagacactctggtcctcgtatagtgagtaatggggctcagggcctctccaacaacagagaggagctgatgctgtagggctgaccccgtgacttcctgagtcctcaccctgtccagtgctttgagattcttcccacctccccatcctcaccagccggatcgggcgctgtgcagtgtggtcagcatggtgaagaaagtcatttcctcggtgggcagtattcctctttatctctcattacactggaaatgttatttctgctgtatcatccgtgctcaacgttttagtctgtcaggctcaccttctctctggaaagaatttgcttaacttgacattccatgtgccgctaataaaatatattttgaaagaataaaaaaa

SEQ ID NO: 5365 - DNA, 2360 bp, Homo Sapiens
  NM_025082
acccatgctgactctggagcgggccgggtggcgctgcccatccccggatccttcgtagatggagtcttgcttagtcgcccaagctggagtagtgtggctcgatctcagctctgcaacctctgcctcccagggttcaagcaattctcctgcctcagtttccagagtagctggaattatagtgcagattctgggaaagtgaactccacggaagactcagaaaccaagttctaattcagttgccatgaaaacttaaggtgagaggattgtcaaccagtgaaaaatacggaggaaaacactaacagaatatgatgaagaagccaagacttgggctgcttgcattacattaaccgaggtttacccgcagcgaggctgcctccaaagcatccggagtttgcaaccatcactgtccaccccgcgagctgcgatagtgcgagaactacaattcccgtggggctgtgcgggagcatcgcgagagttacattaactgtggcggcgggaaggcggagcctgcagctggctgggcggttaggagggcccggggccgagacgatggctgaccacaaccctgacagcgactccacgccgcgcacgctgctgcgacgcgtgctggatacagcggacccgcgcaccccgcggcgaccccggagtgctcgggctggagcccggagagccctgcttgaaacggcttcccccaggaagttgagtggccaaacaaggacgatagccagagggcgttcccatggagccaggtctgttggcagatcggcccatattcaggccagtgggcacttggaggaacagacacctcggacgctgctgaagaacatcctactaactgccccagaatcttccatcctgatgcctgagtcggtagtgaagccagtgccagcaccgcaggcggtccaaccctccagacaagagagcagttgcggcagcctggagctgcaacttcctgagctcgagccccccacaaccctggctccaggtctgctggcccctggcaggaggaaacagaggctgagactgtcagtgtttcagcagggagtggaccaggggctgtctctctcccaagagcctcaagggaatgctgatgcctcttccctcaccagatccctcaacctgacctttgccacacctcttcagccacagtcagtgcagaggcctggcttggcccgcagacctccagcccgccgagctgtagacgtgggtgcctttttgcgggatctgcgagatacttccctggctcctccaaacattgtgttggaggacacccagccgttctctcagcccatggttggctcccccaacgtgtatcactccctgccctgcacgcctcacactggggctgaagacgctgagcaggctgccggtcgcaagacacagagcagtgggcctgggctgcagaagaatagccctgggaaaccagcccagtttctggcaggagaggcagaggaggtcaatgcctttgctctgggcttcctgagcaccagcagtggtgtctctggagaagatgaagtagagcccttacacgatggagttgaagaggcagagaaaaagatggaagaagaaggtgtgagtgtgagtgaaatggaggcaacaggagcacaaggacccagcagggtagaagaggctgagggacacacagaggtgacagaagcagagggatcccaggggactgctgaggctgacgggccaggagcatcttcaggggatgaggatgcctctggcagggcagcaagtccagagtcggcctccagcacccctgagtctctccaggccaggcgacatcatcagtttcttgagccagccccagcgcctggtgctgcagtcttatcttcagagcctgcagagcctctgttggtcaggcatccccctaggccccggaccaccggccccaggccccggcaagatccccacaaggctggactgagccactatgtgaaactctttagcttctatgccaagatgcccatggagaggaaggctcttgagatggtggagaagtgcctagataaatatttccagcatctttgtgatgatctggaggtatttgctgctcatgctggccgcaagactgtgaagccagaggacctggagctgctgatgcggcggcagggcctggtcactgaccaagtctcactgcacgtgctagtggagcggcacctgcccctggagtaccggcagctgctcatcccctgtgcatacagtggcaactctgtcttccctgcccagtagtggccaggcttcaacactttccctgtccccacctggggactcttgcccccacatatttctccaggtctcctccccacccccccagcatcaataaagtgtcataaacagaaaaaaaaaaaaaaaaa

SEQ ID NO: 5366 - DNA, 2546 bp, Homo Sapiens
  NM_025084
cgctttagcagcagccgctgctgccgccgccgggggagaggcagcctattgtctttctccgcggcgaaggtgaggagctgtctcggctcggcccgcgggggagccccgggagccgcacggagatggaggaggacatctggacagtgagcaggaggcgcttcggcccatgccgaacatcccaggggacctggagagccaggaggccatggtggcatttttcaactccgctggagccagtgcccaggaggagcaaagggtgtgctgccagcccctggctcacccagtggcctcgtcccagaaaaagccagaggtagcggccccagccccagagagtgggggtgagtctgtgtttggggagacccaccgggccctgcagggggccatggagaagctgcaggaaagtacatcagccagggggcagtgtcagagacgcagcactgggagaggaggacatcgtcaggctggcccaggaccaggaggagatgaaggtgaacctgcaggagctgcggggcaggtgttgcagcttgtgggagaccacaaggaggggcatggcaaattctgaccattgcccagaaccctgctgatgagcccactctaggagccccaatagcccaggagcttgggtgtgctgacgagcagggtggtgagtagagccctcaggcggggtgggcaggcaggagcaggggaggctcacactgtgctcagattcccaccccccctccctctctctgaagatctttgtgaggtgagcctcactgatagcgtggaggctgcaccaggagaggacagggagggttctccccacgacaaccccactgcacagcagatccagcagctgcttcctgtaatgcaggactccccaggagcacccaggcatgggcagcaacccctgcatgccattctttttgggctcccgagaacagggagataaacaccaccatcatctgagagccgggaaggggaaggcgtaggtgtgggcgtggcaaggttcctggaaaagaggggctggaagggaaaggggaggaagatggagggagaagctagagcttcataggtagtgcctgggggctgtggcggtcctccccaccccacacacactggcctctctcatggcacccaggcagtccacccacagttcagaccaatgctcaactcccccggcttccctcttctgtggtcaccccatcttccaacccactggcccagggccacctcttgcttggggagccccacccaacagccaccaagcctgacagaaggaacactgcttgaaccaaaatggtgaagctgtaagggatggctggctggagtgagcgccagaggcccctctctgggcagtcagaaagcccagggtccactgaagggaccctggggaaggcagggagggcaggtagctagatgccactgcccatagacttataagtctaagaggggaacctcaactggttggcggggggctgcaggttgcataggtgaggctgggcccttcctgctgggaaaagcagaagagggagactccgtggcaggaaaggcaggtgggctcgctaggcggagctcagctgggccagcaagcactgtggtctccttggctgaatagcacaggtgacccctaggagcaacaggccaaggtccgtgagcctgctggctggcagtagtgcttcagtagtgctggccagggacccagccttcagtcacatgctagcagctgtgatggtacctgggagggagggaagggggctgtgtgtccttgcatggcctatgaagtgtgttgtgggataaccgtgtgtataggactctcaggcttttatcctagatcaccactggattgctgacagatagaggacgtgggaccgtgactatcacccctaatctgcagtggatttggctctcggcactcccaggctgggagctggatacctgccctggcagcatgactcagactgcatgacagtcacagactcgcctctgctcctgtggtccagtggccggacaccccctgggatggctcaaaggagtcaggacttggaagtggggacatcagggtagctgaaggaaatccacacacccagagcatctcggagttcagactctcagacctgaagtaggcgcccccgggactgggctaggagttggacggaatggaggatggaggacagcgagaagaaaggaagagaaatgcaaagtgtgggcagccgccaagagtgaaaatagagggaagtgtcatgcaagtgctggacagaaggcggcaggtgggacgagccccacagccccctcctcaaaaacgaccacctccaggactcagtgatccctggggggcaggctctgccagccctggctgccttgctgggcccttctgggactgtgcgctggacttggagccccttggagtatggcttttcacacgggcttctataccgcttcgactggaagatccacctccccactgccttttctcactcagatggggacaccgaggtccagaggaaaagacacctgtcaaatgtcacagatctgggaggggacttaagacttatcatgccaagagg

SEQ ID NO: 5367 - DNA, 5234 bp, Homo Sapiens
  NM_025090
agcgcagcgcgaacgctgggtgcggcgcctttaagcgtcgcggtgacacgtgtgtgaggcgccggaggcccggatggtgcgcgtgctgggccgcgggccgaaggagtcgccagggctgcgtaggcttgtggcgcgcccgcggagaggccggggctctgacgcccgctctgcggcttcggtgtttgaacaggccacagtccaggagcgcttacattcaggagctccgcgtagcacctgcccaaccaaactcagccctccgttaagatcctggttccatgccgcagtaggacagcaggcccaagtctgcacatcccagtgatgcaccatgccaatagtggataagttgaaggaggccctgaaacccggccgcaaggactcggctgatgatggagaactggggaagcttcttgcctcctctgccaagaaggtccttttacagaaaatcgagttcgagccagccagcaagagcttctcctaccagctggaggccttaaagagcaaatatgtgttgctcaaccccaaaacagagggagctagtcgccacaagagtggagatgacccaccggccaggagacagggcagtgagcacacgtatgagagctgtggtgacggagtcccagccccgcagaaagtgcttttccccacggagcgactgtctctgaggtgggagcgggtcttccgcgtgggcgcaggactccacaaccttggcaacacctgctttctcaatgccaccatccagtgcttgacctacacaccacctctagccaactacctgctctccaaggagcatgctcgcagctgccaccagggaagcttctgcatgctgtgtgtcatgcagaaccacattgtccaggccttcgccaacagcggcaacgccatcaagcccgtctccttcatccgagacctgaaaaagatcgcccgacacttccgctttgggaaccaggaggacgcgcatgagttcctgcggtacaccatcgacgccatgcagaaagcctgcctgaatggctgtgccaagttggatcgtcaaacgcaggctactaccttggtccatcaaatttttggagggtatctcagatcacgcgtgaagtgctccgtgtgcaagagcgtctcggacacctacgacccctacttggacgtcgcgctggagatccggcaagctgcgaatattgtgcgtgctctggaactttttgtgaaagcagatgtcctgagtggagagaatgcctacatgtgtgctaaatgcaagaagaaggttccagccagcaagcgcttcaccatccacagaacatccaacgtcttaaccctttccctcaagcgctttgccaacttcagcggggggaagatcaccaaggatgtaggctatccggaattcctcaacatacgtccgtatatgtcccagaataatggtgatcctgtcatgtatggactctatgctgtcctggtgcactcgggctacagctgccatgccgggcactattactgctacgtgaaggcaagcaatggacagtggtaccagatgaatgattccttggtccattccagcaacgtcaaggtggttctgaaccagcaggcctacgtgctgttctatctgcgaattccaggctctaagaaaagtcccgagggcctcatctccaggacaggctcctcctcccttcccggccgcccgagtgtgattccagatcactccaagaagaacatcggcaatgggattatttcctccccactgactggaaagcgacaagactctgggacgatgaagaagccgcacaccactgaagagattggtgtgcccatatccaggaatggctccaccctgggcctgaagtcccagaacggctgcattcctccaaagctgccctcggggtccccttcccccaaactctcccagacacccacacacatgccaaccatcctagacgaccctggaaagaaggtgaagaagccagctcctccacagcacttttcccccagaactgctcaggggctgcctgggaccagcaactcgaatagcagcagatctgggagccaaaggcagggctcctgggacagcagggatgttgtcctctctacctcacctaagctcctggctacagccactgccaacgggcatgggctgaaggggaacgacgagagcgctggcctcgacaggaggggctccagcagctccagcccagagcactcggccagcagcgactccaccaaggccccccagacccccaggagtggagcggcccatctctgcgattctcaggaaacgaactgttccaccgctggccactccaaaacgccgccaagtggagcagattctaagacggtgaagctgaagtcccctgtcctgagcaacaccaccactgagcctgcaagcaccatgtctcctccaccagccaaaaaactggccctttctgccaagaaggccagcaccctgtggagggcgaccggcaatgacctccgtccacctcccccctcaccatcctccgacctcacccaccccatgaaaacctctcaccccgtcgttgcctccacttggcccgtccatagagccagggctgtgtcacctgctccccaatcatccagccgcctgcaaccccccttcagcccccaccccacattgctgtccagtacccccaagcccccagggacgtcagaaccacggagctgctcctccatctcgacggcgctgcctcaggtcaacgaggaccttgtgtctcttccacaccagttgccagaggccagtgagcccccccagagcccctctgagaagaggaaaaagacctttgtgggagagccgcagaggctgggctcagagacgcgcctcccacagcacatcagggaggccactgcggctccccacgggaagaggaagaggaagaagaagaagcgcccggaggacacagctgccagcgccctgcaggaggggcagacacagagacagcctgggagccccatgtacaggagggagggccaggcacagctgcccgctgtcagacggcaggaagatggcacacagccacaggtgaatggccagcaggtgggatgtgttacggacggccaccacgcgagcagcaggaagcggaggaggaaaggagcagaaggtcttggtgaagaaggcggcctgcaccaggacccacttcggcacagctgctctcccatgggtgatggtgatccagaggccatggaagagtctccaaggaaaaagaaaaagaaaaaaagaaagcaggagacacagcgggcagtagaagaggatgggcatctcaaatgcccaaggagtgccaagccccaagatgctgttgtccccgagtccagcagctgcgcaccatccgcgaatggctggtgtcctggggaccgcatggggctgagccaggcccctcctgtgtcttggaatggagagcgggagtctgatgtggtccaggaactgctcaaatactcatctgataaagcttacgggagaaaagttctgacctgggatggcaagatgtcggcggtcagtcaggatgctattgaagacagcagacaggcccggactgagaccgtggttgatgactgggacgaagagtttgaccgagggaaggaaaagaaaattaaaaaatttaagagagagaagaggagaaacttcaacgccttccagaaacttcagactcgacggaacttctggtctgtgactcacccagcaaaggctgccagcctcagctatcgccgctgactgtgcccctgtggaaggaggtcggttccgagggggtgggtgtaagggtgaggtgggggtgtgtgtgccgtgtatgtgtgtaggggtgtggtggggtgtggcgtgtgtgtatgatgtatgtgggctgtgtatctggcacatgtgtgttgggtggtgtgtgtggtgtgggcgcgtctgtggtgtgtgtcctagtcacttggagaagggtgtgtgtgggatgcgtgtgtataagggggtgtgtgtgggatgcgtgtgtataagggggtgtgtgtagtgtgtgttgggtgtggggtgtgtacacctggcatctgtggcatgtgttctggtcacttggagaagggcatgtgtggggtgtgtgtgggatgtgggttgtgtgtatatctggcatgtgtcccagtcacttgcagaagggtgacttcttgccagccgcatcgagatgccatgcattgggttcctaggttggactcatacccgagggtggcagtgggaagattcgggtctcgtttctctctgtcaggactaccgtggtttgttctgcagcctcctggagacaaggcgtcccttcccgggagctgtcggtctggatctgagggagctctctgtgtgggctctgctgcgctgggagcctgtcacggtaggagctctcccggtaccagtgtccacagaccgcccaacacagaggctttgaggcttctctagatcggaacctctttggtgacattcccgaccagccctgcaagagaaacgacagtgtgtgtgtgagcagaggtggccgcacacctgctggacatctttgccaggctgtgccttctcatgtttcatagacagtggtctgtgctggcagaggctgctgcccctggttggggctatcaggagagtgggggatggtggccacatgtcccccaggtggtctcccggtgcatagctggtggctctgggcaagccatcccttgcttctcggggctgacgccaccgttgtgtccgagcccgccctcccctgcttcctcagcgggaccccttcatctgttggccttacctgtcctcagaaaggaagaggtgaccccacccagccacctctcccttttatggaactcgagagggtggccctactgtgcaccccttccttgtgagtagctctcaactgtcctggagagcagaggctatttggggtcggaggagccctcgatacctgcgaatacatctgctttccaggctgctgtttattctgagacgactgtgctgtagcttcccttgcagctgcaataacccgcaggtcttcactgaggtggaggctttggggtagaattctccatttattttactacttaatacaaaacatttatttttgaccagtcctgtggcttccattagcaatatgtttcctttcccaaatatgcaaatagtggctttgtttgctcaattttgtgagtgctttggaatttaaatgattgtataactcaagaagattacttttctatgttgctcaagctgtgcctgccaacttgtaacttaataaatacaggaaatcctcagagaa

SEQ ID NO: 5368 - DNA, 3270 bp, Homo Sapiens
  NM_025092
ggtggcgcggcagccgggcggctcctccttcctcccggccctggcgtggagcagagggacacaggttcccacgctggcgcccggcgaccgggtggggctgcggcccagcagctccatggaggacgccggcgaggaccccaccacgtttgctgcccactctctgcccagtgacccccgtctcttggccactgtgaccaacgcatacctgggcacacgagtgtttcacgacacgctgcacgtgagcggcgtgtacaatggggctggcggggacacgcaccgggccatgctgcccagccccctcaacgtccggctggaggcccctgcagggatgggggagcagctgaccgagaccttcgccctggacaccaacacaggctcctttcttcacaccctggagggcccccgcttccgggcctcccagtgcatctatgcgcatcgcacgctgccccacgtgctggctttccgagtgtccatcgcccgcctggccccggggagcgggcccatcacgctgctcctgcggtcagccttctccccagaaagcccagacctggacctgcatcagggtcctgacttccagggagcccggtacctgtatggccacaccctcacccctgagcagcccggggggccacagcaagaggtacacatgctgtggacaccagcacccccagacctgacccttggggaaggtgaggaggctaggacgtgggacttcctgacagcagtgggcggcagccaggctgaggctcaggcctgcctcactgaggccctgcagctgcaggccaggggagctctgtatacggctcacgcacaggcctgggcccagctctgggtagaatgtggcttggacgtggtggggcccctgcagctgcgccaggccctgcgtggctccctctactacctgctcagtgccctgccccagcccaaggccccaggatacatctgccatggcctcagtcctgggggcctctccaatgggagccgtgaggaatgctactggggccacgtcttctgggaccaggacctctggatgttcccgagtatcctgatgttccacccagaagccgccagggccatcctggagtaccgcatccgcacgctggacggggccctggagaacgcccagaacctgggctaccagggagccaagtttgcctgggagagtgcagactccggcctagaggtttgccctgaggacatttacggagtccaggaggtccacgtcaacggggccgtggtgttggccttcgagctgtactaccataccacccaggacctgcagctatttcgagaggctggtggctgggacgtggtcagggctgtggccgagttttggtgcagtcgtgttgagtggagccccagggaggaaaagtaccacctgaggggagtcatgtcccccgacgagtaccattcaggggtcaacaactctgtgtacaccaacgtcctggtccagaacagcctgcgctttgctgctgccctggcccaggacctgggtcttcccatccccagccagtggctggcggtggctgacaagatcaaggtaccctttgacgtggagcagaacttccacccggagttcgatgggtatgagcctggagaggtggtgaagcaggcagacgtcgtgctcctgggatacccagtccccttctccctgagtcctgatgttcgcaggaaaaatctggagatttacgaggctgtgacgtccccccagggccccgccatgacctggagcatgtttgctgtgggctggatggagctgaaggacgcagtgcgggcccggggcctcctggacaggagctttgccaacatggctgaacccttcaaggtgtggacggagaatgcagacgggtcaggcgctgtgaacttcctgacaggcatggggggcttcctgcaggcggtggtcttcgggtgcacggggttcagggtcacccgagcgggtgtgacctttgaccctgtgtgtctgtcggggatctccagagtgagcgtctccggcatcttctaccaggggaacaagctcaacttctctttttccgaggactccgtgaccgtggaggtcacagctcgagcagggccctgggctcctcacctggaggctgagctgtggccatcccagtcccggctctccctgttgccaggacacaaggtctcctttccccgctcggctggccggatacaaatgtcacccccgaagctgcctggaagttccagctccgagttccctgggaggactttttcagatgttagggacccgctccagagccccctctgggtcaccctgggttcctccagccccaccgagtcactcactgtggaccctgcctctgaataatcaggaacggtggcttcagagacgtctcttgggccttccctctggccacgtctgcacccacccctcctgggcaccctcctagcctgccatccctcacctgcagccaggctctcagggaaggtccatgctgcttggcctgagttcaaggctttctgcctgtagcctggactcccgtggacccccgtgggcaggtggcttccccgtggcatctccacaccgcctctgcctgcccctgtggactgatgctatcgcgcaccgtcccacgaccccaccccgagctcctgaagccggggtctgagcctgcatcacctctggcctctcatcccccactctcctgagagcagtggtcacagcggccggccgctctgctgagaaggcagagaggcaggctcaggcctcagcgtggacagcagggataaggggcacgaaggacggggactcggccccttcagaattcctcaggactctcaggtgcagctttgccaaaaaggaacttttcatgtcatgcagttgaggggacttagtctcaatcccaggctcctcttgactctgggcagctttaatcaggttgggcagcctctgctacagcgtggggtgggatggctctcttccctcagccacgccgcttgtgaggacagaggtgggggagtgggaagtgggaagtcaccagagaacaggagagggatttgagggcgagaccccagcgctctccacggaccagccagagggactggagccaggtgtgcatgggttcaaggccctggccctgcccagcctttgtcttgggagctcagccccagggttcggtcgtcagcagtttcccaagaacaagatgtgatggcatctgctgctgaaaccctgatgaggaccaggccccctgcaccgctgtcagcctgaggaattaaagctttggtgctggggagagcattattcctctgaaa

SEQ ID NO: 5369 - DNA, 2100 bp, Homo Sapiens
  NM_025125
gaagcgcgctcccggggaggtgttgcagccatggctacggcagccggcgcgacctactttcagcgaggcagtctgttctggttcacagtcatcaccctcagctttggctactacacatgggttgtcttctggcctcagagtatcccttatcagaaccttgggcccctgggccccttcactcagtacttggtggaccaccatcacaccctcctgtgcaatgggtattggcttgcctggctgattcatgtgggagagtccttgtatgccatagtattgtgcaagcataaaggcatcacaagtggtcgggctcagctactctggttcctacagactttcttctttgggatagcgtctctcaccatcttgattgcttacaaacggaagcgccaaaaacaaacttgaagttgtctgaaagcttgctctacacttttacattcatcctcacccttttttttgtggggtagaggaggtgcagtaatttactcagtgatctttctactttctagaaactgtccttcaaagctctttaagaccccctcgttagtcagttttttctcttatatgctctggttgagcttgaatagaccagttgttacttaagaaagaaacagagaaagattttagcttttcaatcctatttggcagaggacttcagctaccttcttacagtctttggctgtgttggtaccctcgtgtgctctgagctaagccacatactaaactgactttttggtttgtatacccttgctcccgccttctgatgaaaacaccttaccctcacaaccaccatctttcctctcctttccaaagctctttccaccttgctgcactaagataaagtgacactttcactatatgtcaattccacacacatttattaggtacctgtgaggtaggatcctatcctctcaaacttccatttctcatgctacagagaaagataaggaagatgagcaagtgcctggaatggggcaggctgagcagtcacacaggcatagaggcacgctgagaacctggaggggagactgcagagtgccttccctgatgctgcagccggaagtgatccttccctccacctggcccctgggacactgtgctctgcagtgtgcagggcctgatggcactgctagattgctccttcagctcagggccacagcttaaacagctttacctttcccctcagcacctgtcccactatcttgcacacaggtgctctaaccatgtttattgaacaaaggagggaaactgatttcactttcacttgttcattatcattccaatttttatgtgaaaatggcacaacccatttggggtaccctcaccccaaaataaaagcccaagtctacctttgactggtaccaccttttttgtggtttcgttggtgagaaacctttatctttttcatacctttctattctcaatcacttctccaaaagtgtgtctttccagctctgatttattcaaaacacaagcatttctgtttagagattctagcccatgggttatctggctagttattacctctcctgttcacttagttatactttattattgctcacaggctggggaggcagaatgactctgtcaccactaggagccattagggcttcttccctggaggactgcctgcttgctttctggggacactagccctcatttcccttctgtggtacagtggggcaaattatttgtattaagcaaacatttatgggaaacaacccgctcccgaaaacggagcccccaagtaaagcacaaccctgaaagattatgaactatgaattgtctctagtagagataaatttctgcaaacatatctcagtcttccctctgtttctctggtgattaagaagttcctttttggtaaggaaaaggatttttaaccatagagttaggcatcatggaaattcaaaccagatttcttaatacctggtcttcctcaaagagaaataataacagtaatagtggtgctgggaacaatatggcagattattgaatgaaattgattaacttgaataaaatgctgtgaattttctctaaaaaaaaaaaaaaaaaaaaaaaaaaaaaaaaagtaaaaaaaaaaaaaaaaaaaaaaaaaaaaaa

SEQ ID NO: 5370 - DNA, 3719 bp, Homo Sapiens
  NM_025130
atttagtccgcaacacctcgctccccaggaggtctgccagcctggactggaagcgtgcaacactccagagtcgtaggagtgaacactgcacaggaatctctgcccatctcaggagaaaccaaacttggggaaaatgtttgcggtccacttgatggcattttacttcagcaagctgaaggaggaccagatcaagaaggtggacaggttcctgtatcacatgcggctctccgatgacacccttttggacatcatgaggcggttccgggctgagatggagaagggcctggcaaaggacaccaaccccacggctgcagtgaagatgttgcccaccttcgtcagggccattcccgatggttccgaaaatggggagttcctttccctggatctcggagggtccaagttccgagtgctgaaggtgcaagtcgctgaagaggggaagcgacacgtgcagatggagagtcagttctacccaacgcccaatgaaatcatccgcgggaacggcacagagctgtttgaatatgtagctgactgtctggcagatttcatgaagaccaaagatttaaagcataagaaattgccccttggcctaactttttctttcccctgtcgacagactaaactggaagagggtgtcctactttcgtggacaaaaaagtttaaggcacgaggagttcaggacacggatgtggtgagccgtctgaccaaagccatgagaagacacaaggacatggacgtggacatcctggccctggtcaatgacaccgtggggaccatgatgacctgtgcctatgacgacccctactgcgaagttggtgtcatcatcggaactggcaccaatgcgtgttacatggaggacatgagcaacattgacctggtggagggcgacgagggcaggatgtgcatcaacacagagtggggggccttcggggacgacggggccctggaggacattcgcactgagttcgacagggagctggacctcggctctctcaacccaggaaagcaactgttcgagaagatgatcagtggcctgtacctgggggagcttgtcaggcttatcttgctgaagatggccaaggctggcctcctgtttggtggtgagaaatcttctgctctccacactaagggcaagatcgaaacacggcacgtggctgccatggagaagtataaagaaggccttgctaatacaagagagatcctggtggacctgggtctggaaccgtctgaggctgactgcattgccgtccagcatgtctgtaccatcgtctccttccgctcggccaatctctgtgcagcagctctggcggccatcctgacacgcctccgggagaacaagaaggtggaacggctccggaccacagtgggcatggacggcaccctctacaagatacaccctcagtacccaaaacgcctgcacaaggtggtgaggaaactggtcccaagctgtgatgtccgcttcctcctgtcagagagtggcagcaccaagggggccgccatggtgaccgcggtggcctcccgcgtgcaggcccagcggaagcagatcgacagggtgctggctttgttccagctgacccgagagcagctcgtggacgtgcaggccaagatgcgggctgagctggagtatgggctgaagaagaagagccacgggctggccacggtcaggatgctgcccacctacgtctgcgggctgccggacggcacagagaaaggaaagtttctcgccctggatcttgggggaaccaacttccgggtcctcctggtgaagatcagaagtggacggaggtcagtgcgaatgtacaacaagatcttcgccatccccctggagatcatgcagggcactggtgaggagctctttgatcacattgtgcagtgcatcgccgacttcctggactacatgggcctcaagggagcctccctacctttgggcttcacattctcatttccctgcaggcagatgagcattgacaagggaacactcatagggtggaccaaaggtttcaaggccactgactgtgaaggggaggacgtggtggacatgctcagggaagccatcaagaggagaaacgagtttgacctggacattgttgcagtcgtgaatgatacagtggggaccatgatgacctgtggctatgaagatcctaattgtgagattggcctgattgcaggaacaggcagcaacatgtgctacatggaggacatgaggaacatcgagatggtggaggggggtgaagggaagatgtgcatcaatacagagtggggaggatttggagacaatggctgcatagatgacatccggacccgatacgacacggaggtggatgaggggtccttgaatcctggcaagcagagatacgagaaaatgaccagtgggatgtacttgggggagattgtgcggcagatcctgatcgacctgaccaagcagggtctcctcttccgagggcagatttcagagcgtctccggaccaggggcatcttcgaaaccaagttcctgtcccagatcgaaagcgatcggctggcccttctccaggtcaggaggattctgcagcagctgggcctggacagcacgtgtgaggacagcatcgtggtgaaggaggtgtgcggagccgtgtcccggcgggcggcccagctctgcggtgctggcctggccgctatagtggaaaaaaggagagaagaccaggggctagagcacctgaggatcactgtgggtgtggacggcaccctgtacaagctgcaccctcacttttctagaatattgcaggaaactgtgaaggaactagcccctcgatgtgatgtgacattcatgctgtcagaagatggcagtggaaaaggggcagcactgatcactgctgtggccaagaggttacagcaggcacagaaggagaactaggaacccctgggattggacctgatgcatcttggatactgaacagcttttcctctggcagatcagttggtcagagaccaatgggcaccctcctggctgacctcaccttctggatggccgaaagagaaccccaggttctcgggtactcttagtatcttgtactggatttgcagtgacattacatgacatctctatttggtatatttgggccaaaatgggccaacttatgaaatcaaagtgtctgtcctgagagatcccctttcaacacattgttcaggtgaggcttgagctgtcaattctctatggctttcagtcttgtggctgcgggacttggaaatatatagaatctgcccatgtggctggcaggctgtttccccattgggatgcttaagccatctcttataggggattggaccctgtacttgtggatgaacattggagagcaagaggaactcacgttatgaactagggggatctcatctaacttgtccttaacttgccatgttgacttcaaacctgttaagagaacaaagactttgaagtatccagccccagggtgcagagaggttgattgccagggagcactgcaggaatcattgcatgcttaaagcgagttatgtcagcaccctgtaggattttgttccttattaagtgtgtgccatgtggtggggtgctgtctggggcatctgtttttcattttgcctgtggtttgtgttgcaggtgttgatagttgttttaaggattgttaggtataggaaatccagtaaattaataaaaaaattttgattttccaataaactttgcaaaaaaaaaaaaaaaaaaaaaaaaaaaaaaa

SEQ ID NO: 5371 - DNA, 4534 bp, Homo Sapiens
  NM_025132
ggcccggcccctcgaggcaccgcctttcaattagcactcgctgattggtcgctgctcgcgcggtctcctgggtgacgggaacgcggtagcctgcttggtggagaccgggtgcgcctgcgtacttcatagttcgcgtagcggctcgagcgtggagatgaagcgtattttctcactgctagaaaagacttggcttggcgcaccaatacagtttgcctggcaaaaaacatcaggaaactaccttgcagtaacaggagctgattatattgtgaaaatctttgatcgccatggtcaaaaaagaagtgaaattaacttacctggtaactgtgttgccatggattgggataaagatggagatgtcctagcagtgattgctgagaaatctagctgcatttatctttgggatgccaacacaaataagaccagccagttagacaatggcatgagggatcaaatgtctttccttctttggtcaaaagttggaagtttcctggctgttggaactgttaaaggaaatttgcttatttataatcatcagacatctcgaaagattcctgtccttggaaaacatactaagagaatcacttgtggatgttggaatgcagaaaatctgcttgctttaggtggtgaagataaaatgattacagttagtaatcaggaaggtgacacgataagacagacacaagtgagatcagagcctagcaacatgcagtttttcttgatgaagatggatgaccgaacctctgctgctgaaagcatgataagtgtggtgcttggcaagaaaactttgttttttttaaatctgaatgaaccagataacccagctgatcttgaatttcagcaggactttggcaacattgtctgctataattggtatggtgatggccgcatcatgattggtttttcatgtggacattttgtggtcatttctactcatactggagagcttggtcaagagatatttcaggctcgtaaccataaagataatctaaccagcattgcagtatcacagactcttaacaaagttgctacatgtggagataactgcattaaaatccaagacttggttgacttaaaagacatgtatgttatactcaacctggatgaggaaaataaaggattgggtaccttgtcctggactgatgatggccagttgctagcactctctacccaaaggggctcacttcatgttttcctgaccaagcttcccatacttggggatgcctgcagcacaaggattgcctatctcacctccctccttgaagtcaccgtagccaaccctgttgaaggagagctaccaatcacagtttctgttgatgtggaacccaactttgtggcagtaggtctttatcatctggctgtaggaatgaataatcgagcttggttttatgtccttggagaaaatgctgtgaaaaaattgaaagatatggagtatctgggaacagtagccagtatttgccttcattctgactatgctgctgcactttttgaaggcaaagtccagttacatttgatagaaagcgaaatcttggatgctcaagaagaacgtgagactcggcttttcccagcagtggatgataagtgccgtatcttatgccatgccttaactagtgatttcctcatctatggtacagatactggtgtcgttcagtatttctacattgaagactggcaattcgttaatgattatcgacatcctgtcagtgtgaaaaagatttttcccgacccaaatgggaccagattagttttcattgatgaaaaaagtgatggatttgtttactgtccagtcaatgacgctacctatgagattccagatttttcaccaaccattaaaggtgttctttgggaaaactggccaatggataaaggtgtatttattgcttatgatgatgataaggtgtacacttatgtctttcacaaggacactatacaaggagccaaggttattttggctggtagcaccaaagttccttttgctcataaacctttgctgctatataatggagagctgacctgccaaacacagagtggaaaagtaaacaacatctaccttagcacccatggctttctcagcaacttaaaagatacggggcctgacgaactgagaccaatgctggcacagaatttaatgctaaagaggttttctgatgcttgggaaatgtgcaggattctgaatgatgaggctgcctggaatgagttggccagagcttgtctacatcacatggaagtggagtttgcaatccgtgtttatcggagaattggaaatgttggcatagtgatgtccttggaacaaataaagggaatagaggactacaatcttttggcaggacaccttgccatgtttaccaacgattataacctggctcaggacttgtaccttgcatccagctgtcctattgctgccctggagatgagaagggatttacagcattgggacagtgctctacaactggcaaagcatttggccccagaccagataccttttatatcaaaagaatatgctattcagcttgaattcgcgggtgattatgtaaatgctttggctcattatgagaaaggaataacaggtgataataaggaacatgatgaagcttgtctggctggagtggcccagatgtccataagaatgggagacatacgtcgaggggttaaccaagccctcaagcatcccagcagggtccttaaaagagactgtggagccatattggagaatatgaagcaattttcagaagcggcccaactgtatgaaaaaggtctctactacgataaagcagcatctgtttacatccgctctaagaattgggcaaaagttggtgatcttctgccccacgtttcttctcctaagatccatttgcagtatgccaaagccaaggaagcagatggaagatacaaagaagctgttgtagcttatgaaaatgcaaaacagtggcaaagtgtaatccgcatctatctggatcacctcaataatcctgaaaaagctgtcaatattgttagagagacccagtctctggatggagccaaaatggtagccaggttttttctacagcttggtgactatgggtctgccatccagtttcttgtcatgtccaaatgcaacaatgaagctttcacactggctcagcaacacaacaaaatggaaatctatgcagatattattggttctgaagacactactaatgaagactatcaaagcattgccttatactttgaaggagaaaagagatatcttcaggctggaaaattcttcttgctgtgtggccaatattcacgagcacttaaacacttcctgaaatgcccaagctcggaagataatgtggcaatagaaatggcaattgaaactgttggtcaggccaaagatgaactgctgaccaatcagctgatagaccatctcctgggggagaacgatggcatgcctaaggatgccaagtacctgttccgcttgtacatggctctgaagcaataccgagaagctgcccagactgccatcatcattgccagagaagagcagtctgcaggcaactaccggaatgcacacgatgttctcttcagtatgtatgcagaactgaaatcccagaagatcaaaattccctccgagatggccaccaacctcatgattctgcacagctatatactagtaaagattcatgttaaaaatggagatcacatgaaaggggctcgcatgctcattcgggtggccaacaacatcagcaaatttccatcacacattgtacccatcctgacgtcaactgtgattgagtgtcacagggcaggcctgaagaactctgctttcagcttcgcagctatgttgatgaggcctgaataccgcagcaaaatagatgccaaatacaaaaagaagatcgagggaatggtcaggagacccgatatatctgagatagaagaggccacgactccatgtccattctgcaaatttcttctcccagagtgtgaactcctctgtcctggatgtaaaaacagtatcccatattgcattgcaacaggtcgacacatgttgaaagatgactggacggtgtgtccacattgtgacttccctgctctatactcagaattgaagatcatgctaaacactgaaagcacatgtcctatgtgttcagaaagattaaacgctgctcagctgaaaaagatttcagactgtacccagtacctgcgaacggaggaggaactgtgattggcacgtgcagatacaatgctcctgagaagacagcattttccacaggaggctgtttcctcccctggtggatttaagagacggtcctttctggatacagagaaatgaaacaacggtgacctctccaggtcggcactttccacttctgtacggtggcaaaacgatgacatgtaaccttgctgtttattgtactttgtatattatttcctcttcaaagtctttcttacacactctatcctctgcactgttaatagtaacctatgacataattgtaaatattcagctttttgctaacttttgtattttgaaaaactttaaaataaaattgttgactagaaaaaaaaaaaaaaa

SEQ ID NO: 5372 - DNA, 3859 bp, Homo Sapiens
  NM_025133
atcatagcaataagatttgtaaaacattgcaatggctgaaaaactgtctaacaggaaattttaagtgttattccaaagaagaacaagcctaaaaatgatgatgtgcctgcagatatggttgcagaagaatcaggtcctggtgcacaaaatagtccataccaacttcgtagaaaaactcttttgccgaaaagaacagcgtgtcccacaaagaacagtatggagggcgcctcaacttcaactacagaaaactttggtcatcgtgcaaaacgtgcaagagtgtctggaaaatcacaagatctatcagcagcacctgctgaacagtatcttcaggagaaactgccagatgaagtggttctaaaaatcttctcttacttgctggaacaggatctttgtagagcagcttgtgtatgtaaacgcttcagtgaacttgctaatgatccaattttgtggaaacgattatatatggaagtatttgaatatactcgccctatgatgcatcctgaacctggaaaattctaccagattaatccagaagagtatgaacatccaaatccctggaaagagagtttccagcagttgtataaaggtgcacatgtaaagccaggatttgctgaacatttctacagtaaccctgcaagatataaaggaagagaaaatatgttgtattatgatactattgaagatgcccttggtggggtacaagaggctcattttgatggacttatctttgttcattctggaatatatactgatgaatggatatatattgaatctccaatcaccatgattggtgcagcacctgggaaagtggcagacaaagttataattgaaaacactagagattcaaccttcgtttttatggaaggctctgaagatgcttatgttggatatatgacaataaggtttaaccctgatgacaaatctgcacaacaccacaatgcacaccactgcttagagattacagtaaattgtagccctattattgatcactgtatcatccgaagtacatgtacagttggttctgcagtatgtgttagtggtcaaggagcatgtcccaccatcaagcactgtaacatcagtgactgtgaaaatgttggactatatataacagatcatgcacagggaatatatgaggataatgaaatttccaataatgcgttagctgggatttgggttaaaaatcatggaaacccaattattagacggaatcatattcatcatggacgtgatgttggtgtgttcacatttgatcatggcatgggttactttgaaagttgcaatatacacagaaataggatagcaggctttgaagtaaaagcctatgctaaccctacagtggttcgatgtgaaattcaccatgggcagactggaggaatatatgtccatgaaaaaggaagaggacaattcatagagaataaaatctatgcaaacaactttgcaggtgtatggattacctcaaatagtgacccaacaataaggggaaattctatatttaatggaaatcaaggaggagtttacatctttggtgatggacgaggccttattgaaggaaatgacatttatggcaatgcattagcaggaattcaaattaggacaaacagttgtccaattgttcggcataacaaaattcatgatggccagcatggtgggatttatgtgcatgaaaagggacaaggagtaatagaagagaatgaagtttatagtaacactctagctggagtctgggtgacaactggcagcactccagtactgagaagaaaccggatacacagtggcaagcaggttggtgtttatttttatgacaatggacatggagtgctagaagacaatgatatctataatcatatgtattcaggggttcagataaggactggaagcaaccccaaaattagacgcaacaaaatctggggaggacagaatggtggaattctagtttataattctggtctaggctgtatagaagacaatgaaatatttgacaatgcaatggctggagtctggattaagacagatagtaatcctacactaagaagaaataaaatccatgatggaagagatggtggcatctgtatatttaatgggggtcgaggtctccttgaagaaaatgatattttcaggaatgctcaagcaggtgttctcatcagcactaatagtcatccaatcttaaggaaaaacagaatatttgatggatttgccgcaggtattgaaattacaaatcacgcaactgcaacactagaaggcaatcagatttttaacaaccggtttggaggcttatttttagcatctggtgttaatgtgacaatgaaagataacaaaataatgaacaatcaagatgccatagaaaaggctgttagtagaggccaatgtttatataaaatatcaagttataccagctatcccatgcatgatttctacagatgtcatacttgtaacaccacagatcgaaatgccatatgtgtgaactgcattaagaagtgccatcagggacatgatgtagagtttattagacatgataggtttttctgtgactgtggtgctggaacactgtctaatccttgtacattagctggtgagcctacacatgatacagatacactatatgactctgctccacctatagaatctaatacattgcagcacaactgaattccttccctaaagaaaaagtcctgccattgtaacatcataacttaaaacacttttttggaagaagatttaaaatatttgcccatgctacaggaagagactgtattaaaaatggatacacaaggtcagttgacactatgaagctcaagctaccaaaaagaaagtggcaatatattgactcaggatctcaaagctgggtgttttagcattactgtgtaaagacttgaagggacagaagtgaagaaaataagctgcaattttgtacagataccaacttctgaaaagctggtgtttttacaactagcattgaatgcagtccaatttgcagtagtaatcttcaatagacaagcagctttgttgctgcctttatggacatgggtaccaattgcttttgtaatatggtaaaaatgtgagctagcacttctgcgttccttttgattttttttttttaacatgtattcagattgagaaatatgattttaatgctttaatctcatgtagtttgtttttaatttcaagcaaaatcttactgtacttgaatgtgccctgttttgttagcacacctagacttgctgtaactgtactcatgtcccagtatgtacgttctttctatgaaagagaaaacactaatcttaaattatatccagcaatgtttctggtatcctttaagaaaagttaagactattatttccttcccttccctgtgcagcattcaaaatcacccctagaaaaagtgagtgttttaatgagacttcctaggaagggatgcactgtaaaacaaaagtattcttgtaactcagttttgtgaaaggtaaaaaactactatgttttaagtacactttagaaagtctcttcaaaacaaacagtcctgtatttgaactctgttcatagtttttttttgaacagtttagacaaaactgctggaaattaaaccaatttcctgcattaagctgagacaagtatatatacagccctatacagtttcatagcttttcctcccccatttatgtgtattggtgacagtgggtataaaacagcctgaaagtgtatgcatgtaccataacatctagacttaatatattgtggagtattcaataaccattatgtagaaggtagataagaattaaaagggtttaatttcctagaaagaaaatggaaaaatggtcatttttaaaaaataaagtttattagatcataaaaaaaaaaaaaaaaa

SEQ ID NO: 5373 - DNA, 7889 bp, Homo Sapiens
  NM_025136
actgacgcacgcatggccacgagagggcgggggaggagtgaagaggttgaggcgccccgcccagtcagcaaggttgcgcgtgccctgtgagaccgccaagatggtggtgggcgcgttccctatggcgaagctgctatacttgggcatccggcaggtcagcaagccgcttgccaaccgtattaaggaggccgcccgccgaagcgagttcttcaagacctatatctgcctcccgccggctcaactgtatcactgggtggagatgcggaccaagatgcgcatcatgggcttccggggcacggtcatcaagccgctgaacgaggaggcggcagctgagctgggcgcagagctgctgggcgaagccaccatcttcatcgtgggcggcggctgcctagtgctggagtactggcgccaccaggcgcagcagcgccacaaggaggaggagcagcgtgctgcctggaacgcgctgcgggacgaggtgggccacctggcgctggcgctggaagcgctgcaggcgcaggtgcaggcggcgccgccacagggcgccctggaggaactgcgcacagagctgcaagaggtgcgcgcccagctctgcaatcccggccggtccgcttcccacgcagtgcctgcgtccaagaaataggagcttgctggatggaacctgaatttggacatggcctatgtacctaacgtggccttcttcccgcaccacccttgcctgcgctggcccagtggaaaccaccaggatcttgatgcaacttggcatttggttacccctgctgataagagcagccgttacctgccactgggaccagcaggtgaagcgttgcaacatagccccctccatcatccttcacctcctatcccccactccaaaccaggacgacctgcaaggtcccagccagcaggacaccgtgggcactctggcaaatgaaaaaatggaacctggtcttgagctgaatcaatgtgttattgttacccccacccccggtttacctgatcagtgttaacctttactgggacactcatctgttacactggaacaccttcttctttttgtcaatcggcacagaccactgtaaggaaatgcagtgtgttgcagtggccttttctccccctcaccttctaaggtcagctctagctgagcatcagtgctctcttaaggaggaaaaaaacggtgcggctgggagcggtggctcacgcctgtaatcctagcaccttgggaggccgaggcgggcggatcacttgaggtcaggagttccagaccagcctggccaacatggtgaaactccgtctctactaaaaatacaaaaattagccgggtgtggtggggtgcgcttgtaatcccagctactcgggaggctgaggcaggagaattgcttgaacccatgaggtggaggttgcggtgagccaagatggcaccattgcaccctagcctgggcaacagagcaagacaccgtcttaaaaccaaaagttaaccgggcgtggtggtgggtgcctgtaatcctagctacttgggaggctgaggcaggagaattgcttgaacttgggaggtggaggccaagattgtaccactgtattccagcccgggtgacagagcaagactgtgtctcaaaaaaaaaaaaaaaatcctggctgggcacggtggctcacacctgcaatcccagcactttggaaggtcgaggtgggcgggtcatttgaagtcgggaggtcgggagatcgggagctcgagaccagcctgaccaatatgatgaaaccccgtctctactaaaaatacataaattagctgggcatggtggcatgcacctgtaatcccagctacttgggaggctgagacaggagaattgcttgaacccgggaggcagaggttgcagtgagccgagattgcgcaattgcatgccagcctgggtaacgagcaaaactccatcttaaaaaaacccacaaaaggtcctggcctgcagtcaatccctggaatcattgtaccttcccttgagacccgaagtggactattccaacagaaccccctcatccttgagtctatggcacaacccactggaatggcactacaggatcttttctgtgaatgtcctccaacccccctttccgtggtgggaaatttgatcctaactagggctaatccagcctgtccttcagcctcagccccctattttcctgtcctcagagtccctggagcttgtactgtgtggcatgtcctttcttgccttccccaccttgctcagtagcatttctcagggacccagtcgaatccaagcccatggattcaattgtcacatccttcatcttccatccgtgtctcctaatctgtgtgctcttgctttctttcctcggagctctggactgacccgacagcctgtcttcatgtagcagtaccctcctgcctccatagcccccggtcccacccccatcctaccaattaggccagcagttggccttaactgcttgattaatttccttggactgccataacagatcaccattgggtggtgaacttgatggcttaagtccaacaggaatttaattcacacagttctggagtccagaagtctgaaaccaaggtgctgacagggacacgctccctcttccagctcctggtgattccaggccttccttggctctgcctgcagcttcacatggccttttccctcttctattttgtctcttacaagaacacctgtcattgcatttagggcccatcttaagttcaggatgatcccacctcaagacccttaattacatctgaaaaaacactttttccaaataaactgtcataagcacaggtcctgggggttagtatgtggacttgtctgttgggggcacaccattcaagccattcagcccactattcctcctcaccccaagagtacgctggcgtccaggtgcagtggctcacacctgtaatcccagcactttgggagaccagggcaggagggatctctttgagcccaggagctgaagaccagcctgggcaacatagtgagaccccatctctacaaaagtaaaataaaaaattagccaggtgcggtgatgcatgcctgtagtcccagctacttgggaggctgaggcaggaggatcacctgagccctggaggtcgaggctgcagcgagccgtgatcgcgccactacactccagcctggatgacagagtgagaccctttctcagaaaaaaagtaccctgggactcctgccaaccccgcgggccatttggccttcctgctagctgagaggaacagtctaggaaccacccttttctactgggtttctcttccaggatctgccactgaagcgggagggggtgggtcccagtagcctgcagtctgtccttccgactgtagctctctcattagaggagctgcaaggtgatgaaggcatcctgaggctgtacctgaaccaccatgtggatctccacaatgggtacagagcttattaaaatcaggagggaaactgggagggttctgatggggagaggcccaagagtcaccctatgagctggggaaactaaggccaggggtaagcaaagggacttgccagagatgccacagccagtgaggggctgactgcccagggtggtgaagtagtaggggcagagtgagaggcttggattaccccagctgcagagtgaggagggagaggcgatggctgagcagaggctgggagggtgacgatctctacacagaggcccagaccatcccagaggtggcgttgatagtgggagaccctctctatcccctctcagagcagccccagatcacaccagagatcatagcattgtgtaaactgggtgaccattccacctgggcccgcttttgggaagctgcaggtgaaagtgggagggccgggctttccccgacttccatcctcacctcccttctctaaagaggtaaaactggcctggaccaagatctgcccagatagaaagccaagaaacaggttctgaaacttttcttttcttcttttctcttcttttttcttttcttttctttcggagacagtctagctccgtcaccctgacggagtgcagtggtgcaatctcggctcactgcaacttctacctcccaggctcaaccaatgatcctgcctcagcttccgaagtagctgggattacatgtgcccaccacccacgcctggctaatttttgtattttagtggagacggggtttctccaagttgcccaggctgatcttgaactcctgacctcaggtaatccgcccgcctcggcctcccaaagtgctgggattacaggcgtgagccaccgcgcctggcctgaaacagcatttcagttccttctggaagagggggagaagctggagcagagggaactgaccgagtgggtcctgagtgggctgtgtttaaaactgggagtgacccaggccagctcacgcctgtcatcccagcactttgagaggccaaggtggactgatcacatgatgttaggagatcgagaccagcctggccaacatggcaaaaccccgtctctactaaaaatacaaaaattagccgggcatgttggcacattcctgaatcccagctactcgggaggctgaggcacgagaattgcttgaacccaggaggtggaggttgcagtgagctgagatcgcgccactgcactccagcctgggtgacagagtgagactcaactcaaaaaaaaaaaacagaggtgggagtgtgaacacaggcaggagctccaattcctgaccccagcgctgtcctgacccagatggagtgctgctctcacatctcagagacttcgcactcagccctgccctgccctgccctgacaggcagccagtcatcgtgggcagcagggccatctacttcccccactgcggcgtcaggggtggccagagtgtgtggaagtggaaagaacgtcctctcaaaatgcaagaggccagaggatggttcactgctcgtgtgttctgctagctagaattctgtgtaccttgtaatttggggagaggggttagaataaatttgtaaatgaagctgattatcttcaagttgatgcattcttttttcatatttaaaaagtccttgggactgggcgcagtggctcacacctgtaatcctagcactttgggaggccagggtgggtggatcacctgaggtcaggagttcaagaccaacctgatcaacatggtgaaacctcgtctctactaaaaatacaaaaattagctgggcatggtggttgtgcacctgtaatcccacctactcgggaggctgaggcaggagaatctcttggacccgggaggcggaggttgcagtgagccgagatcatgccattatactccagcctgggtgacagagcgagacttcatctctaaataaataaataaataaataaataaataaggtccatgtcaaccttaggaaaaatatcctttatttattctttcactcaaaaaactcactgaggtggtcccgcaccgggacatggacccagtgtccttggtagggcgtctcccgcaaaaaaaaaaaaaataaaaaaaataaaacacaaaactcactgagttacccactctctgccccaccctatgctggggtcacagtggtgacagagacagccccagccctgccgtcaccgggtcttacagatgctcacacgtacatttcttttccagtgttccctgccccaccccatagttgtttaggaagcaggggctgggctgaatccggaatcctccctctggagtgactcaggactataaacccattcatcccagctcacaaaaccctgggaggtgccctgagggctgtgcccctcccatctcctggcaggccctgctgtccctcttgttggtttctctgtagggcaggccattgcctggagggaggcaaaatggctgagagccaccccaggagaaaatgggctttacataagccccaacctgatctattggctcacggagctactcctgggctggtcgctgtgttgctgagtggcaggcttgggtcccccagtggcaatggcttgtagctggagtcggtgtggacagagagaggagaagcatggcaactctgagtgtactgaggatcaactgcaccaggctccattctagtagctgggagccagttgggagcaagcagaggccctcactggagctgacattctagtgccagagaccggcaataaagaaggaaagagtggccaggcgtggtggctcacacctgtaatctcagcactttgggaggccgaggcgggccaatcccctgaggtcgggagttcgagaccagcctgaccgacatggagaaaccccatctctactaaaaatacaaaattagcagggcatggtggtgcatgcctgtaatcccagccactcaggaggctgtggcaggagaatcgcttgaacccgggaggcggaggttgcggtgagccaatattgcaccattgcactccagcctgggcaacaagaacgagactccatctcaaaaaaaaaaggaaaaagctaatccagcatagggtgatgaggactgagaggaatggaggcagggtaggagttccggacttacgggcaccgctgatctagacaggtgggcagggaggaggcagcgcttcagatggagggagataggaagagggctgtgagtatctgtgaaagtcctaggacagatgtggccttggcctgttcctggaacagcaagagtttctggctgtcagaatagagcagaggctcgctgaccaaggcctttgggccaaatcaaggggacccttgcttcctgtctttgtaaataaagacttattggaacccaggcgctcattcgtttgcatattttccacagttgcttttgcagtacagtgacagagctgagtatttgcacagagatcctagggctctcgtactctctggccctttacagaaaaagtttaccatcccctggaatagagtaagcgaggggagaagttaggtgagggggccaggcaagcaaaggctgccccttgccttgattggcacaactgtggaggtcatcccagctctggagccccaacaggatcactcaggcctctgcttccaccacatctggcttcagcttccccctctgtggagtcctccctccctccctccttccccataggaaatgaccccagtgctcagcagtaacccccactgcgcgcagatctcagaacctccacctcaatctacagccacgtgccacaataagaagcagagttttaggccaggcgcggtggctcacgcctgtaatctcagtactttggaagaccaaggtgggaggatcacttgaagtcaggagttcgagaccagcctgcccaacatggtgaagccccgtctctaataaaaagaatacaaaaattagccgggtgtggtggtgcacatctgtaatcccagctacatgagaggctgacataggagaattgcttgagcccaggaggtggacgttgcagtgagccaagattgcactactgcattccagcctaggtgccagagtgagacttggtctcaaaacaaaacaaaacaaaaaattagccaggcatggtggcacacacctgtagtcccagctacttggggggctgaggcaggaggatcgcttgaacccgggtgtttaaggctgcagtgaactgagatcaggccacagcacctcaacctgggagacaaagtgagaccctgtctcaaaaaaaaaaaaaagcagagtttatgtaatccatcgtgtgcatatttatacaataatttacaattctatgtattttaaaagtgtataattcatatattatgtgacacaatatataatggaatataaaatatatattttatgtcatgtgtaacataacatcatctattatatgtagtgtatgtgcttatgtacatatcattggaatgaaagtttcattaaataattacccttaaaaaaaaaaaaaaaaaa

SEQ ID NO: 5374 - DNA, 5441 bp, Homo Sapiens
  NM_025144
aattcctacttcctgaaactgaagccgtttatgagaaacagtgtgtttcagagaggctgtaccagaattaactctgctcagagttagatttgctggtcttaaagtacttttcctctttaagataaaagaagttcttctaaatcaggaatggattgaaatctaatgaaccgaaactttgggtacttcggccttcaaggggctcctttattgagaatcaatgtcttctcctaggtaattgatcaccctagacccagggacacccaattcatcgtaatcatcatgaataatcaaaaagtggtagctgtgctactgcaagagtgcaagcaagtgctggatcagctcttgttggaagcgccagatgtgtcggaagaggacaagagcgaggaccagcgctgcagagctttactccccagcgagttaaggaccctgatccaggaggcaaaggaaatgaagtggcccttcgtgcctgaaaagtggcagtacaaacaagccgtgggcccagaggacaaaacaaacctgaaggatgtgattggcgccgggttgcagcagttactggcgtccctgagggcctccatcctcgctcgggactgtgcggctgcggcggctattgtgttcttggtggaccggttcctgtatgggctcgacgtctctggaaaacttctgcaggtcgccaaaggtctccacaagttgcagccagccacgccaattgccccgcaggtggttattcgccaagcccgaatctccgtgaactcaggaaaacttttaaaagcagagtatattctgagcagtctaataagcaacaatggagcaacgggtacctggctgtacagaaatgaaagtgacaaggtcctggtgcagtcggtctgtatacagatcagagggcagattctgcaaaagctggggatgtggtacgaagcagcagagttaatatgggcctccattgtaggatatttggcacttcctcagccggataaaaagggcctctccacgtcgctaggtatactggcagacatctttgtttccatgagcaagaacgattatgaaaagtttaaaaacaatccacaaattaatttgagcctgctgaaggagtttgaccaccatttgctgtccgctgcagaagcctgcaagctggcagctgccttcagtgcctatacgccgctcttcgtgctcacagctgtgaatatccgtggcacgtgtttattgtcctacagtagttcaaatgactgtcctccagaattgaaaaacttacatctgtgtgaagccaaagaggcctttgagattggcctcctcaccaagagagatgatgagcctgttactggaaaacaggagcttcacagctttgtcaaagctgctttcggtctcaccacagtgcacagaaggctccatggggagacagggacggtccatgcagcaagtcagctctgtaaggaagcaatggggaagctgtacaatttcagcacttcctccagaagtcaggacagagaagctctgtctcaagaagttatgtctgtgattgcccaggtgaaggaacatttacaagttcaaagcttctcaaatgtagatgacagatcttatgttcccgagagtttcgagtgcaggttggataaacttatcttgcatgggcaaggggatttccaaaaaatccttgacacctattcacagcaccatacttcggtgtgtgaagtatttgaaagtgattgtggaaacaacaaaaatgaacagaaagatgcaaaaacaggagtctgcatcactgctctaaaaacagaaataaaaaacatagatactgtgagtactactcaagaaaagccacattgtcaaagagacacaggaatatcttcctccctaatgggtaagaatgttcagagggaactcagaaggggaggaaggagaaactggacccattctgatgcatttcgagtctccttggatcaagatgtggagactgagactgagccatcggactacagcaatggtgagggagctgttttcaacaagtctctgagtggcagccagacttccagtgcttggagcaacttatcagggtttagttcctctgcaagctgggaggaagtgaattatcacgttgacgacaggtcagccagaaaagagcctggcaaagaacatctggtggacactcagtgttccactgccttgtctgaggagctagagaatgacagggaaggcagagctatgcattcattgcattcacagcttcatgatctctctcttcaggaacccaacaatgacaatttggagccttctcaaaatcagccacagcaacagatgcccttgacacccttctcgcctcataataccccaggcattttcttggcccctggtgcagggcttctagaaggagctccagaaggtatccaggaagtcagaaatatgggacccagaaatacttctgctcactccagaccctcatatcgttctgcttcttggtcttctgattctggtaggcccaagaatatgggcacacatccttcagtccaaaaagaagaagcctttgaaataattgttgagtttccagaaaccaactgcgatgtcaaagacaggcaggggaaagagcagggagaagaaattagtgaaagaggcgcaggccctacatttaaagctagtccctcctgggttgacccagaaggagaaacagcagaaagcactgaagatgcacccttagactttcacagggtcctgcacaattctctgggaaacatttccatgctgccatgtagctccttcacccctaattggcctgttcaaaatcctgactccagaaaaagtggtggcccagtcgcagagcagggcatcgaccctgatgcctccacagtggatgaggaggggcaactgctcgacagcatggatgttccctgcacaaatgggcacggctctcatagactgtgcattctgagacagccgcctggtcagagggcggagacccccaattcctctgtaagcggtaacatcctcttccctgtcctcagcgaggactgcactaccacagaggaaggaaatcagcctggaaacatgctaaactgcagccagaactccagctcatcctcagtgtggtggctgaaatcacctgcattttccagtggttcttctgagggggacagcccttggtcctatctgaattccagtgggagttcttgggtttcattgccgggaaagatgaggaaagagatccttgaggctcgcaccttgcaacctgatgactttgaaaagctgttggcaggagtgaggcatgattggctgtttcagagactagagaatacgggggtttttaagcccagtcaactccaccgagcacatagtgctcttttgttaaaatattcaaaaaaatctgaactgtggacggcccaggaaactattgtctatttgggggactacttgactgtgaagaaaaaaggcagacaaagaaatgctttttgggttcatcatcttcatcaagaagaaattctggggaggtatgttgggaaagactataaggagcagaaggggctctggcaccacttcactgatgtggagcgacagatgaccgcacagcactatgtgacagaatttaacaagagactctatgaacaaaacattcccacccagatattctacatcccatccacaatactactgattttagaggacaagacaataaagggatgtatcagtgtggagccttacatactgggagaatttgtaaaattgtcaaataacacgaaagtggtgaaaacagaatacaaagccacagaatatggcttggcctatggccatttttcttatgagttttctaatcatagagatgttgtggtcgatttacaaggttgggtaaccggtaatggaaaaggactcatctacctcacagatccccagattcactccgttgatcagaaagttttcactaccaattttggaaagagaggaattttttacttctttaataaccagcatgtggaatgtaatgaaatctgccatcgtctttctttgactagaccttcaatggagaaaccatgcacatagaatacggcacagtctggtcctttggggcttgggcagggccgtgacacaggttctggccaatgatttgcaagaggaattgatcagtatcactttaagtcctgcatttaattggcagcacaagatcctgcagagcctctttccctctgccacagttatcaagaatgggtcaggagaccgctgcttctgggcataagtcctgcaaggaaagcaacatggaaaacagccccaactcacccatgagggatgaaaagcactcttgagaaaggcatgtgttgtttaagccattgagattttagagctttttgtcactatctgtcaagactgatactactggggcttttcctattgatttgggagttctttacatattaaaaaaatgtgagcctttgtgatacgaattcaatttgttttcctgtcttttgacatttgactttgcataaaagtttatctgtgcataattttatatgtagttgaattcatcaatcttttattttgtatggctttttggttatgtataatacttagatcctccttatactctgagtttctttctttttaattctcctgtatttccttctagtataattaaatctgtaaaaagtaagatggaagagtggtacagttttctttatccagtctgtccttgatgggcatttaggtagactggataaagaaaatgtggtacatatacaccatggaacactatgtgtattaatccactctcacactgctatgaagagatacctgagactgggtaatttagaaagaaaagaggtttaattaactcacagttccacatggctggggagacctcaggaaacttacaatcatggcagaaggcacctcttcatagggtagcaggagagagaatgagtgccagcaggggaaatgccagatgcttataaagccatcagatcttgtgagaattcattcactctcacgagaacagcatgggaaaaactgcctcaattacctcctaccaggtccttcccatgacacatgggaattatgggactacaattcgagatgagatttgggtggggacacaaagccaaaccatatcacaatgtaaccataaaaaagaatgagatcatgtcctttgcagggacatggatagagctggaggccattatttttagcaaactaatgcaagaacagaaaactaaataccacttgttctcacttataggtgagagctaagtgatgagagtaggtggacacatagagggaacaacacacaccagggcttatcagagggtggacagtgggaggagggagaggatcaggaaaaataactaatgggtactaggctgaatacctgggtgatgaagtaattcgcacaacaaacccccatgacacaaacctgcacatgtacccctgaacttaaaataaaagtaaaaaaaaaaaaaaaaaaaaaaaaaaaaaaa

SEQ ID NO: 5375 - DNA, 2257 bp, Homo Sapiens
  NM_025149
ataggcagaggccaccctccccgcctccccgcccgctgcgcgcccgccccgccccggctcactttaaaagtttactcgggccgggacgcagggcaaagcgagccatggctgtctacgtcgggatgctgcgcctggggaggctgtgcgccgggagctcgggggtgctgggggcccgggccgccctctctcggagttggcaggaagccaggttgcagggtgtccgcttcctcagttccagagaggtggatcgcatggtctccacgcccatcggaggcctcagctacgttcaggggtgcaccaaaaagcatcttaacagcaagactgtgggccagtgcctggagaccacagcacagagggtcccagaacgagaggccttggtcgtcctccatgaagacgtcaggttgacctttgcccaactcaaggaggaggtggacaaagctgcttctggcctcctgagcattggcctctgcaaaggtgaccggctgggcatgtggggacctaactcctatgcatgggtgctcatgcagttggccaccgcccaggcgggcatcattctggtgtctgtgaacccagcctaccaggctatggaactggagtatgtcctcaagaaggtgggctgcaaggcccttgtgttccccaagcaattcaagacccagcaatactacaacgtcctgaagcagatctgtccagaagtggagaatgcccagccaggggccttgaagagtcagaggctcccagatctgaccacagtcatctcggtggatgcccctttgccggggaccctgctcctggatgaagtggtggcggctggcagcacacggcagcatctggaccagctccaatacaaccagcagttcctgtcctgccatgaccccatcaacatccagttcacctcggggacaacaggcagccccaagggggccaccctctcccactacaacattgtcaacaactccaacattttaggagagcgcctgaaactgcatgagaagacaccagagcagttgcggatgatcctgcccaaccccctgtaccattgcctgggttccgtggcaggcacaatgatgtgtctgatgtacggtgccaccctcatcctggcctctcccatcttcaatggcaagaaggcactggaggccatcagcagagagagaggcaccttcctgtatggtacccccacgatgttcgtggacattctgaaccagccagacttctccagttatgacatctcgaccatgtgtggaggtgtcattgctgggtcccctgcacctccagagttgatccgagccatcatcaacaagataaatatgaaggacctggtggttgcttatggaaccacagagaacagtcccgtgacattcgcgcacttccctgaggacactgtggagcagaaggcagaaagcgtgggcagaattatgcctcacacggaggcccggatcatgaacatggaggcagggacgctggcaaagctgaacacgcccggggagctgtgcatccgagggtactgcgtcatgctgggctactggggtgagcctcagaagacagaggaagcagtggatcaggacaagtggtattggacaggagatgtcgccacaatgaatgagcagggcttctgcaagatcgtgggccgctctaaggatatgatcatccggggtggtgagaacatctaccccgcagagctcgaggacttctttcacacacacccgaaggtgcaggaagtgcaggtggtgggagtgaaggacgatcggatgggggaagagatttgtgcctgcattcggctgaaggacggggaggagaccacggtggaggagataaaagctttctgcaaagggaagatctctcacttcaagattccgaagtacatcgtgtttgtcacaaactaccccctcaccatttcaggaaagatccagaaattcaaacttcgagagcagatggaacgacatctaaatctgtgaataaagcagcaggcctgtcctggccggttggcttgactctctcctgtcagaatgcaacctggctttatgcacctagatgtccccagcacccagttctgagccaggcacatcaaatgtcaaggaattgactgaacgaactaagagctcctggatgggtccgggaactcgcctgggcacaaggtgccaaaaggcaggcagcctgcccaggccctccctcctgtccatcccccacattcccctgtctgtccttgtgatttggcataaagagcttctgttttctttggcttaaaaaaaaaaaaaaaaaa

SEQ ID NO: 5376 - DNA, 2390 bp, Homo Sapiens
  NM_025150
aaggaacatggccctgtatcagaggtggcggtgtctccggctccaaggtttacaggcttgcaggctacacacggcagttgtgtcgacccctccacgctggttggcagagcggcttggcctttttgaggagctgtgggctgctcaggtaaagagattagcaagcatggcacagaaggaaccccggactattaagatatcacttcctggaggccagaaaattgatgctgtggcatggaacacaaccccctaccaactagcccggcagatcagttcaacactggcagatactgcagtggctgctcaagtgaatggagaaccttatgatctggagcggcccttggagacagattctgacctcagatttctgacattcgattccccagaggggaaagcagtgttctggcactccagcacccatgtcctgggggcagcagctgaacaattcctaggtgctgttctctgcagaggtccaagtacagaatatggcttttaccatgatttcttcctgggaaaggagaggacaatccggggctcagagctgcctgttttggagcggatttgccaggaacttacagctgctgctcgacccttccggaggctagaggcttcacgggatcagcttcgccagttgttcaaggataacccctttaagcttcacttgattgaggagaaagtgacaggtccaacagcaacagtatatgggtgtggcacattggttgacctttgccagggcccccaccttcggcatactggacagattggaggactgaagctgctatcgaactcatcatccttatggaggtcttcaggggccccagagacactgcagagagtgtcagggatttccttccccacaacagaattgctgagggtctgggaagcatggagggaggaagcagaattgcgggaccaccggcgcattgggaaggaacaggagctcttcttcttccatgaactgagccctgggagctgcttcttcctgccacgagggacaagggtgtataatgcactagtggcgtttatcagggctgagtatgcccatcgtggtttctccgaggtgaaaactcccacactgttttctacgaagctctgggaacagtcagggcactgggagcattatcaggaagacatgtttgccgtgcagcccccaggctctgacaggcctcccagctcccagagtgacgattctaccaggcatatcacagatacactcgccctcaagcctatgaactgccctgcacactgcctgatgttcgcccaccggcccagatcctggcgggaactgcccctgcgactagctgactttggggctctacaccgggccgaagcctctggtggtctggggggactgacccgactgcggtgcttccagcaggatgacgctcacatcttctgtacaacagatcagctggaagcagagatccaaagctgtcttgatttcctccgttccgtctatgccgttcttggcttctccttccgcctggcactgtccacccggccatctggcttcctgggggacccttgcctttgggaccaggccgaacaggtccttaaacaggccctgaaggaatttggagaaccctgggacctcaactctggagatggtgccttctatggacctaagattgacgtgcacctccacgatgccctgggccggccacatcagtgtgggacaattcagcttgacttccaactgcccctgagatttgacctccagtataaggggcaggcgggtgccctggagcgtccagtcctcattcaccgagcagtgctcggttctgtggaaagactgttgggagtgctggcagaaagctgcggggggaaatggccactgtggctgtccccgttccaggtggtggtcatccctgtggggagtgagcaagaggaatacgccaaagaggcacagcagagcctgcgggctgcaggactggtcagtgacctggatgcagactctggactgaccctcagccggagaatccgccgggcccagcttgcccactacaattttcagtttgtggttggccagaaagagcaaagtaagagaacagtgaacattcggactcgagataatcgtcgccttggggagtgggacttgcctgaggctgtgcagcgactggtggagctacagaacacgagggtcccaaatgccgaagaaattttctgagcctttgtacatagatgaggcaaaaacctgcgagtgccatcagcctccctcacatgggagaccccaacccagctgacaatgtggagcccccagaacttcagaactgtgtggaggcacatgtctgctctcctgaaaagagacttggtttggggaccccacaaaaggagggaagctgtagctgtttggatgtgaggagaatgaaactacaaaaaaaaaaaaaaaaaaa

SEQ ID NO: 5377 - DNA, 3840 bp, Homo Sapiens
  NM_025154
agagcgtcttctcgggcctgggcggcgcagacgaggcctgaggcggcggcgcgaggcagttccagctattcttcagatgctctggattttgagacggagcacaaattggaccctgtatttgattctccacggatgtcccgccgtagtttgcgcctggccacgacagcatgcaccctgggggatggtgaggctgtgggtgccgacagcggcaccagcagcgctgtctccctgaagaaccgagcggccagaacaacaaaacagcgcagaagcacaaacaaatcagcttttagtatcaaccacgtgtcaaggcaggtcacgtcctctggcgtcagccacggcggcactgtcagcctgcaggatgctgtgactcgacggcctcctgtattggacgagtcttggattcgtgaacagaccacagtggaccacttctggggtcttgatgatgatggtgatcttaaaggtggaaataaagctgccattcagggaaacggggatgtgggagccgccgccgccaccgcgcacaacggcttctcctgcagcaactgcagcatgctgtccgagcgcaaggacgtgctcacggcgcaccccgcggcccccgggcccgtgtcgagagtttattctagggacaggaatcaaaaatggaaggcagcctctggagtgttctggtggctggggattggatggtaccagtttgttactttgatttcttggctgaatgtgtttcttcttaccaggtgccttcgaaacatctgcaagtttttagtcttgctcatcccactcttccttttactagcaggtctctccttacggggccagggcaatttcttttcgttcttgcccgtgttgaactgggcaagcatgcatagaacacagcgggtggatgacccccaggacgtgtttaaacccacgacttctcgcctgaagcagcctctgcagggtgacagtgaggcttttccgtggcattggatgagtggcgtggagcagcaggtggcctctctgtctggacagtgccaccaccatggtgagaatctccgagagctgaccactttgctacagaagctgcaggctcgggtggaccagatggaaggcggcgctgccgggccgtcagcttcggtcagagacgctgtgggacagcccccgagggagactgactttatggcctttcaccaagaacatgaagtgcgtatgtcacacttggaagatattctgggaaaactgagagaaaaatctgaggccatccagaaggaactagaacagaccaagcaaaaaacaatcagtgcggttggtgagcagctcctgcccacagtcgagcacctccagctggagctggatcagctaaagtcagagctgtccagctggcgacacgtgaagaccggctgtgagacagtggatgccgtacaagaaagagtggacgtgcaagtcagagaaatggtgaaactcctgttttccgaagatcagcaaggcggttctctggaacagctgctgcagaggttctcatcacagtttgtgagcaaaggcgacttgcagacgatgctgcgagacctgcagctgcagatcctgcggaacgtcacccaccacgtttccgtgaccaagcagctcccaacctcagaagccgtggtgtctgctgtgagcgaggcgggggcgtctggaataacagaggcgcaagcacgtgccatcgtgaacagcgccttgaagctgtattcccaagataagaccgggatggtggactttgctctggaatctggtggtggcagcatcttgagtactcgctgttctgaaacttacgaaaccaaaacggcgctgatgagtctgtttgggatcccgctgtggtacttctcgcagtccccgcgcgtggtcatccagcctgacatttaccccggtaactgctgggcatttaaaggctcccaggggtacctggtggtgaggctctccatgatgatccacccagccgccttcactctggagcacatccctaagacgctgtcgccaacaggcaacatcagcagcgcccccaaggacttcgccgtctatggattagaaaatgagtatcaggaagaagggcagcttctgggacagttcacgtatgatcaggatggggagtcgctccagatgttccaggccctgaaaagacccgacgacacagctttccaaatagtggaacttcggattttttctaactggggccatcctgagtatacctgtctgtatcggttcagagttcatggcgaacctgtcaagtgaagacactactcattatttttgtacatttttgtatatactgggacagcgtgaaacactggaatccttcatggacgagggcatatacaatgatgggacagtgccacactccttcaataaacgtggctgctggccagaggacgtgagcgtgtgacgggcgccttggcgccacctgttgggtgctcactgcctctgcaggtgcagaggggtcagcagcaggagaagcgtgttgaacacgtggctctcagacactccttgtttttaacgggaagctctttgcatttgcatttcctcaacaaaggagcaaagcagaggaagctgagagtctggcgtgttcttgacgctttggtcttcagccttgcactggctcttctaaaggacttttggagggcagataatttcatctgttaaatccaacacacatttctttcagggaaaaacaatgtcaccaaattttcagagttctaaactcctttccttcaagccggaattttccttttttcagcaccagtaggtactaagtctccagatggggaaataactaaaatgtgtttttctgctttgttcgctcttacttctgaggaaggtttccagtcaggactcgctgtaccaatatccatggaggaatatgggagcgtttcgctctccttgtaggctgaagtcagtctgacttgaaggggcctggtttggatctaagcaaacacccagatggggttctctggtctcagcaaggcttttcctgttgggagtcacagtaaacagaaacccaaaaatctcatcttgggtgttttcagggcttgttttgagttttgctgaatagggagcgcaagacgccctgagcctccctctcactggtggtgataagaggagccgtctggtgtgtcagggtcacgaacccgttacatttcaggacgatcctttttccttcagcagcatttcttactggctgtggctggaatctgccttttatcacagctgtcaccattctcacgtgattcttgtgagactctttttggttataattactatttaatatttagactattttactgagcagactttataaatgagatatctacaaggcacttaaagtgttacagatgttttaccttaagaattatttaagttgtgttgggttaagacagttttcagtgtaccgtaaatgttgtgttttcagaaaaagacaaaacgatggtgctgactggttttctgtatattgcacaacagtcctcaaatacactgatgtatgaaactattcatacatcaagcagcatttttttcactctccttagaattggaactatgcagttaaggcagataaaatgtacagatgtttcatatattacaggttacatatataaatcaaaatttcctatataaaactgatttgggatttggggtggaaatattttgaatattaatttatttttaaagatgcaagataggactttgtgcaatgtatttttgtaaatgcttttcaaaatatctgtctttggtagtgcttctgctgctgccaccaaattgataagatgctattaagaggtttaaataaagagttttaatttttaaaagggcatgggatataaacagtcaaaaaaaaaa

SEQ ID NO: 5378 - DNA, 1585 bp, Homo Sapiens
  NM_025155
gcggaagaggtgggctggtggaggcggggtcgagatggcggcgcctttgaggattcagagcgactgggcgcaagccctcaggaaggatgaaggggaggcctggctgagctgtcatcccccagggaaaccatctttgtatggcagcctgacttgtcaaggaattggcctagatggcatcccagaggttacagcttcagaaggatttactgtgaatgaaataaacaagaaaagcattcatatttcatgtccaaaggaaaatgcatcttctaagtttttggcaccatatactactttttccagaattcatacaaagagtataacatgcctggacatttccagcagaggaggtcttggtgtgtcttctagtactgacgggaccatgaaaatctggcaggcttccaatggagaactcaggagagtattggaaggacatgtgtttgatgtgaattgttgcaggtttttcccatcaggccttgtggtcctgagtgggggaatggatgcccagctgaagatatggtcagctgaagatgctagctgcgtggtgaccttcaaaggtcacaaaggaggtatcctggatacagccatcgttgatcgggggaggaatgtggtgtctgcttctcgagatgggacagcacgactttgggattgtgggcgctcagcctgcttgggagtccttgcagattgtggttcttctatcaatggagtggcggtgggtgctgctgacaactccataaaccttggctcccctgagcagatgcccagtgaacgggaggttggaacagaggccaaaatgctgctcttggcccgggaagataagaaacttcagtgcttgggactacagagcaggcagctggtgttcctctttattggctcagacgctttcaactgctgtacttttctctctggcttcttgctattggctgggactcaagatggaaacatttatcagctggatgtgaggagtccaagggctccggtacaagtcatccacagatcaggagcaccagttctatccctgctaagtgtcagagatggattcattgctagccaaggtgatggaagctgttttattgtccagcaagacttagactatgtcactgagctcactggggctgactgtgaccctgtgtacaaggtagccacatgggagaagcagatctacacatgctgtcgagacggtcttgtacgacgctaccagctttctgacctctgacttcttggaaagagcagtcccggttagtgaaaaggtttgaccctgatcaacaatgagcagaaacatcatcagtccttcccaaggaccatggcgtttaatgtcttgggcaccccttggaaatcacagaaagtcagctgtactggccgtgtggaactctcatcccaagacctactttgaactgagtaagaaggtcattgtgcccactgcatttgttccaacttctccttgtataaactcaccccagcaacacagggcaaggatatagatgcttttagtttgttcttaaaccagttttgttaaatgtttacaaggacctcagtactaaagcctgttctctggaggaaataaagaaaatatgtttggaggtgcctg

SEQ ID NO: 5379 - DNA, 6884 bp, Homo Sapiens
  NM_025160
cggagggagtaggagagcccggggcttcggcaggcagagcaggcctctcccctccgtcctcgtcgtcctcgtcctcctcctcctcctcctcctccgtggtggtagtggtgggacttcccccggctgctgcccctcccgccgccgctgctgtcccccaccgaagtagcggccacagcctggtcagcggcagcatcatgcaggccaatggggcaggaggaggaggaggaggtggcggcggcggcggtggaggaggagggggcggcgggggccagggacagaccccggaactcgcctgcttgtcggcccagaacggggagtcgtccccctcgtcgtcgtcgtccgcgggggacctggcccacgccaatgggctcctgccttccgccccctccgccgccagcaacaatagcaacagcctgaatgtcaataacggggttcccggcggggcggccgccgcatcctcagccaccgtcgcagctgcctccgccaccaccgccgcctcctcttccttggccaccccagaactgggcagcagcctcaagaagaagaagcggctctcccagtcagatgaggatgtcattaggctaataggacagcacttgaatggcttagggctcaaccagactgttgatctcctcatgcaagagtcaggatgtcgtttagaacatccttctgctaccaaattccgaaatcatgtcatggaaggagactgggataaggcagaaaatgacctgaatgaactaaagcctttagtgcattctcctcatgctattgtggtaagaggcgcacttgaaatctctcaaacgttgttgggaataattgtgaggatgaagtttttgctgctgcagcagaagtacctagaatacctggaggatggcaaggtcctggaggcacttcaagttctacgctgtgaattgacgccgctgaaatacaatacagagcgcattcatgttcttagtgggtatctgatgtgtagccatgcagaagacctacgtgcaaaagcagaatgggaaggcaaagggacagcttcccgatctaaactattggataaacttcagacctatttaccaccatcagtgatgcttcccccacggcgtttacagactctcctgcggcaggcggtggaactacaaagggatcggtgcctatatcacaataccaaacttgataataatctagattctgtgtctctgcttatagaccatgtttgtagtaggaggcagttcccatgttatacgcagcagatacttacggagcattgtaatgaagtgtggttctgtaaattctctaatgatggcactaaactagcaacaggatcaaaagatacaacagttatcatatggcaagttgatccggatacacacctgctaaaactgcttaaaacattagaaggacatgcttatggcgtttcttatattgcatggagtccagatgacaactatcttgttgcttgtggcccagatgactgctctgagctttggctttggaatgtacaaacaggagaactaaggacaaaaatgagccagtctcatgaagacagtttgacaagtgtggcttggaatccagatgggaagcgctttgtgactggaggtcagcgtgggcagttctatcagtgtgacttagatggtaatctccttgactcctgggaaggggtaagagtgcaatgcctttggtgcttgagtgatggaaagactgttctggcatcagatacacaccagcgaattcggggctataacttcgaggaccttacagataggaacatagtacaagaagatcatcctattatgtcttttactatttcaaaaaatggccgattagctttgttaaatgtagcaactcagggagttcatttatgggacttgcaagacagagttttagtaagaaagtatcaaggtgttacacaagggttttatacaattcattcatgttttggaggccataatgaagacttcatcgctagtggcagtgaagatcacaaggtttacatctggcacaaacgtagtgaactgccaattgcggagctgacagggcacacacgtacagtaaactgtgtgagctggaacccacagattccatccatgatggccagcgcctcagatgatggcactgttagaatatggggaccagcaccttttatagaccaccagaatattgaagaggaatgcagtagcatggatagttgatggtgaatttggagcagacgacttctgtttaacttaaaattagtcgtattttaatggcttgggatttggtgcaaacaaacatgattgatagctggacagacatgctcgtcatgaaaaaagaaccatttctgaagcccgattggggccaaacatttacaccttgcttcatagtaaccagttgagatgaagcacgtcgttagaacgttgttggacaccatgttgaattattcccccatcggttgtgaagaactgtgctacattcaggcttacccattgaactcagtatatatatttttttccttcctgtcttttgtctggcaggataccattcttgttgctcttctgtgtaatgaagtttaaatgcttgtttggaaaactttatttaacagtttagaaggcttgatagaaagagtgcattagtctgaagagtatacattggataggaaagaatttccttcttttgtttctccaaatctttccgccttatttagcttgagatctttgcagcttggttcatggattctagccttgcccgttgcgcagtatatactgatccagatgataaaccagtgaactatgtcaaaagcactctcaatattacatttgacaaaaagttttgtacttttcacatagcttgttgccccgtaaaagggttaacagcacaattttttaaaaataaattaagaagtatttataggattaaagtgacttcatttgtatacatttggaatctaaaccagcttaaaaacagtttcctcaatgacttagatacacagtataactgatgctcttctggaataccacatgagacatggtcagaaacagtgcttggaaggacattacacaagaaattcagagtaatgctttgaagatttccccccttttgttttattcctgaaggaacatcagtacccgatcttgaagaaattcaagattcaaaaagaattttaaatacaccaacatgagacatcagtagtcagttggttttcagtaaagcttgttccaagttgttctcaacttaggaagtaattttggtgtgatctagcaaaagagtaggaatcagcgatacaaccactttggaagtttatagtataattgaaattattagaagaattcagcaggttacagacatacttaaactgggattaaaacctcatagtcatttttcttaattgcccttaatattttgacatatagggatacataaatttaaagaatattttttctcagttttttcagatattgccatactgaacctcattctaaactggtgctgtggatagtctttccctctcccctcctgttttagtttaaggaaaggtttccttcatggaaaagcacttttaattttgagaatttcacatttaaaataagccaaaagcctgatgttcacattgtgcttttaaactccgtaacagctgaatacaacataacatagtctcccttgaaattccctccctttttcagtagaggataaatagggtgactccagctgttggaatgagaatggggatacccccaaaataagattctggtgaagaaaaagtcttgtactaagttcccctttaggtgtagccaagtctataatataattatgatcatgaatagactccagaatccacaaagagaagagggcttggatgtcaaaaattcttccattgtggggtaggtggtcggggatgggagaaagggaaaagtcagggaaggggagaagaaagaaaaacacatttggccttaaaatagcatgcattctcccagaagcccatagtaaagaaaatgacagatcgtggtcagcagactcttatcaaattggtatgtaaaagatttcttcaagctccattttgcagagaccaccacttagagaatcaaaaaattcctgttttgatacttctaagttaaaatatatgttacagtttatctggtacttcatttttcttaactaaaattactttttactttaagcttgaataaaaatcttcattggtaactgtatgtaattaagtggcaacttctctttacctcagtatagttaaaaaccattcatattttaagtgattcatgtataccctgaagccgttaatacaccccagtctctatggtaacatcactaaatgtgggcatagaaactccacagctgtttacaaatttggttacagtgtgctacggtgcatttgtaacactcagatttgtgcccattcaggggcaatttggcactcagattctactctacttcacctaaccacccctagatctgagttttcagagtgcttctgaagtacagtttaaaaacactttttaaaaagtggagtaaaagtgaggcacattttacaagaacataactcctattaaaacggagtaacaactatgcaaaggtttctatagcagctaggtgagtttgttttccgggtctgtcttaactggcagcttcctgtacatactggtacttatttgctgtaaacgtctgtttcatacatttgccatgcagtgactgtgctcgaaaggtgaaatcaatggtaaagaagcctaggattttatggtatgagaaactgatcgcaggattttctgatccatagctattaattgaaaacttctgatagtgctgtaggctctatagtaggcttaagagtgagtcttatactatgaagccagccacaagatactaacaaatgtataaattgaaaagtaccaatactttttgcacatagatcaaaatagagtggagaatttgggctccaaaaatcaggttagtaggctcatttccatgtgcttaaaaatgtttttgttgttatgcattgattaagggctagagcaaatataaaattaaatgtctttttcctccaaataattggttattaatggtaaaatgttggacttggggattactgagattagtatgtgggtagtaaagaattggagtgggagttagtggggagggatgacaaagcttcagctttggtttttgtatttttttagtcttcataacagctacatttctgttgctcttattggccagataaatgtgttatattaaaccaggtaagtattttaaacagagaacattttatttgcatatatccctacaaattggcccattttattgggtggggggataaaaaagggattccctaactttaaataatcagaatatcctgcaattgaaaggagaaaaaaatccaattttgtcagtattttcttagtctgaaaaaaacagcagtagtaatctggtgaatgttattattaggagtgttctgcctctacagtggcatattccatgacattaatagaaaacccttctttcccacccctccccatcttgacattttcttttttaggatgttggttcctgcaaacaagaactgaccctatcacctctgcctcacagtgggtaaatatatcatacatctcttgaaagggaaaatatccatgtcagtttctttcacagtagaagaatggctgcttttgaatggggaggaaagaagacatttttcttaatatcctttttgtcccatctctaaaatgtataaatattttgatttggttttactttaatttctcattcataatttcgcaactgtccttttgggttgccctccaacacattacttccatttcagaaaccatatctgatttaatataaactgctaacttaagaagaggtgaatttgcatttacacttagacactttctaaaaacagggtgaacttaattgaaatttttcagtgttgttaagctattgttatagtagctgccctatagttacaaaaataaaaactataaaaacccatcccctatctacttaatccagatagcctggatttaacaaaaccaatagtataaaaatgtgtgtgtgtgttctgtgtgtgtgtgagagagagagtacttgattcattaaaaagtcctggaaacagctgttctaggatcttgtcatttttactgaaagtctcgtgcacatgtgaagtgccctctgagtttaaggtttggttaatactggtatatttttataagattgaaattgtgtccccatctttaacttaaacattttcattatcagggtcaatgtgctagaactgaattgtaacatttttaggcacagatggaaaaaaatgttattggctccttgaaaatgtgtgtgtgtggcgaggggaatagatccacaaaagcatgtatgtacttacaaaccaagctgtagagatcaagaaaagaacttaagtgttgatctcaagatttctaaattgtcaagatttacatggcattgtggtggaactagttaacacttagagcttttggtatgtaataactatttgctatggactgattaaatgtttcaaaagattgtgttcttcaattttggtgggttttgatttttgtttttttaactgcctctcagattatatttacttagtttaaatttctttgctttattcattaaagtataaaaacttcaggtctctgatatttattttcacttgtttactaattatttacaaaacaccctttgttgacttttattttataaatgtgtaatgtattaaacgtctttaaatttttgttcaactgaaactacattaactttgatttgctttactgggatttttttttaaagacactttttccatgtcagtgcgcagcacttaaccagtcgtttgtattccctttctttcaatccaataaacagaatgaatacctaaataaaaaaaaaaaaaa

SEQ ID NO: 5380 - DNA, 3681 bp, Homo Sapiens
  NM_025161
gccgtaaagcgctccgaggcggagccgccgccgcgcggccggggcttctcactctgacgggcccgcgcgcacgatggccggcgccgcgccgcgggtccgctacctggcgggcttctgctgccctctcgggggcctggcggcgggcaagccccgcgtgctgtgccatgaggcagaggtcttcctgtccaccgggagcgagctcgtctacgtgtacgaccaggagggcgggctgctgaccgcggcgttccggttccccgaccaggtgtggcacctggagctgctggcgccgcgcaggttgctgtacgcgctgtgcgcccggaggggcctctactgcctgtcgctggaccacccgggcaggagcaggtctacgagccaggatgacagggacagcgaggacggtgaccagccttcccccgtgatccctgtggaccccgatgcctgcatccttcccgatgctgcgctgtgcgcgttcaccttgctggacagtgtgctggtcaccctggtgcagggccctgcccgatggaagatgcagctgtttgagcagccctgtcctggggaggacccccggccaggaggccagatcggtgaggtggagctgtcctcctacacgcccccagccggggtcccaggaaagcctgcagccccccacttccttccagtgctgtgctctgtgtcaccatcaggctccagggtcccgcacgacctcctcgggggctccgggggcttcacgctggaggacgccctcttcgggctcctctttggagctgatgccaccctcctgcagtcacctgtggtcctctgtggtctccctgatggccagctctgctgtgtgatcctgaaggccctggtcacctccaggtcagcccctggtgacccaaatgcccttgtcaagatcctccatcacctggaggagcccgtcatcttcataggggccttgaagacagagccacaggctgcagaagctgcagagaattttctgcctgacgaggatgtgcactgtgactgcctggtggcctttggtcaccacggccggatgctggccatcaaggccagctgggatgagtccgggaagctggtgcccgagctgcgggagtactgcctcccaggccctgtgctctgcgctgcctgtggcgggggtggccgcgtgtaccacagcaccccttctgacctctgtgtggtggatctgtctcggggaagcaccccgctgggccctgagcagcccgaagaaggcccgggaggcctgccccccatgctgtgcccagccagcctgaacatctgcagtgtcgtctcgctgtccgcgtctcccaggacgcatgaaggtggcaccaagctcctggccctgtccgccaaaggccgcctgatgacctgcagcctggacctggactctgagatgcctggcccagccaggatgaccacagagagtgcaggtcagaaaataaaggagctgctgtctggaattggcaacatctctgagagagtgtcttttctaaagaaggcggttgaccagcggaacaaggcactgacaagcctcaacgaggccatgaacgtgagctgtgcactgctgtcaagcggcacgggccccagacccatctcctgcaccaccagcaccacctggagccgcctgcagacacaggatgtgctcatggccacctgcgtgctagagaacagcagcagcttcagcctggaccaggggtggaccctgtgcatccaggtgctcaccagctcctgtgctctcgacctggactcggcctgctccgccatcacctacaccatccccgtggaccagctcggccccggtgctcggcgggaggtgacgctacccctgggccctggtgagaacggcgggctcgacctgcccgtgaccgtgtcctgcacgctgttctacagtctcagggaggtggtgggcggggcccttgccccctcagactctgaggacccctttctggatgagtgcccctccgacgtcctgcccgagcaagagggtgtttgcctgcccctgagcaggcacacagtggacatgctgcagtgtctgcgcttccctggcctggccccgccacacacacgggccccctccccactcggccccacccgagaccctgtggccacttttctggaaacttgtcgggagcctggcagccagccagcaggacccgcctccctgcgggccgagtacctgcccccatctgtggcttccatcaaggtgtcggcggagctgctcagagctgccttgaaggacggccactcaggcgtgcccctgtgctgtgccaccctgcagtggctccttgctgagaatgctgctgtggacgtcgtgagggcccgagcactatcttccatccagggagtggcccctgatggcgccaacgttcacctcatcgtccgagaggtggccatgactgacctgtgcccagcagggcccatccaggccgtggagattcaagtggaaagctcctctctggccgacatttgcagggcgcaccatgccgttgtcgggcgcatgcagacgatggtgacagagcaggccacccagggctccagcgctcctgatctccgtgtgcagtacctccgccagatccacgccaaccacgagacactgctgcgggaggtgcagaccctgcgcgaccggctctgcacggaggatgaggccagctcctgtgccaccgcccagaggctgctacaggtgtaccggcagctgcgccaccccagcctcatcctgctgtgaccaggcgggcctgcccctgggctctggccacgcttccagcctctgtcacagcccccccaggcctcatgggttagagggaaaccgagctggcctggccagagccgtcagggaaggtaggacctggccacgtaggagcagaacgctcatgaaagtgcttggaggccgtggagcacaaagcagattctgattgggagcaaccgaggcgggctctgaacctggccggtccagcttcgcgtcctctgctggtgtctctccttctctgaccgcggccgcagcccctgcactcgccttcctcactgctgggcagccttcccaccaccgcagcagcccctgaggccaggaggcagtgcagggcattctggacccggagggccagagaaacaggatttctggggtttggacttggggtgagtttgtaactgttgctgccacaccaccaggagcaccggctgcccctctgggtggcactaccaggtgccccacggtacccttgtcacactgttcacacctgcccggctgcccactctgggaccccgaggtaggagggtgctccctgagaccaaagcacaaaacagcatgcagggagctcctgcaagtgcccgtggtctcgtgccacaccaaggaagggccagcgggtggcctgtggccggaatgctcaacaactaggtgcctccagccggggcagtacccagcactgtgcactattttcagggccactcagggtggcgctgtggcccgggggggggccctgagccccagcccccagcctcctccctcagcctgggctacggcccacctcctggtgctggtgttttcatctggggagggtgctcgcgccgctcccgctgcaggcactgtccgcgatgagtgcgggtaggagccgtgaggtgcttctctgctgtgacaaacgaccctgtctgtccgtgaaccttcaaaaaaaaaaaaaaaaaaaaaaaaaaaaa

SEQ ID NO: 5381 - DNA, 6072 bp, Homo Sapiens
  NM_025164
cagccgcgtcccccagccccggcctcccgcggacccatgcccgcccgtatcggctactacgagatcgaccgcaccatcggcaagggcaacttcgcggtggtcaagcgggccacgcacctcgtcaccaaggccaaggttgctatcaagatcatagataagacccagctggatgaagaaaacttgaagaagattttccgggaagttcaaattatgaagatgctttgccacccccatatcatcaggctctaccaggttatggagacagaacggatgatttatctggtgacagaatatgctagtggaggggaaatatttgaccacctggtggcccatggtagaatggcagaaaaggaggcacgtcggaagttcaaacagatcgtcacagctgtctatttttgtcactgtcggaacattgttcatcgtgatttaaaagctgaaaatttacttctggatgccaatctgaatatcaaaatagcagattttggtttcagtaacctcttcactcctgggcagctgctgaagacctggtgtggcagccctccctatgctgcacctgaactctttgaaggaaaagaatatgatgggcccaaagtggacatctggagccttggagttgtcctctacgtgcttgtgtgcggtgccctgccatttgatggaagcacactgcagaatctgcgggcccgcgtgctgagtggaaagttccgcatcccattttttatgtccacagaatgtgagcatttgatccgccatatgttggtgttagatcccaataagcgcctctccatggagcagatctgcaagcacaagtggatgaagctaggggacgccgatcccaactttgacaggttaatagctgaatgccaacaactaaaggaagaaagacaggtggaccccctgaatgaggatgtcctcttggccatggaggacatgggactggacaaagaacagacactgcagtcattaagatcagatgcctatgatcactatagtgcaatctacagcctgctgtgtgatcgacataagagacataaaaccctgcgtctcggagcacttcctagcatgccccgagccctggcctttcaagcaccagtcaatatccaggcggagcaggcaggtactgctatgaacatcagcgttccccaggtgcagctgatcaacccagagaaccaaattgtggagccggatgggacactgaatttggacagtgatgagggtgaagagccttcccctgaagcattggtgcgctatttgtcaatgaggaggcacacagtgggtgtggctgacccacgcacggaagttatggaagatctgcagaagctcctacctggctttcctggagtcaacccccaggctccattcctgcaggtggcccctaatgtgaacttcatgcacaacctgttgcctatgcaaaacttgcaaccaaccgggcaacttgagtacaaggagcagtctctcctacagccgcccacgctacagctgttgaatggaatgggcccccttggccggagggcatcagatggaggagccaacatccaactgcatgcccagcagctgctgaagcgcccacggggaccctctccgcttgtcaccatgacaccagcagtgccagcagttacccctgtggacgaggagagctcagacggggagccagaccaggaagctgtgcagagctctacctacaaggactccaacactctgcacctccctacggagcgtttctcccctgtgcgccggttctcagatggggctgcgagcatccaggccttcaaagctcacctggaaaaaatgggcaacaacagcagcatcaaacagctgcagcaggagtgtgagcagctgcagaagatgtacggggggcagattgatgaaagaaccctggagaagacccagcagcagcatatgttataccagcaggagcagcaccatcaaattctccagcaacaaattcaagactctatctgtcctcctcagccatctccacctcttcaggctgcatgtgaaaatcagccagccctccttacccatcagctccagaggttaaggattcagccttcaagcccaccccccaaccaccccaacaaccatctcttcaggcagcccagtaatagtcctccccccatgagcagtgccatgatccagcctcacggggctgcatcttcttcccagtttcaaggcttaccttcccgcagtgcaatctttcagcagcaacctgagaactgttcctctcctcccaacgtggcactaacctgcttgggtatgcagcagcctgctcagtcacagcaggtcaccatccaagtccaagagcctgttgacatgctcagcaacatgccaggcacagctgcaggctccagtgggcgcggcatctccatcagccccagtgctggtcagatgcagatgcagcaccgtaccaacctgatggccaccctcagctatgggcaccgtcccttgtccaagcagctgagtgctgacagtgcagaggctcacagcttgaacgtgaatcggttctcccctgctaactacgaccaggcgcatttacacccccatctgttttcggaccagtcccggggttcccccagcagctacagcccttcaacaggagtggggttctctccaacccaagccctgaaagtccctccacttgaccaattccccaccttccctcccagtgcacatcagcagccgccacactataccacgtcggcactacagcaggccctgctgtctcccacgccgccagactatacaagacaccagcaggtaccccacatccttcaaggactgctttctccccggcattcgctcaccggccactcggacatccggctgcccccaacagagtttgcacagctcattaaaaggcagcagcaacaacggcagcagcagcagcaacagcagcaacagcaagaataccaggaactgttcaggcacatgaaccaaggggatgcggggagtctggctcccagccttgggggacagagcatgacagagcgccaggctttatcttatcaaaatgctgactcttatcaccatcacaccagcccccagcatctgctacaaatcagggcacaagaatgtgtctcacaggcttcctcacccaccccgccccacgggtatgctcaccagccggcactgatgcattcagagagcatggaggaggactgctcgtgtgagggggccaaggatggcttccaagacagtaagagttcaagtacattgaccaaaggttgccatgacagccctctgctcttgagtaccggtggacctggggaccctgaatctttgctaggaactgtgagtcatgcccaagaattggggatacatccctatggtcatcagccaactgctgcattcagtaaaaataaggtgcccagcagagagcctgtcatagggaactgcatggatagaagttctccaggacaagcagtggagctgccggatcacaatgggctcgggtacccagcacgcccctccgtccatgagcaccacaggccccgggccctccagagacaccacacgatccagaacagcgacgatgcttatgtacagctggataacttgccaggaatgagtctcgtggctgggaaagcacttagctctgcccggatgtcggatgcagttctcagtcagtcttcgctcatgggcagccagcagtttcaggatggggaaaatgaggaatgtggggcaagcctgggaggtcatgagcacccagacctgagtgatggcagccagcatttaaactcctcttgctatccatctacgtgtattacagacattctgctcagctacaagcaccccgaagtctccttcagcatggagcaggcaggcgtgtaacaagaaacagagagttttgtgtacagcttgggaatgaaaaggttgattgtaaacccacagtatctagcagcgttgtgccaaattgcccttgtgtttctctccacccaaaatatcacagctgctttcctcacatttggttcatccgtgtgctgttcttttgggttctgagagggttttgccatgtttgcttgtatgaccaagtcaccaaggaaataaacaggaaggaaatccatgttctccatcttttgtgaaagtatatttgagttggtggttttttgttttgtttgggggtttgtgttttgttttgtttttggtatgttttcttccagaggtgatatactttcttttttttcttcctttcttttttttctttcgttccttttttgaaacaggagagcaaagcagttagagttcagaggccagcggcctcagggccactccctccctagccttcatcagcagagcaccctccatccccctgcattgctcttctgtgaaagcaaatactaaaggatgccatcctctggaatcctaatggcaggcaaagggagagaggaagggtgacggcttctggcacttagaaaacaaaaagaacaaaaaaagagaaacccccaagcctggaacgcagagaggtctttactgctgggatccacggaaaacatgtctgtcctagccaagatcatatgaagagtttggcacggaggctgagaatgacctggcatagatggtttgccagttaggatgtctcaatttgagcctttgcttttggtggataactcagctcccctcttgtaacctggaaagttggttgcctttatcatcctgctggttttatccatggactgaacacccaacagcagtgcactatgctttctatggcatctttcattctcattttatattgtgctataaaaaggattgtttctccatatatatattatatatgtgtgtatatatataatataatatatgtgtatatatatattatatatataatatataatataatatattatatatatattatatatataatatatatataaaatatatatatatatgctctcctctttcagcctctttgtcacagggaagaagtgtaggaggttgccttgggccctgcctctctcctaacctcctcttccccactgggtaccctcagcccctatattttaattcttgatcatgtagaaattgtttttggtaaatgttgatattattgttattatcattattaataaataaagagaaaaggaatttttgtttaaatgagaaatgtttaaccagattctgttctatttgaattgtgacttgcaccttttgttcaaagtatttcctttaggcattgtaattgtgaacagctcttacttgtgccagtgacagatgcagtggtctcctttccccagttgaagcagtgcatacgcagtagctattatttgtgttatctttatttctcttcattgttagaaaccaaagtcttctctgctggctggggctgagagagggtctgggttatctccttctgatcttcaaaacaagagagagaccttgaatacactgactcttccaccctttttttttctgggaaaggagagcaagaggtcccgagtcccctcctagtctttcatcctgaatttgcacagaggaaagcgggtgcccggcatggccatcctgatgttgctggcgggatccccatgcaccttgtccttctccactgatactggcagctcggctcctggacccaagatcccttgagtggaattctgcagtgcaagagcccttcgtgggagctgtcccatgtttccatggtccccagtctcccctccacttggtggggtcaccaactactcaccagaagggggcttaccaagaaagccctaaaaagctgttgacttatctgcgcttgttccaactcttatgcccccaacctgccctaccaccaccacgcgctcagcctgatgtgtttacatggtactgtatgtatgggagagcagactgcaccctccagcaacaacagatgaaagccagtgagcctactaaccgtgccatcttgcaaactacactttaaaaaaaactcattgctttgtattgtagtaaccaatatgtgcagtatacgttgaatgtatatgaacatactttcctatttctgttctttgaaaatgtcagaaatatttttttctttctcattttatgttgaactaaaaaggattaaaaaaaaaatctccagactcaagttgctaaaaa

SEQ ID NO: 5382 - DNA, 6054 bp, Homo Sapiens
  NM_025180
aacggcgggaaggctcaggggcgtgcttgcggcaaccctgtaaccgccggtgcgcaagttggaggggcaaggggctgccgtgtcctggtctggaggcggcccaggctgccttggtgattctggcttcgcggcctcatggcttgcggccggtttgcgcaacggcctgcgaaccaccaggcgcgtccccgccggcttgggtccgccccgaagcccagtccctcggcctggcccgctatgccctgcacactggcggagtctggcgtggcgcagcccggcgtggggttcggccccgccaggtggtcagcccttcctcggagtccaggtggctgggggcgcttcggagagtggccaggggcccccaaacccggggccgcagagcagtaccagtccgtggcctgttaggaaccaggctacagagcaggagttgccaaaacaaaggggatttggtgatggaggctttgttagaaggaatacaaaatcgagggcatggtgggggatttttgacatcttgtgaagcagaactacaggagctcatgaaacagattgacataatggtggctcataaaaaatctgaatgggaaggacgtacacatgctctagaaacttgcttgaaaatccgtgaacaggaacttaagagtcttaggagtcagttggatgtgacacataaggaggttggaatgttgcatcagcaggtagaagaacatgaaaaaatcaagcaagagatgaccatggaatataagcaggagttgaagaaactacatgaagaattatgcatactgaagagaagctatgaaaagcttcagaaaaagcaaatgagggaattcagaggaaataccaaaaatcacagggaagatcggtctgaaattgagaggttaactgcaaaaatagaggaattccgtcagaaatcgctggactgggagaagcaacgcttgatttatcagcaacaggtatcttcactggaggcacaaaggaaggctctggctgaacaatcagagataattcaggctcagcttgtcaatcggaaacagaaattagagtctgtggaactttctagccaatcagaaattcaacacttaagcagtaaactggagcgggctaatgacactatctgtgccaatgagttggaaatagagcgcctcaccatgagggtcaatgacttggttggaaccagtatgactgtcctacaggagcagcagcaaaaagaagaaaaattgagggaatctgaaaaactattagaggctctgcaggaagaaaagagagaattgaaggcagctcttcagtctcaagaaaatctcatacatgaggccagaatacaaaaggagaagttacaagaaaaagtaaaggcaactaacactcaacatgctgtagaagctataaggccacgggaagaatctctggcagaaaagaagtacacctctcaagggcagggggacttagacagtgtgctctcccagttgaattttacccatactagtgaggaccttctgcaggcagaggtgacttgtcttgaaggcagtttggaatctgtgagtgcaacgtgtaaacagctgagccaagaactaatggaaaaatatgaagaactgaagaggatggaagcacataacaatgaatacaaagcagagattaagaagttgaaagaacagattttacagggtgaacaaagttacagttctgcactagaaggaatgaagatggaaatctcccatctaactcaggagttacatcagcgagatatcactattgcttccaccaaaggttcttcctcagacatggaaaagcgactcagagcagagatgcaaaaggcagaagacaaagcagtagagcataaggagattttggatcagctggagtcactcaaattagaaaatcgtcatctttctgaaatggtgatgaaattggaattgggtttacatgaggcaaaagagatttcactagcagacctccaggagaattatattgaggcattaaataaattagtgtctgaaaatcaacaactacagaaagatttgatgaataccaaatctcagctggagatttctactcagatgtgcaaaaaacaaaatgacaggatctttaaaccaacacacagcagaacaactgagttcaagaatacagagttcaagccaacccatggccagcacagacatgatggaataaagactgagcactacaaaacagatcttcattctccaagaggacaagcgtcggatagtataaaccccatgtctagggtgctaagccccctgagtcctcaaatcagcccttgcagctccaccaggtctttgacttcctactctctatgtaaaactcattctttgccttcagcgctagatacaaatgaagccaatttttctgacactatgtctgagagtatgaatgaccaagaagagtttatatcttcgtgttccttgcctgtatctccccttggttcaatagctaccagatttttggaagaggaggaactgaggtctcatcacattctagagcgcttggatgcccatattgaagaactaaaaagagagagtgaaaagacagtgagacaattcacagccttaaagtagcctcttaaaaaaatcacaatcttggaaataaaaataaacaccaaagagttactgtcatctgaagtagcagctctttaaaaacatgaagagataaaattataaaaatgatacatctaaagcagtggtgaagaaagctgaaaaactgatacttttgataggcattttctctgcactggtttgtttaaaggacttcttccagcaataagttgaaagaataaaccactttgctagacttttttctcatacgaatatttattatcataaagtgatacttaccttgctgacttaaatgtgaatagctatgtactaattgaaataaggattttatgatacatgttgaaaataaagtaactgcaggaactttctttaggggaaatgtgtagaagcatggatttaggggtcaaacatacctggatcgatagactggttttgccacttaccagccaacggggcttgttatttactgggctggtagcccctcctagccaaggggctggtagtgtgtaaagtcaggctggtagtgaataaggggggggtgtgctaaagaaccttatcaagcagtcctctcttgctcaacactcatgcagaggagagaggcagggagggcaagggactggctgtcatgcacggtgcccatggaatatccattggaaataaatgttcatcgtctgcactgctgaggacaagtttagatgggagacaaagatctggatgttgatgtgccgcaggcatttgaaacgatgggagttgataagatccaccagggaggctgtggagagagagaggagcaggaggctgggtttggggccctgaaagatgccagcatctgaggatcacaggaaatagatctagcaaaggaactagaatgtgcagttacagatgagaaaggtcagtgtagtgtacttgccagctcaagggtgtggcctctgtgaaccctctttctgtagtggatctttcccatcagcgtaaaacatcctgttatttcccctttttaaataaaacctcagttttttttaatgcctctcttttactgctctgtatgtttgcttcccttcacccaaacacttctggaaagagttgtctgcagtgactctttccagttcctcaccccgccccaccgtagttctcttcctaaccctctccaacaccacttccatccccagactgctttcttgctcttgagttcaccagtgacctaatcagtgtctgagcatcattcagcacagttggactctctcttggcttctgtgacctggaacttctggtttcctctctacctcatcctccactccatctcatggcttttcctcttctaacctctaagtcagagggccccctagagctctgtcatgggttttctccctcagcattctcttccctagaagtttccattccattctcaagctcttaataccacctataggccagtgacccttacatttattactaatcttgacctctccccagagctgctgtcttagatacctagctgcttatgcgatgtcttcacttggatatctgacaaacatcttgtttccaagagagaactctttattctccctcttgctaagattccatatcaggacatagcattatgtttgccagttcctaggagttacttataattccttccttacccacatccgcatatccagtcatttgggaggtcctgtcatttcttcccccagaatcttatctcagacccaaccgtttccctcctgcacttctaccacctgatccagactacttctctctcaccctgattctggcagtagcctcctaactgatagtactcacaccagtaattcagggagcttctggagttatcctttagaaatgtaaatgaaacagtgtcaccactgcttcccttcagactcttccaaggcttctctttttttttttattgagacagagtctcactctgtcgcccaagctgcagtacagtggcaggatctcggctctctgcaacctccacctcccgggctcaagtgattctcctgccttagcttcccgagtagctgggattacaggcgcatgccaccaggcccagctaatttttgtatttttagtaggaacagggtttcaccatgttggtcaggctgatctcgaactcctgacctcaagtgatccacccgcctgagcttcccaaagtgctgggttataagcgtgagccactgcacccagccccaaggcttcttactgcactcagaataaaatccaaatgaattagtatagcctacagagtgtcaataatctgggcctaatcacccattgcatcatcctttactgtgctccacccatgctggcgtcctttctgtttattgagtgcagcaagctttaacctgttcgggtctttcatttgcagtttaccctgaatattccctttctcttacctcacctttgattggcgttttcccccttgcagacctgcactctggcatcctctcctgagcaagccttctttgattgctgcctcccaaacctgtttctccccatttctctagctcattggcctgtgttacttgcttcatagtgctcactactatctgaaatcatttcattacttgatttatgtttgtactgtctatttctgtctttagaattaaaactccttgagggcaaggactttgcttctctggttcatggtgggatcctcatcacccagcacaagcccaacacttaggagaggctcagctagtttgaaccaatggaaaatgccattcctgaggtgcaccacatcgtttcttttgtgttggtgtgcatgctgtccttcagtttgtctcctcttcccacaccctgtcatgtgctcctaaaactccccctttacttggctactttatctggcttggcaaagctttcccatatcccctgacccatgtcagggaacgtttctcctcattgctgtcatggcaccctgtgtgtggctctgaccagactttgctatccgctttgatttctgtctttcaggggctaagtcctgcctacatcctcagtcagcatgctgcctaacacataacagatcctaagcaaatattgggtggatgaaaatcactaccattcaaggcttcattgtatttatcagtaaaactgaaataatatctaatggggtcgagaagatttactgaaaatatatatttgaaagggctttgcagttttaagtactgtacctatgtgcattgctgttacattcaggagatttctgagttttagacagtcccaagcttcagcttaaaatctgtagactgcagcccgtttctgaaacgtttgtactacgtgttgactaggaggaacaatgacagactctgtagtcaccggaaatacttaaggaatcatgaggtactatgtatttccttaaattatactgttttttaaagctgaagtatctaatagttaatgggttgtccaaatttgtcagaacatttgactgtaatttaatgtctcaccatttttcaaaaagatatattaataccaaatattaaaatgtgtcaagact

SEQ ID NO: 5383 - DNA, 3045 bp, Homo Sapiens
  NM_025182
ggtttgcaggcggaggctacagctagggctgctcagtaactgccccaaccactaccacgtccccaagtgcaacgggacccacggaactacagggtcctgctgagctcaggagctgcacggaatggtggcagtcaccttgccagtgcagcaggcatggatcagactgcaagctaggggcacgaggcatcagttgggaagaggggacgcacagctaggcttgaggcctcttcatcgggatgtccccaggccccccagcccaggcccagcataaaggccgtgttggggggcccccctgacccaaggggggcttcatgcgccacgtgcaggcggagccgtctccatcctcagagccggaggctggcccttcacagcctccagtcaggcagggggccctccagggtggcctgctcatgggctacagcccagcagggggggcgacatcccccggggtctaccaggtatccatcttttcccctccggctggtacctctgagcctcatagggccctgaaacgacaagccccatccactgagggtccccgggagctgaagagaggccctgggctgggggccagagagggactaccccctgaagaaccatctactgtggggctcttaggcccagagggaccggggctgggactaggtgtggccagccagcatttctcccaccgtggcctctgtgttgtggaacagagaagtagtgtcacctcatcttggacttcaggggcctggagtcccccctgccccccatcaaatgcttcctgcaatactttgcacaccagagactgggcctccccagatccagggggacaggggtccctgggggagtccccagggccagcccctccaggccagctgcacacacttgacactgatttgcacagtcttgcacaaatagggggtaagagcccagtggctggggtgggcaatgggggtagcctctggcctagggagtcccctggcactgccaatgggcacagtcccgagcacacaccccctggccctggacccccaggcccctgccccaccaagcgaaggctgcttcctgctggagaagccccagatgtcagctctgaggaagaggggccagcccctcggaggcgccggggatccctgggccaccctactgctgccaacagttctgatgccaaagccacacccttctggagccacctgctgcctgggcccaaagagcctgttttggacccaacagactgcggtcccatggggcggaggctgaaaggagcccgtcgcctgaagctgagcccccttcgaagcctccggaaggggccaggcctgctgagcccccccagtgcctcccctgttcctacccctgctgtcagccgtaccctgctgggcaactttgaggaatcattgctgcgaggacgttttgcaccatctggccacattgagggcttcacagcagaaattggagctagtgggtcatactgcccccagcacgtcacgctgcctgtcactgtcacattctttgatgtttctgagcaaaatgccccggctcccttcctgggcatcgtggatctgaaccccttggggaggaagggttacagcgtgcccaaggtgggcaccgtccaagtgaccttatttaaccccaaccagactgtggtaaagatgttccttgtgacctttgacttctcggacatgcctgctgcccacatgaccttcctgcgccatcgcctctttttggtgcctgtgggtgaggagggaaatgctaaccccacccaccgcctcctctgctacttgctgcacctcaggttccggagctcccgctcaggccgcttaagcctgcatggagatatccgcctgcttttttcccgccggagcctggagctggacacagggctcccctacgaactgcaggctgtgaccgaggcccctcataatccacgttattcacctttgccctgattgccagcactctgaacccatgcgggctaatgacctgcccatcctgctccatcttagagaacatatatggagagacagcaagagacccttcaggcttgaattaaagccctcaccatgctcacgcccaaatggattatttgggtgtttaaagcttctgattcttactacaccctgccctacttcgggtactccatgtgcctgtcccctcccttgggtttcccaggccagcttaggtagtagggaggaactggagctaccctgagattttctcaagttcccaggcaagttatgccagcgttgcctccctgtcctgggcaggggccacttgttattttatttatttttaatttataatttattcaaattggattgccttggtaacctcccacacctgataattggcatcactcctccccgcttcccactctcagatattgctccaacctcaggagttgaagaggcttatgcggtgggggcaggaggagaactgctttccctcagctgagggaagaggggctattccagagggactgagtcagtagccaaagactcagcttcccctgtccttccccagtcccttcacttcccctaccctctgacctatctctgaaagccaagttatgcgtatgtgtgtgtgcacaagcttgtctttgtgtggtatgtgtgtgtgagtgtgcatgtatgcacacacacaggggttaaccacccctcacctagggctccagactccagttgtccctctcctcctacctgtgtctccttgttttggggtcctgactgaagaaggtgtccagggggcagagtcagggccaagcactggggtgcctcctctcacctggccagactctgacccacctacctcagctggggtgaggggcacccctcaaactcagtcatgtggttccaaactaccccattccccactccagactctgacccagcctcagtcctaactcctggggctgggctgaggggaacaagcatttgctgaaacttgaaaaaacaaagcaaatcaaaaacaggaaaaaattgtacctggtacttttttttagaaaaaaagattaaaaaagaaagaataaattcttgtttggaaacttgaaaaaaaaaaaaaaaaaaa

SEQ ID NO: 5384 - DNA, 5986 bp, Homo Sapiens
  NM_025190
gggcgcgcgagagctgctagggcggtttctctgcctcgggcctgttgggcagggccggctaaggtgcgcgtgctcgctggttctaacccttctgttgggcgtttctgcggagaggcgggaggcgctgagagtctgcgcggaggtccgtgcacagactgctttgcctgttgttgctcttcggaggcggcgatccccgaaggcgagctgaaatacggctgcaggctacaatttgcagccgacgattaaggaagacgacgagcgggagaggtggcccaccctcatggagcgcttgtgctcggatggcttcgcatttccccattactacattaaaccgtatcatctgaagaggatccacagagctgtcttacgtggtaatctggagaaactgaagtaccttctgctcacgtattatgacgccaataagagagacaggaaggaaaggactgccctacatttggcctgtgccactggccaaccggaaatggtacatctcctggtgtccagaagatgtgagcttaacctctgcgaccgtgaagacaggacacctctgatcaaggctgtacaactgaggcaggaggcttgtgcaactcttctgctgcaaaatggcgccgatccaaatattacggatgtctttggaaggactgctctgcactacgctgtgtataatgaagatacatccatgatagaaaaacttctttcacatggtacaaatattgaagaatgcagcaagaatgaatatcagccactgttacttgctgtgagtcgaagaaaagtgaaaatggtggaatttttattaaagaaaaaagcaaatgtaaatgccattgattatcttggcagatcagccctcatacttgctgttactcttggagaaaaagatatagtcattcttcttctgcagcacaatattgatgtgttttctcgagatgtgtatggaaagcttgcagaagattatgccagtgaggctgagaatagagtcatttttgatctaatttatgaatacaaaagaaagagatatgaagatcttcctataaatagcaatccagtgtctcctcagaaacaacgagctgagaaggctacaagtgacgacaaagattctgtttcaaatatagccacagaaataaaggagggacctatatctgggacagtgtcttctcagaaacaaccagctgagaaggctacaagtgacgagaaagattctgtttcaaatatagccacagaaataaaggagggacaacaatctgggacagtgtctcctcagaaacaatcggcccagaaggttatatttaaaaagaaagtttctcttttgaatattgccacaagaataatgggcggtgggaaatctggaacagtgtcttctcagaaacaaccagcctcaaagactgcaagtgacaagacagattctgctttgaatacagctacagaaataaaggatggactacaatgtgggacagtgtcttctcagaaacaacaagccttgaaggctacaactgacgaggaaggttctgtttctaatatagccacagaaataaaggatggagaaaaatctgggacagtgtcttctcagaaaaaaccagccttgaaggccacaagtgatgagaaagattctttttcgaatataaccagagaaaaaaaggatggagaaatatctaggacagtgtcttctcagaaaccaccagccttgaaggctacaagtgtcaaggaagattctgttttgaatatagccagagaaaaaaaggatggagaaaaatctaggacagtgtcttttgagcaaccaccaggcttgaaggctacaagagacgagaaagattctcttttgaatatagccagaggaaaaaaagatggagaaaaaactaggagagtgtcttctcataaacaaccatccttgaaggctacaagtgacaaggaagattctgttccgaatatggccacagaaacaaaggatgaacaaatatctgggacagtgtcttgtcagaaacaaccagccttgaaggctacaagtgacaagaaagattctgtttcgaatatacccacagaaataaaggatggacaacaatctggaacagtgtcttctcagaaacaaccggcctggaaggctacaagtgtcaagaaagattctgtttcgaatatagccacagaaataaaggatggacaaatacgtgggacagtgtcttctcagagacgaccagccttgaagactacaggtgatgagaaagattctgtttcgaatatagccagagaaataaaggatggagaaaaatctgggacagtgtctcctcagaaacaatcggcccagaaggttatatttaaaaagaaagtttctcttttgaatattgccacaagaataacgggcggtgggaaatctggaacagagtatcctgagaatctgcgcaccttgaaggctacaattgaaaataaagattctgttctgaatacagccaccaaaatgaaggaggtacaaacatccacaccagcagaacaagacttagaaatggcatcagagggagagcaaaagaggcttgaagaatatgaaaataaccagccacaggtgaaaaaccaaatacattctagggatgaccttgatgacataattcagtcatctcaaacagtctcagaggacggtgactcgctttgctgtaattgtaagaatgtcatattactcattgatcaacatgaaatgaagtgtaaagattgtgttcacctattgaaaattaaaaatacattttgtttatggaaaagattaataaaacttaaagataaccactgtgagcaacttagagtaaaaattcgaaaactgaaaaataaggctagtgtactacaaaagagaatatctgaaaaagaagaaataaaatcgcagttaaagcatgaaatacttgaattggaaaaagaactctgtagtttgagatttgccatacagcaagaaaaaaagaaaagaagaaatgttgaagagttgcaccaaaaagttagggaaaagttaagaataacagaagagcaatataggatagaagctgatgtgacaaaaccaattaaaccggctctcaaatcagcagaggtggaattgaagacaggaggaaataattcaaatcaggtttctgaaactgatgaaaaagaagacctgctgcatgaaaaccgcttgatgcaagatgaaattgccaggctcaggctggaaaaagacacaataaaaaaccaaaacctggaaaagaaatacttaaaagactttgaaattgtgaaaagaaagcatgaagaccttcaaaaggctctaaaacggaatggggaaacattagcaaaaacgatagcctgttatagtggacagcttgctgctctgacagatgaaaacacaacgctccgttccaaactggagaagcaaagagagagcaggcaaagactggaaacagaaatgcaatcataccgttgtagactgaatgctgctcgatgtgatcatgatcaaagtcactcatcaaaaagagaccaagagcttgctttccagggcacagtagataaatgtcgtcacttacaggaaaatttgaattctcatgttctgattctttctctgcaactttctaaagctgagagtaagtccagagtcctcaaaactgagctccattacacaggagaggctctgaaagaaaaggctttggtttttgaacacgtgcaaagtgagctaaagcaaaaacagagtcaaatgaaggacattgaaaaaatgtacaaaagtggatacaatacaatggaaaaatgcatagaaaaacaggaaagattttgtcaactaaaaaaacaaaatatgttgcttcaacagcaactggatgatgctcgcaacaaagctgacaatcaagaaaaagcaatacttaatattcaagccagatgtgatgctagagtacaaaaccttcaagctgagtgcagaaagcaccgtcttttactagaagaagacaataaaatgttggtcaatgaactgaatcattcgaaagaaaaagaatgccaatatgaaaaagagaaagcagaaagagaagtagctgtgagacagcttcaacaaaaacgagatgatgtcttaaacaaaggatcagcaacaaaagctctgctggatgcttcatcgcgtcactgcacctatttagaaaatgggatgcaggattcaaggaagaaattagaccagatgagaagtcaatttcaagaaatacaggatcaacttacagctactataagatgtactaaggagatggaaggcgacacacaaaagcttgaagtagaacatgtgatgatgagaaaaattattaaaaaacaggatgaccaaattgagcggcttgagaaaatcctgcagcattcaagtttgatgctgcaggtgtttgagagctagatgaagcatccagccaaactagactacatggagctccacagtgatcgtcttcacctccagctgtttgcatttacttcttccctctatcctacatgtgttttccttccccttcagatatcaacctatgaattgcctctaccaaaaagcctacaatattgacacaaacctgggctagtatcccttctatgtcttccaataagtgctgtcttatgcttgtcattgtatgtatgactctgtatgggaattgcctgtttgttttttcagattatagcatacagttgttgaggggcggaccgtatcatctttatcttgtaattccagtgcttgtcctagtaccttagcacatggttgctgaatacatgaacgaagagtgagaaaccagaagctctgatacttaactgccatgataatgaattcggtgtgcaactatgggcaaattatatttaatagtaattgcatattgtacatatttttcattcttattaacactgataagcttttcagcatatactgactttctcttagttaactgtgaaatcatttagataaagaatataattctttttcattctaacttctgaatttaaatctgaatcctctatagcaggggtccccaactcccaggccacacacagttccatgacctgttaggaagcaggctgcacagcaggaggtgagtggcaggcaagcgagtgaagcttcatctgtatttccagccactccctgttgctcacattatcacctgagctctgcctcctgtcagatcagcaaagccattagattctcacaggagtgaaaatcctactgtgaactgctcgttcaagggatctaggtcacatgctccttatgagactctaatgcctgatgatatgtcattgtctcctatctcttcacgatgggaccatctagttacagaaaaacaagctcaggactcccattgattctccattatgatgagttgtgtaattatttcattatgtattacaatgtagtcataataggaataaagtgcacaatagatgtaatacgcttgaatcaccatcctgaaaccatcccccaaacccccatctgtggaaaaattatctttcacaaaactgctgcctggtgccaaaaaggctggggactgctgctctatagcttctgcactagaatctactaatgagtaaaatttaaatcaataactagttttaaaagcataacaagaatatgtgctgtctggctgcagtggctcatgcctgtattctcagcactttgggaggccagtgcaggtggatcacttgaggtcaggagttcaagaccagcctggccaatatggtgaaatcctgtctctactaaaaatacaaaaattagctgggtgtggtggtgcatgcctgtagtctcagctactcgggaggctgaggtgggagaatcacttgaacccgggaggcagaggtttcagtgagccaagatcgtgccactgcactccagcctgagcaacagagtgactccatctcaaatgcaaaacaaaacagaaagaatacatgctgacgaaaaaaatctaagacaataaaattgtattactaggctgttaacatgatattttgtttcccgttaaatgtgtgacatgcaaaagtatttattaaatgaaaatattttttatctttt

SEQ ID NO: 5385 - DNA, 2203 bp, Homo Sapiens
  NM_025193
ggaggagccagcggaaggacggtgtgcgggccggccagccctggacgaaagaagagggcccctccaggccagtctgggcaccctgggatagcggctgcagccaggcatggccgactctgcacaggcccagaagctggtgtacctggtcacagggggctgtggcttcctgggagagcacgtggtgcgaatgctgctgcagcgggagccccggctcggggagctgcgggtctttgaccaacacctgggtccctggctggaggagctgaagacagggcctgtgagggtgactgccatccagggggacgtgacccaggcccatgaggtggcagcagctgtggccggagcccatgtggtcatccacacggctgggctggtagacgtgtttggcagggccagtcccaagaccatccatgaggtcaacgtgcagggtacccggaacgtgatcgaggcttgtgtgcagaccggaacacggttcctggtctacaccagcagcatggaagttgtggggcctaacaccaaaggtcaccccttctacaggggcaacgaagacaccccatacgaagcagtgcacaggcacccctatccttgcagcaaggccctggccgagtggctggtcctggaggccaacgggaggaaggtccgtggggggctgcccctggtgacgtgtgcccttcgtcccacgggcatctacggtgaaggccaccagatcatgagggacttctaccgccagggcctgcgcctgggaggttggctcttccgggccatcccggcctctgtggagcatggccgggtctatgtgggcaatgttgcctggatgcacgtgctggcagcccgggagctggagcagcgggcaaccctgatgggcggccaggtatacttctgctacgatggatcaccctacaggagctacgaggatttcaacatggagttcctgggcccctgcggactgcggctggtgggcgcccgcccattgctgccctactggctgctggtgttcctggctgccctcaatgccctgctgcagtggctgctgcggccactggtgctctacgcacccctgctgaacccctacacgctggccgtggccaacaccaccttcaccgtcagcaccgacaaggctcagcgccatttcggctatgagcccctgttctcgtgggaggatagccggacccgtaccattctctgggtacaggccgctacgggttcagcccagtgacggtggggctggggcctggaggcccagatacagcacatccacccaggtcccgagccctcacaccctggacgggaagggacagctgcattccagagcaggaggcagggctctggggccagaatggctgtccttgtcgtagagccctccacattttctttttcttttttgagacagggtcttgctctgtcacccagactggagtgcagtggtgtgatcatagctcactgcaccctcaacctcctgggttcaagcaatcctcctgcctcagcctcctgaacagctgggaccacaggtgcacgccaccacacctggcttttttttgttgtttttagagacagggtctcactatattgctcaggctggtcttgaactcctgggctcaagtgatcttcccacgtgggcctcccaaaacgctggaactacaagtgtgagccaccgcgcctggcccaagccctccacattttcaatccaggagccttgagtctgtgttgtgtcctgacacctccaagttctagggccgtcaggacacgggagggtttggggacagagtgtccttcctctgtcctctcatcccagtcctgatggccgcttggtgagtgtctggtgccctggtggcctgccccagctctcttctggctttctgagcaggaagcgagcagaggctccacaggcttacgctgctctcctgacagccacacgcgaccctcggtgcagagtgcagaggcggctctggttcctccagccacctcagtccctctttgggaggtgatgttcccattgtttttcaaaggcctcaccttcaactgtctgtcttagaattcccctctggagggctatggcctccctatgctttcacttcccacctctctacctaagttccttcccagcacatcgccagccctgggcctggggatgtccccaatgctgtacctggctgaccccggattaaaagcctcatccacgaccgtgaaaaaaaaaaaaaaaaaa

SEQ ID NO: 5386 - DNA, 3658 bp, Homo Sapiens
  NM_025195
aaggaggagtgcactggccgggatcggtgcagcgctcacactcactcacagtcactctctctgagcgcgtctcgctcgctctcatacacgcccggagcccaggagcgctcaggatcccgagcgccgcgaaaaagttcccccggcttttgctggagactcatcgttttgggaagtgcatttgcttcgtggctccgccgagcctgctgaatcctgtcctcgcggcacgggaccccgggatcgctgaccgctgccgccgccgcctctgcctcccggactatcggcagcctcggcaacaatagtggcggccgcccccagcgaggctccgggagcccttgcctgcgggggtccggggactcgagccggcctccgcctcccggacgcacagccagcgtggtccccgcgtgcaacgcgagcgccggggagtggctcctgctttgcccctcgtgggggccgagccaagaccagtctgcaaactccatcccgccggctggaagaagtcgcggagccggcaccaaacccgcagcgtcttcccgcgcggatcccgggacttaaaaagccggggccaccccggcccaggacgggatgcgggtcggtccggtgcgctctgccatgagcggcgcctcgcagccccgcggcccggccctgctcttcccagccacccgaggcgtcccggccaaacgcctgctggacgccgacgacgcggcggctgtggcggccaagtgcccgcgcctctccgagtgctccagccccccggactacctcagcccccccggctcgccctgcagcccgcagcccccgcctgccgctccgggggccggcggaggctccgggagcgcgccggggcccagccgcatcgccgactacctgctgctgcccctagccgagcgcgagcatgtgtcccgggcgctgtgcatccacactggacgcgagctgcgctgcaaggtgtttcccattaaacactaccaggacaaaatcaggccttacatccagctgccatcgcacagcaacattactggcattgtggaagtgatccttggggaaaccaaggcctatgtcttctttgagaaggactttggggacatgcactcctatgtgcgaagccggaagaggctgcgggaagaggaagccgcccggctcttcaagcagattgtctccgccgtcgcccactgccaccagtcagccatcgtgctgggggacctgaagcttaggaagttcgtcttctccacggaggagagaacccagcttagactagaaagtctagaagacacacacataatgaagggggaagatgatgctttgtcagacaaacatggctgcccagcctacgtgagccctgagatcctcaacaccactgggacctactccggaaaggctgcggacgtttggagcctgggggtgatgctctacacccttctggttggacgataccccttccatgactcagaccccagtgcccttttctccaaaattcggcgtggacagttctgcattcctgagcacatttcccccaaagccaggtgcctcattcgcagcctcttgagacgggagccctccgagagactcactgcccccgagatcctactgcacccctggtttgagtccgtcttggaacccgggtacatcgactcagaaataggaacttcagaccagattgttccagagtaccaggaggacagtgacattagttccttcttctgctaatccccaaaacctcagaaacctcataattcttaacacctggcatttccatttctaaagatggacaggccctttggcgtggtaccaaccagataatgactgcatcaggatgaaagctgctgaactcggcatggcgcctcctcttctctgttgggatgagtgactttattgatttgagcagcatatgctgtgattggctgccctgcaaatttgtttcccttaaggaaccctcaccaactatctctgctggatttgggagttccgcatcttttgtggagggcagagtatggacatcttacacccggtggtcaagtgtgtaataaacttgagcattcgaatgggagaaaaagcaaatcgcacaatgacatattttgagtaataaccgtatttttcacagggtgacaaattgggccaataaatctgccatctttgaactcatctttggtggctagactgctacggcagcttctctgatgggaaagttccttttttggcttaacactcaccctttcttcacactcacatttaccaatgactctgctccgtttttggagcagactgttttaagttgctcaggagcctgatggaaccatgaaccgagactcttctctgtttcctgccaagacctcatctgcactaatgccttctccctgaccttgacacttccccctttagctataaaagcacttaccagccgaacgtggaacagtatcacaaaagattccatctcccaacgatttcagaactctgagctcagagagactccagattttaaaaaataatttgagtgcttggaaactattagctttttaagttccttccaaatatgttagtacctaccctttactttttccccaagaccatctcagggtggagcattctgtctaagagaagaaagataaggaggctcccacccacctctcccaagagcagacattaaacatctttgtgctttgaagagagtgaattttggatagtcttgtgattctcagactaacttccagaattatactttaacccctcccagatatggtccgcctttggcattgtgtgtacatctgcagttttgcatggtgggttgttaatatttcaaatgtgtggtttatgaatacgtctgtataatcggcttctggagtgaaacagcaaaccccaaatcttcaaagttggaaggaactttaaaaatcatccggtccaatctctttcctctttctgccacctcccaaggcagaaatcccctcttcagcttcttttgtaggtgggaatccagcctctgttagatatgtccagagatggaaactcactcccctacaaaagatggagcttaatggagaaattgcaactttcattaaaaaacaaattcagatgaaatatcagtaactgtcttggacagtgctgaaatcaggtggttaaacgggtaaacaaaatatactgtattttgagaaatggcacaaaaacaggcagtcatctttaagggctatgcctaggcaaactactaacatgcattgtgagaatgccgtgtatacctcacgtactgtgtactttgtacatatattttaccttttatacctatgttcgattttgttttgttttgttttgttctggctttgaggcttgttttgttgtctgtgtctgtctgaataacctgcgtgtctaaaaccacgtgaaatgtgaatgattattggcaatattaccttgacagaatcatgggactttgagaagagggaggacagaggcctctgtcgcactaacgctctcgtggttgctcgactgttgtatctgtgatacattatccgactaaggactctgggctggcagggccttctgccgggaaagctagaaacactaggttcttcctgtacatacgtgtatatatgtgaacagtgagatggccgtttctgacttgtagagaaattttaataaacctggtttcgtaaaaaaaaaaaaaaaaaaaaaaaaaaaa

SEQ ID NO: 5387 - DNA, 1519 bp, Homo Sapiens
  NM_025196
gctgggtgcgtgcgcggcgactgcgacgggcagtggcagtcatggcggctcagtgcgtgaggttggcgcggcgcagtcttcctgctttggcgttgtctctcaggccatctccccggttgttgtgcacagccacgaaacaaaagaacagtggccagaacctggaagaggacatgggtcagagtgaacagaaggcagatcctcctgctacagagaagaccctcctggaagagaaggtcaagttggaggaacagctgaaggagactgtggaaaaatataaacgagctttggcagacactgagaacttacggcagaggagccagaaattggtggaggaggcaaaattatacggcattcaagccttctgcaaggacttgttggaggtggcagacgttctggagaaggcaacacagtgtgttccaaaagaagaaattaaagacgataaccctcacctgaagaacctctatgaggggctggtcatgactgaagtccagatccagaaggtgttcacaaagcatggcttgctcaagttgaaccctgtcggagccaagttcgacccttatgaacatgaggccttgttccacacaccggttgaggggaaggagccaggcacagtggccctagttagcaaagtggggtacaagctgcatgggcgcactctgagacccgccctggtgggggtggtgaaggaagcttagctgctgttgatggggtgggtgtttttaaactcacttgatgtaactctcaaggctggttcattgtttctcatctatgagtacgtgtgaccttttcccaaaccttattggaaaccttaagtaaccagtggctaaacagaaaagccggttgcccaactgcattaatgaactctaattcgggagtctgttcccttttagtgccacgcgttgaatagttccacatactttcagaagagctcagcagggccctgcctggtctcccgagcatcatgagtaacgtgtctgctcagactctgctgacaccaaagtattttaaacaaataaaaggtcttggggaattctgtttggctacctgggcacgccagtctgcaccatgtgtccctgcggcgcatgagtgactggcgtatttagcccgtcacatttcattcgctgaaggaaaggcaagagagttgaaacatttttcttacttaaaaaaaatgatctttgtgaagaacatagtgagttcgtttgtcttcagtcaacagcggctgaaactgaccactgagaaatgggtgtgggcactgacagttctcccccattatttggccaggaattgagcttggcttggcaaagttccttttaccctgttctgttcatctaaatgcagacatatttaaatcatattcaactagttactaatgacctcaagttgtattccctggcaaaatggactttctcaaaataggactgcacgcttggtgtactttaaatgttaatgtttaatttaaaatttttatttaagaggattaaagccctaatgtttattttcctacaaaaaaaaaaaaaaa

SEQ ID NO: 5388 - DNA, 2594 bp, Homo Sapiens
  NM_025197
cggaggctcggccacaacgccactggattggtggtagggcggggcgggccacagtctccagcctgaagcggaagtggaggaaagatggaggaccatcagcacgtgcccatcgacatccagaccagcaagctgctcgattggctggtggacagaaggcactgcagcctgaaatggcagagtctggtgctgacgatccgcgagaagatcaatgctgccatccaggacatgccagagagcgaagagatcgcccagctgctgtctgggtcctacattcactactttcactgcctaagaatcctggaccttctcaaaggcacagaggcctccacgaagaatatttttggccgatactcttcacagcggatgaaggattggcaggagattatagctctgtatgagaaggacaacacctacttaggtaaagtggcccggcctgggagccctggtatccatggggaagcccactctcagagttctgagataccaggcttataggaggcacagtctgtgagtgggaagagactggagtgtagatgttgcccatttgtaggtggtaaaatcaattgtttttgatggaattgattttccctgagtggagtgctgggggaaggaggaggtccaggccggtagtggccattcgccgtgcctcagcgagcaggtgtgtgtgggtcctccaccactcacctcttggttagcgggagtgtgctgcccccacccccacccccgcacccccattctacacaaggcagaagaggcacgggttttcctgggagcgaatatcaagtgcctgagagcaactacaggactaactgtgtttgggttgggtgtagtataaataataataatggctaatatttcctgagcatctactaaatgcaaggaattgtgcttggtgtgtcatgtggattctctcttgcatcttcatgataaatgttattgtcgctgttttaccgatgagggttggattagaggggttaaacaacttgtcttaggctccacagctgggaacaagtggggctgggaagctgacttcgtgctcttcaccaccacaaaggatgtgtgtgcatcctggggcatgcctgcctcatgtgggggtgtcctgggctgaatttcctgggcacttctcagtggaactctctagcctcctggttcggaatgtcaactatgagatcccctcactgaagaagcagattgccaagtgccagcagctgcagcaagaatacagccgcaaggaggaggagtgccaggcaggggctgccgagatgcgggagcagttctaccactcctgcaagcagtatggcatcacgggcgaaaatgtccgaggagaactgctggccctggtgaaggacctgccgagtcagctggctgagattggggcagcggctcagcagtccctgggggaagccattgacgtgtaccaggcgtctgtggggtttgtgtgtgagagccccacagagcaggtgttgccaatgctgcggttcgtgcagaagcggggaaactcaacggtgtacgagtggaggacagggacagagccctctgtggtggaacgaccccacctcgaggagcttcctgagcaggtggcagaagatgcgattgactggggcgactttggggtagaggcagtgtctgaggggactgactctggcatctctgccgaggctgctggaatcgactggggcatcttcccggaatcagattcaaaggatcctggaggtgatgggatagactggggagacgatgctgttgctttgcagatcacagtgctggaagcaggaacccaggctccagaaggtgttgccaggggcccagatgccctgacactgcttgaatacactgagacccggaatcagttccttgatgagctcatggagcttgagatcttcttagcccagagagcagtggagttgagtgaggaggcagatgtcctgtctgtgagccagttccagctggctccagccatcctgcagggccagaccaaagagaagatggttaccatggtgtcagtgctggaggatctgattggcaagcttaccagtcttcagctgcaacacctgtttatgatcctggcctcaccaaggtatgtggaccgagtgactgaattcctccagcaaaagctgaagcagtcccagctgctggctttgaagaaagagctgatggtgcagaagcagcaggaggcacttgaggagcaggcggctctggagcctaagctggacctgctactggagaagaccaaggagctgcagaagctgattgaagctgacatctccaagaggtacagcgggcgccctgtgaacctgatgggaacctctctgtgacaccctccgtgttcttgcctgcccatcttctccgcttttgggatgaagatgatagccagggctgttgttttggggcccttcaaggcaaaagaccaggctgactggaagatggaaagccacaggaaggaagcggcacctgatggtgatcttggcactctccatgttctctacaagaagctgtggtgattggccctgtggtctaccaggcgaaaaccacagattctccttctagttagtatagcggacttaataaaagaggaaaaaactcttgcttcagta

SEQ ID NO: 5389 - DNA, 3738 bp, Homo Sapiens
  NM_025201
aagtttcttgggcccccggcagccggcgggacagaacgcggagagtcgccgcctggccgggcgtagacgcggtggcagagcccgcgcggcgctggaagcgagtggcggagcggcgggacctcggcggactcgccatggaggaggagggtgtgaaggaagccggtgagaagcctcggggagcacagatggtggacaaggctggctggatcaagaagagcagtgggggcctcctgggtttctggaaagaccgatatctgctcctctgccaggcccagctgctggtctatgagaatgaggatgatcagaagtgtgtggagactgtggagctgggcagctatgagaagtgccaggaccttcgtgccctcctcaagcgaaaacaccgctttatcctgctgcgatccccagggaacaaggtcagcgacatcaaattccaggcacccaccggggaggagaaggaatcctggatcaaagccctcaatgaagggattaaccgaggcaaaaacaaggctttcgatgaggtaaaggtggacaagagctgcgccctggagcatgtgacacgggaccgggtgcgagggggccagcgacgccggccaccaacgagagtccacctgaaggaggtggccagtgcagcttctgacggtcttctgcgcctggatcttgatgttccggacagtgggccaccagtgtttgcccccagcaatcatgtcagtgaagcccaacctcgggagacaccccggcccctcatgcctcctaccaagcctttcctagcacctgagaccaccagccctggtgacagggtggagacccctgtgggggagagagccccaacccctgtctcagcaagctctgaggtctcccctgagagccaagaggactcagagaccccagcagaggaggacagtggctctgagcagcctcccaacagcgtcctgcctgacaaactgaaggtgagctgggagaaccccagcccccaggaggcccctgctgcagagagtgcagaaccgtcccaggcaccctgttctgagacttctgaggctgcccccagggagggtgggaagccccctacacccccacccaagatcttatcagagaaactgaaagcctccatgggtgagatgcaggcttctgggccacctgctccaggcacagtgcaggtctcagtgaatggcatggatgacagtcctgagcctgccaagccctctcaggctgagggcaccccaggaactcctccaaaggatgcaacaacatccacagcactgcccccctgggacctgccacctcagttccatccccgctgctcctcccttggggacttgcttggggaaggcccgcggcatcccttgcagcccagggaacggctatatcgggcccagctggaggtgaaggtggcctcggaacagacggagaaactgttgaacaaggtgctgggcagtgagccggcccctgttagtgccgaaacattgctcagccaggctgtggagcagctgaggcaggccacccaggtcctgcaggaaatgagagatttgggagagctgagccaggaagcacctgggctaagggagaagcggaaggagctggtgaccctctacaggagaagtgcaccctagggccttctgggccagaggcaccatcccttctggccatccatcaagtccatcaaggcccagccctgctgagaaatgtgcttctgcttctacagcaatggctgcaggagggccattgggcatgtcagggtttggccatgacccgaagagactcctggcgtccttcctactctgctctggccagtggtgccaggtgccacccagggctactgcctggctatctggcctggcctctgggctggggctggggctgggagcacacacgctgggacctatgtgtttgtgtggtcgttccaaactgccccagggctttgggggcggcacttggggtttctgggaatgacatcatctctgttccccatccccagtagtttacattcctgacttctgaatacagcacagctgagccccctgcagctcccatctccagctattcctaggcaaagagcctcatggctaaggcagcctcaaagccagcccctcctcccacctattctgagtagctgcagaggccttgggtccaggctctaggttcatccctcagttggggggaacgtaggacccagctggagcctcttgagggagatgagaggcctctttgtgaggaggacattagctgtgtggcctctctctctttggccctgtttccttttttgcaaaacaaggacattttctgcagccccttcctctcagtgagctatgattggagggcttaggtctggaggattcaagagtggaagaggaatttaaggggtcccctagtctagtctctgcccctggatagtgtccagccttgtatatttctgaagaggtggatcccagagtggctctgatgtccacattagaaaaacttacttgtaatgatcatgtcagccttcagaagagaatccccaccaacttctgtgcctcctcagatggggatttatctggatctctgtggttccttctcagccgaaacaggtccagtatcccagtcatttcttcaaatgctgataggggtatgttggaatccgaagccacttccccgccttcaagccccagatgggctgctctcctgtaactttctaggagaagagacattttcttctttccctttcctggtccatccctgcaccctggtcctctcccagcctctcccccacattgtccctgactctaggggcacatccagtctccatcgtgctgcagcagctggactgagggcagagcctgtaggtgcagaggccctggctcccgaggtccagccactctccctggggcctctggggtgagagcagcttccgataggacctgcccagatttctgcatgtgcacttttgtttactgaaagagagaaaggggggggtcacagcaacatgccctggcctttctgctctgttccccaaccccactgaggcctgctgcacaggtcaatgccttcgttatcgttattgtactgtcactttgttcttgaggtagtagtcaaggatcaggaggggcagatgtcttctctgggctgcgtggggccggagcagaggtgagcagcaatgcactggttcgggagcccccatcagcctccttgtgcaaactgggcccccatgccacagtctggctttccctccatctgccccaggacaagagcaagaaggacatcagttgcccagtcatgtgatcccctgccatcttgccttaggaacagccttcccccaccagcagccatggctggctggggctttagccaagccacctactgccaggaattggagcctcagttccctcctgtgtcaagtagctaactgcagcagctggactgagggcagagtctgtgggtgcagagaccctgcatgtaggtcacaggttgaggcccagccactctccctggggcctggtgggtaggcaagtagctctggggccacctcaagtgaccaaatgctattaatttccatcctttagcaggctgggccctaggcaggaagctggcttctgggagaggagtgagaacgtgcagggcctgcctagcttgcgtgcttgaggaaggtggcattccgtgcttgcctccttgaggagggtggcattctgtgtcttctgcttatgaagcgcctttcttaaagtttggcaataaatccatttttatggaaaaaaaaaaaaaaaaaaa

SEQ ID NO: 5390 - DNA, 2000 bp, Homo Sapiens
  NM_025202
agtcgctgagccctggcgcctccttaaagccgcagctccgccccgaccgccccgcccgccagtccgtcctcagaccctcccaaccgccgggtccccgccgcctcggcggagtgttgtagagcctcgagcctgcgaggagcgcgccgcccgccagctccctgcgtcccgtcccgcgtccccgcgttcccgcgtcctgcgatccgccgccatggccagtgaggagctggcgtgcaagctggagcgccggctgcggcgcgaggaggccgaggagagtggcccccagctggctcccctcggcgccccagccccggagcccaagcccgagcccgagcctcccgcccgtgcgcccacggccagcgccgacgcggagctgagcgcccagctgagccggcggctggacatcaacgagggcgctgcgcggccccggcgctgcagggtcttcaacccctacacggagttcccggagttcagccgccgcctcatcaaggacctggagagcatgttcaaactgtatgacgctgggcgggatggcttcatcgacctgatggagctgaagctgatgatggagaagctgggggccccccagacccacctgggcctgaagagcatgatcaaggaggtggatgaggacttcgatggcaagctcagcttccgggagttcctgctcattttccacaaggccgcggcaggggagctgcaggaggacagtgggctgatggcgctggcaaagctttctgagatcgatgtggccctggagggtgtcaaaggtgccaagaacttctttgaagccaaggtccaagccttgtcatcggccagtaagtttgaagcagagttgaaagctgagcaagatgagcggaagcgggaggaggaggagaggcggctccgccaggcagccttccagaaactcaaggccaacttcaatacatagtcctgctgaccttgccctctgcccacagctgtgcctcacagatgccccgagaagagatgactaggcatcttcatcactgctgtcggtcccctccctgagccagcatctccatccaccaccccgtgccagctcccgtgccagccttcattcctcccagtgtccaagcccctccaggagggtcctggggtgggccagatgcctgcccacctctgtctcctgcctctgctcctctgcccttcttatagccagaacttgtatcttctcagcaaccttcactttgtccttgtccctttaccattccccatcaaagagtagtctgctatatcaatttgtgtagatatgtctgtctttttgggtcctcagagaaaatgcccattttctcggagaattctctgcactcctctctgcttcacattcaacttccctgttctcatctttggtaggattctgccagttgcttttgcatcttctgttcctgggtaatggtgggtcttaatggaggctgggtggaccactgcccgtccactcttcaacaggaggaacagcatgccaccatagtaacacacattagagaaaggacagaggtctgctccttcctgccacctttctcctggccccttagcattcccccagtccctccctcttcaccttgctccgtctatgtcttcccagctcagccttttccccactcttaaatactgtactacttcactgtaagaacgaaagaatagttaggataccaatgagtaaaagggttcctgttcactctgactctgtgcaaattgtattacagtagaccgctgacgttcccaagtgacagatccagggcctttcaaacatccccaaagtcatggccatactcaccattagccagtttctaacatctgtttcagggtatccagctgtagatgttcttatcccccatacttgtgagttcttggggttgctcacaaatactaggggtttttgttgtatttttaacaaatatatcctaatgtcatatttattctcttttgtaactgctgtctttacaataaagaaatcatctgcctttctatcttaaaaaaaaaaa

SEQ ID NO: 5391 - DNA, 3897 bp, Homo Sapiens
  NM_025203
agaggactgagggccggtgcttccggtggctgcccagaacttcttatgtgcggcggcgtgatgttgggcggccacagagagattggtgtttttgtgaggcagtgagacctaaggtaacctttatcaaaaggatggagttgggaaaaggaaaactactcaggactggactgaatgcgttgcatcaagcagtgcatccgatccatggccttgcctggaccgatgggaatcaagttgtcctaactgatttgcggcttcacagtggagaggtcaagtttggggactccaaagtcattggacagtttgaatgtgtctgtgggttgtcctgggccccacctgttgcagatgatacacctgttctactcgctgtccagcatgagaagcatgtcactgtgtggcagctgtgtcccagccctatggagtcaagcaaatggctgacgtctcagacttgtgagattagaggatcactacctatccttccccagggctgtgtgtggcacccaaaatgtgctattctgactgtgttgactgctcaggatgtctccattttccctaatgttcactctgatgattcccaggtaaaggcagacatcaacacccagggccgcattcactgtgcatgttggacccaggatggcctgaggctggtggtggcagtaggcagcagcctgcattcttatatttgggacagcgctcagaagactcttcacaggtgctcctcctgcctggtgtttgatgtggacagccacgtctgctccatcacagcaactgtggactcacaggttgctatagctactgagcttccattggataagatctgtggcttaaatgcatctgaaacctttaatatcccacctaacagtaaagacatgactccgtatgctttaccagttattggtgaagtacgctctatggataaagaggcaactgattctgaaacaaattctgaagtatcagtttcttcttcctatttagaacctctggatctaactcacatacatttcaatcaacataagtctgagggtaattctcttatttgtctaagaaaaaaggactacttgacaggaactggccaagattcttcacatttggtccttgtgacctttaagaaggcagttaccatgacgagaaaagtcactattccaggcattctggttcctgatctgatagcatttaatcttaaagcccacgtagtggcagtggcttccaacacttgtaatataattttgatctactctgtcattccatcttcagtcccaaacatccagcaaattcgattagagaacactgaaagaccaaaagggatatgtttcttgacagaccaactattactaattttggtaggaaaacaaaaactcactgatacaacatttcttccttcttcaaagtctgatcagtatgccattagcttgattgttagagaaataatgttggaagaagaaccttcaataacatcaggtgaaagccagactacctactctactttcagtgctccgttaaataaagcaaatagaaaaaagttaattgaaagtctttccccagatttttgtcaccaaaacaaagggctgttgctgacagttaataccagtagtcagaatggaaggcctggaagaacacttattaaagaaatccagagtcctctgtctagtatctgtgatggctccatagctctagatgctgagcctgttacccagccagcatcgctgcccagacacagcagcacaccagaccacaccagcacactggagcctcctcgtttgcctcaaagaaagaacttacaaagtgaaaaggaaacttatcagctgtctaaggaagtggaaattttatctaggaacctggttgaaatgcaacggtgtctttctgaacttacaaaccgtctgcataatgggaagaaatcctcttcagtgtatccactctctcaagatcttccttatgttcacatcatttaccagaaaccttattatctaggtcctgttgttgaaaaaagagcggtgcttctctgtgatggtaaactaaggctcagtacagttcagcagacttttggcctttctctcattgaaatgctacatgattcccactggattcttctctctgctgacagtgagggctttatcccgttaaccttcacagccacacaggaaataatcataagagatggcagcctgtccaggtcagatgtcttcagagactctttttctcacagtccaggtgctgtttcttctcttaaagtctttacaggccttgctgcccccagtttagataccactggctgttgtaaccatgtagatggcatggcttgatatctgcagtgtccttgctgtgtagctcttcagatgagaccattacaaacaaggcctgcttgacactggacactcgccaatgagactcccactgcactcaggcgaagcgcttgccatggtcggctctcctggtttccccctgtttcccctgagctgaggctcgctgctgtgtagcagagctcagtctttattagatggctccgaaagtggtgtttatgtattcatgactgtgtggttttgactaagggcagaattctcagaacaaaacaatattatggtgccatatggatggtgttttatggtttctctgaggctttgtgtcccttgtccaaagctgcattgaagctgtcttaggagcacttaaaagataccttggcattgttataggtctttttcttggcttcaagaggaggttgaggagtctgctggggggcatgtgctctagcatattaacctcaaaccagcaagaattagcagagctccaaggaggaccagagacccactggcttctgctctcaggaacaggaagtggctctgatgttgcctggacctcccagaatttaaaccaaaccctcttgcttccttaacaaattctggctgacgaaggtccaggtactcttaaaaactggccctgggaaaattttgaatgaaatttcaagggaatttgtcccctctgggttccacttgaggttgtgccgatgctgctaccacactgtcgagcccaggtaagtcctactgcaggattttgtgctgtggccactcatgagtgtccctgaaataactttttttttttttaaatccagttttgggatcacgcaactttcctatttttctcccagtagtcagctcccttagttaacttgtcactttaatttgatatttttattttctctccttttaagtcttagagaccagcagagaatctgtgagagaaagtatttcaggaagttagaaattcaaccgaatctgaggtagtcctaaaaagtgccattttgtttcacttatgggctaaagtaccagcttagtcaggtaagagccctgacccacttcagatggtaacaccacttctcactgccttcagatggaatcacagatttcagtcacggcgcataacaaattgatcagtgagtggctaggcatctgcagataaattgtttcagccatagaagctccattagcacatatgcttccttttccccccttcctttaaaatcatctggaaagaaactattttgtgcccttggggactcctgtctgtctgttacagtttaccaagatggagctgggttaggaaagaagtgagggcccattttgtggttcaagtgcactagacagctgctggggtaggaagcacaggcaatgtctgtaatcagctgtgggagagcagtgactgagaacagtctgaggcctggctccacttggaagtatctggggtgcgatgaaatcacaattatcttgaagcctaaagagggaactacaagactgttaactaagatcaatgtgggcacctaaaagggtatgttaaaatcaccatttctcaggtcaaaatactgtgaataagtcttcaataaaatcactaatggttattgtggctgttaaa

SEQ ID NO: 5392 - DNA, 3997 bp, Homo Sapiens
  NM_025208
tctcaggggccgcggccggggctggagaacgctgctgctccgctcgcctgccccgctagattcggcgctgcccgccccctgcagcctgtgctgcagctgccggccaccggagggggcgaacaaacaaacgtcaacctgttgtttgtcccgtcaccatttatcagctcagcaccacaaggaagtgcggcacccacacgcgctcggaaagttcagcatgcaggaagtttggggagagctcggcgattagcacagcgacccgggccagcgcagggcgagcgcaggcggcgagagcgcagggcggcgcggcgtcggtcccgggagcagaacccggctttttcttggagcgacgctgtctctagtcgctgatcccaaatgcaccggctcatctttgtctacactctaatctgcgcaaacttttgcagctgtcgggacacttctgcaaccccgcagagcgcatccatcaaagctttgcgcaacgccaacctcaggcgagatgagagcaatcacctcacagacttgtaccgaagagatgagaccatccaggtgaaaggaaacggctacgtgcagagtcctagattcccgaacagctaccccaggaacctgctcctgacatggcggcttcactctcaggagaatacacggatacagctagtgtttgacaatcagtttggattagaggaagcagaaaatgatatctgtaggtatgattttgtggaagttgaagatatatccgaaaccagtaccattattagaggacgatggtgtggacacaaggaagttcctccaaggataaaatcaagaacgaaccaaattaaaatcacattcaagtccgatgactactttgtggctaaacctggattcaagatttattattctttgctggaagatttccaacccgcagcagcttcagagaccaactgggaatctgtcacaagctctatttcaggggtatcctataactctccatcagtaacggatcccactctgattgcggatgctctggacaaaaaaattgcagaatttgatacagtggaagatctgctcaagtacttcaatccagagtcatggcaagaagatcttgagaatatgtatctggacacccctcggtatcgaggcaggtcataccatgaccggaagtcaaaagttgacctggataggctcaatgatgatgccaagcgttacagttgcactcccaggaattactcggtcaatataagagaagagctgaagttggccaatgtggtcttctttccacgttgcctcctcgtgcagcgctgtggaggaaattgtggctgtggaactgtcaactggaggtcctgcacatgcaattcagggaaaaccgtgaaaaagtatcatgaggtattacagtttgagcctggccacatcaagaggaggggtagagctaagaccatggctctagttgacatccagttggatcaccatgaacgatgtgattgtatctgcagctcaagaccacctcgataagagaatgtgcacatccttacattaagcctgaaagaacctttagtttaaggagggtgagataagagacccttttcctaccagcaaccaaacttactactagcctgcaatgcaatgaacacaagtggttgctgagtctcagccttgctttgttaatgccatggcaagtagaaaggtatatcatcaacttctatacctaagaatataggattgcatttaataatagtgtttgaggttatatatgcacaaacacacacagaaatatattcatgtctatgtgtatatagatcaaatgttttttttggtatatataaccaggtacaccagagcttacatatgtttgagttagactcttaaaatcctttgccaaaataagggatggtcaaatatatgaaacatgtctttagaaaatttaggagataaatttatttttaaattttgaaacacaaaacaattttgaatcttgctctcttaaagaaagcatcttgtatattaaaaatcaaaagatgaggctttcttacatatacatcttagttgattattaaaaaaggaaaaatatggtttccagagaaaaggccaatacctaagcattttttccatgagaagcactgcatacttacctatgtggactataataacctgtctccaaaaccatgccataataatataagtgctttagaaattaaatcattgtgttttttatgcattttgctgaggcatgcttattcatttaacacctatctcaaaaacttacttagaaggttttttattatagtcctacaaaagacaatgtataagctgtaacagaattttgaattgtttttctttgcaaaacccctccacaaaagcaaatcctttcaagaatggcatgggcattctgtatgaacctttccagatggtgttcagtgaaagatgtgggtagttgagaacttaaaaagtgaacattgaaacatcgacgtaactggaaattaggtgggatatttgataggatccatatctaataatggattcgaactctccaaactacaccaattaatttaatgtatcttgcttttgtgttcccgtctttttgaaatatagacatggatttataatggcattttatatttggcaggccatcatagattatttacaacctaaaagcttttgtgtatcaaaaaaatcacattttattaatgtaaatttctaatcgtatacttgctcactgttctgatttcctgtttctgaaccaagtaaaatcagtcctagaggctatggttcttaatctatggagcttgctttaagaagccagttgtcaattgtggtaacacaagtttggccctgctgtcctactgtttaatagaaaactgttttacattggttaatggtatttagagtaattttttctctctgcctcctttgtgtctgttttaaaggagactaactccaggagtaggaaatgattcatcatcctccaaagcaagaggcttaagagagaaacaccgaaattcagatagctcagggactgctaacagagaactacatttttcttattgccttgaaagttaaaaggaaagcagatttcttcagtgactttgtggtcctactaactacaaccagtttgggtgacagggctggtaaagtcccagtgttagatgagtgacctaaatatacttagatttctaagtatggtgctctcaggtccaagttcaactattcttaagcagtgcaattcttcccagttatttgagatgaaagatctctgcttattgaagatgtaccttctaaaactttcctaaaagtgtctgatgtttttactcaagaggggagtggtaaaattaaatactctattgttcaattctctaaaatcccagaacacaatcagaaatagctcaggcagacactaataattaagaacgctcttcctcttcataactgctttgcaagtttcctgtgaaaacatcagtttcctgtaccaaagtcaaaatgaacgttacatcactctaacctgaacagctcacaatgtagctgtaaatataaaaaatgagagtgttctacccagttttcaataaaccttccaggctgcaataaccagcaaggttttcagttaaagccctatctgcactttttatttattagctgaaatgtaagcaggcatattcactcacttttctttgcctttcctgagagttttattaaaacttctcccttggttacctgttatcttttgcacttctaacatgtagccaataaatctatttgatagccatcaaaggaataaaaagctggccgtacaaattacatttcaaaacaaaccctaataaatccacatttccgcatggctcattcacctggaataatgccttttattgaatatgttcttatagggcaaaacactttcataagtagagttttttatgttttttgtcatatcggtaacatgcagctttttcctctcatagcattttctatagcgaatgtaatatgcctcttatcttcatgaaaaataaatattgcttttgaacaaaactaaaaa

SEQ ID NO: 5393 - DNA, 2375 bp, Homo Sapiens
  NM_025216
acagtcacttactctacaggcagtggggcccgacacagacagcgccgcccccgccagccagcctcgcacgccctcggaagcgcaggctcccggcgctgcgctggagggttccccggcaccccagcctcccgtccccagcccgctgcacctccgggccccccttacccttgagaggcaccgggagttgtcgcgggggggcctcgggaaattccccggacccctgtgccaggaggtgcccggttcgcccgctcttcaccccccgccccccccgagggcggtgcccgggggtgctgccccatggagcggggaggcgggcgccgtctgctccgggagccctgacccgagtcggagctgtgtgtcgcagccgccccgaccccccgccgatcatgcgccggcgcccctggctctccagtcccactgggctgtgagccccccactcccagcccgtcagggcctgcgcgccatgggcagcgcccaccctcgcccctggctgcggctccgaccccagccccagccgcggccagcgctctgggtgctcctgttcttcctactgctgctggctgctgccatgcccaggtcagcacccaatgacattctggacctccgcctccccccggagcccgtgctcaatgccaacacagtgtgcctaacattgccaggcctgagccggcggcagatggaggtgtgtgtgcgtcaccctgatgtggctgcctcagccatacagggcatccagatcgccatccacgaatgccaacaccaattcagggaccagcgctggaactgctcaagcctggagactcgcaacaagatcccctatgagagtcccatcttcagcagaggtttccgagagagcgcttttgcctacgccatcgcagcagctggcgtggtgcacgccgtgtccaatgcgtgtgccctgggcaaactgaaggcctgtggctgtgatgcgtcccggcgaggggacgaggaggccttccgtaggaagctgcaccgcttacaactggatgcactgcagcgtggtaagggcctgagccatggggtcccggaacacccagccctgcccacagccagcccaggcctgcaggactcctgggagtggggcggctgcagccccgacatgggcttcggggagcgcttttctaaggactttctggactcccgggagcctcacagagacatccacgcgagaatgaggcttcacaacaaccgagttgggaggcaggcagtgatggagaacatgcggcggaagtgcaagtgccacggcacgtcaggcagctgccagctcaagacgtgctggcaggtgacgcccgagttccgcaccgtgggggcgctgctgcgcagccgcttccaccgcgccacgctcatccggccgcacaaccgcaacggcggccagctggagccgggcccagcgggggcaccctcgccggctccgggcgctcccgggccgcgccgacgggccagccccgccgacctggtctacttcgaaaagtctcccgacttctgcgagcgcgagccgcgcctggactcggcgggcaccgtgggccgcctgtgcaacaagagcagcgccggctcggatggctgcggcagcatgtgctgcggccgcggccacaacatcctgcgccagacgcgcagcgagcgctgccactgccgcttccactggtgctgtttcgtggtctgcgaagagtgccgcatcaccgagtgggtcagcgtctgcaagtgagcggcccggggtcccctgggccctgatcgaggtcccctcctggagcctggccctctgaggcttacggtcttggcaaggcagcatcgccttggctcttgggaagaggagattggaccacatgatcttataggaacccctcagctctgaggtctgtgatcgccggacagtccaggcctgtctgaaccccaccactcacttctgtgggctctaggactgactgggttcttcctccctccccgaagcccagacagttcagttgggctgggggttgctccacaccctaaaacaagcctcagccaggcaacccgtcagtctgtctccatcctttcaccccttccctggagatgggaggtggggaatgaatggaagctgacgggcagagagaggaggattaaaaaaaagaaatagacataactgagctgaagtaattccataaagggcccagacagcctcctccaccattcccttcatcattcatttaacaaatatttattttgcactctctttgcggcactctgggggcggtggggtgcgtgggggtggcaatgcaaggcactgaggccacagatgtgagtaagcgagacacaacacttgtcctcttggaggttacattcttgctggggggaggcatgggcaataaacaagtaaatatacaaac

SEQ ID NO: 5394 - DNA, 5307 bp, Homo Sapiens
  NM_025219
gggagcgcgcgcgccggtgcgggtgcgtgcgtgagcgtgctcgtctccgctgccgctgccgctgccgctgccggtgccgcacccgcgccctctgccgccgccgccgccgccgcccggggtctccaggctgaggagtgcgtcggccgctgcccagcagcgccgcgaatcggggagcggagccgcggagccggcgggagggcgggcgggcgggcggacgggcagaatagcctaacatggcagaccagagacagcgctcactgtctacctctggggagtcattgtaccacgtccttgggttggacaagaacgcaacctcagatgacattaaaaagtcctatcggaagcttgccttgaaatatcaccccgacaagaaccccgacaacccggaggccgcggacaagtttaaggagatcaacaacgcgcacgccatcctcacggacgccacaaaaaggaacatctacgacaagtacggctcgctgggtctctacgtggccgagcagtttggggaagagaacgtgaacacctacttcgtgctgtccagctggtgggccaaggccctgtttgtcttctgcggcctcctcacgtgctgctactgctgctgctgtctgtgctgctgcttcaactgctgctgcgggaagtgtaagcccaaggcgcctgaaggcgaggagacggagttctacgtgtcccccgaggatctggaggcacagctgcagtctgacgagagggaggccacagacacgccgatcgtcatacagccggcatccgccaccgagaccacccagctcacagccgactcccaccccagctaccacactgacgggttcaactaaatccaggaggagctgtggtcagaggaggagccggcgcctggccacgccaaccttagaatcatgaactgtagtcacagagatgggaaggcagcctcctgcctgccctggccttgctggggcccctcctgcctccacgcccacccagcgtcgacccttgacccacgaagtgcgtagcatgcagtatttaaagcagtgtagctacggtcttctgtttttttcccttttttaatagcatgtatggggttctgttccatgtctgtgttgtggacattccgcggcatgaccgcgtgaactgcacggtggagctgcctcagggctgtcggtcaggttggtccagtgaggggtgactgcagccggtcaggtgggcgaggagaaggggggctgcccctttcctacctgtgcttgaggggccggaggcaggtgctgcctggcagagctgtgttaccgtcttggcctcggggtctggtccacactctgtgctcccagccttgaggctgcagtaggactctgatctcacctgccagaagagaggcggggccgcgtcctcctggcgtcaccggcgtcactgtcattccttggtgtctgtgctgggcatggttggcttgggggtctgtggtttcctgggccttgtggcagggtttctcccgtgggagaatttggtgtggaaagcataggaggccccttccgaggttgacaccgtgtcctccgcggtgtttctcgcctggtcgtctcgtcgtgtggacgctgccgttctggttctcggaggtgtgtccttcgccgtgttggggttatttgtctgtgttcctgcacttttcccgggctctgagctggattgatggggccagtctcccccctcccatcttgaggtcgttctccacattccttccagcacacctgtcctttccatagccctttttggacctttagaaccacagatgataggaccagcccaatgagccacagtcagagagtagattgtgcatgtgtgagcacccagctactggggacgggggctctcccacgacccctcctcctgtgtttgccagagctcccatctgccccactcgcctttgccccgtcatcgatgattcaggcagagccagattcgttaggtccctggaggaaggactgactggaccagagggaccctctggctcaggagggttgggtccctgggaggccggcagccaggccacagaatccacacgtggaccattgtgggtccctgggaggccggcagccaggccacggaatccacacgtggaccattgtgggtcccttgggaggccagcagccagactacggaatccacatgtggaccatgggaagtcagtctcttgcgtgtcctagaccttgtgggtggcgccctgcataggggagcagggggaacgggtctgatgtccctgtgctggctgagggctcagagctgcccgcactccgtagctcatgggatgtgctgggcctgcctttggcgccatgctgcagactccagtgggcctggtttctgcagaatgtccatggtggccgctgcagagttgcagaggtccctgtagagataaagctgaggaggaggctgtgtgtgatggctctggctcggaccaaccagatgagcctcctgaagcccccttccctgcctgcctgctgacccgtggccccagctcactcattgccctcagcagccacccgaggctgtgcagaagggtaggttcaggttgaccaggaagctgccaaaagggacatggatatgaggatacatctggacgtgcttaggaacagggtgctggttgagggcccccagctgacccctactgcagatccgcatgtggaccatgagccggctgccagcactaggtcctgggcagctttgtttgtcccacttttctttgtttcttctcactaaaatgatcacgaagacctttgacaagaggagagatatgcactgtgatattaaattagaaataatttatcaaaatcagacctctcctaaaagaataagaaattcattgtttggcccatcctgaaaggtgaggtggcgagacagtggggtgcctccgtgccgcttcgtgcagcagcaagttcagcctgagatgctggctgtactcagcctttgcaatttttgtagatgtagcttaggacgtgagttatttttccgcagactggccaagagccaggttctaagcttggacctaaggtagaaagctgcccatcgggggccctagctcagccccaccaggccctctgttgggcctgcacacagctctgtggctagaacactccaaggcccttcggtacccatcagagtgggccccttgccaggtggcttttcagttacagagtccagtggaccattttgtagaaccatgcagctccctgcggaaggtggggtagggtgggaaagaggagcaggtctggaggtttgtggaacccagtcccctgcagaatctgtaaaacctaataaatcatggttgtggccattctcacggtggtgattgtgattagacgacccccgggaagcccagacactcggggcctggagttcctccccctgcctgacctagaagcagaaccgttttcagcgctctgccctgttggctttaaggctttgtcttaatttaaggaaaaagatcctcccgggttttatttctctctttcttgagtggactgtttccctataattaaaagaggtggtgagtcctggggcagcttccgcgcctccctgtccacgtgctaacagatcaggacgcccccagcacccctgcctgcttttgctggtggcagtgacgggaccccgactcctcactctcgggccgcagacaatgctgtgagcaagtgtggccatgggcacagaatgtccctttggacgccgctgctgggggctgccaggggccctctggggtcgtgctttgaggcccgtccggttcacgagggggtccgggcagcactgactgcttccgacctgcaggaggcgtaggagcggccctgcgggccctttcacggcagctgctgctgtatagatttgtctccactcagtgacgtgggatttttttgtcttccttttggctttatttttaaactgctttagatattactgctcagtgtttgtgaactttcctagttctctatgttgttagtgcagccagcacccagtggggacctactagaaaaaggaactggcatgcacacgtgcccagcaggaaaagcttcgtcttcacgtcggctgctgccatccagaagaggccctggagcctcacgccgtcgaggctgctctcaggcgttctgttccgggcgaggcttgtgctgcaaggaagggcaccagcatgcaggctgccactggagggtccgggtgctgcgggcagagttcagcgcttgtccaccctcccttagctctgactcagtgcatcctactgtggggacatctcgtgaggggacacgaaatgactgatctcaccctttcccagtattcagagctgtgaacccctgtggcgcaggactggcctgtgtctgttattttggttgtaaatcattctcctgtggaattggcaaaagctacatttttactgtccttaccagcaacagtttgcgtcgtcacatgctgtgagtgtgggctgtggtgtgtccgtgtgtgtacatatgtgtatatgtatatatcacgcagcaggagtgtcattcatgctgctgtcccctggtgaagtgacaagtacaattaaaggtggctctgaaatggcctctggtttcttgggagtcgggcagggacctgcaggaggctttcccagcaggtgcacagaaggaagcgctgagcccactgtgtgcagagggtgtgtgcccagggcactgccacggcccccaccagcattggcctctgctctgcagggtggggtgcccatcctgggggctgtgtgtcatgctcacctgacccaggtgtgtgtcccggtgtgaaatcgaggaggggactggaagcccttccctgccttgaaacatgaaagctgattttctgagcagcagatacggtcagtggcaaagctgcatctgaagggcggcctgggaaggggccctgtgctggccccgggtccgccccagaggagtccacacagcaccacctccagaaggggctgggcccggggtcctgcaggcggcaccttttggtagagtttgtttccctggaaaatggggaaaatgtttcaagccaggtgaggggggaagttaacactgaaatatgtattgtttttaaaaatcaaatgcacacgcatggaagctgcttgtccatgcactggttttgtcactggcgtcctggaatccgaccgtgttggggtgcaggcgctgtcagactccggctgatcctggctcgagcacacacatctaagggccaggctggttccgcatggtgatctccgtcttgtatgtctgaatgttggcctaaaataaagattactgttgtaaaataaatgttttcactgcggaccccaaaaaaaaaaaaaaa

SEQ ID NO: 5395 - DNA, 4292 bp, Homo Sapiens
  NM_025222
ttctgcctgtcgccccaaaatggcggacacaatgagccggcgacgcgccggttgtccgtgaggtggctgtgaggacgaacggtcggcgaggctccacagtccaggcagaagaccctcgaccaagcaggaagaagaggaggaggcggcccaactgttggccgacttcccgctagccgccggcgcggcgcccgccccgcctgggttggcccctcggcagcccgcccgctcgccgccgggccccgccccggccctgcgccgccgctgccttccccagccgccgccatgaagctgaccgacagcgtgttgcggagcttccgcgtcgctaaggtgttccgcgaaaactcggacaagattaactgcttcgatttcagccccaacggcgagacggtcatctcgagtagcgacgacgactccatcgtgctctatgactgccaggagggcaaaccaaagagaaccctgtacagtaagaaatatggtgtggacctcatcagatacactcatgcagcaaacacagttgtttacagctctaacaaaatagacgatactattcgttacttgtccttgcatgacaacaaatacatcagatactttcctggacatagcaaaagggtggtggccttgtccatgtcacctgtggatgacactttcatttctgggtctcttgataagaccattcgactctgggatctccggtctcctaactgccagggcctcatgcatctgcaggggaagccagtttgttcttttgatccagaagggttaattttcgctgcaggtgtcaactctgaaatggtcaagctttatgaccttcgttcttttgataaggggccatttgctacctttaagatgcagtatgatcgaacttgtgagtggacaggacttaaattcagcaatgatggcaagctcatcctcatttccaccaacggcagcttcattcgtctgattgatgcattcaaaggagtggtgatgcacacatttgggggttatgccaacagcaaagctgtcacactggaggcttcatttactccagactctcagtttattatgattggttcagaggatggcaagatccatgtctggaatggagagagcggtataaaagtagctgtgttggatggtaaacacacaggcccgattacctgtttgcaattcaaccccaagttcatgacttttgccagtgcgtgttccaacatggccttttggttgcccaccattgatgactgaccctgttgctgcttggctatttctgtatagtgagggcggccagcaggaagaaactcagagggaactgagataatagtgggattggatcatttgactgggctggagaacatccttttacatggccttcccatggatgtgctgtacatctgctcaaaagaaaataattactttgatgagcgtcttcaaaaggactcttggtgcaacagactcaattggaactcagcttttctaactgtcactgcaccaagctctgctggaggagtgaccagactcacgatttggtatagtggggctctcaagcatcttcaatttgaatgtacatgctgctgaggagccggtgaagtcatcagttccgcacatcccttctaccctccaactgcatgggaagccaaagtcctggttttgaaatgcttgggcagctcagccgcttgccctcaccctgcatgtcttgttactgggtctccctgtgtacttgtggcattatccacaaccatcatgtttcttaggtgccaaacatttacagaaacattttcatatatcttggggtcagagaaagggacagatacagaaggaccttgcttgcaggaagccatgcagttagtttctgcagttagtcgtgtgaggctaggtggttgggcaggcctcgggctgtaggtgttgggtgggaaaaagacccaagggcctgaaagggagggaaaggggagggtagcgggagggtagcaggtgagttcctagggctggaaggtttagcagcagcctggtgcagtgccctgtcatcaagacaaacccacggtcctcctgggtgcctaccaagcttggtttgtacaaaagcaaggtgggagtctatttttgtacatgagatacatcacacttacctgtgggccagtattgtgaagtgagtctgagttgtttacactgatgccttccctgcccaccacaaattgtgtacatagtcttcagatgataccacccctttccccagctcccaaccaagagctggttctaggcctgtgttatatgtcatatttagcgtttttatatatgacctttgatttctgttgtttgtattttagcacagtgtatgcaccttcatttaaatacatctgtgtgcatacagatacgcatatatgtgtgtgcgtatgcatatatctctcatctgtagtttccaagagttcagctgaagcagatggagtcctgcagcccaggagacaccctgcatccctgctaatagtgtttgccacaagtattagtgagtcttccttattaatattttcatttcagaagactgaagcaaagctgatagtgtttgctgtttctttggcagctaagtgagggtcttgggatgacttgctgtgttcctcaagctgcactttggggccatctctgcagtattagccccctttttgcttggtggtactctgtctgtgcctgtgtgtgtgtgtgatagtcactcttgcatggcttccatgtctggtttgtggcatttggggataaggtgctgaagccagagcatttgcagtttgtttgaggcctcgttgccaatgatagatcactcctgttgacctggtatgtctgcttgcttgctgcttttccttgctttctcttggaagaggaaaggactctggtcaggcccaggctgagtgagatgagctgcagctggctcatggccttcttagagcagagagaggagtatgtcattttactaagttcctaaacaaacatttatgcaggcaacactccttgcagatccagaaactgaggcacaatagggttatgacttgctcaagaatatgtagctgctagggggtaaatcaaggcatcacaatttctgttcagcgggcaggaataggctgtgaattgctagcactttttttttttaagcaattactttttgacttgttcctctgaaagtgcaagaggcgtacacctttcccaaatgtagactagaatctgcaggatgccacccactgtatagttctgctttcccagagaggaagaacttttagaaaccaaatgatcttaattgttattgcccacccctggcttttccgggtagaaaattcacagtaggaatgattgttaagagagagtgcttggaaccatgggttaacaggaaaggctacctaacttcacatatctgcaaccagagcagccaccaagcattacttagcagcaggaaaatgattgtatttgagttcctgtgtgtccaaaactgagcaccatgttctttgaaaacatgccacctcaaggctgggcgcggtggctcacacctgtaatcccagcactttgggaggccgaggcgggcggatcaccggaggtcgggagtttgagaccagcctgaccaacatggagaaaccccatctctactaaaaatacaaaattagccgggcgtggtggcatgcgcctataatctcagctacttgggaggctgaggcaggagaattgcttgaacccaggaggcggaggttgcggtgagttgagatcgtgccattgcactccggcctgggcaacaacagcaaaactccgtctcaaaaaaaaaaaaaaaaaaatgccacctcacagtctctatcgttgggccctgtggttgcaaagctgcctcctgaattaagaaggaaagggaaaagatatagctggaagcgagtggaagagatgctgagggctggggctgcacagacgtgctcagcagggctacaggtgctcaagccctattggggatgggtggggagtggggcagcggcgtttgccaccttaagaattggggccaaagccactgatgtttatttgacagtgacactgcactgggtacttaaagaaattatttcccgttgtaattataattactgcttattaaggaaaatatgggaattttagaaagaatcaagtttgccacccaaatgctaccactgttaatcttttggtgttaaatgttccccctagacatttctgtgcatagatttttggtgtgtttacatagtcgttattctgtatatacaattttatgtcccttttgtacttaacgtataaacattttttccatgttacagtcttaaacagaattttatggctgc

SEQ ID NO: 5396 - DNA, 4376 bp, Homo Sapiens
  NM_025224
tgaccttctctcctccctgtgtctttttttttcctttagagatgggggtcttgctctgtcactccagctggagcacagtggtgcaatcggagctcactgactgcggcctgcaactcctgggctcaagtgattctgccgcctcagcctctcaacgtgctgcgattagagagtctgtagaagaggcgacaccagggcttccaaatgaacaaccgaaaggaagatatggaaatcacgtcccactaccggcacctgctgcgggagctcaacgagcagaggcagcacggcgtcctgtgcgacgtctgcgtggtcgtggagggcaaggtcttcaaggcgcacaagaacgtcctgctgggcagcagccgctacttcaagacgctctactgccaggtgcagaagacgtcggagcaggccacggtcacgcacctggacatcgtcacggcccagggcttcaaggccatcatcgacttcatgtactcagcgcacctggcgctcaccagcaggaacgtcatcgaggtgatgtcagccgccagcttcctgcagatgacggacatcgtgcaagcctgccacgacttcatcaaggcggcgctggacatcagcatcaagtcggacgcctcagatgagcttgcggagttcgagatcggcgcctcgtccagcagcagcacggaagctctcatctcggccgtgatggctgggaggagcatctccccgtggctggcacggcgaacgagtcctgccgattcttccggagactcggccatcgccagctgtcacgacggagggagcagctacgggaaagaggatcaggagcccaaggccgatggccctgatgatgtttcttcacagcctctatggcctggagacgtgggctacgggcctctgcgcatcaaggaagagcaggtttcaccgtctcagtacggagggagcgagctgccttctgccaaggacggtgcagtacagaactctttctcagagcagagtgctggtgatgcctggcagcccacgggccgaaggaagaatcggaaaaacaaagagaccgtccggcacatcacacagcaggtggaagatgacagccgggccagctccccggtgccgtccttcctgccgacgtcggggtggccgttcagcagccgagactcaaatgcggacctgtccgtcaccgaagccagcagctccgacagccgaggagagagggccgagctctatgcacaggtggaggagggtctcctgggaggagaagccagctatctgggccctcccctcaccccagagaaggacgacgccctgcatcaggccaccgcggtggccaacctgcgcgcggcgctcatgagtaagaacagcctgctgtcgctgaaggccgacgtgctgggggatgacggctccctgctgttcgagtacctgcccagaggggcccactcgctgtccctgaatgagttcacggtgatcaggaagaagttcaagtgtccgtactgcagcttctcggccatgcaccagtgcatcctcaagcgacacatgcgctcgcacacgggagagcggccctacccctgcgagatctgcgggaagaagttcacgcggcgcgagcacatgaagcgccacacgctggtccacagcaaggacaagaagtatgtgtgcaaggtgtgcagccgcgtcttcatgtccgccgccagcgtgggcatcaggcatggctccaggcgccacggtgtgtgcaccgactgtgctggccgcggcatggccgggcccctggaccatggcggcggaggcggcgagggctctccagaggcgctgttcccaggcgacgggccctatctggaggaccctgaggacccacgaggggaggcggaggagctgggcgaggacgacgagggcctggcccctgaggatgcgctgttggcggacgacaaggatgaggaagactcgccgcggccgcgcagccccccaggaggccctgacaaggacttcgcctggctctcctaggcccgcccgccggcagggtcggtggctgcctcgctccgtccacccgtgtgtgtgtccggtgggtctccactgcggggccagggccacgctcacccctctcgcggcccctcctctgcttccccctgaacccaccccccacggaaaccagccctgcgggctaagcaggtgcgaccccagcaagaggggtgctctgggaccagacatgaagtgagttgggggagggcacagggtgggtttgagtgaagggagagcacggtcctaagtccccagcaggtggtgcgggtgtgtgagtggcccctgtgatggccagcctggcttggacacgtgatgggcctgtggccgggtccagtgggcactgggcggggtggtgtgttcggcccagaggcccctggcctgagcaggtgcagagttttacagacacccggtcagcccggctggagcccgccctcccctcccctagcagccaggtcactgcctgtggctgcagccgtggcccgtggtgcagccgtggcccatggcagcctgtagaatccaggtgcacagagagccctgccaccgtcttacctctgggctttggtgcttaacacacaacacagctgcagaccctgctggaggccgagggctccaggtgctatcttaggtggacacagccctgggggctccttccaggaggggaccctcagccctgtgccccccaccacttcaggccacaccaggttccctctgcaagggcctcggctcagtcgtgtgcacttcctcggagagccttgggctgccacgtccaccccgggctctgcccgtcctgttctgcccatggcccagcccggccgctcctgctgacccctcctggacgggttggagctgggctcctgcctttgctgctaacactggaggcggtgttcctaactgcagtgtgctgcttacacctccccgcgtgggtaaccaaatttttaagtagtcagagacatatcgaggtagttacataaaattattttgtttggcattatttttctcactcgaagaaactatatagggttgtttttcctttagcttgtgctcaagtcctcttgctgtgttttcagaagcactcacatgttctttcttttcctgagtgaaaagcaaaggtcccacggtgtgtgctgtggtgcaccgcctggctttgggggtcccggaggcaggctgcctagactcacagcctcgggaccgttgccacggcctgtcttctcgttcaggcctgcctctgacagcactcaccatgaggacattccatccttcaccccctcctctggcacaggccaccactgcggtgctgtgccttcagatgggaggtgggcgcggtggccgcctccttccctccaggacctgcccgtgtgaagaccccccggagtgctgagcttcagggctgcgtggaaagagtttttactctctttttctagcctgtataccaggcttttccccacattgtcaggtagagcaccagcttccctgaccgctgctgctcggggagggctggggctggccgggggtcctgtggaggagtacatggaggactccaggtacagcgcaggagtcacggcttttgttttttgacattggcccccggttctaccaatgacagggtgccctggctggagctgtcatcacacacacccctcagctcggaggctgtgggctcctcaaagctggagaaagaggccaagatttttctgcacacggagtgtggggataggagccgggccaagcgctggcccctcagcggtgagccctgcccactcttaccgagcaaggtgggtggctctggcacgagtcccccagggggagagcatggctaccagggagctgcagcggagccctccagccctcaccccaggccagccccaccccggcctctttgagaattctcagaactttgtacctttcccctgatttttaaaccctttttctaaacagactgactttcttacaaaatgcatttggaaaccagacctttgctacccaccaatgtctctgggttttgtaccagtccctgctctcaggccaccctgcccaggacccaggcccgcctccccctccacactcaggatgtcctgctccatctggccggctcactccgtgtggcctgcctttgctgaccgttttggggttccccgccggagctacaggggcattttcttccctaaaaccaacagtgtcccactgacctccccaagtgtttgctgcgtggcagatttcctgttcttgttcgcagtttgccgactgaagagtgtgggatttccgaggcccaggtgagcacgtccatctcaggaggcgtggagggaaaagacatgtcatgaagggttttttttatgtgactgatttttttttaaatcgatgttcaaactaataaatatttttttatgaagagg

SEQ ID NO: 5397 - DNA, 2267 bp, Homo Sapiens
  NM_025228
acttagatgataccagagagcaagagagaggaactggggtttgcgaaccttgtggctttgtctgtttcctgtttcagcaaggctgctgtgcaaaaagaaagacggtaccaagaagggacgtgttaatggggcccagacctatggattgaaagcgtgtgctttacccatctgctgtcttgctccatctgagaccagagccaagatctgcccaggactggaatgctttcccgagtggcttgagttggagcctgggactaggagcagccttattgaggtacaattcatgtgcttgtgggtttggatggcacaatctgtgtctgggctaaggaaagcagacttggcaccaacattaaccctgacagatccaggcatctattccaggaactggaagccaagcgcaacaggtgcttggaggtcatcatgatcagcccagaccccaggccctcccctggcttggcccggtgggctgagagctatgaggccaagtgtgagcgcaggcaagagatccgtgaaagccgccgctgccgtcccaatgtgaccacttgccgccaggtggggaagacgctgaggatccaacagagagagcagctccagagagctcgactgcagcagttcttcaggaggaggaacctggagctagaggagaagggcaaagcgcagcatccccaggccagggagcaagggccctccaggcggccaggacaggtgactgtcctcaaggaacccttgtcttgtgccagaaggatttcttctcccagagagcaggtgacaggcaccagctctgaagtctttccagcccagcatcctcctccctcaggcatctgcagggatctgtctgaccacctctcctcacaggctgggggccttcctccacaggacactcccatcaagaagccacccaaacaccaccgtggtactcagacaaaggcagaaggaccaacaattaagaacgatgccagtcagcaaaccaattacggagttgcagttctggataaggaaatcatccagctttctgattacctcaaagaggccctacaaagggagctggtcctaaaacagaaaatggtgattctccaagacctactgtccactctgattcaggcctctgacagctcttggaagggacagcttaatgaagacaaactgaaggggaaactgagatccttagaaaaccagctatacacctgtacccagaaatactccccttggggaatgaaaaaagtactactggagatggaagaccagaaaaacagctatgagcagaaggccaaggagtcactgcagaaagtgctggaggagaaaatgaatgcagagcagcaactacagagcacacagcgatccctggccctggcagagcagaagtgtgaagagtggaggagccagtatgaggctctgaaggaggactggaggacccttgggacccagcacagggagctggagagccaactccacgtgcttcagtccaaactgcagggagcagatagcagggacttacagatgaaccaggccctgcgatttttggaaaatgagcaccagcaactgcaggccaagattgaatgcctgcaaggggacagagacctgtgcagcttggatacccaggacctacaagatcaactaaaaaggtcagaggcagagaaactcaccctggtgaccagagtacagcagttgcagggtttgcttcaaaatcaatccttacagcttcaagaacaggagaaactcttaacaaagaaagatcaggctttgcccgtgtggagtccaaagtccttccctaacgaagtggagcctgagggtacagggaaggagaaagactgggatctcagagaccagctgcaaaagaagactttgcagctccaggccaaggaaaaggagtgcagagaactgcattcagaattagacaacctcagtgacgagtatctctcctgcctgcgtaagctgcagcactgtcgagaagagctgaaccagagccagcagctgcctcccagaaggcaatgtgggcgatggctcccagtgctgatggtggtgattgctgcagcactggcagtgttcctggccaataaagacaacctgatgatctgaataatttgtgacaactgccttgggtgaaaatcagaagcaagcaactcagcgaaaaactcagaaggtttgggtacattacagcttgggttttccaactgacttaggatttctgactttttattaatttcttaacctactgtaaataaacttcacctgaccagattgttcctcagaaaaaaaaaaaaaaaaaa

SEQ ID NO: 5398 - DNA, 1290 bp, Homo Sapiens
  NM_025231
gagtctagtctttgttcggggctgtccaaaggacgctagctgttgcacctgttcctccctgcgcgtaagatagaggataaatctcctggcaaagcccagaatgaccacagccctggaacctgaggaccaaaaaggacttctgataattaaggcagaggaccattactggggacaggattccagctcacaaaagtgcagtcctcacaggagggaactctatagacaacacttcaggaagctctgctatcaggatgcacctggaccccgtgaagctcttacccagctgtgggagctctgccgtcagtggctgaggccagaatgccacaccaaggagcagattttagacctgctggtgctagaacagttcctgagcattcttcctaaagacctgcaagcatgggtgcgtgcacaccatccagagactggagaggaggcagtgacggtactggaggatctggagagagagcttgatgaacctggaaagcaggtcccaggcaattcagaaagacgggacatactcatggacaagttggcccccttgggaaggccatatgaatcactgactgtccagctccatcccaaaaagacccagctggagcaggaagctgggaaaccacaaaggaatggtgataaaactaggactaagaatgaagagttgttccagaaggaagatatgcccaaagacaaggaattccttggggagataaatgacagactgaacaaagatactcctcagcatcctaagtccaaagatattattgaaaatgagggcagatcagaatggcaacagagggaaagaagacgatataaatgtgatgaatgtgggaaaagtttcagtcatagctcagaccttagtaaacacaggagaactcacacgggagagaagccctataaatgtgatgagtgtggaaaagccttcattcagcgctcacatctcattggacatcatagagtacacacgggagtaaaaccctataaatgtaaagaatgtgggaaagacttcagtgggcgcacaggtcttattcagcatcagagaatccacacaggtgaaaaaccctatgaatgtgatgagtgtggaaggcctttccgagtaagttcagctcttattagacatcaaagaattcataccgcaaataaactctactaatatagcagtaatatcaaaagttctttggacactcaggcctaactagttatcaaagaatctattttagaaaccttgagtttcctcaatgtggtcaaagcttcagtcatcattaaacttctctggaccaaaaaaaaaaaaaaaaa

SEQ ID NO: 5399 - DNA, 1205 bp, Homo Sapiens
  NM_025234
gagcccgtcttccgacgtgcagcctggcagtgcagtgagctgtctggccttttgtccttgatccttggttaaggaaatgaccaaccagtacggtattctcttcaaacaagagcaagcccatgatgatgccatttggtcagttgcttgggggacgaacaagaaggaaaactctgagacagtggtcacaggctccctagatgacctggtgaaggtctggaaatggcgtgatgagaggctggacctacagtggagtctggagggacatcagctgggagtggtgtctgtggacatcagccacaccctgcccattgctgcatccagctctcttgatgctcatattcgtctttgggacttggaaaatggcaaacagataaagtccatagatgcaggacctgtggatgcctggactttggccttttctcctgattcccagtatctggccacaggaactcatgtcgggaaagtgaacatttttggtgtggaaagtgggaaaaaggaatattctttggacacgagaggaaaattcattcttagtattgcatatagtcctgatgggaaatacctagccagtggagccatagatggaatcatcaatatttttgatattgcaactggaaaacttctgcataccctggaaggccatgccatgcccattcgctccttgaccttttccccggactcccagctccttgtcactgcttcagatgatggctacatcaagatctatgatgtacaacatgccaatttggctggcacgctgagcggccatgcctcctgggtgctgaacgttgcattctgtcctgatgacactcactttgtttccagttcgtctgacaaaagtgtaaaagtttgggatgttggaacgaggacttgtgttcacaccttctttgatcaccaggatcaggtctggggagtaaaatacaatggaaatggttcaaaaattgtgtctgttggagatgaccaggaaattcacatctatgattgtccaatttaaacatcaaagtctccaggcttatgctgcaaagagaatgtacggattgatcatgacattccttaccttcttaggcttgtttaaaagaaatatagcatttattgtagcaaagacttaaattttgtagatacaatatgaatcttttcatgttttattggaaatgctgttcatactttaacataaagctttcttaatgcaaaaaaaaaaaaaaaaa

SEQ ID NO: 5400 - DNA, 1443 bp, Homo Sapiens
  NM_025245
catggccgccccgccgcgccccgcgccatcgccccccgccccgcggcgcctcgacacgagcgacgtcctgcagcagatcatggccatcaccgaccagagcctggacgaggcacaggccagaaagcatgctctgaattgccatcggatgaagcctgctctgttcagcgtgctctgtgagatcaaggaaaagacagtggtaagcatccgtggcattcaagacgaagatccccctgacgcccagctcctgaggctggataacatgctgctggctgagggcgtgtgcaggcccgagaagagaggaagaggaggagcggtggccagggccggcacagcaacaccaggtggctgtccaaatgacaatagcattgagcactctgactacagggccaagctgtcccagatccgacagatttaccactctgagctagagaaatatgaacaggcctgtcgtgagttcaccacgcacgtcaccaacctcctccaggagcagagcaggatgaggcctgtctcccctaaggagattgagcgcatggtcggcgccattcacggcaagttcagcgccatccagatgcagttgaagcagagcacctgtgaggcagtgatgaccctgcgttcgcggctgctcgatgccaggcgcaagcggcggaatttcagcaagcaggcgacggaagtgctgaatgagtatttttactcccatctgaacaacccttaccccagcgaagaagccaaagaagagctggccaggaagggcggcctcaccatctcccaggtctctaactggtttggcaacaaaagaatccggtataaaaagaacatggggaagtttcaagaagaggctaccatttacacgggtaaaacggctgtggataccacggaagttggggtcccagggaaccacgccagctgcctgtcaacacctagctccggctcctctggacccttcccgctgcccagcgctggggacgccttcctcaccctgcggactctggcctctctccagcctcctcctgggggaggctgcctgcagtcccaggcccagggtagctggcagggggccaccccccaacctgcaactgcctcacctgctggagaccctggcagcatcaactccagtacatctaattaagtttgggggataagcaggaaagagcgctgcgtgagctgccatgtatcgccagccgttgctttgttactgaacgtgccgccgacgacctcagaaaacccagatgggtggtggtgcccatgagcccctgctcctcagccaggcccgtggcgccggctcatgtgtctgctgcgactcgagatggcctgaaacgccactcattctcccacttcagttcgtttttttgacagtaattttatggtaacgctatgaattgaattgtctgttctaggactgggcacagattttcccattaaaatttttgacttattttaaaaaaa

SEQ ID NO: 5401 - DNA, 4031 bp, Homo Sapiens
  NM_025247
actgctcttccggacgcaattttgaggaggtcggagcggaaggacgtcgtggagattgcttgcgctggggtgccacacttaggctgagctgcaggttttcgcacagtcgcgagttaacctctgcttgctccagaggcctcgtcctaatccacctcggctgacggcgcgggatccctggctccgcgagcctcagcctcaccatgtgtgtcaggagctgtttccagtccccccgtctccagtgggtgtggagaacagccttcctgaaacacacccagcgcaggcaccaggggtcccaccgatggacacaccttggaggcagcacctacagagcggtgattttcgacatgggcggagttctcattccttctccagggagagtcgctgcagaatgggaggtacagaatcgtatcccttctggaactatattaaaggccttgatggaaggtggtgaaaatgggccctggatgagatttatgagagcagaaataacagcagagggttttttacgagaatttgggagactttgctctgaaatgttaaagacctccgtgcctgtggactcatttttctctctgttgaccagtgagcgagtggcaaagcagttcccagtgatgactgaggccataactcaaattcgggcaaaaggtcttcagactgcagtcttgagcaataatttttatcttcccaaccagaaaagctttttgcccctggaccggaaacagtttgatgtgattgtggagtcctgcatggaagggatctgtaagccagaccctaggatctacaagctgtgcttggagcagctcggcctgcagccctctgagtccatctttcttgatgaccttggaacaaatctaaaagaagctgccagacttggtattcacaccattaaggttaatgacccagagactgcagtaaaggaattagaagctctcttgggttttacattgagagtaggtgttccaaacactcggcctgtgaaaaagacgatggaaattccgaaagattccttgcagaagtacctcaaagacttactgggtatccagaccacaggcccattggaactacttcagtttgatcacgggcagtcaaatccaacttactacatcaggctggctaatcgtgatctagttctgaggaagaagcccccagggacactccttccatctgcccatgccatagagagggagttcaggattatgaaagcccttgcaaatgctggagtacctgtccctaacgttcttgatctctgtgaagattcaagtgtcattggcacccccttctatgtgatggagtactgcccaggtctcatctacaaagacccttccctgccaggcttggagcccagccacagacgagccatatacactgccatgaacacagtcctgtgcaaaattcacagtgtggatctgcaggctgtgggacttgaagactatgggaagcaaggggactatattccacgccaggtacgaacctgggttaagcagtatcgagcttccgaaactagcaccatcccagccatggagaggctgatcgaatggctgcccctccatcttccccgtcagcagaggaccacagtggtgcacggggacttcaggctcgacaacctggtgtttcatccagaagagccagaggtgcttgctgtccttgactgggaactttctaccttgggcgacccccttgctgatgtggcctacagctgcctggctcattacctgccatccagttttcccgtgctgagaggtattaatgactgtgacttgacacagctgggaatccctgctgcagaggagtatttcaggatgtactgtctccaaatggggctccctcccactgagaactggaacttctatatggctttttcctttttccgtgtggctgcaatcctacagggagtctacaagcgatcactcacagggcaagcaagctccacatatgcggaacaaactggaaagctgaccgaatttgtgtctaacctggcgtgggatttcgcagtcaaagaagggttccgggttttcaaagagatgcccttcacaaatccgttaacaaggtcctaccacacgtgggccaggccccagtcccagtggtgccccacaggcagcaggagttatagctccgttccagaagcttccccagctcatacctcaaggggaggtctggttatctctccagagagcctctctccacctgtcagagagctgtatcaccggctgaagcacttcatggagcaacgtgtgtaccctgcagagccagagctgcagagtcaccaggcctcagcagccaggtggagcccctccccactgatcgaagacctcaaggagaaagccaaagctgaaggactttggaaccttttcctacccttagaggctgatcccgagaaaaaatacggagcaggactgaccaatgtggaatatgcacatctgtgtgagctcatgggcacgtccctgtatgcccccgaggtatgtaactgctctgcgcctgacacgggcaacatggagctgctggtgaggtatggcaccgaagcgcagaaggctcgctggctgattcctctgctggaggggaaagcccgctcctgttttgctatgaccgagccccaggttgcctcttcagatgccaccaacattgaggcttccatcagagaggaggacagcttctatgtcataaacggtcacaaatggtggatcacaggcatcctggatcctcgttgccaactctgtgtgtttatgggaaaaacagacccacatgcaccaagacaccggcagcagtctgtgctcttggttcccatggataccccagggataaaaatcatccggcctctgacggtgtatggactggaagatgcaccaggtggccatggtgaagtccgatttgagcacgtgcgtgtgcccaaagagaacatggtcctgggccctggccgaggctttgagatcgcccagggcagactgggccccggcaggatccatcactgcatgaggctgatcgggttctcagagagggccctggcactcatgaaggcccgcgtgaagtcccgcttggcttttgggaagcccctggtggagcagggcacagtgctggcggacatcgcgcagtcgcgcgtggagattgagcaggcacggctgctggtgctgagagctgcccacctcatggacctggcaggaaacaaggctgcagccttggatatagccatgattaaaatggtcgccccgtccatggcctcccgagtgattgatcgtgcgattcaggcctttggagcagcaggcctgagcagcgactacccactggctcagttcttcacctgggcccgagccctgcgctttgccgacggccctgacgaggtgcaccgggccacggtggccaagctagagctgaagcaccgcatttagagccttggggctgcagtggctcaatgtcctggctggtccagctgtgcccagatctgtcactgatgtgcctcgaaagatccggtgtttgtggctcctgcaccctgctcagcagctctgtcccgggacagtcagggtggactcaatctttctggttctccacagaagacgtctctgcaagaagcctggagtctgtttcaggccaggaggaggggatttgctgagggccaagggggttctgggacagagtctggaaagctggtcttcaggctctcagtcccaggctgggcaggcacggtcacttcacttcagcctttcagtccctctctctctgcctgtgggaatctggacacattttgggaggcctcccaaggctgtgggacgtgcttgctctggcagctgcagggttcctgtctggcctccctggtgagcagaggggcggccacggcgggcggtggcctagagacccaggacctgggcgcctgggaaaatggaatgcaacccacattgtaaagccactggcatctgattatctccatttgaacacacagcacagaacaatcatttaaatgttattttggaaaggggttttggggacacagaagaataagtaaacacatctcggaggctttgtggaaaaaaaaaaaaaaaaaa

SEQ ID NO: 5402 - DNA, 3860 bp, Homo Sapiens
  NM_025249
agagctgccagggattggccagaacttggctttgagtcacaaagctgctgcggcaccagggctccaagactggccgttcagactgctaggtttagcttcaggggcagcccagggcagtgttgctgcatattgcatggatgaaaggctgaaggctgcctcctcttgcaggctggcttctgagattgcaccttcttctcctgctactcctccaaatctatgacccttcaaggcagagctgacctgtccggtaatcaaggcaatgcagccggccgcctagctacagttcacgagccagttgtcacccagtgggcggtgcatcctccagcccccgctcaccccagtctcctggacaaaatggagaaagcgcctccacagccccagcacgagggcctcaagtccaaggagcatcttccgcaacagcctgccgaaggcaagacggcgtcccgccgcgtcccacgcctccgggctgtggtcgagagccaggccttcaagaacatcctggtagacgagatggacatgatgcacgcccgtgcagccacgctcatccaagccaactggaggggctattggctccggcagaagctgatttcccagatgatggcggccaaggccatccaggaggcctggcggcgcttcaacaagagacacatccttcactccagcaagtcgttggtaaagaaaacgagggcggaggagggggacataccttatcacgccccacagcaggtgcgcttccagcatccggaagagaaccgccttctgtccccgcccatcatggtgaacaaggagacccagttcccttcctgtgacaatctggtcctctgcagaccccagtcgtcccccctcctgcagcccccagcagctcagggtaccccagagccctgtgtgcagggtcctcatgctgccagagtccgggggctggccttcctgccacaccagacggtcaccatcagatttccctgcccagtgagtctggacgcaaaatgccagccatgcctgctgaccagaaccatcagaagcacctgcctcgtccacatagagggtgactcagtgaagaccaaacgtgtaagtgcccggaccaacaaagccagggctccggagacaccattgtccagaaggtatgaccaggcagttacgagaccatccagagcccaaacccagggccctgtgaaagcagagacccccaaagcccccttccagatatgtccagggcccatgatcaccaagactctactccagacatatccagtggtctccgtgaccctgccacagacatatccagcgtccacgatgaccaccaccccacccaagactagcccagttcccaaagtaacaataatcaagaccccagcccagatgtatccggggcccacagtgaccaaaactgcacctcacacatgccccatgcccacaatgaccaagatccaggtacaccccacagcctccagaactggcaccccacggcagacatgccctgcgaccatcacggcaaagaaccgacctcaggtttcccttctggcttccatcatgaagagcctgccccaggtatgcccggggcctgcgatggcaaagaccccaccccagatgcacccggtcaccaccccagccaaaaacccattgcaaacatgtctgtcagccacaatgtccaagacttcatcccagaggagcccagttggggtgaccaagccctcaccccagacccgcctgccagccatgataaccaagaccccagcccagttacgctcggtggccaccatcctcaagactctgtgtctggcctctccaacagtggcaaatgtcaaggctccaccccaagtggcggtagcagccggaactcccaacacctcaggctccatccatgagaacccacccaaggccaaggccaccgtgaatgtgaagcaggctgcaaaggtggtgaaagcctcatccccctcctatttggctgaggggaagatcaggtgcctggctcaaccacatccgggaactggggtccccagggctgcagctgagcttcctttggaagccgagaaaatcaagactggcacccagaaacaggcgaaaacagacatggcatttaagaccagtgtggcagtggaaatggctggggctccatcctggacaaaagttgctgaggaaggggacaagccacctcacgtgtatgtgcctgtagacatggctgtcaccctgccccggggacagctggctgccccactgaccaatgcctcatcccagagacatccaccctgcctgtcccagagaccactggccgccccgctgaccaaggcctcatctcagggacatctgcccactgagctgaccaagaccccatccctggcccatctggacacctgtctgagcaagatgcattcccagacacatctggccacaggtgccgtgaaggtccagtcccaagcgcctctagccacctgtctgaccaagacgcagtcccgggggcagccgatcacagacataaccacgtgcctcatcccagcgcaccaggctgctgatctcagcagcaacacccactcccaggtgctcctaacagggtccaaggtgtccaaccacgcctgccagcgcctcggtggcctcagcgccccaccctgggccaagccagaggacagacagacccagccacagccccacggacacgtgccggggaagaccactcaggggggaccatgcccggcagcctgtgaggtccagggtatgctggtgccgccgatggcacccaccggccattccacatgcaacgttgagtcctggggagacaacggagccacacgtgcccagccatcaatgcccggccaggcggtgccctgccaggaggacacgggccccgcggacgctggtgtggttggtggccaatcgtggaaccgcgcatgggagccagccaggggtgctgcgtcctgggacacctggcgcaacaaggcggtggtgcctcccaggcggtccggggagccaatggtgtccatgcaggctgcagaggagatccgcatcctcgcagtgatcactatccaggcgggcgtccgtggctacctggcgcgtcgcaggatccggctgtggcaccggggggccatggtcatccaagctacttggcgcggctaccgtgtgcggcggaacctggcacacctctgcagagccaccacgaccatccagtctgcctggcgcggctacagcacccgccgggaccaagcccggcactggcagatgctccaccccgtcacgtgggtggagctgggcagccgggccggggtcatgtctgaccgaagctggttccaggatggcagagccaggacagtatctgaccatcgctgcttccagtcctgccaggcacacgcttgcagcgtctgccactccctgagctccaggatcgggagcccgcccagcgtggtgatgctagtgggctccagccctcgcacctgtcatacctgtggacgcacacagcccacccgtgtggtgcagggcatgggccagggcactgagggccccggggcagtgtcttgggcctccgcctaccagctggctgccctgagtcccaggcagccgcatcgccaggacaaagcggccacagccatccagtccgcctggaggggctttaagatccgccagcagatgaggcagcagcaaatggcagcgaagatagttcaagccacctggcgaggccaccatacccggagctgtctgaagaacacagaggcgctcttgggaccagcagacccctcggccagctcacggcacatgcattggcctggcatctaggaccctggctccctgcagtggggacttcgtgggaggcactcatggctctctgggtctaatgaataaagtcctccacagcctagaaaaaaaaaaaaaaaaaa

SEQ ID NO: 5403 - DNA, 3880 bp, Homo Sapiens
  NM_025256
gcaagcggcgatggcggcggcggcgggagctgcagcggcggcggccgccgagggggaggcccccgctgagatgggggcgctgctgctggagaaggaaaccagaggagccaccgagagagttcatggctctttgggggacacccctcgtagtgaagaaaccctgcccaaggccacccccgactccctggagcctgctggcccctcatctccagcctctgtcactgtcactgttggtgatgagggggctgacacccctgtaggggctacaccactcattggggatgaatctgagaatcttgagggagatggggacctccgtgggggccggatcctgctgggccatgccacaaagtcattcccctcttcccccagcaaggggggttcctgtcctagccgggccaagatgtcaatgacaggggcgggaaaatcacctccatctgtccagagtttggctatgaggctactgagtatgccaggagcccagggagctgcagcagcagggtctgaaccccctccagccaccacgagcccagagggacagcccaaggtccaccgagcccgcaaaaccatgtccaaaccaggaaatggacagcccccggtccctgagaagcggccccctgaaatacagcatttccgcatgagtgatgatgtccactcactgggaaaggtgacctcagatctggccaaaaggaggaagctgaactcaggaggtggcctgtcagaggagttaggttctgcccggcgttcaggagaagtgaccctgacgaaaggggaccccgggtccctggaggagtgggagacggtggtgggtgatgacttcagtctctactatgattcctactctgtggatgagcgcgtggactccgacagcaagtctgaagttgaagctctaactgaacaactaagtgaagaggaggaggaggaagaggaggaagaagaagaagaggaagaggaggaggaagaggaagaagaagaggaagatgaggagtcagggaatcagtcagataggagtggttccagtggccggcgcaaggccaagaagaaatggcgaaaagacagcccatgggtgaagccgtctcggaaacggcgcaagcgggagcctccgcgggccaaggagccacgaggggtgtccaatgacacatcttcgctggagacagagcgagggtttgaggagttgcccctgtgcagctgccgcatggaggcacccaagattgaccgcatcagcgagagggcggggcacaagtgcatggccactgagagtgtggacggagagctgtcaggctgcaatgccgccatcctcaagcgggagaccatgaggccatccagccgtgtggccctgatggtgctctgtgagacccaccgcgcccgcatggtcaaacaccactgctgcccgggctgcggctacttctgcacggcgggcaccttcctggagtgccaccctgacttccgtgtggcccaccgcttccacaaggcctgtgtgtctcagctgaatgggatggtcttctgtccccactgtggggaggatgcttctgaagctcaagaggtgaccatcccccggggtgacggggtgaccccaccggccggcactgcagctcctgcacccccacccctgtcccaggatgtccccgggagagcagacacttctcagcccagtgcccggatgcgagggcatggggaaccccggcgcccgccctgcgatcccctggctgacaccattgacagctcagggccctccctgaccctgcccaatgggggctgcctttcagccgtggggctgccactggggccaggccgggaggccctggaaaaggccctggtcatccaggagtcagagaggcggaagaagctccgtttccaccctcggcagttgtacctgtccgtgaagcagggcgagctgcagaaggtgatcctgatgctgttggacaacctggaccccaacttccagagcgaccagcagagcaagcgcacgcccctgcatgcagccgcccagaagggctccgtggagatctgccatgtgctgctgcaggctggagccaacataaatgcagtggacaaacagcagcggacgccactgatggaggccgtggtgaacaaccacctggaggtagcccgttacatggtgcagcgtggtggctgtgtctatagcaaggaggaggacggttccacctgcctccaccacgcagccaaaatcgggaacttggagatggtcagcctgctgctgagcacaggacaggtggacgtcaacgcccaggacagtggggggtggacgcccatcatctgggctgcagagcacaagcacatcgaggtgatccgcatgctactgacgcggggcgccgacgtcaccctcactgacaacgaggagaacatctgcctgcactgggcctccttcacgggcagcgccgccatcgccgaagtccttctgaatgcgcgctgtgacctccatgctgtcaactaccatggggacacccccctgcacatcgcagctcgggagagctaccatgactgcgtgctgttattcctgtcacgtggggccaaccctgagctgcggaacaaagagggggacacagcatgggacctgactcccgagcgctccgacgtgtggtttgcgcttcaactcaaccgcaagctccgacttggggtgggaaatcgggccatccgcacagagaagatcatctgccgggacgtggctcggggctatgagaacgtgcccattccctgtgtcaacggtgtggatggggagccctgccctgaggattacaagtacatctcagagaactgcgagacgtccaccatgaacatcgatcgcaacatcacccacctgcagcactgcacgtgtgtggacgactgctctagctccaactgcctgtgcggccagctcagcatccggtgctggtatgacaaggatgggcgattgctccaggaatttaacaagattgagcctccgctgattttcgagtgtaaccaggcgtgctcatgctggagaaactgcaagaaccgggtcgtacagagtggcatcaaggtgcggctacagctctaccgaacagccaagatgggctggggggtccgcgccctgcagaccatcccacaggggaccttcatctgcgagtatgtcggggagctgatctctgatgctgaggctgatgtgagagaggatgattcttacctcttcgacttagacaacaaggatggagaggtgtactgcatagatgcccgttactatggcaacatcagccgcttcatcaaccacctgtgtgaccccaacatcattcccgtccgggtcttcatgctgcaccaagacctgcgatttccacgcatcgccttcttcagttcccgagacatccggactggggaggagctagggtttgactatggcgaccgcttctgggacatcaaaagcaaatatttcacctgccaatgtggctctgagaagtgcaagcactcagccgaagccattgccctggagcagagccgtctggcccgcctggacccacaccctgagctgctgcccgagctcggctccctgccccctgtcaacacatgagaacggaccacaccctctctccccagcatggatggccacagctcagccgcctcctctgccaccagctgctcgcagcccatgcctgggggtgctgccatcttctctccccaccaccctttcacacattcctgaccagagatcccagccaggccctggaggtctgacagcccctccctcccagagctggttcctccctgggagggcaacttcagggctggccaccccccgtgttccccatcctcagttgaagtttgatgaattgaagtcgggcctctatgccaactggttccttttgttctcaataaatgttgggtttggtaataaaaaaaaaaaaaaaaa

SEQ ID NO: 5404 - DNA, 2224 bp, Homo Sapiens
  NM_025264
acgtgacccgaaggcgcgagggcgcgcctgagccgccatgtcggaggcgcgtggagagccagggtccgggcctgaggctggcgcccgattcttctgcactgcgggtcgcggcctggagccgttcgtaatgcgagaggtgcgggcgcggctggcggccacgcaggttgaatatatttcaggaaaggtttttttcaccacctgttctgatttgaatatgttgaagaaattaaaatctgcagaaagattatttttgctgattaaaaagcagtttccacttattatttcttctgtaagtaaaggaaaaatatttaatgaaatgcaaagacttataaatgaagatccaggaagttggttgaatgccatttcaatttggaaaaatcttcttgaacttgatgcaaaaaaggaaaaactttctcagagagatgataaccaactaaaaagaaaagtgggagaaaatgaaatcattgcaaagaaattaaaaatagaacaaatgcaaaagatagaagagaatagggactgccagctggaaaaacaaataaaagaagaaactctggagcaaagagattttaccactaaaagcgaaaagtttcaagaagaagaatttcagaatgacatagagaaagcaattgatactcataatcagaatgacttgactttcagagtatcttgtcgctgcagtggaactattggaaaggccttcactgcacaggaggtaggaaaagtaattggaattgctattatgaaacactttggatggaaagcagacttgaggaatccacaattagagatctttatacatctaaatgacatttactctgtggtggggattcctgtgttcagggtttccctagccagcagagcttacatcaagacagctggactgcgatctacaatagcgtgggcaatggcatctctggctgacattaaggctggtgcatttgttttagatccaatgtgtggacttggaacaatacttttggaagctgctaaagaatggccagatgtgtattatgtaggtgctgatgtcagcgactcacagttactaggtacttgggacaatctgaaagctgcaggccttgaggataaaattgaattacttaaaatctctgttatagaattgccattgccttcagaaagtgttgatattattatttctgacattccatttgggaaaaagtttaagttaggaaaagacatcaaaagcattctacaagaaatggaaagagtgcttcatgttggcggaaccattgtattgttgcttagtgaagatcaccacaggcgccttacagattgtaaagagagcaacatccctttcaattccaaggacagtcacacagatgaacctggaattaaaaagtgcttgaatcctgaagaaaaaactggtgcattcaagacagcgtcaacttcattcgaagccagtaaccacaaattcttagacagaatgtcaccatttggctccttggtaccagtggaatgctacaaagttagccttggaaagacagatgcgttcatatgtaaatataagaagtcgcactcttctggactgtagcaggcttgctgccatcagccgggttcaggcccttgtaagttagctgtacagcagaagtttgctgtctctaggattcatatagcacccacagagctccaagtaaccaaattcccccaaagacaggaggtgtggctgatgggtacacatgcttggtaagagtttctgctttatattctaaagtacttaatgtttttgagaaaaaagttatcgaatattttttagacttaagttttatcttctgtcagaatgtgaaaagttctgcccagtttctgagcaaaaacttcaatttcaaaataaaggttttcaggggttcacttaagtgtatcacaatcaacaccagacgggatattttaactatcagattttcggaaatgtaaaaacctttatgtgtaacttcttttgatattaaacttgatttttgagcctgtaattttcttctccattggaatgaaaataatttgtatttgcaatacattttatatgtttattatgtaaaccaacagtgagaataataactgaattaagccagtatccttcaaaacatgatggaaaatgaaatttgctttttttctaaaagcattcatacactgtcacctcgcccttatttatatagaaagtcagtttgttgcttatgttcactacctgagaaaaagaaacagtaagtttgaggagaat

SEQ ID NO: 5405 - DNA, 2402 bp, Homo Sapiens
  NM_025265
aagaaaggtaagggccctgggcgaggaaagcgcggccctttccgagtttggtgttttgcagcgaaaggaaatctcgctcttccgaaagtcctccagggcgagagaggaaagggcctaggtactgtgctggggtcgcacagccggccgagacagtgccgggacggggagccaggcttccgagtgcgcccggtcactgactcctccgcgctttcctcgtgcgcctgcagcccttggttcttggaaacgccggcgccttgttcagggctggtggggctggggcgcaaggtgcagctgacaatgcccgagaggagccgcagcctctggtggagttcggtcgggtgtgggggtagtcaaggaaagaagcaaagggaatacctcctctgaaaaatggcagaagcagttttccatgccccaaagaggaaaagaagagtgtatgagacttacgagtctccattgccaatcccttttggtcaggaccatggtcctctgaaagaattcaagatattccgtgctgaaatgattaacaacaatgtgattgtgaggaatgcggaggacattgagcagctctatgggaaaggttattttggaaaaggtattctttcaagaagccgtccaagcttcacaatttcagatcctaaactggttgctaaatggaaagatatgaagacaaacatgcctatcatcacatcaaagaggtatcagcatagtgttgagtgggcagcagagctgatgcgtagacaggggcaggatgagagtacagtgcgcagaatcctcaaggattacacgaaaccgcttgagcatcctcctgtgaaaaggaatgaagaggctcaagtgcatgacaagcttaactctggaatggtttccaacatggaaggcacagcagggggagagagaccttctgtggtaaacggggactctggaaagtcaggtggtgtgggtgatccccgtgagccattaggctgcctgcaggagggctctggctgccacccaacaacagagagctttgagaaaagcgtgcgagaggatgcctcacctctgccccatgtctgttgctgcaaacaagatgctctcatcctccagcgtggccttcatcatgaagacggcagccagcacatcggcctcctgcatcctggggacagagggcctgaccatgagtacgtgctggtcgaggaagcggagtgtgccatgagcgagagggaggctgccccaaatgaggaattggtgcaaagaaacaggttaatatgcagaagaaatccatataggatctttgagtatttgcaactcagcctagaagaggcctttttcttggtctatgctctgggatgtttaagtatttactatgagaaggagcctttaacgatagtgaagctctggaaagctttcactgtagttcagcccacgttcagaaccacctacatggcctaccattactttcgaagcaagggctgggtgcccaaagtgggactcaagtacgggacagatttactgctatatcggaaaggccctccattttaccatgcaagttattctgtcattatcgagctagttgatgaccattttgaaggctctctccgcaggcctctcagttggaagtccctggctgccttgagcagagtttccgttaatgtctctaaggaacttatgctgtgctatttgattaaaccctctactatgactgacaaggaaatggagtcaccagaatgtatgaaaaggattaaagttcaggaggtgattctgagtcgatgggtttcttcacgagagaggagtgaccaagacgatctttaacaattcaacctcaaatttctaatttcaccaacaactatttattgagggctaggtaaaaagttctttttgttgtaatcgtccattaattcataagttttaaagggcatggtgctcccagcaccagaaaactatcagtgtttttaaagataaattacacaagggaggagaaagatccctgtgctaggactgcagattctatacttgcgttggcctctaactctccaatccagagcctcctgcctctggcgtcagtcttttccctcatccactcactggggagattggactagaggagtcctgagaggacacttccaacaagagacatttattctctgattttacctgaaaatggtagtagtttacatttatacagtacagtttatgaagcactttcatacgcaggcatctcttgttacctacatctaagctgttcccgaaagagtgttacagaacacaacagtattgtacaatattcgataagcatatcttcactgcacttgttataaaaatgagtggtgaaataatgtttggagacataatgaaagcgattaacatttggcaaaatataataaagcctttttgtaattggtgagaaagtcaaaaaaaaaaaaaaaaaa

SEQ ID NO: 5406 - DNA, 1800 bp, Homo Sapiens
  NM_025267
tggagattccctgctccaagtcttctgggcgctccaggttctgtgaggccccacgggagccccggacccctggtctctgtaactgtggggtgagggaaggcagcacgcccggaccttgtggtacgacaggcccaggtatgtgttcatggagttttgtgttgaggacagcaccgatgtccacgtgcttattgaggatcaccgcattgtgttcagctgcaagaatgccgatggagtggagttgtacaatgagattgagttctatgccaaagtgaactccaaggactcccaggataagcgctcttcccgctctattacttgttttgtgagaaaatggaaggaaaaggtggcctggccgcggcttaccaaggaggatatcaagccagtgtggctgtctgtggactttgataactggagagactgggaaggggatgaagagatggagctggctcatgtggaacattatgcagagcttttgaagaaggtcagcaccaagagacctccacctgccatggatgatttggatttcaccaccaccgtggtctcctgctgtcccgcggagctgcagactgaagggagcaacggcaagaaagaagtgctgagcggtttccaagtggtgctggaagacacagtgcttttccctgagggcgggggacagcctgatgaccgtggtacaatcaatgacatctctgtgctgagagtgactcgccgtggggaacaggctgatcatttcacccagacacccctggatccaggaagccaggttctggtccgggtagattgggagcggaggtttgaccacatgcagcagcattcagggcagcatctcatcacggcagttgctgaccatctatttaagctgaagacaacatcatgggagttagggagatttcggagtgcgattgagctggacaccccctctatgactgcagagcaagtagctgccattgagcagagcgtcaatgaaaaaatcagagatcggctgcctgtgaatgtccgagaactgagcctggatgatcctgaggtggagcaggtgagtggccggggtttgcctgatgatcatgctgggcccattcgggttgttaacatcgagggcgttgattccaacatgtgctgtgggacccatgtgagcaatctcagtgaccttcaggtcattaagattctgggcactgagaaggggaaaaagaacagaaccaacctgatatttctgtctgggaaccgggtgctgaagtggatggagagaagtcatggaactgaaaaagcactgactgctctgcttaagtgtggagcagaggatcatgtggaagcagtgaaaaagctccagaactccaccaagatcctgcagaagaataacctgaatctgctcagagacctggctgtgcacattgcccatagcctcaggaacagtccagactggggaggtgtggtcatattacacaggaaggagggtgattcagagttcatgaatatcattgccaatgagattgggtcagaggagaccctcctgttcttaactgtgggcgatgagaaaggtggtggactcttcttactggcagggccacctgcgtctgtggagaccctggggcccagggtggctgaggtcctggaaggcaaaggagcagggaagaaaggccgttttcagggcaaggccaccaagatgagccggcggatggaggcgcaggcgcttctccaggactacatcagcacgcagagtgctaaggagtgagggcttagggcactcacctcctgtttccacaggaatcttttggtcaataaaatagattgactcagaaaaaaaaaaaa

SEQ ID NO: 5407 - DNA, 1418 bp, Homo Sapiens
  NM_030577
ggcgtgctttgcggccgccctgccgcgcgcacatgtaggcgttccgagcggcggcggaggtgagcgcacggacgagcgggagggacccttctccggcctgatgcgacccgattgtccgcagtgactacactcatggcaggtcccctgtggcggaccgcagcatttgtgcagagacacaggacaggcctcttggtgggttcctgtgcaggcctgtttggagttccaatctcgtaccacctcttcccggatcccgtggtccaatggctctaccagtactggcctcagggccagccagctccgctccctccacagctgcagagcctcttccaagaggtgctacaggacataggtgttccttcaggccattgctacaagcccttcaccaccttcaccttccagcctgtgagtgcaggcttcccaagactccctgctggggctgtggtgggcatccctgccagtttcttgggagacctagtgatcaacactaaccatcccgtggtcatacatgggcatacagtggactggcggagcccagcaggcgcccggctgagagcttccctgaccttgtcccgtgaagcccagaagttcgccttggccagggaagtggtgtacctggaaagcagtaccactgccgtgcacgccctgctggccccagcttgcctggcagggacctgggcactgggcgtgggtgccaagtacaccctggggctccatgcaggccccatgaatttacgggctgccttcagcttggtggcagcagtggcaggctttgtggcctacgccttctcccaggattctctcactcatgccgtggagtcctggctggaccgccgcacggcctccctctctgcagcctatgcctgtggtggagtggagttctatgagaagcttctgtcgggcaacctggccctgcgcagtctcttgggcaaagacggggagaagctgtatacacccagcgggaacatcgtccccagacacttgttccgaatcaaacatttaccctacaccacccgccgggactctgtgctgcagatgtggagggggatgctcaatccgggccgctcctgatgggctcatcacaaggacacttccagcttgtgcagacaccaccctgccattgagtctggagggccctgttggagcctttggacctatagctcacggccagaaaaatcactggctttggaattaaatagcttagattgtactataaccactacttatgaactcagggactatgagggactattcaggggctatgaatctgagcctttgtttcttgaactgtaaagtggagatgatgtaaaccgccttgcaagattgtagagttgggtaaggtcatgaacataagggcctggcacaaagggtgcactgtaaataaacagacatccctccttaaaaaaaaaaaaaaaaaaaaa

SEQ ID NO: 5408 - DNA, 4286 bp, Homo Sapiens
  NM_030579
tgggccctggttacggaagccgaggaaggctgagcgcgggctctcaaggaaagtagtcgcggaatctcagttagcggtggagaggcagtatgtccggttcaatggcgactgcggaagctagcggcagcgatgggaaagggcaggaagtcgagacctcagtcacctattaccggttggaggaggtggcaaagcgcaactccttgaaggaactgtggcttgtgatccatgggcgagtctacgatgtcacccgcttcctcaacgagcaccctggaggagaagaggttctgctggaacaagctggtgtagatgcaagtgaaagctttgaagatgtaggacactcttctgatgccagagaaatgctaaagcagtactacattggtgatatccatccgagtgaccttaaacctgaaagtggtagcaaggacccttcaaaaaatgatacatgcaaaagttgctgggcatattggattttacccatcataggcgctgttctcttaggtttcctgtaccgctactacacatcggaaagcaaatcctcctgaggaggccttgctgaagttagaaagtgcatccactttggggcgaaaactagagacttgcttgggggctgcagaagtgccctctcctcgaatcctgccagttgcattcttcccccttggagccaagacgattggccagacatcacctcagatctgagaccagcgtcttccatctctcagagccttactcccaaagtacctgctcactgttccgtgttgaacaattgccggtgtttcctctcttcactggtttccatgagtacccttatatttcacaactttctgttcataagttatagtgacattgctctttggtaaaaatgcctgctttccaatactttgattgcatattagacattcttaacagggcggcagtctagtgttgaaagttttatttttccatttttcttttaagtaaattttttttaaaaaattctgatttagggctaggtgtggtggctcaggcctgtaatcctggcactttgggaggccaaggtgggaagatcgcttgaggccaagagttcaagaccagcctgggcaacatagcgagacccctatctgtattaaaaaaaaatctgatttaattcttttatttatcataaggggtttaattcctgaagtaaaggtttgcacctattaaacttaaaactgccaaatgatttttgttcttttatgtgcgtgataaaaatacaaagaatggtgtggccacctcctccctttcaagctagggcagcaggtagctcttcccagcccctgagcccagccccttcccaagtggtgccggacaaaaaactacatggccctttcgtgtcttgggggtggaaaggtagggatgaattggggtgatagaaccctggtgaattcagagtaatctttctttagaaaactggtgttttctaaagaaacaggataggagtttagagaaggcaccaaagctttcactttggtttggcaccagtttctaaccatctgttttttctaccctagctatcttttattggtaaaatataaatgtataattatgtttgtagagctttaccaaggagtttccctccttttttgtttgttgattagcaaatttttgattctccattttccaaaagtaagagactccagcatggccttctgtttgccccgcagtaaagtaacttccatataaaatggtatttgaaagtgagagttcatgacaacagaccgttttccatttcatctgtattttatctccgtgactccaacttgtgggtttgttctgtttttccatgagaataaaatactggcggtttttttctcagatgtgtgttcattgagaagtaggttactagaattatgttactgtgtcttattggttcaatgatgatttctctggcatattagacttttattttttcccccatggaagcacttgaggaaataaatagtacactggctgttttctgccagcaactgtggtgatttttctccctgtcctttgagaattgctagtctgcttctgagccattgtcatatccagcagggagcagcttggttcaagaaggaccatagaggctgctcagcatctcctccctccctcccagcttgccagggatttgatgagacaggaaactgcccagcaaaccagggactgcccatgtaaactatttaagaaaaagttcaacccaggtcttgtatcctgtgatttagcagttgaatgaatacagaattcatcaaaataatattaaccttgtacttgcacacttggatatatttgggagtaattttaggagatttctggctgacttttattatcagggatatgggtttagtaaagcttttatctttagaaaaatgtttgtatgcattataagatgctacttttaagacaatattgaaaaaaactttggttattatttaacaaaagtggtatgacttgatgcttctctatttaaaggcaaggaaggattggtatatgattgcctgtaataaataaattgcgtgattattggagtacattggggtaaaagtaaagaacagaggagtattgaggagcttgaaagggaacattcaaactaaagccaagcctgaagataacttgaatcagttgtaaaagtgtgttggcaatgtccgaaattgaatgaaaaacatctggcttataagaaatgttaaagaactaccatcttaagtaaaattggtgtttttgttatttttaaggtaaatgccaatgcaaaaggtatgtttttctacttcacattggttttcttttcctgtttacatctgcacttgttttttgctgagagccagaggaaaagataattagactttgtctcttccacccatgaaatcccccagtacccagggcttcttctgaactactgccgatgtgatgtcactttgtatctggaaaatcactttggggtccatttactgttattttgttgcctacaaaaacagccaggtgaaagctaaatcttgtgtgagagtttgcagaggtttttctatacaataaagtagtatagcacactagccaaatccatccaaaaggaccttttttttaggaagtagacttgaattcacaaaacagtcttgacatgggtagctggtgaaaaaccctctggagagcaagtggagccagtccccattggctgacagtgccacctggagctggtctctggggtgttcggttgtttattcctgaggaagactagctgctgctgctgctgctgctgcaaactgtactgtacacatcatggctgctggacacgaaggaggaggtgagagaagtttcatgctaccgaaatagagggtgttggtaccactgcccctggcctgagagccagggtttaaacctgcctcagtagagtctagtttgaaatgacaccaaaattcctcagcccctactcagcaattggttttggtttccaaatgacttctgcatttgtaaagataacagagtggtggggtcaaagtttatcttgtgtttagatctcttcaagactgcttaagcaaaaacaaaaatcccttggaacctatcgtttgagcctgtaaagttgttttagcagttgtcataaatgcatatgttgtgaaatcagaacactgtcgagtttatactcatttagctgcaatgtgggacaatgaaaaatgctttacaggcctggagtatcattacttatggtatctcctgctttaaaatctcaagcgatatctatctggttaaattccattttaggagattgagatgcagaacgttaatgttcattacctcctcctaccccaagagaaatggattcagacatgtcttgtctcaacaagaaattgatttttttttaaactatcttattctgttgccaaatatcacagaagtaatgaggagtttagttacatttggctgttgtgctctgaaagagccaggtttggaatttgtgggggtgatctaggaagaaggttccaaagaagcagaggcatttgtcaagttacctaccctatatccagcatcctcctcatgagcttcagtagctgctctttgcccacgcttgtatcctacgtttgctatttgggcaaaccattacttcagttatttaacttccctttttttttaacttcacctttgactatgaacaagtaacggtaacattccttttgtgtattcaataatgcagttagtttacctttttcagaatattttgaacaaagatctttgtctctttctgctggaatgcgcacacagtgaacgtttgttagaactacacacaataaagacactgttttcctttt

SEQ ID NO: 5409 - DNA, 1943 bp, Homo Sapiens
  NM_030580
ttggcggggagggagggccgaacgggcgaggttgggctgccgtgctgctcggcggcgctgaggccaaatagttgcatcacatgtatctaatccgagagtctcatgcttctgctcctcagtgaccagctcctgctcactgccctcagaaagcccaaccctcaggcaatggcggccttgttcctgtctgccccaccccaggccgaggtgaccttcgaggacgtggctgtgtacctctcccgggaggaatggggccgcctgggccctgctcagaggggcctctacagggacgtgatgctggagacctacgggaacctagtctcactgggagtaggacctgcaggccccaagcctggagtgatctcgcagttggagcgaggggatgagccctgggtcctggatgttcagggcacctctgggaaagagcacctgagagtcaacagcccagctcttgggaccagaactgagtacaaggagttgacttcacaggagacatttggtgaggaagatccccagggatctgagccagtagaagcctgtgaccacatcagtaagtcagaggggagcctggaaaagctagtggagcagagaggccccagggcagtcacactgaccaacggggagagcagcagggagtctgggggaaacctcaggttgctgtcaagacctgttcctgatcagagacctcacaaatgtgatatatgtgagcaaagttttgaacagagatcatatctcaacaaccataagcgtgtacacaggtcaaaaaaaacaaatacagttcgtaactctggggaaatcttcagtgcaaacttagttgttaaagaagatcagaaaattcctactgggaaaaaattgcattattgcagttactgtgggaaaacattcaggtacagtgccaaccttgtcaagcatcagcggcttcacactgaagagaagccctacaaatgtgatgagtgtgggaaagccttcagccagagctgcgagttcatcaatcaccgaaggatgcactcaggagagattccctaccggtgtgacgagtgtgggaagacattcacccggaggcccaacctcatgaagcaccagaggattcacactggggagaaaccctacaagtgtggggagtgtgggaagcactttagcgcctactcttccctgatttatcaccagagaatccacaccggagagaaaccctataaatgtaatgactgcgggaaagccttcagtgatggctcaatccttatccgacatcgtcggactcacaccggagagaagccatttgagtgcaaggaatgtggcaaaggctttacacaaagttctaaccttatccaacatcagagaattcacactggagagaaaccctataaatgtaatgaatgtgagaaagctttcattcaaaaaaccaaactcgtggaacatcagagaagccacactggagagaagccctatgaatgcaatgactgtggcaaagttttcagccaaagcacacacctcatccagcaccagagaatccacacaggagagaagccctacaagtgcagcgagtgtgggaaggccttccacaacagttccagactcatccaccaccagaggctgcaccacggagagaaaccctacagatgcagcgattgcaagaaagccttcagccagagcacgtacttgattcagcaccggaggatccacaccggggagaagccctacaagtgcagcgagtgtgggaaggccttccggcacagttccaacatgtgtcagcatcagcggattcacctccgggaggacttctccatgtaacagtggcgcggtgtccgagggcagagtccagctgagcacttcctgcatgcgcccccggcacctgactctgccctttatgtattatccacacgatgttttcacagagtgaaaggacgtttctcattaaacaaacctcttttcttaaatcaaaaaaaaaa

SEQ ID NO: 5410 - DNA, 3678 bp, Homo Sapiens
  NM_030581
cggggctgattctctggctgtgtggggcgcacggtcccgggatactggggacggcggggtgggagggcgccgtcctggggccgcggcggccgggcgggggagatggcggcgcgatggagcagcgaaaacgtggttgtagagttccgtgactcccaggcaactgcgatgtctgtggactgtcttgggcagcatgcagtgctttctggccgcagattcttatacatcgtcaatctagatgcccctttcgaaggtcaccgaaagatctctcgccagagcaaatgggacattggagctgtgcagtggaatcctcatgacagctttgcacactattttgcggcttcgagtaaccaacgagtagacctttacaagtggaaagacggcagtggggaagttggcacaaccttacaaggccacactcgtgtcatcagcgacttggactgggcggtgtttgagcctgacctcctggttaccagctctgtggacacctacatctacatttgggatatcaaagacacaaggaaacctactgttgcactgtctgctgttgcgggtgcctcccaggtcaaatggaataaaaaaaatgctaactgccttgccaccagccatgacggcgatgtgcggatatgggataagaggaaacccagtacagcagtggaatatctagccgcccacctctccaaaatccatggcctggactggcacccagacagcgagcacattcttgctacctccagtcaagacaattctgtgaagttctgggattaccgccagcctcggaaatacctcaatattcttccttgccaggtgcctgtctggaaggccagatacacacctttcagcaatggattggtgactgtgatggttccccagctgcggagggaaaacagccttctcctgtggaatgtctttgacttgaacaccccagtccacaccttcgtggggcatgatgatgtggtcctggagttccagtggaggaagcagaaggaagggtccaaggactatcaactggtgacgtggtcccgggatcagaccttgagaatgtggcgggtggattcccagatgcagaggctttgtgcaaatgacatattagatggtgttgatgagttcattgagagtatttcccttctgccggaacctgagaagaccctgcacactgaagatacagatcaccagcacactgcaagccatggggaggaagaagccctaaaagaagatccccctagaaatctcctggaagagaggaaatcagatcaactggggctgcctcagaccttgcagcaggaattctccctgatcaatgtgcaaatccggaatgtcaatgtggagatggatgcggcagacaggagctgcacagtgtctgtgcactgcagcaaccatcgtgtcaagatgctggtgaagttccctgcacagtacccaaacaacgccgccccttccttccagtttattaaccccacaaccatcacatccaccatgaaagctaagctgctgaagatcctgaaggacacagccctgcagaaagtgaagcgtggccagagctgcctggagccctgcctgcgccagctcgtctcctgccttgagtcctttgtgaaccaggaagacagcgcttccagcaacccgtttgcactccccaactctgtcactccccccttaccgacgtttgcgcgggtgaccacggcttacgggtcgtaccaggacgccaacattccctttcctaggacttctggggccaggttctgcggagcaggttacctggtatatttcacaaggcccatgacaatgcatcgggcggtgtctcccacagagcctactccgagatctctctcagccttgtctgcttatcacactggcttgatcgcgcccatgaagatccgcacagaggcccctgggaaccttcgtttatacagtgggagccccactcgcagcgagaaagagcaggtctccatcagctccttctactacaaggagcggaaatcaagacgatggaaaagtaagcgtgagggatcagactctggcaatcgacagatcaaggctgctgggaaagtcatcatccaggatattgcttgcctcctgcctgttcacaaatcgctgggagagctgtacatattgaatgtgaatgatattcaggaaacatgtcagaagaatgccgcctctgccttgctcgttggaagaaaggatcttgtccaggtttggtcgctggctacggtagctacagatctttgccttggtccgaaatctgacccagatttggaaacaccctgggctcgacatccatttgggcggcagctgctggagtccctgttggctcactattgccggctccgggatgttcagacactggcgatgctctgtagcgtgtttgaagcccagtctcggcctcaggggctaccaaacccctttgggccttttcctaaccgttcttctaatcttgtggtgtcccatagtcgatatcctagctttacctcttctggttcctgctccagtatgtcagacccagggctcaacactggcggctggaacatagcgggaagagaggcagagcacttgtcctccccttggggagaatcctcaccagaagagctccgctttgggagtctgacctacagtgatccccgtgagcgagaacgcgaccagcatgataaaaataaaaggctcctggaccccgccaatacccagcaatttgatgactttaagaaatgctatggggaaatcctctaccgttggggtctgagagagaagcgagctgaagtgttgaagtttgtctcctgtcctcctgaccctcacaaagggatcgagttcggcgtgtactgcagccactgccggagtgaggtccgtggcacgcagtgtgccatctgcaaaggcttcacgttccagtgtgccatctgtcacgtggctgtgcggggatcgtccaatttctgcctgacctgtgggcacggtggccacaccagccacatgatggagtggtttcggacccaggaggtgtgtcccaccgggtgtgggtgccactgcctgcttgaaagcactttctgaacctacagaagttgggtattgtctgaaatcccagaggacccataagtgccggtgacaagctgtctgtcaggggagaggctccagaacctgggttcgtccccagtgagaccggaggatgatcccccaaggactgcgcagcatcagctcttggtgggcctctgccttctcttctgtttggccacctggtgtggatgtcactgtgtgaagataaggacagaagtgcagagctgcgctttgtgtgttgtctatgtcggctgagctaccaaggtggaagttttcatggagaaaagcacctggctccagggccagtgttacagtgttaccctgtaaggtgttagccttaaaccaccgagcagcgttctcttgatgccagtgcagagaccagagtcagatgcccgaggacagtgggtaggaatttcatcaacaaatggacctatggcatcatggctttagaagctggtacatttactgagctgatggacagtggccttctaaaatatgacacttaaattgtaaatatgcactgtacttaaggattcttaagatgtatttttttgttatttctcctccagctgctatcccttggctaataaaattctagtaatttgaaaaaaaaaaaaaagagagaaagttaaaaaaaaaaaaaaaaaa

SEQ ID NO: 5411 - DNA, 2657 bp, Homo Sapiens
  NM_030622
aactagcccagccgcgcggagcgcctgggagaggagaaggagccgacctgccgagatggaggcgaccggcacctgggcgctgctgctggcgctggcgctgctcctgctgctgacgctggcgctgtccgggaccagggcccgaggccacctgccccccgggcccacgccgctaccactgctgggaaacctcctgcagctacggcccggggcgctgtattcagggctcatgcggctgagtaagaagtacggaccggtgttcaccatctacctgggaccgtggcggcctgtggtggtcctggttgggcaggaggctgtgcgggaggccctgggaggtcaggctgaggagttcagcggccggggaaccgtagcgatgctggaagggacttttgatggccatggggttttcttctccaacggggagcggtggaggcagctgaggaagtttaccatgcttgctctgcgggacctgggcatggggaagcgagaaggcgaggagctgatccaggcggaggcccggtgtctggtggagacattccaggggacagaaggacgcccattcgatccctccctgctgctggcccaggccacctccaacgtagtctgctccctcctctttggcctccgcttctcctatgaggataaggagttccaggccgtggtccgggcagctggtggtaccctgctgggagtcagctcccaggggggtcagacctacgagatgttctcctggttcctgcggcccctgccaggcccccacaagcagctcctccaccacgtcagcaccttggctgccttcacagtccggcaggtgcagcagcaccaggggaacctggatgcttcgggccccgcacgtgaccttgtcgatgccttcctgctgaagatggcacaggaggaacaaaacccaggcacagaattcaccaacaagaacatgctgatgacagtcatttatttgctgtttgctgggacgatgacggtcagcaccacggtcggctataccctcctgctcctgatgaaataccctcatgtccaaaagtgggtacgtgaggagctgaatcgggagctgggggctggccaggcaccaagcctaggggaccgtacccgcctcccttacaccgacgcggttctgcatgaggcgcagcggctgctggcgctggtgcccatgggaataccccgcaccctcatgcggaccacccgcttccgagggtacaccctgccccagggcacggaggtcttccccctccttggctccatcctgcatgaccccaacatcttcaagcacccagaagagttcaacccagaccgtttcctggatgcagatggacggttcaggaagcatgaggcgttcctgcccttctccttagggaagcgtgtctgccttggagagggcctggcaaaagcggagctcttcctcttcttcaccaccatcctacaagccttctccctggagagcccgtgcccgccggacaccctgagcctcaagcccaccgtcagtggccttttcaacattcccccagccttccagctgcaagtccgtcccactgaccttcactccaccacgcagaccagatgaaggaaggcaacttggaagtggtgggtgcccaggacggtgcctccagcctcaacagtgggcatggacagggttaatgtctccagagtgtacactgcaggcagccacatttacacgcctgcagttgttttccggagtctgtcccacggcccacacgctcacttgactcatgctgctaagatgcacaaccgcacacccatacacaactacaagggccacaaagcaactgctgggttagctttccacagacataaatatagtccatctgcaatcacaagcacatagccaggtaacccaccaactcccctggatctgcagcccacacgtgggagtctggctgtcaccttcacaagccacagaaacggccacacatgttcacagctcacacgccctctccattcatcgaacttctcagtgtccctgtccctggtgcctggcacagggaacagcatgccccctccggggtcatgccacccagagactgtcgctgtctatggccccaactcatgctccctctcttggctacaccactctcccagcctgtgaccaccgatgtccacacacccccaaccacttgtccacacagctacccacgtacgacatcgtcctggctccccagagtatcttcccactgagacacgccgcccccacagaggcacagtccccagccacctctgcaactgcagccctcagtcacccctttttaagcaccctgattctaccaaatgcaaacacatctgggtctgcgattatgcacagagactttggacatacgaggaccctcagaccggaggaacacctgcccaaccccaacacgtgcttatgtaaccacgtggaaagcggcccctgctgcccctccacacacacatacacactcactgatctacagcccctgttcggcgtcagagtccccactagacccagtggaaggggttagagaccaagtaggggccagtttccaattcaccctgtcagggagtgagccggatctgacgttccttgtgacttaagggtccggcttgggaattaaagtttgtttctggcctttagcctaaaaaaaaaaaaaaaaaaaaaaaaaaaaaaaaaaaaa

SEQ ID NO: 5412 - DNA, 7769 bp, Homo Sapiens
  NM_030627
tttccagctggttgtcatttcactcggctcggtcctgaggagaaggactcagccgcggctgcgggacccgggcaccgggaggcggtggcggcggcggcggcggcagcagcggcgacagcagaggaggaagaggaggaagaaggaaagaaaaagaagaaccaggaggagtcctcaacaacgacagcggggactgcgggaccagggtaaagcggcgacggcggcgacggcccagcaaccgtgaggagaaacaaaagccttctaaattatagtttaaaaaaaaattctgggggaaaagagagagaaagccgaggggggaggcccttctcctttaaaataactacggtagtgggtttttcctttttttcctcttttttccctctctgcggagaatcgaactgagggaactgaacaaaccgcccctgggtcccatgagggaaaaaaaccccggagccgcagagaggggaagaggcagaaaccgcaggaccttccaggtcgccccctcggtccccgcacccccaggccgcccgctcaccctcgtcgagtctcgctaatccctcctgatcgcgacccccgcaagagggagaaacgggtgtttccaacccctttcatgggggagaggaagccgcggggagcccaggaacagcgaccgcagcaagatctgcacccggagcctcaggaacagccccagaggccaaaactgcaccctgcgaaagagcagaaaacaggaccaggaacagcagaaacctccctgcaatcatctttccattagtcaatgctgatttcctctcccgaaaccaggaattcacttcccaccccagataacctaatataatctatatatataaatatataatatataatgttcttaaattattcctgatttttttttaaccaagctgccaagaaaagaacgtattcccctcttagtcctattctaatttttatgtgagtgaatctaaactgctgaggaaaaccatatgtgattgttaaattatatatatctatatttttactccgcgcaaggcttattcttctacatccatagatgcttgagaagctctgtttttgtcattcatgtacattttcctttggaaaaagaaagcgcctattttactaaccaaagacttgatttttaccctcttcatttttattccctcctaaaaataagcccaattggatccaagtcaatgttttaagagatttttttaagagttgttttttctttcagagaccagaattccaaatcagaacaatttaaggtgataagctgcgatctttgagctagctataaataagacatttcaagcaagcaagcaaacaacttaaatttggggtagaggaaaaaaaaggcgtgagacatcaggttgtcattttttattgtgagattctgctcctaaagataataaatgggggattacgggtttggagtgctagtgcaaagcaatactgggaataaatctgcttttccagtcagattccatccacatctgcagcctccacaccatcaccaaaatgccacccccagccctgctgcttttataaataataacacagctgccaatggcagcagtgctgggtcagcttggctttttcctgctccagctacccataacattcaggatgagatcttggggtcagaaaaagcaaaaagtcagcaacaggaacagcaagaccccttagaaaagcagcagctttccccaagtccaggtcaggaagctggaatactgcctgaaacagagaaggcaaaatcagaagaaaatcaaggggacaattcttcggaaaatggcaatgggaaggagaaaataaggatcgaatctccagtgttgacagggtttgattatcaagaagccactgggctaggtacttcaacccaacccttgacatctagcgcatcgtctcttactggtttcagtaactggtcagcagcgatagcgccttcctcctctacaataatcaatgaagatgcaagtttctttcaccagggaggggtccctgctgcttcggctaataacggtgctctgttgtttcaaaatttcccccatcatgtcagccctggctttggaggcagcttctctcctcagatcgggcctctctcacagcaccacccacatcaccctcatttccagcatcatcacagccagcatcagcagcaaaggaggtctcctgccagtccccatcccccacccttcacacatagaaatgctgcttttaaccagctgcctcatttggcgaataatcttaacaaacccccctctccgtggagcagctaccagagtccgtcaccaacaccctcctcttcctggagcccgggcggtggtggatatggtggctggggaggttcccaaggccgagatcaccgcagagggctgaatggtggaataacgcccctgaactccatctcgcctttgaagaaaaattttgcaagcaatcatattcagctccagaagtatgctcgccccagctctgcctttgcacctaaatcctggatggaagatagcttgaacagggctgacaacatttttccttttccggatcgccccaggacattcgacatgcactcactggagagttcactcattgacataatgagagctgaaaatgataccattaaaggtcgtctaaactattcatatccaggatccgatagctctctgcttattaatgcaaggacatatgggcgaaggagaggtcagtcttcactgtttccaatggaagatggattcttggatgatggccgtggggatcagcctcttcatagtggcctgggttcacctcactgcttcagtcaccagaatggggaaagagtggaacgatattctcgaaaggtgtttgtaggcggattgcctccagacattgatgaagatgagatcacagctagttttcgtcgctttggccctctgattgtggattggcctcataaagctgagagcaaatcctattttcctcctaaaggctatgcattcctgctgtttcaagatgaaagctctgtgcaggctctcattgatgcatgcattgaagaagatggaaaactctacctttgtgtatcaagtcccactatcaaggataagccagtccagattcggccttggaatctcagtgacagtgactttgtgatggatggttcacagccacttgacccacgaaaaactatatttgttggtggtgttcctcgaccattacgagctgtggagcttgcgatgataatggatcggctatatggaggtgtgtgctacgctgggattgataccgaccctgagctaaaatacccaaaaggagctgggagagttgcgttctctaatcaacagagttacatagctgctatcagtgcccgctttgttcagctgcagcatggagagatagataaacgggtggaagttaagccatatgtcttggatgatcagctgtgtgatgaatgtcagggggcccgttgtggggggaaatttgctccatttttctgtgctaatgttacctgtctgcagtattactgtgaatattgctgggctgctatccattctcgtgctggcagggaattccacaagcccctggtgaaggaaggcggtgaccgccctcggcatatttcattccgctggaactaaaggataactgcagtgctcattttcaggcctcagaataagtgcactcttctgttcattctgaccccttcctcaacctcttcacgctggcatgtccttttgtagcagtctgtaacttaactatagtataatgaaaagaatgacctataatataggtgttttgtagattcttgtgtcactgcaaacaatatgaactcctttttcgtattgccatcgggttgcatggaagttttattctcttgttttgctggaaaccaagaggatccaaacttcctgcaacattttcttagaggagagagagaaatattaaaagagaaatgaaacaatagagtattttgggtttttaattaaattattgttaataatataacatataagaatacttttattaaaataaccatgcaacaataacactatcggtctatctgacagtttttcccccagggaagtgcttttgccttttcctttcttttttttttttttttcatcttttttgtctctctcttttttccatccctttttaatttttttaacagcaatggaggaagttaacaatttttaatggaaagagcatgttagagcaaacaaatgcataagcaagactgagcagcattataattaattttcagggttttgaggctgaacataatttcattatccctcaaaaagttaccaccacatcagaaaaaataaaaaaaaaatagtaaagtaggcagagctaggtttattttctcttaaacaatttttaaaattcagaatgtaaaaattgggtaaatttactactgaggggagtgcacttatttatttaacttacttatctggtcaaagccccaggaaacctaccaaagctagaattaatgacaactggtgggaaacctagcatttcctctcctgaagaataaatgtataaatgttatttttgatgtttatatataaactctatatcctaatttactaatactcatcagatgtcagcctttgctctccattttgacgttaaaaaacaacaacagatctagagatacctcaaggatatcatttttgattttgtgttacagtacacttgtagccaaaactggaagacaaaaccaatatataatttggctgctgattggcttacttttagatttaaagttactttgggtatcctgtaatttagttgtaacatagaaaatgaaaaaacagttaaaaaaagtgaagtagttgcaaagtgttttgcactgttgaactaagtaactgtgtaaatctgtgcaaaggtacgtatgtttatcttactcttcctataaactaaaataacattacagtttccgaatttagcatgggacatagtcagtgtttgaagtgccaacttcatcaagtaatgcatgctttattataaataaaattctagctttgaaaggcgttatgtgttgaacagtatgcttcaggggtaaatttaaaatagtctcttgaagccctagtcatggaagtaacttttattttaattgacattctcttattaaatgccctatccatcattaaaaggtttattatcagtgggcaaaacatgaaataatatgatcgaatggcaatcttgctagttgcgctacctaacagtaccatcttggatccttcaaaaccaaagacttgccccagcactgctgtggaaccacctggcttatgacccctatggatgatctttaggaaaagcagccctttacttttaatacaggctttaatgaactatacctgttaagttccaaaggtcaaaatggaggcatttgctgtctaatattcaaacatagaaagggagctgcttttaaagaattccctgcaaatactgaaagcagtcatgcgaatggagggtgctcttgtgtagctggtcagggacttttttttcttttctcctgaactacatgattctaattggaatgttcatttgcctctttttactcttttaaatgcttgtaggtggcttggggtgtgctatcgtgctgttcctactcagtaaacaggtgtgatgagttaacaagaaataacactgtttgagaactagctttgaataataatttttccctttgtacatgacctgctgaatttcggtacagtgtttttgtagctaacttattttgtcatgcacataatgtatatttgttatgcactacttttgtatatcttgtttttccaacagtgaacatttttaggcacacttttcactgacgggatatctctttatgcaatacctcaatttttcatattgcaaagagtagctttttgtacttttattactgagagatcttcatatacttcattttttaatataaataattttaataaattttattttcttatattctgctttttatacatttcagtgctctgcatacattttaaattatgaatgtcgtgcactggcaatgctattttagagtctgcagagaagagaaagcatgttgcttaaacatccttccccagcaccagctattggtgtacctataatttaagaaatagtctatgtaaagtcacaaattaatgaaaaaaattcgcatgaaaatgacagataacactgtagttcctaaaaaaaaaattaaatgcataagcataaggtagaaattaaaataacaaaattgtctacagcttcttactaagtttttaaaattattcataaaatgcagacatttttggtgaatgtttagccatttttaatattaataaattgatgttaagtgtttgattcagagatgtctgctcttttaaattatatataaggaaaaaaaatagcctgccttgggacaggtgtgtaatgttagtgtgcatgactaatgtaagaaattgttattctactaatatttacttgtgattgtgtgacaagtgtgtttacagattattggttacacttcaatttacagggcataaacaatgattatctattactctgaactttatgattacatgttcttcagattacatgggattgtagttgggagttaccatgtaactcaaacataattaacatgtaattagtttacagattgtagggcatcacttcaattcaccaagcatgtagttctagcgcactagcatggcgccagccatgtacttacaatgtagttacagagtaattacatggtgatttttgcaatgtaaaataaagtgtttctgattattttctatgtaaaggaaccctctcctttccccttctggtccctgcgctttggtataatatatatacttctccatacacagacctctgcagaatgcaaaataaaacttgcagtgaatgaatttagcattttatgagagtgctgttggaaagacttgataattcaccccttttgttttgaagagttgaatcttctgttaaaaggtgatttaaaacttgaatgtgatgaattgtggcaagttaacttcaagttatgtgcaatacttatttcaaacttttgaaagatctttgcagtgtaattctttgtttttaattgcagacatttaaaaatgtcattttctactgttaagagtaatcctctttcttgctggtgtttctaaagaaaagaatcagaaatcaatctttctactaatgtaaatttgagattatttttaaaaatggaataaaagaggttttggtcatttgctttattttattattttaaagctactgtgattgatagcattgtaagaatcgggacaatattgtattcaactgttttattttttatatttttaaaatttaaagtataattagtttttataattttcatcagatttttgttatattttttggaagtgaaacttttagcaagtgggtgtctagtttttactaatccctaattttttttccagtgtattgctcatattatcagaaggaaaagttatttaagtatgtcagttaattgtactacttggctgaatttccatatagtttttactgtgtatggggaggttgtagtatttattatagcattttaaataagggtaattcattttttattaaagtcattttcacgttaagttcctatttttgtatgttctactcttaagttatataacacagttccttttttaaaagagttcatttgttgaagtgctagtgaaaaattaatgttattaaatagtttgcaaatgactatttataccagtatgcatataatttttaaatatttgtaatgtgagatgttgaatgaataaaacttttaactcaga

SEQ ID NO: 5413 - DNA, 3300 bp, Homo Sapiens
  NM_030628
atgcgccgcctgcgctccgccgctcgcgcctcgggctcggctcgggctccgggatgtccgcgctgtgcgaccctcccggggccccagggccacctgggcctgccccggccacccacggtcccgcgcctctcagtgctcaggagctgtcccaggaaatcaaggcttttctgactggcgtagaccccattctgggccaccaactctcagcccgggaacatgctcgctgtggtcttctcctgctccgttctttgccacctgctcgggctgctgtgcttgaccacttgagaggtgtctttgatgagagtgtccgggcccacctggctgccctggatgaaacccctgtggctggtccacctcacctccgtccacctccaccctctcatgtccctgctggtggacctggtctagaggatgtggttcaggaagtgcagcaggtgctgtctgagtttatccgggccaacccaaaggcctgggcacctgtgattagtgcatggtccattgacctcatggggcaactgagcagcacgtactcaggccagcaccagcgtgttccccacgctactggcgctcttaatgaactgctacagctgtggatgggttgtagggccacgcgtacattaatggacatctatgtgcagtgcctctcggctctcattggtagctgcccagatgcgtgtgtggatgccttgctggatacctctgttcagcattctccacactttgactgggttgtggcacatattggctcctcttttcctggcaccatcatttcccgggttctctcctgtggccttaaggacttttgtgtccatggtggggctggaggtggagctggcagtagtggtggaagctcttctcagaccccctctacagaccccttccctggatctcctgccattcctgcggagaaacgggtgcccaagattgcctcagttgtaggcatcctaggtcacctggcctcccgccacggagatagcatccgacgggagctcctgcgaatgttccatgatagcctggcagggggatctggaggccgcagtggggacccctcccttcaggccacggttccgttcctactgcagctggcagtcatgtcaccagctttgctgggcactgtctctggagagcttgtggattgcctcaagcccccagctgtgctgagccagctgcagcaacaccttcaaggattcccccgagaggagctggacaacatgttgaacctggctgtgcacctggtgagccaggcctctggggcaggtgcctaccgcttgctgcagttcctggtggacacagctatgcctgcttcggtcattaccacccagggcctggctgtgccagacaccgtgcgtgaggcttgtgaccggctaatccagctgctgctgctgcacctgcaaaaactggttcatcaccggggagggtctcctggggaaggggtgctaggcccgcccccacctccccgcttggtgccctttttagatgcgctcaaaaaccatgttggagagctgtgtggagagacgttacgattggaacggaagcgcttcctctggcagcaccagctcttgggcctgctgtctgtctatacccggcctagctgtggacctgaggccttgggccatctgctgagccgagcccgaagccctgaagagttgagtttggccacccagttatatgcagggctagtggtcagcctctctggcctcctgcccctggctttccgaagctgtctggctcgggtgcatgcagggacattacagcctcccttcacggcccggttcctgcgcaacttggcactgctagtagggtgggaacagcagggtggcgagggccctgcagccctaggggcgcactttggggaatctgcctcagcccatctgtctgacctggctcctctcctgctacatcctgaggaggaagtagctgaagctgctgcctctctcctggccatttgtccctttccttctgaagccttatccccctcccagctcctgggactggtaagggctggggtgcaccgcttctttgcctctctgaggctgcatggacccccaggtgtggcctcagcctgtcagcttctcacccgcctgtctcagacatccccagctgggctcaaggctgtcctgcagctgctggttgaaggagccttacatcgaggcaacacagaactgtttggtgggcaagtagatggggacaatgagactctctcagttgtttcagcttctttggcttctgcctccctgttggacactaaccggaggcacactgcagctgtgccaggtcctggagggatttggtcagttttccatgctggagtcatcggccgtggcttaaagccacccaagtttgtccagtcacgaaatcagcaggaagtgatctataacacccagagcctcctcagcctcctggttcactgctgcagtgccccagggggcactgaatgtggggaatgctggggggcacccatcttgagtccagaggcagccaaagcagtggcagtgaccttggtggagagtgtgtgtcccgatgcagctggtgcagagctggcctggccccccgaggaacacgcccgggccaccgtggagcgggatctccgcattggccggcgcttccgcgaacagcccctgctctttgagctgttaaagctggtagcagctgcacccccagccctgtgctactgttccgtgctgcttcgggggctgctggccgccctcttgggccattgggaagcctctcgccaccctgacacgacccactccccctggcacctggaggcatcctgcaccttagtggctgtcatggctgagggaagcctcctgcctccggccctgggtaatatgcatgaagtatttagccaactggcacctttcgaggtgcgtctgctgctgctcagtgtctggggttttctccgggagcatgggcccttgcctcagaagttcatcttccaatcagagcggggtcgcttcattcgggacttctccagggagggtggaggtgagggtggaccccatctggctgtgctgcacagtgtcctccaccgcaacatcgaccgcctaggtcttttctctggccgtttccaggcaccttcaccgtccactctccttcgacaggggacgtagccttttcttgctctggaagcccagggaggttgagcagtgagagagggaagggactaacgtgctccggaagggtggaggtttctcttctaagtccttggtctaaagagcgctgtcacttttttctctcccacttttttttttctaaataaaatttgccaacttgagaaaaccaaaaaaaaaaaaaaaa

SEQ ID NO: 5414 - DNA, 4687 bp, Homo Sapiens
  NM_030636
gcgagcggcgcggcgcggcgcggccgggactttggctttgacaccgactgcgagcgggagccgtgcggctggtgctgggtctggactggctctggcggatccccgcccgagttgggcgcaggactttttgccggggtaaacgcaactgcggcggcgccgccgcaagccccggtgcagcctcggcggcgggtttcgccgccgctgccgccgcctccgagcagccctgcggcttctattcactctgggagagcgatgctaagtttctcccatagaaagagccgggacacgcagaccgaagcggcgtagtcggcttccagggcctgaccagtgacccacacccgcgcggacgcctaggctggaggcagggggcccgtgctgtcccgggctgggctcaggcttccgagccgcaggtggaagaggaaccggcgccccgcagagcggccgagaggcggccaagtgaaaggtaattttggacacgccaggcatggaagattcggtgtttgtctatagtaacctcttcagtccctgaatcctgcaccttccgtttttctgtgcttgtacggcctactgggcttcctccctagccagagagctcttctgcagtggtgcggccttcccgggagcctgatcctggcggaccatggggagcaccctgggctgccaccgctccatccccagggacccctcggacctgtcccatagccgcaagttcagcgcagcctgtaacttcagcaacattctagtgaatcaggagcggctcaacatcaacactgccacggaggaggagctgatgaccctgcctggggtgacgcgtgccgtggcacgcagcatcgtggagtaccgagagtatatcggtggcttcaagaaggtggaggacctggcattggtcagtggtgtaggcgccaccaagctggagcaggtcaagtttgagatctgtgtgagcagcaagggcagctcagcgcagcactctcccagttccctgcggcgggacctgctagcggagcagcagcctcaccacctggccacagctgtgcccctcaccccacgtgttaacatcaacacagccaccccggcccagctcatgagcgtgcgaggcctctcggagaaaatggccctcagcatcgtggacttccgccgtgagcatgggccctttcgcagcgttgaggacctagtgaggatggatggtatcaatgccgccttcctggacaggatccggcaccaggtgtttgctgagaggtccaggcccccatccacccacacgaacgggggactgaccttcaccgccaagcctcacccgagccccacttccctgagcctgcagagtgaggacctggacctgccgccaggggggcccacccagattatctccactcggccgtccgtggaggcctttggaggcacaagggatgggaggcctgtgctgaggctggccacctggaacttgcagggctgttccgtggagaaggccaacaaccccggggtgcgagaggtggtgtgcatgacactcctggaaaacagcatcaagcttctagctgtgcaagaactgcttgacagagaggccttggaaaagttctgcacggagctaaaccagccgaccctgcccaacatccgcaagtggaaggggccccggggatgctggaaggctgttgttgctgagaagccctcgagtcagctccagaagggagctgggtatgcaggattcctatgggacgcggctgccggcatggagctgagagacgcgggttcacaggagagctcgccaagcaacgggcacgggaagctggcgggccccagcccatacctcgggaggttcaaggtgggaagtcacgacctgacccttgttaaccttcacctggcagccctgaccctcctggggagcgagaatcccagcaagaatcacagtgatggccaccggttggcgagctttgcacagaccctacaggaaaccctgaaaggagaaaaggatgtcattatcttaggggattttggccaagggccagacagcaatgactatgatatcctgaggaaagaaaagttccaccacctgatccccgcgcacaccttcaccaacatcagcaccaagaaccctcaaggctcgaagtctctggacaacatctggatcagtaaaagcttaaagaaggttttcacaggtcactgggctgtggtgagagaaggcctcacgaacccttggattccggataactggtcttggggcggggtggcttctgaacactgcccagtgctagccgagttctacactgaaaaggactggagcaagaaggatgcccctcggaacggcagcggggtggccttggagcgaagtgaagccaacatcaagcacgagcgatgatgacaccaaatccatgtgtccaccctgggacccaggagggcacagccaaggaatgagccctgtggggtgacgcttcagggcagagctgccttttaatttttattctcagagcatcagcacttgaggccttgccccacgccttctctgtggaccattcaggacctccagtgggggtggcgtgccaggcgcgtaccccaccaggtgggcaaagcagaaacctgcggggagcggagacgccttttatctctggatgccacagacctgagcagcattgggctggctgtccgctgctgactggatggcagcacaaagacaatatgagcagagggaggagaagaaggggtgctcaggctgcgggccacagtccagcagcgccagaagcactcatttctgaccaccaggctatgacgttcctgctgcgcattacagaaagcttttaactgtgatcaggcactctgctcagatacattgagtggcgatttttagttttgttttgaaaaaataaacagattaacctgcctcgctgcagtgagagcatgggacaagtccgccacagccctcccccgcccccttcccccgccccccaacgcgcagtgtgtatttgcaccacggcaggtgcctctgtgtggagctagggtcaagccctgagcagcttcacttcccctgcgccttttatgtccccaccttgaggccttgcagaggcgcctctcaaggccccatcagctcgccgggacctctgtgaagcctctctgtcatctccccttcccagcccctccttcatcccctgcctccttcaccagcctggcttttgcctggagcactatttgtttagttctctttgcaggacaagaattctctcagggtggtatcacctcctccctcctccccactcactccagtttttagcccggagcctcctgtggttgactatcaggaatgtgtgctgtgtcaggatacataggaagttgacctcggggtatcatggagagtgtccctcctagtggctggaggtagggacagttggttgtggggctggagagaggttgtggggaggaagcgaggatgcgtgcctgccactaggcatctgcatccccgagcccaagccaggagggatttcccttaggcaacaccatcccagggagatctgccacaatttgcgtttcacagctgaagacgctgaggcttagagagctcgacctcctcaaggtcacaccactgggtaaatagagggatgcagactcaggttttgctatgtgctcacatttcaactttatgcttaacatgaatggaaaaatatgaaagtaaatagtgaaaaggtaagttatgagcttagattacctagattattccagtatcccatggaagctgaggacttattccgctttccacaccgaacactaaatgtggaccagtatcaagaaccctcctgtccccacgcagtgtaaacccagtggcttctctgacctggagctgatgggccgtgaagggggcctatttttctccaaaggccatccttttggggccacctggctccaagaagcatcgctggtcttggggacgggaagggaaccctcttccaggagctctaagggtacttgggaatcaattgtgtccattctgaggtctctccagtgggagggcggcagctcctgtccctgggttcaggctgtgcttctggaagcatcgaaatgggatgtctgagccttgaggaaaagcagcagggttagcattaaagtcaagaggggcagctcaggatgctaccagggagcacatcgtttctggtgcctcatctaaaggtgaaacctcccctacattcaccagccggatgtcccaaatccctttagccagattgctttttgcaaccaaagctgtggacagaaaagcctccttaagtgagctgaggggacaggaaatccaatcagatgacctttgtgttcgtaatcgggcttgagccagaggctggggagctgagtcccagccaaacctcactggcccttttgcttttcacgcccagggctcagtggcccaggaagtgtgctgggcagcctgttcttactccagctcaacccattgggtgttggctgtttttggttttagttgttgttttgtattttgttgttttaattaataggctttatttgtaagagcagttttatgtttacagaaaaattaggcacaaagggattcccatatccctcctcttctttgcatatttccccctctaattagcatgttgcattagcatggcactttgttacaactgatgaacttgtattcattattagctacagtgttcatagtttatattaaagttcactctttgtgttgtgcatccta

SEQ ID NO: 5415 - DNA, 6312 bp, Homo Sapiens
  NM_030640
gtttttaaacgattattaccacctctctctcccccccaacccccactttcacaacgcggccccccacctttacctccctaagttcttcatctctttcgacattttttttgaaggctgatgggggggagggtggaagagaaagagtgaagaaaagttgcgagcgtctcctctcttcctaagcctcccgccccaacccacccctcagagaaggagaagataatatactgaaaagaagaggaggaggagagcgacgggacgggacgcgagcgggagcgcagccgccctctcggctccgcggcggcgcctcgcaagtccgggaggcgaggggggcccgaggggagacgccgtgacaactttcgtttccctctgagggaattgggaggtcggcggccccaaaagctttcagtccagtgtaaagctgttggagcgcgggagcaaaggtaaagaatgatgtaatgcgctggctgctccaaagcatcttttgttgtggaatggttattccagtcatctctttatgaatcaaatgtgaggggctgctttgtggacggagtcctttgcaagagcacatcaacgggaaagagaaagagacattcacttggagggctcttgctgaaaatgggtttaactctccttttgccagtcaccaccagcctgacctcatacacttttagtacaatggagtggctgagcctttgagcacaccaccattacatcatcgtggcaaattaaagaaggaggtgggaaaagaggacttattgttgtcatggcccatgagatgattggaactcaaattgttactgagaggttggtggctctgctggaaagtggaacggaaaaagtgctgctaattgatagccggccatttgtggaatacaatacatcccacattttggaagccattaatatcaactgctccaagcttatgaagcgaaggttgcaacaggacaaagtgttaattacagagctcatccagcattcagcgaaacataaggttgacattgattgcagtcagaaggttgtagtttacgatcaaagctcccaagatgttgcctctctctcttcagactgttttctcactgtacttctgggtaaactggagaagagcttcaactctgttcacctgcttgcaggtgggtttgctgagttctctcgttgtttccctggcctctgtgaaggaaaatccactctagtccctacctgcatttctcagccttgcttacctgttgccaacattgggccaacccgaattcttcccaatctttatcttggctgccagcgagatgtcctcaacaaggagctgatgcagcagaatgggattggttatgtgttaaatgccagcaatacctgtccaaagcctgactttatccccgagtctcatttcctgcgtgtgcctgtgaatgacagcttttgtgagaaaattttgccgtggttggacaaatcagtagatttcattgagaaagcaaaagcctccaatggatgtgttctagtgcactgtttagctgggatctcccgctccgccaccatcgctatcgcctacatcatgaagaggatggacatgtctttagatgaagcttacagatttgtgaaagaaaaaagacctactatatctccaaacttcaattttctgggccaactcctggactatgagaagaagattaagaaccagactggagcatcagggccaaagagcaaactcaagctgctgcacctggagaagccaaatgaacctgtccctgctgtctcagagggtggacagaaaagcgagacgcccctcagtccaccctgtgccgactctgctacctcagaggcagcaggacaaaggcccgtgcatcccgccagcgtgcccagcgtgcccagcgtgcagccgtcgctgttagaggacagcccgctggtacaggcgctcagtgggctgcacctgtccgcagacaggctggaagacagcaataagctcaagcgttccttctctctggatatcaaatcagtttcatattcagccagcatggcagcatccttacatggcttctcctcatcagaagatgctttggaatactacaaaccttccactactctggatgggaccaacaagctatgccagttctcccctgttcaggaactatcggagcagactcccgaaaccagtcctgataaggaggaagccagcatccccaagaagctgcagaccgccaggccttcagacagccagagcaagcgattgcattcggtcagaaccagcagcagtggcaccgcccagaggtcccttttatctccactgcatcgaagtgggagcgtggaggacaattaccacaccagcttccttttcggcctttccaccagccagcagcacctcacgaagtctgctggcctgggccttaagggctggcactcggatatcttggccccccagacctctaccccttccctgaccagcagctggtattttgccacagagtcctcacacttctactctgcctcagccatctacggaggcagtgccagttactctgcctacagctgcagccagctgcccacttgcggagaccaagtctattctgtgcgcaggcggcagaagccaagtgacagagctgactcgcggcggagctggcatgaagagagcccctttgaaaagcagtttaaacgcagaagctgccaaatggaatttggagagagcatcatgtcagagaacaggtcacgggaagagctggggaaagtgggcagtcagtctagcttttcgggcagcatggaaatcattgaggtctcctgagaagaaagacacttgtgacttctatagacaatttttttttcttgttcacaaaaaaattccctgtaaatctgaaatatatatatgtacatacatatatatttttggaaaatggagctatggtgtaaaagcaacaggtggatcaacccagttgttactctcttaacatctgcatttgagagatcagctaatacttctctcaacaaaaatggaagggcagatgctagaatcccccctagacggaggaaaaccattttattcagtgaattacacatcctcttgttcttaaaaaagcaagtgtctttggtgttggaggacaaaatcccctaccattttcacgttgtgctactaagagatctcaaatattagtctttgtccggacccttccatagtacaccttagcgctgagactgagccagcttgggggtcaggtaggtagaccctgttagggacagagcctagtggtaaatccaagagaaatgatcctatccaaagctgattcacaaacccacgctcacctgacagccgagggacacgagcatcactctgctggacggaccattaggggccttgccaaggtctaccttagagcaaacccagtacctcagacaggaaagtcggggctttgaccactaccatatctggtagcccattttctaggcattgtgaataggtaggtagctagtcacacttttcagaccaattcaaactgtctatgcacaaaattcccgtgggcctagatggagataatttttttttcttctcagctttatgaagagaagggaaactgtctaggattcagctgaaccaccaggaacctggcaacatcacgatttaagctaaggttgggaggctaacgagtctacctccctctttgtaaatcaaagaattgtttaaaatgggattgtcaatcctttaaataaagatgaacttggtttcaagccaaatgtgaatttatttgggttggtagcagagcagcagcaccttcaaattctcagccaaagcagatgtttttgccctttctgcttcactgcatggatacagttggtaaaatgtaataatatggcagaattttataggaaacttcctagggaggtaaattatgggaagattaagaaaggtacaaattgctgaggagaagcaggaaacctgtttccttagtggcttttatcccctcggcatgcgatggggctgatgtttctatgattgcctcagactttcacatttactagtagggctgagagaggctttagtgaggaaggaatattcagaataaaacggttgagaaagctgagaagaccattgagttttgatcagttgtgaatagagtgcaaagccatggccaagctgtttttggaaacgctggccggcgtgtcttcagtggaaaaagcaaatcaaaatggagcgagagcaaaggggcgtcctcagtcctcaacctacaatcactgtatggaatcggtcctggcagctgaacataggaggtcactggaacaagtgatagtgcagattggctttcaaacatcctcctggcttgagttttatcagctacaatgtgggtcctcttttgaagccttaattcacaacagcagctttttgggggtggggctgggcgggtgttgtcattgttctttcccttcctgtaagtgtcgctagttgctgcctcgtatctcaggtttttctctgtttttgagaaatggacagttttttgaccaggatgtgacttcatgtttcctatggtgacttctaaaaccagcacagaatgatatgactcaacacagaccgacttggttatggggatgatgagccgcacagacctcactagttgtgcacaaataatgtgctatgatggggtgtaaagtgaaggcagaagagggtcagccgcattgttatgatactgggaaagtgctggtcaacgatttgagttagtttttagatatacattgaaatctttaatcagacattctcaagtttcacacagtagtttttgatgttatgtacacacacaccaaatgtgtaacagttcaccacttccagagtgtggtcatgcccaaaacatgtttaagaaaggaaagcagtagctccttgctaacgatgtttcaggaggtttgggggacttggttttaatgagcttctgtcatttagggcttctcttggccatggtcccccttccttctggaactgtgatgtagtcacatcctacagcctttagtgctggttcactagtgtcagataatcagttcttggaatcgagactgccgtggcgaaggggtggcctcggaggcaggctctggagctgcttggatgtctttaggtggggtggtggctggctctcttcagcatgtaattggggaaaccctcgcgtctactaggggtgatacagatggtgattttaaagagcaaaactagacttctatgtgagaagtgctggaaaatgatttaggacatgtgtaaagttagatggaaagactgtaaatgtttaatatgaatatagtgttcttttgaagtaaggccagctgttgaacggttaaactgtgcatttctcattttgatgtgtcatgtatgttaatgtatgaaatgattaaataaaatcaaaactggtacctgtttatacataaatacgagaaaagacctatctttgcagccataaactcggtgggaacaccaccactcaagttgccaaaggaggcagtggtgaaacctgtcctgttctcacttaaatgaggatttagctcaaaataaagtggtggtgtcatcaggtttattccgtgttctgtcattcacatggaacaccggatgattagctaacagtttagtgccagccttcattctttactgtgtacgttaaatgcacactacagtgaaaaagcctaagacacttggtaaatattttctagctgactgattccagaacacacaagtacatggtaggaaaaaaaaggccagctacacacacatggcccatttcgatataacatgtaaatgatgttacgattcctacaggaaaaacaggaagggcaattgttgaagagctgtcctttgtccttgccacatacatctcaacaacctctctgctcatgacactagatttgatgacttatgagactagaaacttagtctcatcagtttcataaaaattaggcattgaaggaataaagcttcagtgcaaacagatggaatattgactacagaaagaatcacaggtgaccttgaagttggttgagttgaagttacatttaagaaaatttataagaaagattgggccgggtgagctagactagaagagctatcttggccaggaccctgcagaaaaagaggtggaagtgagatagaggaataaagggaattagaataaatcagcctccagagatagagggtaacaggaggaacagttgtttcagtgagaggcttccaatgagaagatgcagatcttgggagagcctgaagttcaggccagttgctgacagtgctcggagccccttcatgaccagcctcagcaggctattgttggaggactggtttggatgtgacaactacaattagaccaggaattaaac

SEQ ID NO: 5416 - DNA, 3182 bp, Homo Sapiens
  NM_030645
gatgatgtatttccgcttctggtctgcctggtcgtttttggttggatcggcttgttgcggggagggagggggggagattgtttgcagcatagaagctccgcggacgggaaggtaaactgagctccccagagacgctcatcctacagcctcagctcgggcccagccttctctctccagctgccaccacagcctggaggcgcctgcctccaccctcccgaatggtgctcctcctagcaggcctcggtccaggatccaagccccctttgccccctgccttggagctgttgctccgggtttgtcacagtggactccctgtggcgggaagggaagaacttttgcacagacaaggcttcagctctaggaaccccactgacaacttgaatctcaacctctaacctagtgtgaggttcttcctgtgcccaccttttctgccttttgagaagagaaactcttctcctggccatctagagcccaggaagccccaagctggggccctggtcccagcatgtcagtcctctcttgtgcatagggctctgccctccccctgtcagcatggctgagctcagacaggttccaggagggcgggagaccccacagggggagctgcggcctgaagttgtagaggatgaagtccctaggagcccagtcgcagaagagcctggaggaggtggaagcagcagcagtgaggccaaattgtccccaagagaggaggaagaactggatcctagaatacaggaggagttggagcacctgaaccaggccagcgaggagatcaaccaggtggaactacagctggatgaggccaggaccacctatcggaggatcctacaggagtcggcgaggaaactgaatacacagggttcccacttggggagctgcatcgagaaagcccggccctactatgaggctcggcggctggctaaggaggctcagcaggagacacagaaggcagcgctgcggtacgagcgggccgtaagcatgcacaacgctgctcgagaaatggtgtttgtggctgagcagggcgtcatggctgacaagaaccgactggaccccacgtggcaggagatgctgaaccatgctacctgcaaggtgaatgaggcggaggaagagcggcttcgaggtgagcgggagcaccagcgagtgactcggctgtgccaacaggctgaggctcgggtccaagccctgcagaagaccctccggagggccatcggcaagagccgcccctactttgagctcaaggcccagttcagccagatcctggaggagcacaaggccaaggtgacagaactggagcagcaggtagctcaggccaagacgcgctactccgtggcccttcgtaacctggagcagatcagcgagcagattcacgcacggcgccgcgggggtctgcctccccaccccctgggccctcggcgctcctcccccgtgggggccgaggcaggacccgaggacatggaggacggagacagcgggattgagggggccgagggtgcggggctggaggagggcagcagcctggggcccggccccgcccccgacaccgataccctgagtctgctgagcctgcgcacggtggcttcagacctgcagaagtgcgactccgtggagcacttgcgaggcctctcggaccacgtcagtctggacggccaagagctgggaacgcggagtggagggcgccggggcagcgacggcggagcccgtgggggtcggcaccagcgcagcgtcagcctgtagccgaggggccagggttcctggcttgaatctgccaccacgggccggttggggcccacagtcttctcacgccctctcctctggggcctcgtcttcccgaaggtccccttctccagtgcttccctgggagaggccagctgtgttcgagtcctctgtgcctgccctggcgttctcacagcctcccccttcccctcagcaggcggctctctttgccttacccattcagaaggctcgccctcggcgctctgtctgcctctgcctgccagctcatcacgatctgcagggcattgaccctttgctttccctttctgctccctctctttccatctgtttggctttttccctcagggaacttggtctagaaggcactgggaagctcatcagagaaaatgggtgctgggcctgagtactcccgtcggaggggatggacagtcacccctcccgttggtttccagccccgccccccttcccaaggcaactctggagggtaccctaggtatgctgctgagccctgccccccgtcctgctccagcctgcccgtgtgtaacctgtaagatgtactgtgtgcctccggaagacaccacctttcccttcagcattccctttcatgacctgaggcactctgcgatgtgtgccccaaagcagaacttacagggcctgcaggaagctggtgtcagggagagaaacccaaccccactgtcaacatagggagcatcaccaactccagactggctcctgtgggtatggtgtttccgctgggctgggtcctcaacattgccaaggtgctagtgggtccctaagagggcccatgttgggggtgaagtcatgaggtcctgaaggcttaggcccctgtcattcccaccctcactcttgctgcacagttgtgtttactttttctgggtagaggatgctgaactgactcagcaccctcctgcaggacggggttagggaatttggtgctcaattgctctcccttgctcttccccaaactgaaaatacctactgcaggatccctcggggcacactgaagcttggctgccaaccctcttacttcctttgttacagggaggggttggcttggggtgaaaagttctgccctccgcagggagcagctccagctgcctggcagtgctcccagtttgtagggaagccacaccagatctgggtgccttgggagaaccagtccttccttttgacccaccccaggaagatggagtgctcttttctaggcccatgttctgccagcaaccgggatgcgtgggcaactggactctgcacgggggtctacaggttgagggaggttggtcacaatgagaacctcggggtttgaggtggccatgggcagacagccgaaagggagggagggtgtgggtgtgcgtgtgtgcatgtgctggtgtgtaagggggaaagggtctttcctggttttatttaaataaagtagtttatgtaac

SEQ ID NO: 5417 - DNA, 5765 bp, Homo Sapiens
  NM_030650
atgggaaggagttggcccggcttgtctctctgtcagtggcggctgctgcctgctctggaggcaggctgggcggtggcggccgagactggcgggggtggacgcccgggccgggctgcgcccgcttcttgcagctgtgaattcctttggacaattgatgatatttatcattgtgcccagtttctacaaataaaagatgggtggattattttctcgatggaggacaaaaccttcaactgtagaagttctagaaagtatagataaggaaattcaagcattggaagaatttagggaaaaaaatcagagattacaaaaattatgggttggaagattaattctgtattcctcagttctctatctgtttacatgcttaattgtatatttgtggtatcttcctgatgaatttacagcaagacttgccatgacactcccattttttgcttttccattgatcatctggagcataagaacagtaattattttcttcttttccaagagaacagaaagaaataatgaagcattggatgatttaaaatcccagaggaaaaaaatacttgaagaagtcatggaaaaagaaacttacaagacggctaaattaattcttgaaaggtttgatccggactcaaagaaagcaaaggagtgtgagccgccatctgctggagcagctgtaactgcaagacctggacaagagattcgtcagcgaactgcagctcaaagaaacctttctccaacaccagcaagccctaaccagggccctcctccacaagttccagtatctcctggaccaccaaaggacagttctgcccctggtggacccccagaaaggactgttactccagccctatcatcaaatgtgttaccaagacatcttggatcccctgctacttcagtgcctggaatgggtcttcatcctccaggtccacctttagcaagacctattctcccccgagaacgaggtgctttggatagaattgttgaatatttggttggtgatggtccacaaaacaggtatgcacttatatgtcagcagtgtttttctcataatggcatggctttgaaggaagaatttgaatacattgcttttcgatgtgcctactgttttttcttgaaccctgcaagaaaaaccagacctcaggctccaagacttcctgagtttagttttgagaagaggcaggtggtggaaggttcaagttcagttggtcccttgccatcaggaagtgtgctttcatcagacaaccagtttaatgaagaatctttagaacacgatgttcttgatgataatacagagcagacagatgacaaaataccagctacagaacagacaaaccaagtgattgaaaaagcatctgactcagaggaaccagaggagaaacaagagactgagaatgaggaagcctcagtgattgaaaccaactccacagttcctggagctgattctattcctgatcctgaactaagtggagaatctttgacggcagagtagtaaatgcttccacgtgccttcaactggatatttatagtcttactgatgtcagttattgctttttcggtggcacttactttttttgcccctctaagggtatgcttgtgtatcatttgaattcagattgcctagctatttgaacatctcaaagttatatatactgggtattaaaattaaaagcaagttatatcagtgaagtaagatccttttgaatgtacaaagacccacactattgagacagcttttagatacttttttgtccattctaaaagtaagcaaacatgattgccttcttgttttctgtatgtataacccgtaaatatccattttgacataggaagaactttggttaagagtaagttctctaattgtgtttgttttaaggaatgaaacttggttaagattttgactacttcattattaaaaattgatagaattttagctcctgagatatttacaactgggagaaatgtctatttaggtgtttacattaagcggtatgaaagttgttaccacataggcactggtacgaattctcaataagaatgcagtggaacagttaagtagaactgtaactacgttggcactggtacgaattctcagtgagaatgcaatgaaacagtcaactgcagtgtttctttttgatgtcttttattttacaactgggccaaaggcacattatgtatataattagtttatatttacacactagcatataggaaatatttctgcacttgaccctatttgaattctgagcattatttataagtataaaatgatgatatataagtgaattttgtgctcttgtttgtattttattaaggaaaatgaaaataatctggcatcagtttcattttgctaaatatctagtcttcttcaaacagtatcttggtgggtgacttggctacctgaaaaatcttaggaggaatagctcacaatacaataaatctgtagattctgcttagagcaaattatggtacttttattcagacttgtttcctttctagttaacagaaatagtgacatttagaggttttaatcagaagttaggtttttctgattcaggaacatcgtaggccagccatttgtaatttttaactttgagaaacaaattttgtgagaataggtagtgggttgctggtagttaattggatttaatatttgtattaaggattaactggaaaaaatgtgtctcagtgctaattcttggacctttaatacagtgtgcttatctgttacggcctccttttatctctcttctccaatattaaaaaaaatggaaatcaaattattatgctgaagggaaaaatatacctgtataagaatggtgtgtttggctaatgtttctaagttgcacacagtttattaacaactgaacaaaacatttttatcatttaaaaatctatttttatgatttaatatctcatatgtgacagtttttttttttttttttttttggaactcaatctgttaacagtctgggacatccggtatagtaaccagagtttttgagcctgccgtattgggcttaaatttcaggtctgtagtcttgggcaagtcacctataaactcactgagattattttttcatctgtaaaatgggaagagttatgtttatttttgaagggtattaggataattaaaaataatgtaatgtgcctagcacactacctgaaaacgatggcatttgttcttattaatgtctttaaaatatgcaaggaccataagtttttcctcttgcagatgaggaaagtaaaaaataatacgaacatgtaattcagcttctcagattcaagccaatgttttttgcatcaacttttctatattgtatgtatgtatataaatacatagattaaggaaataggaaactgaaactctgtggaatataaactttttaaaaataatttcatcaggttttttgtatgttactgacccatatggattttagtaacatcttgcttagtcatgttgttataaaacattcaaattctgatatacattgcttgaaaatgagtgagtacctcagagaaatttgatagactcaaacagatagtatgagaaatatctttgaaagaaatatggaggaaggttaaaaggggattagtaaaattaatgcgataggtaacatgtttgtaaccatatagtatccttttagatacaaaagcttattttcattattattataataaacagttaatggttgaaacttagtaaaatgtcctatttctgattattaagactagtataaatgagaaaatccaagctattaagtaccattagctacagtgatcttagcttccttgcttacaattgttcagtgggtcatctaaattcttctatgtcctgagcatgatctacaaacatggtctagcttctgtctctccgtcttcccgccatcattgtgctgtagccatatggaactcctttcagttctctgaccatgccctttcctgcctcagatttcagcttaaattttgcctcctcagagagatgccttcccaaactccccatctgaagctggcctctgccttttactccctatcatgtcactctctgctcaccatccttatcacaatgtgtatttgatttgtttgctagtttactgtcttcacaacataatgtccgtttgtgcaagggtcttatttttcttattcatgtctgtatctcaagggtctagcacaatgcttgatgcatattgtgtgaataaatactttgttgccaaatccagtgaaaactctcagttcttgtttcactgcttggcagtattgacattgaatattctctgagatactttttttcttttggcttttcatatatcacactattattctcttatttctctggcctcttgctctcaacgtcctgtaagtgttggtgttccttaagttctacctagtgtcatcatttcttcattctgcatattctttccctagggtttcttcccaacaccaaaggacttaccatctgtctctctgaatctcagatctccagctttgatctgtttcctttactttagagctatatatttgcctgcctactggcctgtctctcacaatccatatattcaagaatgaacactatactttgcttcaaaccttcagaacattcaaaccgtttatgtttctcatctaatcaaatagagttactctctaagccagaagctgtaaactcatctcttttccctttattcaagctgtcaatttttgtctcctaaacatcttctagttatattctcatttctctgttcacattgcattaataatgatgataaacatttgcattcttattctgtgccaggcaacatgctaactgctgtatatatattattacatttgtactttggcaagaatcctgtgaagatttttatctttggactactagaagagaaagctgagttgtagagagagtatgtatttaagtccgtttgggctgctataacagaataccacagactgggtaacgtgatgaacaaaaatttatttggctcacagttctggaacctgggaaatccaaaggcatgatgctagcatttggtgagggcctttgtgctttgtcatcccatgccagaaggcagaagggtaagagagggcaagagtgagcaagagatggaagttgcaacctcaagctcttttataatgagcattaatccattcatgagggcttcaccctcatgacctaaacatctccattaggctccaccttccaatgcaacagttagcataagttttcaacacatgctttttgtagcattcaaaccatagcaggaagcaactttgcttaaaattgtatacctggtaagtggaaaaagagggatttgaatataggcaaatgacttcagaggatttactcttaatttctgttgtactgccttctaatcttggcctccatcatttcagattaccaaagctgtctcttaactggtttctttgtctccaaccttgtgcacttgctatctattctgtgtgctgcagcctgagtttttaaaaaacagaaaatgaggggccaggtgtggtggtggctcacgcctgtaatcccagcaagttgggaggctgaggcgggcagatcatctggggtcaggagttcgagaccagcctgaccaacgtggagaaacactatctctactaaaaatacaaaattagccaggcgtggtggtgcatgcctgtaatcctagctactcaggagcctgaggcaggagaattgcttgaacacgggaggcagaggttgcagtgagcagagattgcgccattgtactccagcctgggcaacaagagtgaaactccatctc

SEQ ID NO: 5418 - DNA, 1931 bp, Homo Sapiens
  NM_030651
cttcatctctccatctctgcgctgctgccggctgcgccatccagcacccagactccagcaccggccgaggacccccactccggctgcagggaccctgtcccagcgagaccgcaggcatgtcatccgaaaagtcaggactcccagactcagtccctcacacttctccgccgccctacaatgcccctcagcctccagccgaacccccagccccaccgccacaggcagccccttcctcacaccatcaccaccaccaccactaccatcagtctggcaccgccaccctcccgcgcttaggggcagggggcctggcctcttccgcggccaccgctcagcgcggtccctcctcctctgccacgctgccgaggcccccccaccacgcccctcccggccctgctgccggggcacccccacccggctgcgctaccttgccccgcatgccacccgacccttacctgcaggagactcgcttcgagggcccacttcccccgccgccgcccgctgccgccgccccgcccccgccggcgccagcccagactgcccaggcccctggcttcgtggtgcccacgcacgcggggactgtgggcacgctgccgctggggggctacgtagcgcccggataccccctgcagctgcagccttgcactgcttacgtgccggtctacccggtgggcacgccatatgcaggcgggaccccggggggaacaggagtgacctccactctccccccgccgccccagggcccagggctggccctactggagccgaggcgcccgccacacgactacatgcccatcgcggtgctgaccaccatctgttgcttctggcctactggcatcattgccatcttcaaggccgtgcaggtgcgcacggccttggcccgcggagacatggtgtcggccgagatcgcttcacgcgaggcccggaacttctccttcatctccctggccgtgggcatcgcggccatggtgctctgtaccatcctcaccgtagtcatcatcatcgccgcgcagcaccacgagaactactgggatccctaaaaacgcccctggtccggccccactctgcgcccctcgatctcccaggctctttctgcagtcataccgcggacccaatgggcgccctgcacacccgtttctggggccgtcagacttggatacatcgtaaactccgcctccacggaacgtctcgccttgcgagcaagctcggaatccagttcctcaggaacccctccaaaacccacacccccagggacgccgctttccgggatcccggccaaacgccggaccctcagtcgctccaggccccctcaccctcaaagtgtagcgcccccaaccgagcaacctcggtttggtccctaaaaccccgcctcctctataagcaccgccccagctctgacaaaaccccgcctccaggtcggcaggctccgccttcttttcttctccgcggggtgattcagtccagtgattgggtttgtggctccaggcctcgcccacagacggacagacccctccctttcttccggcaaaaggaccgagccctggggtagtaaggcccccacactcctgttttttgcaagtacatttttgtccctcctccacccaggtatctgcctattttcttgctaatcccagaacctttccttttgctttttttaaggacatttgggaagttcctggtgtaggacccttctccctgggataagaaacctgcctgtaaacgctctgtaaatactcccttccacccatcccagcccctgggcagccgggcagaagggaatccaggctatggacctcccaagtccccgctccccgctcccctcggcggccccgccttgttctgatctgtgtgtgagtgtgtgtgaacttctgaaagacaatattaaagagacttagttgaaaaaaaaaaaaaaaaaaaaaaaaaaaaaaaaaaaa

SEQ ID NO: 5419 - DNA, 3947 bp, Homo Sapiens
  NM_030653
tgcgcagcggcgggggttgttccggctgcctttcactgaggggacccgccagtttctaactcagtggcgtttgccctgattcccggggcctggctttcagcgtagcaattctgccggcgaagaaggtgagcgcagtgctgtgtggcagcagagctccttaggacgaggagcagcgggacgaggaagggcagactggtgaaatcgcaaactgggcgtctgttccggcgccggacccctatttgcaaaggtccatggctaatgaaacacagaaggttggtgccatccattttccttttcccttcacaccctattccatccaggaagacttcatggcagagctgtaccgggttttggaggctggcaagattgggatatttgagagtccaactggcactgggaagtccttaagtcttatttgtggggccctctcttggctccgtgactttgaacagaagaagcgtgaagaagaggcacgactccttgaaactggaactggccccttacatgatgagaaagatgaatccctgtgtctgtcttcttcctgcgaaggggctgcaggcaccccgaggcctgctggagaaccggcctgggttactcagtttgtgcagaagaaagaagagagggacctggtggaccgactaaaggcggagcaggccaggaggaagcagcgagaagaacgcctgcagcagctgcagcacagggtgcagctcaagtatgcagccaagcgcctgaggcaggaagaagaagaaagagagaatctcctccgcctcagcagggagatgctagagacaggcccggaggctgagcggctggagcagctggagtctggggaggaggagctggtcctcgccgaatacgagagtgatgaggagaaaaaggtggcgagcagagtggatgaggatgaggatgacctggaggaagaacacataactaagatttattactgtagtcggacacactcccagctggcccagtttgtgcatgaggtgaagaagagcccctttggcaaggatgttcggctggtctcccttggctcccggcagaacctttgtgtaaatgaagacgtgaaaagcctaggttctgtgcagcttatcaacgaccgctgtgtggacatgcagagaagcaggcacgagaagaagaaaggagctgaggaggagaagccaaagaggaggaggcaggagaagcaggcagcctgccccttctacaaccacgagcagatgggccttctccgggatgaggccctggcagaggtgaaggacatggagcagctgctggcccttgggaaggaggcccgggcctgtccctattacgggagccgccttgccatccctgcagcccagctggtggtgctgccctatcagatgctgctgcatgcggccactcggcaggccgcgggcatccggctgcaggaccaggtggtgatcatcgacgaggcgcacaacctgatcgacaccatcacgggcatgcacagcgtggaggtcagcggctcccagctctgccaggcccattcccagctgctgcagtacgtggagcgatacgggaagcgtttgaaggccaagaacctgatgtacctgaagcagatcctgtatttgctggagaaattcgtggctgtgctaggggggaacattaagcaaaatcccaatacacagagtctgtcacagacagggacggagctgaagaccatcaacgactttctcttccagagccagatcgacaacatcaacctgttcaaggtgcagcgatactgtgagaagagcatgatcagcagaaagctctttggattcactgaacggtacggagcagtgttctcatcccgggagcagcccaaactggctgggtttcagcaattcctgcagagcctgcagcccaggacgactgaagctcttgcagcccctgcagacgagagtcaggccagcaccctgcgaccagcttctccactgatgcacatccaaggcttcctggcagctctcactacggccaaccaggacggcagggtcatcctgagccgccaaggcagcctcagtcagagcaccctgaagtttttgctcctgaatccagctgtgcactttgcccaagtggtgaaggaatgccgggcagtggtcattgcggggggtaccatgcagccggtgtctgacttccggcagcagctgctggcctgtgccggggtggaagctgagcgcgtggtggagttttcctgtggtcacgtgatccctccagacaacatcctgcccctcgtcatctgcagcgggatctccaaccagccgctggaattcacgttccagaaaagagagctgcctcagatgatggacgaggtgggtcgcattctctgtaacctgtgcggtgtggttcctggaggggtggtctgtttcttcccctcctacgagtacctgcgccaggtccatgcccactgggagaagggtggcctgctgggccgtctggctgccaggaagaagatattccaggaacctaagagcgcacaccaggtggagcaggtgctgctggcatattccaggtgcatccaggcctgtggccaggagagaggccaggtgacaggggccctgctcctctctgtggttggaggaaagatgagtgaagggatcaacttctctgacaacctaggccggtgtgtggtgatggtgggcatgcccttccccaacatcaggtctgcagagctgcaggagaagatggcctacttggatcaaaccctccccagagcccccggccaggcacccccagggaaggctctggtggagaacctgtgcatgaaggccgtcaaccagtccataggcagggccatcaggcaccagaaggattttgccagcgtagtgctcctggaccagcgatatgcccggccccctgtcctggccaagctgccggcctggatccgagcccgtgtggaggtcaaagctacctttggccccgccattgctgctgtgcagaagtttcaccgggagaagtcggcctcttcctgatgggcaaccacaccactgcctggcgccgtgcccttcctttgtcctgcccgctggagacagtgtttgtcgtgggcgtggtctgcggggatcctgttacaaaggtgaaacccaggaggagagtgtggagtccagagtgctgccaggacccaggcacaggcgttagctcccgtaggagaaaatgggggaatcctgaatgaacagtgggtcctggctgtccttggggcgttccagggcagctcccctcctggaatagaatctttctttccatcctgcatggctgagagccaggcttccttcctggtctccgcaggaggctgtggcagctgtggcatccactgtggcatctccgtcctgcccaccttcttaagaggcgagatggagcaggcccatctgcctctgccctttctagccaaggttatagctgccctggactgctcactctctggtctcaatttaaaatgatccatggccacagggctcctgcccaggggcttgtcaccttcccctcctccttcctgagtcactccttcagtagaaggccctgctccctatcctgtcccacagccctgcctggatttgtatccttggcttcgtgccagttcctccaagtctatggcacctccctccctctcaaccacttgagcaaactccaagacaccttctaccccaacaccagcaattatgccaagggccgttaggctctcaacatgactatagagaccccgtgtcatcacggagacctttgttcctgtgggaaaatatccctcccacctgcaacagctgcccctgctgactgcgcctgtcttctccctctgaccccagagaaaggggctgtggtcagctgggatcttctgccaccatcagggacaaacgggggcaggaggaaagtcactgatgcccagatgtttgcatcctgcacagctataggtccttaaataaaagtgtgctgttggttaaaaaaaaaaaaaaaaaaaa

SEQ ID NO: 5420 - DNA, 7668 bp, Homo Sapiens
  NM_030665
cccgcggacaccaggcaggcccggccgggtgcgcggccaaggcccgctccccgcgtccccgggcgccgcccccgcccgcggctgggctccgagagacgagtgggagagcgagtgcagcgagggcgagaggcgagccgagcaggccgccctgcccgcggccctagcgccggcgcgaggagggggcgccgcggcccaccctccttcctgcctggccgcgggccggccgggccgccgcgccccgacccccatggccacccaggcctccgggccgcgaagtcgcagcgccagacccaaggcccccgagtgagcgcgggcgccgaggatctcatctggccaccgcgttctggaagaggcgagagggagagcgtgcgcgagaggagagagacggcgggggaaagggagacggcgagacgcgcagcgccggcgcccgggagacccaggaggagcccgcagataaccagcccgagtcatgcagtcttttcgagaaaggtgtggtttccatggcaaacaacagaactaccagcagacctcgcaggaaacatcacgcctagagaattacaggcagccgagtcaggccgggctaagctgcgaccggcagcggctgctcgccaaggactattataacccgcagccttacccgagctatgagggtggcgctggcacgccctctggcactgcagccgcggtggccgccgacaagtaccaccgaggcagcaaggccctgcccacacagcaaggcctgcaggggaggccggctttccctggctacggcgtccaggacagcagcccctacccaggccgctatgctggtgaggagagccttcaggcttggggggccccacagccaccacccccacagccgcagccactacctgcaggggtggccaagtatgatgagaacttgatgaaaaagacagcagtgccccccagcaggcagtatgcagagcagggcgcccaggtgccctttcggactcactccctgcacgtccagcagccaccgccgccccagcagcccctggcataccccaagctccaaaggcagaagctgcagaacgacattgcctcccctctgcccttcccccagggtacccactttcctcagcattcccagtccttccccacctcctccacctactcctcctctgtccagggtggtgggcagggggcccactcctataagagttgcacagcaccgactgcccagccccatgacaggccgctgactgccagctccagcctggccccggggcagcgggtccagaatcttcatgcctaccagtcgggccgcctcagctatgaccagcagcagcagcagcagcagcagcagcagcagcagcagcaagcccttcagagccggcaccatgcccaggaaaccctccattaccaaaacctcgccaagtatcagcactacgggcagcaaggccagggctactgccagccggacgcagccgtccggaccccagagcagtactaccagaccttcagccccagctccagccactcacccgcccgctccgtgggccgctcaccttcctacagttccacaccgtcgccgctgatgccaaacctggagaactttccctacagccagcagccgctcagcaccggggccttccccgcagggatcactgaccacagccacttcatgcccctgctcaatccctccccaacggatgccaccagctctgtggacacccaggctggcaactgcaagccccttcagaaggacaagctccctgagaacctgctgtcggatctcagcctgcagagcctcacggcgctgacctcacaggtggagaacatctccaacaccgtccagcagctgctgctctccaaggctgctgtgccgcagaagaaaggtgtcaagaacctcgtgtccaggaccccagagcagcataaaagccagcactgcagccccgaagggagcggctactcagccgagcccgcaggcacaccgctgtcagagccgccgagcagcacgccacagtccacgcatgcggagccgcaggaggccgactacctgagcggctccgaggacccactggagcgcagcttcctctactgcaaccaggcccgtggcagccctgccagggtcaacagcaactcgaaggccaagcccgagtccgtgtccacctgttctgtgacctctcctgacgacatgtccaccaaatctgacgactccttccagagcctacacggcagtctgccgctcgacagcttctccaagttcgtggcgggtgagcgggactgtccgcggctgctgctcagcgccctggcacaggaggacctggcctccgagatcctggggctgcaggaagccatcggtgagaaggccgacaaagcttgggctgaagcacccagcctggtcaaggacagcagcaagccacccttctcgctggagaaccacagcgcctgcctggactctgtggccaagagtgcgtggccccggcctggggagccggaggccctgcccgactccttgcagctggacaagggcggcaatgccaaggacttcagcccagggctgtttgaagacccttccgtggccttcgctacgcctgaccccaaaaagacaactggtcctctctcctttggtaccaagcccacccttggggttcctgctccagaccccactacagcagcttttgactgtttcccggacacaaccgctgccagctcagcggacagcgccaacccctttgcctggccagaggaaaacctgggggatgcttgtcccaggtggggattgcaccctggcgagcttaccaagggcctggagcagggtgggaaggcctcagatggcatcagcaaaggggacacccatgaggcttcggcctgcctgggcttccaggaggaggacccccctggggagaaggtggcctcgttgcccggggacttcaagcaggaggaggtgggtggggtgaaggaggaggcaggtgggctgctgcagtgccccgaggtggccaaggctgaccggtggctggaggacagccggcactgctgttccaccgccgacttcggggacctcccactgctgccacccaccagcaggaaggaggacctggaagctgaggaggagtactcctccctatgtgagctcctgggcagccccgagcagaggcctggcatgcaggacccgctgtcacccaaggccccactcatctgcaccaaggaggaggtggaggaggtgctggactccaaggccggctggggctctccgtgccacctctcaggggagtccgtcatcctgctgggccctacagtgggcaccgagtcaaaggtccagagctggtttgagtcctctctgtcacacatgaagccaggtgaagaggggcctgatggggagcgagctccaggggattccaccacctcggacgcctctctggcccagaagcccaacaagcctgctgtgcccgaggcgcccatcgcaaagaaagagcctgtgccacggggcaaaagcttacggagccgtcgggtgcaccgggggctgcccgaggccgaggactccccatgcagggcaccagtgctgcccaaagacctcttgctccctgaatcctgcacagggcccccccagggacagatggaaggggctggagccccaggccggggggcctcggaagggctccccaggatgtgtactcgttctctcacggccctgagtgagccccgcacgcccggacccccaggcctgaccaccacccctgcacccccagacaaactggggggcaagcagcgagccgccttcaagtcgggcaagcgggtggggaagccctcacccaaggctgcctccagccccagcaacccggccgccctgcctgtggcctccgacagcagcccgatgggctccaagaccaaggagacagactcacccagcacgcctggcaaggaccagcgctccatgatccttcggtcacgcaccaaaacccaggagatcttccactccaagcggcggaggccctctgagggccggctccccaactgccgtgccaccaagaagctcctcgacaacagccacttgcccgccacattcaaggtctccagcagcccccagaaggagggcagggtgagccagcgggcaagggtccccaaacctggtgcaggcagcaagctctctgaccggcccctccatgcgctcaaaaggaagtcggccttcatggcgccggtccccaccaagaagcggaacctggtcttgcggagccgcagcagcagcagcagcaacgccagtggcaatgggggagatgggaaggaggagaggcctgagggttcccccaccctcttcaagaggatgtcttctcccaagaaagccaagcccaccaagggcaatggcgagcctgccacaaagctcccacccccggagacccccgatgcctgcctcaagctcgcctctcgggcagccttccagggggccatgaagaccaaggtgctgccaccccggaagggccggggcctgaagctggaagccatcgtgcagaagatcacctcgcccagcctcaagaagttcgcatgtaaagcgccaggggcctctcctggtaatcctctgagcccatccctttccgacaaagaccgtgggctcaagggtgctgggggcagcccagtgggggtggaagaaggcctggtaaatgtgggcaccgggcagaagctcccaacttctggggctgatccgttatgcagaaatccaaccaacagatccttaaaaggcaaactcatgaacagtaagaaactgtcttctactgactgtttcaaaaccgaggccttcacatccccggaggccctgcagcctggggggactgccctggcgcctaagaagaggagccggaaaggccgggcaggggcccatggactctccaaaggcccgctggagaagcggccctatcttggcccggctctgctcctgactccccgagacagggccagtggcacacaaggggccagtgaggacaactctggtggaggaggcaagaagccaaagatggaggagctgggcctggcctcccagcccccggagggcaggccctgccagccccagacaagggcacagaaacagccaggccacaccaactacagcagctattccaagcggaagcgcctcactcggggccgggccaagaacaccacctcttcaccctgtaaggggcgtgccaagcgacgacgacagcagcaggtgctgcccctggatcccgcagagcctgaaatccgcctcaagtacatttcctcttgcaagcggctgaggtcagacagccggacccccgccttctcacccttcgtgcgggtggagaagcgagacgcgttcaccaccatatgcactgttgtcaactcccctggagatgcgcccaagccccacaggaagccttcctcctctgcctcctcttcctcatcctcgtcctcgttctccttggatgcagccggggcctccctggccacactccctggaggctccatcctgcagccgcggccctccttgcccctctcctccacgatgcacttggggcctgtggtttccaaggccctgagtacctcttgccttgtttgctgcctctgccaaaacccggccaacttcaaggaccttggggacctctgtgggccctactaccctgaacactgcctccccaaaaagaagccaaaactcaaggagaaggtgcggccagaaggcacctgtgaggaggcctcgctgccgcttgagagaacactcaaaggtcccgagtgtgcagctgccgccactgccgggaagccccccaggcctgacggcccagctgacccggccaagcagggcccactgcgcaccagtgcccggggcctgtcccggaggctgcagagctgctactgctgtgatggccgggaggatgggggcgaggaggcagccccagccgacaagggtcgcaaacatgagtgcagcaaggaggctccggcagagcccggcggggaggcccaggagcactgggtgcatgaggcctgtgccgtgtggaccggcggcgtctacctggtggccgggaagctctttgggctgcaggaggccatgaaggtggccgtggacatgatgtgttccagctgccaagaagccggggccaccattgggtgctgccacaaaggatgcctccacacctaccactacccgtgtgccagcgatgcaggttgcatattcatcgaagagaacttttctttgaaatgtcccaaacataagaggctgccgtagtaatccaccccaacggccggaggagccgccggagcccgcctgcccgcccgccgccgaaggagaggagccgcctgcgcagcccccgggcctttgagctgctcccagcgctggtccagagccgatccttgatccgggtcccggatcgtggatccggccgcctagggctcagacttgcggccccgggttgggaggaaaacccgttccggagccgcctgctcccggaaccggacggcacagggcgttcttgcccaccccaggggccaggcttgcggagggggagcccgcggagcggccagactccccggggcgctcagcctccggcgagggtgggagacggctttgtcctggggacactttccctctggaatctcaagacgacgtggcacacattccacgtgggtgctgccgccaccccagtcggtcgtggcgtgcagctgggagccctgggcttgggggtgggggtcgaaacagtactggaagaggcggagggcggctcctagctccgtggactaggcgggggagaaaggaagcctttctgagagcgggctaggccggcactggagaggccggagcctttggaacaaaccgtgcggaacgcgtccaggggccttcccgcccagcctttgccagatctctcgtgcggttcgggcaaagccggggtagacctgggctatgctcagttaggggttgcgggatccccgagtgtgggcgggactgggacaccctttggcctctgtttgtcccctttccagtcctccaccccacccctggagcccagcctgggagcgcaaaacccaagaagcggccagaacgcacctccggctccggcggacgcgcgaccgttgtgcaccaccagggaccgccgcgcctactctgcacgggagcagggacagcgctagatttcgtgtacaaaacctgtgtacccctctatatatatgttacatagaatgtatatatgttgggaacatgctcgcttctcccgtgtgtcgccgccgtgcgtcgtgcgcccgcaacagagccccaaccgggcctttgccgggtaaggggctaccgcgacgccacttgtccacgcagccaccaccggcccgggccagtccctgccagtccgtccgcctgtccgtccgtgtcctcagctctgtccacgcttcgataggcctgacgcagcccccagcccagggccgccctagcaacttcctgtacatatgactgtaaaatggtaaacgtgtgtattatatctggcctcgttatatagtgtatatatatgtatacatatacatatatataatatatatgaagactgtaaatgttaagacgactagtgttcttattagtatattgcttcacactgaagattgtgtgtatcgagctgtttctaaaagatgtttattttccttaagagtaaaaaacagtcattgcattcagaaaaaaaaaaaaaaaaaagtcaataaagatacaacgattgttttggaaaaaaaaaa

SEQ ID NO: 5421 - DNA, 1310 bp, Homo Sapiens
  NM_030666
gctcggagcccggagcgtgcctcggcggcctgtcggttttcaccatggagcagctgagctcagcaaacacccgcttcgccttggacctgttcctggcgttgagtgagaacaatccggctggaaacatcttcatctctcccttcagcatttcatctgctatggccatggtttttctggggaccagaggtaacacggcagcacagctgtccaagactttccatttcaacacggttgaagaggttcattcaagattccagagtctgaatgctgatatcaacaaacgtggagcgtcttatattctgaaacttgctaatagattatatggagagaaaacttacaatttccttcctgagttcttggtttcgactcagaaaacatatggtgctgacctggccagtgtggattttcagcatgcctctgaagatgcaaggaagaccataaaccagtgggtcaaaggacagacagaaggaaaaattccggaactgttggcttcgggcatggttgataacatgaccaaacttgtgctagtaaatgccatctatttcaagggaaactggaaggataaattcatgaaagaagccacgacgaatgcaccattcagattgaataagaaagacagaaaaactgtgaaaatgatgtatcagaagaaaaaatttgcatatggctacatcgaggaccttaagtgccgtgtgctggaactgccttaccaaggcgaggagctcagcatggtcatcctgctgccggatgacattgaggacgagtccacgggcctgaagaagattgaggaacagttgactttggaaaagttgcatgagtggactaaacctgagaatctcgatttcattgaagttaatgtcagcttgcccaggttcaaactggaagagagttacactctcaactccgacctcgcccgcctaggtgtgcaggatctctttaacagtagcaaggctgatctgtctggcatgtcaggagccagagatatttttatatcaaaaattgtccacaagtcatttgtggaagtgaatgaagagggaacagaggcggcagctgccacagcaggcatcgcaactttctgcatgttgatgcccgaagaaaatttcactgccgaccatccattccttttctttattcggcataattcctcaggtagcatcctattcttggggagattttcttccccttagaagaaagagactgtagcaatacaaaaatcaagcttagtgctttattacctgagtttttaatagagccaatatgtcttatatctttaccaataaaaccactgtccagaaaaaaaaaaaaaaaaaaaa

SEQ ID NO: 5422 - DNA, 5153 bp, Homo Sapiens
  NM_030667
gggcgcagaggaggaaagggagcaggcgcagggggactggaaaggcagcatgcgctcgccaggagcaacctcggcgcccagggtctgaggctgcagccccagttcgccattgtgagccgccgccgggggagtccgctagcgcagccgtgcccccgagtccccgtccgcgcagcgatggggcacctgcccacggggatacacggcgcccgccgcctcctgcctctgctctggctctttgtgctgttcaagaatgctacagctttccatgtaactgtccaagatgataataacatcgttgtctcattagaagcttcagacgtcatcagtccagcatctgtgtatgttgtgaagataactggtgaatccaaaaattatttcttcgaatttgaggaattcaacagcactttgcctcctcctgttattttcaaggccagttatcatggcctttattatataatcactctggtagtggtaaatggaaatgtggtgaccaagccatccagatcaatcactgtgttaacaaaacctctacctgtaaccagtgtttccatatatgactataaaccttctcctgaaacaggagtcctgtttgaaatacattatccagaaaaatataacgttttcacaagagtgaacattagctactgggaaggtaaagacttccggacaatgctatataaagatttctttaagggaaaaacagtatttaatcactggctgccaggaatgtgttatagtaatatcacctttcagctggtatctgaggcaacttttaataaaagtacccttgttgagtacagtggtgtcagtcacgaacccaaacagcacagaactgccccttatccacctcaaaatatttccgttcgtatcgtaaacttgaacaaaaacaactgggaagaacagagtggcaatttcccagaagaatccttcatgagatcacaagatacaataggaaaagaaaaactcttccattttacagaagaaacccctgaaattccctcgggcaacatttcttccggttggcctgattttaatagcagtgactatgaaactacgtctcagccatattggtgggacagtgcatctgcagctcctgaaagtgaagatgaatttgtcagcgtacttcccatggaatacgaaaataacagtacactcagtgagacagagaagtcaacatcaggctctttctcctttttccctgtgcaaatgatattgacctggttaccacccaaaccacccactgcttttgatgggttccatatccatattgaacgagaagagaactttactgaatatttgatggtggatgaagaagcacatgaatttgttgcagaactgaaggaacctgggaaatataagttatctgtgacaacctttagttcctcaggatcttgtgaaactcgaaaaagtcagtcagcaaaatcactcagcttttatatcagtccttcaggagagtggattgaagaactgaccgagaagccgcagcacgtgagtgtccacgttttaagctcaaccactgccttgatgtcctggacatcttcccaagagaactacaacagcaccattgtgtctgtggtgtcgctgacctgccagaaacaaaaggagagccagaggcttgaaaagcagtactgcactcaggtgaactcaagcaaacctattattgaaaatctggttcctggtgcccagtaccaggttgtaatatacctaaggaaaggccctttgattggaccaccttcagatcctgtgacatttgctattgttcccacaggaataaaggatttaatgctctatcctttgggtcctacggccgtggttctgagctggaccagaccttatttaggcgtgttcagaaaatacgtggttgaaatgttttatttcaaccctgctacaatgacatcagagtggaccacctactatgaaatagcagcaactgtttccttaactgcatccgtgagaatagctaatctgctgccagcatggtactacaacttccgggttaccatggtgacgtggggagatccagaattgagctgctgtgacagctctaccatcagcttcataacagccccagtggctccggaaatcacttctgtggaatatttcaacagtctgttatatatcagttggacatatggggatgatacaacggacttgtcccattctagaatgcttcactggatggtggttgcagaaggaaaaaagaaaattaaaaagagtgtaacacgcaatgtcatgactgcaattctcagcttgcctccaggcgacatctataacctctcagtaactgcttgtactgaaagaggaagtaatacctccatgctccgccttgtcaagctagaaccagctccacccaaatcactcttcgcagtgaacaaaacccagacttcagtgactttgctgtgggtggaagagggagtagctgatttctttgaagttttctgtcaacaagttggctccagtcagaaaaccaaacttcaggaaccagttgctgtttcttcccatgtcgtgaccatctccagccttcttcctgccactgcctacaattgtagtgtcaccagctttagccatgacagccccagtgtccctacgttcatagccgtctcaacaatggttacagagatgaatcccaatgtggtagtgatctccgtgctggccatccttagcacacttttaattggactgttgcttgttaccctcattattcttaggaaaaagcatctgcagatggctagggagtgtggagctggtacatttgtcaattttgcatccttagagagggatggaaagcttccatacaactggcgtaggagtatatttgctttcttaaccctgctaccctcatgtctttggactgattatcttttggcattttatattaatccttggagtaaaaatggtttaaagaagaggaaactgacaaacccggttcaactggatgactttgatgcctatattaaggatatggccaaagactctgactataaattttctcttcagtttgaggagttgaaattgattggactggatatcccacactttgctgcagatcttccactgaatcgatgtaaaaaccgttacacaaacatcctaccatatgacttcagccgtgtgagattagtctccatgaatgaagaggaaggtgcagactacatcaatgccaactatattcctggatacaactcaccccaggagtatattgccacccaggggccactgcctgaaaccagaaatgacttctggaagatggtcctgcaacaaaagtctcagattattgtcatgctcactcagtgtaatgagaaaaggagggtgaaatgtgaccattactggccattcacggaagaacctatagcctatggagacatcactgtggagatgatttcagaggaagagcaggacgactgggcctgtagacacttccggatcaactatgctgacgagatgcaggatgtgatgcattttaactacactgcatggcctgatcatggtgtgcccacagcaaatgctgcagaaagtatcctgcagtttgtacacatggtccgacagcaagctaccaagagcaaaggtcccatgatcattcactgcagtgctggcgtgggacggacaggaacattcattgccctggacaggctcttgcagcacattcgggatcatgagtttgttgacatcttagggctggtgtcagaaatgaggtcataccggatgtctatggtacagacagaggagcagtacatttttatccatcagtgtgtgcaactgatgtggatgaagaagaagcagcagttctgcatcagtgatgtcatatacgagaatgttagcaagtcctagttcagaatccggagcagagaggacatgatgtgcgcccatcctcccttgcttccagattgttttagtgggccctgatggtcatttttctaaacagaggccctgctttgtaatatgtggccaaggagataatttatctcacagaagcaccgggaagacttagccttaaagagcctacagtgtccttttggactctttcacttcgggacatttaataatggaccaaattcaacagaacaccaggaaggtcaagacgctctccaaagggcaggaagtacagcacttccgaagagtttagttggccctttgctggttgggctgagttttttatttttaagtgtttgtttttcagtgcaataatttttgtgtgtgtgtgattcttatcagaaagttgaattgttttctgcctacaccgttcatcagccccataacccaggaaggaacaggcattgttagcatcagattatacctcattattaaaaggaggcatggccacacatgaagaaatggtcattctacttcaaagaaattgagccagcactatctgtactccaacattaccggatctggattggggaggttggtcagggaagagaggggttctacccacagatcaactgtgtaatcttttactattcaagctataattcagcttcaaagtagagtagaaaaaaaattgtcttaactgttctagttcttgatggttttcttccttattaacagttggtgtttcttccttggcccttttggactaatgttactgtccaagttctttctcaagaaaccacatctggttcagaagagtgtcaagttggactctttgaactctgttgctgtctgagcaatcgtggtgcctagactttgcattccttgttctgttgacctgcatacatgtgagagctatttctttaagaactatataggctgtgaaaacgcactttctttcccccaaagagctgggaatttatgaagttatggcaatgaactgcagcatgctgggacaattatttgactacttttttttgtaatattgtcaaatgtctctatggattctgacagagatttctttttgttttgttattcttttggttgtcagtttcattttaacgagtgtaactagtaacattttattctttggattttgtataattacagtacatgattgtgtattgtgacatgaatgctgtcaaaatgacattgatggcattgtgaagcctgttactttgtgtcacttcctgataaataagaggtgatgacatggatatacaacagaaaacactttgagttgaaagtaaacacaagctggctgcttccctgtggcaactgtggct

SEQ ID NO: 5423 - DNA, 4064 bp, Homo Sapiens
  NM_030671
aagtaaaaaaatggaagggggaaaaggcaaagtattctgccttccaagttagatagctatctttatgaaaggacatatttcaaaggcaatataaagtctttatggtgctcttacctacctatatttgaattgggggatgcttcacctgcttattagtgaaagaagaaagaatacacttagtaaattaaattttttttaaaactttgtctttgctcagaaccagctccacccaaatcactcttcgcagtgaacaaaacccagacttcagtgactttgctgtgggtggaagagggagtagctgatttctttgaagttttctgtcaacaagttggctccagtcagaaaaccaaacttcaggaaccagttgctgtttcttcccatgtcgtgaccatctccagccttcttcctgccactgcctacaattgtagtgtcaccagctttagccatgacagccccagtgtccctacgttcatagccgtctcaacaatggttacagagatgaatcccaatgtggtagtgatctccgtgctggccatccttagcacacttttaattggactgttgcttgttaccctcattattcttaggaaaaagcatctgcagatggctagggagtgtggagctggtacatttgtcaattttgcatccttagagagggatggaaagcttccatacaactggcgtaggagtatatttgctttcttaaccctgctaccctcatgtctttggactgattatcttttggcattttatattaatccttggagtaaaaatggtttaaagaagaggaaactgacaaacccggttcaactggatgactttgatgcctatattaaggatatggccaaagactctgactataaattttctcttcagtttgaggagttgaaattgattggactggatatcccacactttgctgcagatcttccactgaatcgatgtaaaaaccgttacacaaacatcctaccatatgacttcagccgtgtgagattagtctccatgaatgaagaggaaggtgcagactacatcaatgccaactatattcctggatacaactcaccccaggagtatattgccacccaggggccactgcctgaaaccagaaatgacttctggaagatggtcctgcaacaaaagtctcagattattgtcatgctcactcagtgtaatgagaaaaggagggtgaaatgtgaccattactggccattcacggaagaacctatagcctatggagacatcactgtggagatgatttcagaggaagagcaggacgactgggcctgtagacacttccggatcaactatgctgacgagatgcaggatgtgatgcattttaactacactgcatggcctgatcatggtgtgcccacagcaaatgctgcagaaagtatcctgcagtttgtacacatggtccgacagcaagctaccaagagcaaaggtcccatgatcattcactgcagtgctggcgtgggacggacaggaacattcattgccctggacaggctcttgcagcacattcgggatcatgagtttgttgacatcttagggctggtgtcagaaatgaggtcataccggatgtctatggtacagacagaggagcagtacatttttatccatcagtgtgtgcaactgatgtggatgaagaagaagcagcagttctgcatcagtgatgtcatatacgagaatgttagcaagtcctagttcagaatccggagcagtaagtggagaagagctctccacgagtgttcagtcttagaactattagagggggatgtgatggatgggacaaaagacagcagtagccatttgtattgactctgacttcacatgagtatttcttcccagctcctggcctcacatgggtggtcacagggagaaacaagtactgtagcagatctttgagtttcaatgcaccttggttggtgttggcaacaaacaggagcttctgcacatcatgatgactttacctccattccctctacccagaaccctaaattattctgttattggatctgtgcctgtaatatcaggatactaccatccaaatctatctagatatcttgtgcaaatattttattgattacaagggctgtatacggggttacaaaaagacatgagctggattggacactcctaaaaccaaaaacaacagtgacaatagagtctcaggatagcagagtctgaaaataccttggtctcccccattatgtgagcccttatttgagagcttcatgaagacacttgtaacatattcaacgtcctgtactccagttttgactacgagatcagattttggaggtgtaagtaatcttggctgaggtaacagtaatctgcccatttagttcagtaaacagactgtagagtgtctgactatactgggggaagaggagccaatgacagggtagggagatgacagtggtgcatgatgggagaatcatgaaagtctgggaagcatatggaccagtgggaaggataggattagcactgcacctctacatccatcaagagagacagagcgcacaatggagcaggaaggataaaaaataaagaaagacagagacaaacaaatttgctgggagagggaaagacattcagacccacagaaaggaggcagcacacagagaaagatgcacagatcaacccacatctgcatgggttgtgagactgagcatagtgagagcagtggtggagcaatagaagattgctgtgacaccaggctgcttactgtctttctttgtctcattcacaggagaggacatgatgtgcgcccatcctcccttgcttccagattgttttagtgggccctgatggtcatttttctaaacagaggccctgctttgtaatatgtggccaaggagataatttatctcacagaagcaccgggaagacttagccttaaagagcctacagtgtccttttggactctttcacttcgggacatttaataatggaccaaattcaacagaacaccaggaaggtcaagacgctctccaaagggcaggaagtacagcacttccgaagagtttagttggccctttgctggttgggctgagttttttatttttaagtgtttgtttttcagtgcaataatttttgtgtgtgtgtgattcttatcagaaagttgaattgttttctgcctacaccgttcatcagccccataacccaggaaggaacaggcattgttagcatcagattatacctcattattaaaaggaggcatggccacacatgaagaaatggtcattctacttcaaagaaattgagccagcactatctgtactccaacattaccggatctggattggggaggttggtcagggaagagaggggttctacccacagatcaactgtgtaatcttttactattcaagctataattcagcttcaaagtagagtagaaaaaaaattgtcttaactgttctagttcttgatggttttcttccttattaacagttggtgtttcttccttggcccttttggactaatgttactgtccaagttctttctcaagaaaccacatctggttcagaagagtgtcaagttggactctttgaactctgttgctgtctgagcaatcgtggtgcctagactttgcattccttgttctgttgacctgcatacatgtgagagctatttctttaagaactatataggctgtgaaaacgcactttctttcccccaaagagctgggaatttatgaagttatggcaatgaactgcagcatgctgggacaattatttgactacttttttttgtaatattgtcaaatgtctctatggattctgacagagatttctttttgttttgttattcttttggttgtcagtttcattttaacgagtgtaactagtaacattttattctttggattttgtataattacagtacatgattgtgtattgtgacatgaatgctgtcaaaatgacattgatggcattgtgaagcctgttactttgtgtcacttcctgataaataagaggtgatgacatggatatacaacagaaaacactttgagttgaaagtaaacacaagctggctgcttccctgtggcaactgtggct

SEQ ID NO: 5424 - DNA, 8487 bp, Homo Sapiens
  NM_030674
ccttcggccccggcggggctctggcgtacccaaaatgcaggccccagcggaacgcacagccctcctgtcctccgccggtgcccctttagccgccccacccccatccctaagggctctcattctccagctgcagccgcagctgggttccgaacacgccgccgggccccgggagggagaggggcaggtgccagggcggcgcgcagcctctgctcccggtgccagcttcagtgcgccgggcacacgcgcgccccgcaacccctccctcaccctttccccgttgctcaatctccgccagccgcggtcgctgcatcgtcagagagctgcaagagggaggcagcaaggtgcggccgccagcagtgacaccatgtgaccggcacggctcactgacacgcagctttggttaaagagcgggcgcacaggaggggaggagaccgcgcgcgggacggggaggaatggcctgtccgcgttaaaccatcacaagccatggttgcggaagggccacgcgtcccccagtaggagaatgactccgattcgtgaccctcagcgccggtgcatgtcgatgtaagtgcgaggccggcgagcagagtgtgagtgggggttggtggtgaggggagattctgatgcaatcggcccggaaaggaggagagccaggcgagcgcggactggggcggccacgccactccgccagaaggtcgccaggagcctccgcccttcaccttcctccgaaatccgccaggccacgccaagctccctgcccaacccttactgacgggggccacattttcccggcctccgcagccagaccttgacacaaaggacatcaaactgccgagggtaaaaaccccggaagggcggacacctccacatcgccttttgccacctttccctttatttccggagatatttattgagtgtctactgtgtgccaggcactatatctatgtgcatagaaaaaccctggaaggccatacaacaatatatatagagtgatcgtctctgcttgctgagctaacaggggtgtcaagcttccattttggtatctacttctaaatacactcagaacaggagaaatttggactaattttcaaactacagacactttctaatcatgatgcatttcaaaagtggactcgaattaactgagttgcaaaacatgacagtgcccgaggatgataacattagcaatgactccaatgatttcaccgaagtagaaaatggtcagataaatagcaagtttatttctgatcgtgaaagtagaagaagtctcacaaacagccatttggaaaaaaagaagtgtgatgagtatattccaggtacaacctccttaggcatgtctgtttttaacctaagcaacgccattatgggcagtgggattttgggactcgcctttgccctggcaaacactggaatcctactttttctggtacttttgacttcagtgacattgctgtctatatattcaataaacctcctattgatctgttcaaaagaaacaggctgcatggtgtatgaaaagctgggggaacaagtctttggcaccacagggaagttcgtaatctttggagccacctctctacagaacactggagcaatgctgagctacctcttcatcgtaaaaaatgaactaccctctgccataaagtttctaatgggaaaggaagagacattttcagcctggtacgtggatggccgcgttctggtggtgatagttacctttggcataattctccctctgtgtctcttgaagaacttagggtatcttggctatactagtggattttccttgagctgtatggtttttttcctaattgtggttatttacaagaaatttcaaattccctgcattgttccagagctaaattcaacaataagtgctaattcaacaaatgctgacacgtgtacgccaaaatatgttaccttcaattcaaagaccgtgtatgctttacccaccattgcatttgcatttgtttgccacccgtcagtcctgccaatttacagtgagcttaaagaccgatcacagaaaaaaatgcagatggtttcaaacatctcctttttcgccatgtttgttatgtacttcttgactgccatttttggctacttgacattctatgacaacgtgcagtccgacctccttcacaaatatcagagtaaagatgacattctcatcctgacagtgcggctggctgtcattgttgctgtgatcctcacagtgccggtgttatttttcacggttcgttcatctttatttgaactggctaagaaaacaaagtttaatttatgtcgtcataccgtggttacctgcatactcttggttgttatcaacttgttggtgatcttcataccctccatgaaggatatttttggagtcgtaggagttacatctgctaacatgcttattttcattcttccttcatctctttatttaaaaatcacagaccaggatggagataaaggaactcaaagaatttgggctgcccttttcttgggcctgggggtgttgttctccttggtcagcattcccttggtcatctatgactgggcctgctcatcgagtagtgacgaaggccactgaaacccgccgagaaaaagaaacatccctgttgtctgctcagtcaagtccccacacatcagcaatctctcaccacttcttttgcaagtttacagaagcaaacagaaatgtacaggatacttaaaatggaataactttttggttgcaaaacagagacatggttctataatgcttcatgtccctccaagatttgagatcaatttagggattgtgaaatttttttttcaaatttcatacaatcatatttcccagtacttttcacaatcattttttacccatctaactctatgttttgtggcttcccggtctcttagaactttgaaaacatgatatacaataatgtttatttattatacatccagattctgaaataattttcctactgatgttcagctcacactatctgtacctttttagaagagaaaagaatcttgaattgtatatatttattttgctttacagaaaaaaatggtttcgtaaataatttgcctattttggttaacatagcacatggagataatcatctgaaagttatagggcactgccactgctgaatcagagcatgcccaatatttgaggtggctctgatttcctggcagctgaactcgggtagtccagtggcctagctggtaccacatctattcccatccagagacattctctggcaagtgttctcagctgaaaagtggttggggatgattcttaccttggtaattaaatgaagctacacatttgggtaatctagcaaatgaagtattttttccctcttggcaacttgtgtcagagttactctggtctgagtcaactttcgctggggaaaacctatggaacctactgcaaaaagattgtccaaaatgcctaagaaaatactcctctgatgcatttagccttcaaccctacctgtcttgctgaagggagaaaaatgttttagtacattataggcccagcagcttttattcatgtccaccagctagttgcacagagaatcatgtgtacctaactaaggatgatctaggataagtaactcctgttttatattgagtattttagggaagtctttaaaagacttgttttatatctataaatctaggttattacaaatacaagaattttgtaccttaaataagcctcatttctatttcttcttcattaattctccatctagtcttgtgaaaaaaaaaaaaaaaaaaccctcagagatagtctttgtgaagagcttctgacagaatcactgagtaccttccttcccccagatgaggaagacaagggggtctcagtgtctgtgctgtctcctcttctcttccccaaccaaggactgtgccattactgcccgtctcaactgtccatgcaggaggacagagttgcctggtactcttacccttgtccctctcctaaagggagcacaaggaaactgaagagactgaaaaagaagagagtttgtagctgaaaaagaatagggatagcaaggaaacccagaactgcattcccctaagtggggccatcccatgtgattgaattgtccatagcttgcctatggtgagaaatgtgcatgctccgtgagctggtctcttgaaacaggacttatgcttcctctatattctggttaaattttccaaacacataagttcactgagcacagatttcttatccagagacaagtagaatctaaccgcagactgttggcagagtttccaggcacttagccatgttcccttcctgactcaaatccccaaaggccttcactctcactgagaatcacactactgtcccatagataaggcaggcattgaagcacctgtcgtgatcctctaggggggagaatgaaaggttatttcctgcattgcatcatcatagcttttaatataatgctacagaatcatatccacattaggttagagttcagatatttggatatgaatacctaacctagccatatccatggccatctctgttcttttcagcaatgttttccatattatattagcaatgacagaaacagaacaagccaagatccagtcagttcttgggagcttgtctagagcaccaagtaatgaaatagccaggtagtgggatgactgtacctttaaaaatacataatttagtttgcaagctatattatgctactttctattttccttgttactttatagcaattcattttaccctcacaaagtcaatttagaaccttatcattaactgggatgtgtagtgatatttttgggcctctgggtttcatgtgtcaatacaaggaatatttatttaaaatagatttatttagaggaggcacagtgttgttgatctgtgtgacaccacccatatttttaaaaacctttgtatgtttctctaaatttgttgttgactgaatataatagaccctaccataattcgtcaaatatcactgattagttacatcctttgtgtgagattagctgtaaagtatactgctcttattcttattcagaatagttaattggtagccaaaaatacatgtatcacagatgttaggtcgaatttaaacagcacagtcaagtgctatggaagtttttctgctaaattagtagattaaagaatactataccctaggcatggggagcagcacgttttcctttggtaggtaggatctctatactagtgaacagtgccagttccacactttggacttagaactgttctctagttattgtaacacagaatactgtcaatccctaatttacttaatgttacttattggaagtggggctgatgaaatacgcacaggagggaaatctactgtgtttaggcacaggcagccccagtgtataaggagatcatattccaaaaggttgtcagttggttgtttgcaacctggaatgtattttcctttagagaccaggttatccatggtggttaggcccctagagcagctggaaaagatgatcaaaccaataggttagctgacatcgaataatgtaataggtttgctaaagaatctaaccatcaaatataatattgtttccagggagggtgtttgttcagagttgcctgttagtagaatctggactgtccatcccagccacatcccacctactggacagtaggggtagagatgccaccagactacaggtgaccagattggcctgaaacatggtgtccagtaaaaacggggaggaataagtccatgactgctggagagcttggtggtaggaggagggtgaaggagggtgagggggcctctcatgggtcagaaacctccagggacatccctcagctggtaactctgctgttgtccggagggttcaggcttggtgtgccttcttctgtttgtctgacttttggctcctatggttcatctcctgccctgcccaccacagaaaaggatgctgctgcatagcttctccaatgtaccagtcattgaggccagcgcgcagcacttttaatgtttttagtgctagtaactgtgttttaactctccaggaataagctgggaggttagaaaacaagaaaaaagggggaaaaaaaaacctctccacccactttccttttttacagttacagaccctgttgagaaaaagaagcacccagatgggtgatggtgatagggcttgtggtggacacagggttgtggtaagattcctcagtgcttcggcgagcacctaagactattaccctggaactgactgctttctagagcttgattcatgcctctaagccagtggttctcaaagtgtggcccctagaccagtagcatcagcatcatcggggacctcattagaatgcagattctcagccccctcccagacatggtgaagtcagaagctctcagggagggactcagcaaatgattctaaagcgcatcaagtttgagaaccaccctaagccaatgagtctcccttttacttcccattagtcctccctcaccagatgattcctaggactcatggtgcaacatacaggagccaggctttagggaggggaggaaaggagcctggcggcaggggtctctgcaatggcaagaaagtgagtgaatccagcgctgccacctggttatccccttctcgttgaaaatagcagcgcaggtgcaaattcctaaacacaggctgcctgcactcggtgttacctcgggctgaggcatgataatattttattttttaaagctgtgaggaaatgaaagtgaggctttggttggggcgaggcagttgtgaaagaaattaaaataaaagaccctttgtaaatgcagacttagaagaaatactgaatttgtgtcagaagttctccagtgtttgtgttaatcgtgtggtgataatcctgtcctccttttaaagcgaattctctactgaaaggtctgctctgcttaaggagctacaaactgctctcaaaagaatgaaatactgagttccaattcagtgaggcacagtgttggactatggcacatttagttggagtcggggggaggtcaggaatatgatcagataatggattttataccttagagcaaaatctattagtctctctcagtttatcaatttaaatggctttaggcttatagggggtgtaaactttaagaatataattctcccattcaagtttacagcaaacatctagccaccttcaaaacaaagaatatacagaccatcatttagcaatactaatacatgattttccttggggatggcaggtttgagaatcctttagcaacaggacatacttcccctaaattacagtgaattatttataacgagataaagctttcaggtacaagctgaaggtggggtgtctaacaactaaaaactatcactaaatctcaaagagaaagttcttgcaaaatatgtaaagttcacaaggtgcagacattttccttctttaggcttttatctaaggaagggctatgaaactgggcccatctgtatacaggctcaaatttacgtttttaaaggaagaatctatgcagctgaggcttattgcaggaaatacttcatttgtatgtaaatattattgtaaataaataggaggctgtatatttttgaagttgttgatctgcactgaaatagaagtctctaggatctgcatataaacaataaatgtttcctagaaattagtggttttgtttgggaattagaaaaatttacattctctcccaggtaacatagttctctcaatgtaaacttggaacctgaaaccctacttaatttagagaaagaaatgtctgagaaatagttcccttgatttcttatgctggcattaagatcaattatttaacagatagtcctctgagatacaagtaaggaatatttagacacaaatccttgtcctatagaaacagatatacccaaatgacaaattgtttcttcataatgatcttccatttttaacactgataccactacacagtacatatgaaaacagaagctggggagaagaatgtttttttcacaattgaattgctgcatttctcaaactttgggatctatgaaagcggggagagggaacctgaatattaattatgagcacaaatttgaaggaaagaaaacaaagaaccattatctaatcaagctttgaaagtcctgcatgtttgccttttattttagtgttgacgccaacatagactgtctaaggtatttttttccccaaacacttgaatcttggtcgttggtatgtaatccactctctagagtccagtgtactttagacttcatctgagtccaatacatgtaccacactactgttttattaatgtaaaaaccttgtaaatgaatttcagatgggtgatttaagtgagtcacaagtcacaaaactttgctattcatagttaatcaaatagaactgggttttttttttcagagtgtggtgtaaataaagaaatataagaagttctgttctataactgctctgttaacatagtttttaaacattaaaaaatgtgaactaaaagtatttaaaaa

SEQ ID NO: 5425 - DNA, 4349 bp, Homo Sapiens
  NM_030758
gcccccgcctcgcgccgcgcgcacgtgactgcgcccccggccccgcccccggcctgccccccgcccccactggccgctcggccgcgcgcgggtcggccggctctatggggaaagcggcggctccgagccgaggcggcggctgtggcggccgctcccgcgggctctcgtcgctgttcacggttgtcccctgcctgtcgtgccacacggcggcgccgggcatgagcgcttccacgtccggctccgggccggagcccaagccccagccccagcccgtgcccgaaccggagcggggaccgctgtcagaacaggtgtcggaggcagtttcggaggcagtgccaagatcggaacctgtgtccgagacgacgtctgagccggagccaggggctgggcagccatcggaactgctgcaggggtcgcggccggggtcagagtcaagctcaggtgtaggggctgggcccttcactaaggccgcatcggagccgctctcccgggcggtggggagcgcgacctttctcagacccgagtcaggatcgctgccagcgttaaagcccctgcctcttctgcgaccaggacaggcgaagactcctcttggggttccaatgtcggggactggcacgacctccagtgccccactggccttactgcctctggacagcttcgagggctggcttctcaagtggaccaactatctgaagggctaccagcgccgctggttcgtgctgggcaatggtttgctctcttactacagaaatcagggtgaaatggcccacacgtgccgtggaaccatcaacctgtccaccgcgcacattgacacggaggactcttgtggtatcttgctgaccagtggggccaggagctaccacctcaaggccagctcagaggtggaccggcagcagtggatcaccgccctggagctggccaaggccaaggctgtccgcgtgatgaacactcattcagatgactctggggacgacgacgaggctaccaccccagccgacaagagcgagctgcaccacaccctgaagaatctttccctgaagttagatgacctcagcacgtgcaatgacctcatcgccaagcacggcgctgcactccagcgctccctgacagagctggacggcctcaagatcccatctgagagtggggagaagctgaaggtggtgaatgagcgggccaccctcttccgcatcacatccaatgctatgatcaacgcctgcagggacttcttggaactagcagagatacacagtcggaaatggcagcgggcactgcagtatgagcaggagcagcgcgtgcacttggaggaaaccattgagcagctggcgaagcagcacaacagcctcgagcgggccttccacagtgcccctggccggccggccaacccctccaagagcttcattgagggaagcctcttgactcccaaaggagaggacagtgaggaagatgaagataccgagtactttgatgccatggaagactccacatccttcatcaccgtgatcaccgaggccaaggaagacagcagaaaagctgaaggtagcaccgggacaagttccgtggactggagctcagcagacaatgtactagatggtgcctcgctcgtgcccaagggttcatccaaagtcaagaggcgagtccgcattcccaacaagcccaactacagccttaacctctggagcatcatgaagaactgcatcggccgggagctctccaggatccccatgccggtgaacttcaatgagcccctgtccatgctccagcggctgacagaggacctggagtaccaccacctgctggacaaggcagtgcactgcaccagctcagtggagcagatgtgcctggtggccgccttctctgtgtcctcctactccaccacagtgcaccgcatcgccaagcccttcaaccccatgctgggggagaccttcgagctggaccgcctcgacgacatgggcctgcgctccctctgtgagcaggtgagccaccaccccccctcagctgcgcactacgtgttctccaagcatggctggagcctctggcaggagatcaccatctccagcaagttccggggaaaatacatctccatcatgccgctaggtgccatccacttagaattccaggccagtgggaatcactacgtgtggaggaagagcacctcaactgttcacaacatcatcgtgggcaagctctggatcgaccagtcaggggacatcgagattgtgaaccataagaccaatgaccggtgccagctgaagttcctgccctacagctacttctccaaagaggcagcccggaaggtgacaggagtggtgagtgacagccagggcaaggcccattacgtgctgtccggctcgtgggatgaacaaatggagtgctccaaggtcatgcatagcagtcccagcagccccagctctgacgggaagcagaagacagtgtaccagaccctgtcagccaagctgctgtggaagaagtacccgctgccggagaacgcggagaacatgtactacttctcagagctggccctgaccctcaacgagcacgaggagggcgtagcgccaaccgacagccgcctgcggcccgaccagcggctgatggagaagggccgttgggacgaggccaataccgagaagcagcggctggaggagaagcagcgcctgtcgcggcgccggcggctggaggcctgcgggccgggcagcagctgcagctcggaggaagagaaggaggcggatgcctacacgccactgtggtttgagaagaggctggatccgctgaccggggagatggcctgtgtgtacaagggcggctactgggaggccaaggagaagcaagactggcatatgtgccccaacatcttctgagcgccacccttgcaacaaatacaggcgcctgcacagcctggcccacctgttcattaatgcactcaatttagtactgaatggtctttctcccagcccattcccagcccttcctatttcctttcctattttttttttctccccacactttcttgggactcccaccttggaaggaggaagggctgacctgggttctctccagcccccaggtgcgccgggtcacccgtgccccttcattatggacctgggccctaccggaacccctgccccagttaccacaactcaggccggctggcccgggccatgggctgcgcaaatcaccagcccccaacccagggaggaactggcccctcctagggagcctcttcgacttttttagaaaaatgatctccatttctttccagccatgatgtttagtaaatatttttagtaccgcacttagcagacagctttccaagtgtgctttcttgccacaaaagtgtcctggcaagagccccttatttttaagacatcaggaagccagaccgctttgagttgggagaattttgtagctcaacatatcaagtcctcgatggtatctgagctgcccacacccccacctgccaaggccccacagagcccaaaacagaagggggctgccccagcccagcagagcacagagtttctggagctcccatccacagatgcaggagggggtactgatggtaacccccatgtggatttgagggcagcagtccctggcctcaccctagccagcctgggtggctccctagccccaagaggccaggaagggctggaaggcagggcctgcaggtgctccccgccctgagacccaggccccaaatcagcaataatgaacaaacccttggcccagcctgggctggtgacctgggcaccagagaccttgcatccctcctcatcctaggaggcccctaggggtgccccatctcagtgtcccctgaactctttatttgcctaatttatatatatatatatgagatatataaatatatataaaatagctattttgcttaaatttctacagtatgtaaaagtgaaaaaatgatgaagacgggtgcacctgtctgagtttggccctcatgtgagctgtgcccttccctctcctcatgcccccttccagcggcttctgccaaccatggggggctggaccaccatggccactgacccagcccctcagaatcccacactccaatcctttccatttcagtttagtcctaaaagttcatcacagggtctttctttctactccaggactggttttgtttttatatatataaaaaaaaaaagtgaaaacaccaatgtgtgaaatgccttacaatgcccactggagaggcggggcggggtggggcaggatggccccactggggctcctacagagctgtggaatgtacctctccccaacactgttttgttagcgagcaccttttgaccagtaataaaaaaccttggctttggagttttccactgaaaaaaaaa

SEQ ID NO: 5426 - DNA, 2351 bp, Homo Sapiens
  NM_030760
ctcactcggttcaaggcagcgcgactgcgggtggcgcacgaccagggcgcagaccttggggcgcgcggcccatggagtcggggctgctgcggccggcgccggtgagcgaggtcatcgtcctgcattacaactacaccggcaagctccgcggtgcgcgctaccagccgggtgccggcctgcgcgccgacgccgtggtgtgcctggcggtgtgcgccttcatcgtgctagagaatctagccgtgttgttggtgctcggacgccacccgcgcttccacgctcccatgttcctgctcctgggcagcctcacgttgtcggatctgctggcaggcgccgcctacgccgccaacatcctactgtcggggccgctcacgctgaaactgtcccccgcgctctggttcgcacgggagggaggcgtcttcgtggcactcactgcgtccgtgctgagcctcctggccatcgcgctggagcgcagcctcaccatggcgcgcagggggcccgcgcccgtctccagtcgggggcgcacgctggcgatggcagccgcggcctggggcgtgtcgctgctcctcgggctcctgccagcgctgggctggaattgcctgggtcgcctggacgcttgctccactgtcttgccgctctacgccaaggcctacgtgctcttctgcgtgctcgccttcgtgggcatcctggccgctatctgtgcactctacgcgcgcatctactgccaggtacgcgccaacgcgcggcgcctgccggcacggcccgggactgcggggaccacctcgacccgggcgcgtcgcaagccgcgctcgctggccttgctgcgcacgctcagcgtggtgctcctggcctttgtggcatgttggggccccctcttcctgctgctgttgctcgacgtggcgtgcccggcgcgcacctgtcctgtactcctgcaggccgatcccttcctgggactggccatggccaactcacttctgaaccccatcatctacacgctcaccaaccgcgacctgcgccacgcgctcctgcgcctggtctgctgcggacgccactcctgcggcagagacccgagtggctcccagcagtcggcgagcgcggctgaggcttccgggggcctgcgccgctgcctgcccccgggccttgatgggagcttcagcggctcggagcgctcatcgccccagcgcgacgggctggacaccagcggctccacaggcagccccggtgcacccacagccgcccggactctggtatcagaaccggctgcagactgacaccctcggcccacgactgtcttcccaagttttacagacttgttctttttacataaaggaatttgtaggaaatgcagccaaaggtgcagtcggaaaagatgcaggggaaatgtatttatgcagcgacaccccacaatgtgaacaaacagacaaaaaatctgtgccctcgtggaattgacgttctgcttgggaacacagaaaagaactcggtgatgaaataatggagatgattccagtgacaaacgacagagatggtgatggtggtcagggaagacctctctgcagaggtagtgacttgtgatgtgagctgagacctctgtcctgggaagaccaaaagaaaagcatttcaggatgagggaatggcatgcgcaaaggccctgaggctgaaatgtgcccatgtgttctaagaaatgcagcgatgctggtgtgcctggagcagggacggagggggagaatgggaggagacaaggagctgaaggagtagttcccgaaggaccttgtgggtgatatagaggacttcgcttttgctctgagtgaggtgggagccatagaagcttctaagcagaagagggacttgccctaattcaggtgatcacaggtgtcttgtggcctccatgggaggttgaaaaccagagaaggtgaaggggggctgcactgagccacaggaacaatgatggagattccagctaagcccagaccccgtggattctagatagattttagaggcagcagacagaattactgaggaattgagtgtaagagtggaataaagttatcaaggacaatgccaagggtggggcacccccaaatttgactctgggagactcagccaaatcctatctggtaataaaatttcttttttatttttcttttctttctttctttcttttttttttttttgagttgggatcttgtgctctgtcacccaggctggagtgcaatgggcacaattatagctcactgcagcctggaactcctgggatcaagcctggagttcctgcttcagcctccctagtagctgggactacaggcatgcaccaccatgcccagttaataaaatttcttcaaatgcaaaaaaaaaaa

SEQ ID NO: 5427 - DNA, 7387 bp, Homo Sapiens
  NM_030767
gcaactgaagacggaggtgcccaaggtcagaaggaagcaccacacagagggcacaggcaggatggccgatgctgacaggaaccagcggtgactctggggcccctggcagcagctctgtctcctgaagatgaagtggcccaggtgaagcccaggccagccccaatggccagctcggagactgagatccgctgggctgagcctggcctggggaagggcccccagcggcggcgctgggcctgggccgaggacaagagggatgtggatagaagtagttcacaaagctgggaagaagagagactctttcccaatgccaccagccccgagctcctagaggacttccgcctggcccagcagcacctgccgcccctggagtgggacccacacccgcagcccgatgggcatcaggattccgagtcaggagagacttcgggagaagaggctgaagcagaggatgtggacagcccagcaagttcccatgagcctcttgcctggctcccccagcagggccgtcagctggacatgactgaagaggagccagatgggaccctcggaagtctggaggttgaggaggctggagagagctcctcaaggttggggtatgaggctggtctcagcttggaaggccatggaaacaccagccccatggctcttgggcatggtcaggccaggggctgggtggcttctggcgaacaagccagtggggacaaactttctgaacattccgaggtcaacccatccgttgaactcagcccggcaaggtcctggagcagtgggacagtgagcctcgaccaccctagtgacagccttgattctacctgggaaggagagaccgatggcccccagcccactgccctggcagaaaccttgccagagggccccagccaccacctcctaagcccagatggcagaactggaggcagtgttgctcgggcaacccccatggaattccaggactcctcagctcccccagcccagagtccgcagcatgccacagatagatggaggagagaaacgaccagattcttctgccctcagcccaaggaacacatctggaagcagacaaagacgtcacctaagccactcccttcccgattcattggctccatcagccccctgaatccccagcccaggccaacgcggcagggcaggccgctgcccagacagggagccactctggctggccgctcctcttctaatgcccccaagtatggccgggggcagttgaactacccactccctgatttctccaaggtagggccccgggtgagattccccaaagatgagagctaccgtccccccaagtccagaagccacaacaggaagcctcaggcccctgccaggcccctcatcttcaagtctccagctgagattgtgcaggaggtgctgttgagcagtggagaagcagccctggcaaaggacacgcctcctgcccaccctatcaccagggtaccccaagaatttcagacgcctgagcaagccactgagctggtccatcagctccaggaagactaccacaggctcctcaccaagtacgctgaggccgagaacaccattgaccagctacgcctcggggccaaggtgaacctgttctctgacccaccccagcccaaccacagcatccacacgggaatggtgccccaggggaccaaggtcttgtccttcaccatcccacagccccgctctgcagagtggtggccgggcccggccgaggacccccaggcctctgcggcctcagggtggccatcagctcgaggagacttgagcccctcctcgcttaccagcatgcccaccctggggtggcttccggagaaccgggacatctctgaggaccagtcctcagcagagcagacccaggcactggcttctcaggccagccagttcctggccaaggtggagtcctttgaaagactgatacaggcaggacgtctcatgccccaggaccaagtcaagggcttccagcggctgaaggctgcccacgcggccctagaggaggagtacctgaaggcttgtcgggagcaacaccctgcccagccgcttgccggctccaaggggacgcctggaagatttgatcctcgcagggagctggaggcagagatataccgtctgggaagctgcctggaagagctgaaggaacacatagaccagacccagcaagagcctgagccgcccgggtcagactcagctctggacagcaccccagccctgccctgcctccatcagccaacgcacctgcctgctccttctggacaagcccccatgccagccatcaagacctcctgccctgagcctgctaccaccactgccgccgccagcactggcccctgcccattgcacgtaaatgtggaggtgagctctggcaacagtgaggtggaggacaggccacaggaccccctggcccgactcaggcacaaggagctgcagatggagcaagtttaccatggcctcatggagcggtacctcagtgtgaagtctctcccagaagccatgagaatggaggaggaggaagaaggagaggaggaggaggaggaagaggggggaggtgactccctggaagttgatggggtggctgcaactccagggaaagcagaggccaccagggtcctcccaaggcagtgcccggtgcaggctgagaaaagtcatggggctcccctggaggaggccacggagaagatggtatctatgaagccaccaggtttccaggcatccctggctagagacgggcacatgtcaggcctgggcaaggctgaggcagcccctccaggccctggcgtgccaccccaccctccaggcaccaagtccgcagcatcccaccaaagtagtatgaccagcctggagggaagcggcatctctgagcgccttccacagaagcctttgcaccgaggcggtgggccccacctggaggagacctggatggcgtccccagagacagacagtggctttgtgggctcagaaacaagcagagtttcacccctcacccagactccagagcaccggctctcccacatcagcacagcaggaacattagcccagccctttgctgcatctgtgcccagggatggagcttcctaccccaaggccaggggttctctgattcccagaagagccacagagcccagcacaccccggagccaagcacagaggtacctctccagcccaagtgggcctctccggcagagggcacccaacttcagcctggagcggacactggcagccgagatggcggttcctggctcagagtttgaggggcacaaacggatttctgaacagccccttcccaacaagacaatcagcccacccccagcccccgcccctgccgctgcgcctctaccctgtggaccaacagagaccatccccagcttcctgctcaccagggcagggcgagaccaggccatctgtgagctgcaagaagaggtgtcccggcttcgtctgcggctggaagacagcctgcaccagccactccagggcagcccgacacgcccagcatctgcctttgaccgccccgcccggacccgcggccggccagcagactccccagccacctggggctcccattatggcagtaaatccacagagagattgcctggtgagcctagaggtgaagagcagattgtccctccaggaaggcagcgagccaggtcttcctcagtgcctcgggaggtgctccgactgtccctgagttcagaatctgagctgccctccctaccactgttctctgagaagagcaagaccaccaaggacagtccacaggcagctcgggatggaaagagaggggtgggcagtgctggatggccagacagggtcaccttccggggccaatacacaggccacgaataccatgttctgtcccctaaggcggtcccaaaaggcaatggcacagtctcctgtccccactgccggcccattaggacccaggatgcgggtggtgctgtcacaggggacccactgggaccgcctcccgctgatacccttcagtgtcccctgtgtggtcaagttgggtctcccccagaggcagatggtccaggctcagccacctctggggcagagaaggccaccacgaggagaaaagcatcttcaactcccagccccaagcagaggagcaagcaggcggggtcgtcgccacgcccaccccccggactgtggtatctggcaacagcgcccccagcaccagcccctccagcctttgcctacatctcctcggttcccatcatgccttatccacctgccgctgtgtactatgcgcctgcaggacctacctcagcccaaccagctgccaagtggccgcccacagcctctcccccaccagcccggagacaccggcactccatccagctcgacctgggcgacctagaggagctcaacaaggccctgagccgggccgtgcaggctgccgagagcgtccgctctaccaccaggcagatgagaagctcgctgtcagccgacctgcgccaggctcacagcctgcggggctcctgcctcttctgacttcactgggggcccagaggcagatgggtgggtgggtgggcaggtggcctgccaggccaggagtgggctggagctgctgaggcccagaaggcccgcatagttcctcaccaggagggtctccctccagcacaggtcccgcctgctcagtccctgtgctttccaagtggagggggtgtcagctcggtcaccaagagaagtgacttcccaggagcaccagtcccctcacagaggtgctgtgagcgaggcctccttcggtccaggcagaacctcaggcagtctctcctggtcctgcatgtgtgcaactccagctaataataggtattttatatacagatggacagatatttttttaaactggggagttttcctgatcttgggtcctctttagggggccagacaagaaaggcctacggtttctggagcaaacctgtcccccacctgtgaccagtcactctggggcaagcatcactgggaagggcatagccggagacctttctcctagtgactggtagtcagtggggcattttaggatgtcagggccccagggtgacatgtgtccagcttttctatggcagcagaggcctttccctcagacaagctacaaagtgcccaggatgccatccaccatggtccccttcagtacctcacgcatggtccccagcttctcctaggatcccagtggcgtttatcagtggccagctacctgccaggcccgggctggggcacggtctgcggccatgaggccaggccgcctcccgcacccctaccccgtggcagcagcatacctctgcatttctggaatgtgtgtgcatcaatgatgtttgtatatttgaggcatttaaaaatctattttcgttacgagggcaaatgaagaatgaatattgatcttaaaaaaagaaaagaagacaaaaaaaatacccaaagccatccgtgtctctgctgtatgtcattaacttttgccttcaatgtcaagtttatggggtggtaggtttgatgcccagccaagccctttcccaggggacctgttgggtgctctgcctgcctccctctggtggcttctgtttctccagttttccccctttgcctatctcagaaccataaatctttcaactgcggagggccttgaggtggggctgcctagccaagtcccttttgactgaggccagagatgtaaatgaggcacacagcaagttgctgtctacaagagtatgcacctggactctccagtgctcctttctttcttttttttttcttttttctttttctttttttttttttttttgagactgagttttgctctggttgcccaggctggggtacagtggtggaatctcggctcactgcaacctccgcctcccgggttcaagtgattctcttgcctcagcctcccgagtagctgggattacaggcatgcaccaccacgtctggctaattttgtatttttagtagagacagggtttctccatgttggtcgggctgatcttgcactcccagcctcaggtgatccacccacctcagcctcccaaattgctgggattacaggcgtgagccatggcgcccagccttccagtactttcagtagcaaacagcacctgccatttagggagcacctgctagaccctgattccggtgctaagcactgggcattgtctgcttcacacagtccatgtgctaaccctcaggaccctcactctgccccccttttactgatgaggagagtggggttccaatgggccatctgcccaaactggtttgggagagaacctggatttaaactcacattggtctgacccaaagtccacattctttgttatgtgtgttttttgcttcctctacctccatgattctttttctcttgacctctggtttcttcctcacgtggctttttcttccatgttccccacttctcgtctcccttgcttctccctgctctgcccatcatgactcatttctgtttcatttttcagcggatcctcctgagtatggttgaaaatggtgtctcactgaaagtaacactgaaatggacaaacttcctgtaggttctgagccttcagttccaggacattgtgggaccccagaggctgtcctgtccacttgccttctgaggacatcagctcggtgtccccagcctccgtgctgtgggcacagctgtggtttgggtgctgagcaaaggatgctgtagtcttggccctgtggagcttggctgttgggacaggaggtacaaaggggagtggtgcctgtggacacaggactagaccccaggacatcagggcctcgggctcatggtcctatcaccctggatggtatacgcagctgcacacgtggaattgctcaaacaattcaggcccaacttttctgccacggaaggggtgctgcttccctcacgtaacaagaggctgtcaatcacgagcacccaggttggggtgaggccggccctttgtggcttgtgccactgagtgggctgtgcctcgggcttggctccacctcagggctccacatttgcaggatgtcagctgatttccagggaccagcctcacccttacgtgttatctccttcttctgggtctcccaggtgagcaccctaagaacacatccatggagacacccagcccctctggcctgggccccaagccctctgcatcaccccagcccttccctgccctgccctgtcctggcccaggcaaccgcctcttgcctagttgcccacagcagccttcactcaggccttcctgcctccagcctggtccccacaacgtgcctcccccgatggccatggtaatactggaataaggtccttgtgataggcaccacatgcctgaactctccccaccccatccaccttgtatttgtctgttctcacattgctataaagaactacctgagactgggtagtttatgaaaaaaa

SEQ ID NO: 5428 - DNA, 1480 bp, Homo Sapiens
  NM_030768
ggtgactgacggcgccggccgcccctgcccgtcgcccgcccgctgctgccgcccgcccggggtgtggagcccggccgctgctcgcgggctgagtgtctgtcgctgctgccgcctccacccagcctccgccatggacctcttcggggacctgccggagcccgagcgctcgccgcgcccggctgccgggaaagaagctcagaaaggacccctgctctttgatgacctccctccggccagcagtactgactcaggatcagggggacctttgctttttgatgatctcccacccgctagcagtggcgattcaggttctcttgccacatcaatatcccagatggtaaagactgaagggaaaggagcaaagagaaaaacctccgaggaagagaagaatggcagtgaagagcttgtggaaaagaaagtttgtaaagcctcttcggtgatctttggtctgaagggctatgtggctgagcggaagggtgagagggaggagatgcaggatgcccacgtcatcctgaacgacatcaccgaggagtgtaggcccccatcgtccctcattactcgggtttcatattttgctgtttttgatggacatggaggaattcgagcctcaaaatttgctgcacagaatttgcatcaaaacttaatcagaaaatttcctaaaggagatgtaatcagtgtagagaaaaccgtgaagagatgccttttggacactttcaagcatactgatgaagagttccttaaacaagcttccagccagaagcctgcctggaaagatgggtccactgccacgtgtgttctggctgtagacaacattctttatattgccaacctcggagatagtcgggcaatcttgtgtcgttataatgaggagagtcaaaaacatgcagccttaagcctcagcaaagagcataatccaactcagtatgaagagcggatgaggatacagaaggctggaggaaacgtcagggatgggcgtgttttgggcgtgctagaggtgtcacgctccattggggacgggcagtacaagcgctgcggtgtcacctctgtgcccgacatcagacgctgccagctgacccccaatgacaggttcattttgttggcctgtgatgggctcttcaaggtctttaccccagaagaagccgtgaacttcatcttgtcctgtctcgaggatgaaaagatccagacccgggaagggaagtccgcagccgacgcccgctacgaagcagcctgcaacaggctggccaacaaggcggtgcagcggggctcggccgacaacgtcactgtgatggtggtgcggatagggcactgaggggtggcgcgcggccaggagcacgcatggtattgacttaaaaggttcattttgtgtgtgtgcacattgtgtgttttgtgtactcctgtgggactcccatggttgtaaataaaggtttctctttttttttcctaaaaaaaaaaaaaaaaaaaaaaaaaaaaaaaaaaaaaa

SEQ ID NO: 5429 - DNA, 2867 bp, Homo Sapiens
  NM_030769
gcagacgaggcagggggaggtttgcactcggcgtggcgcgggtgagccgcgtgctctcgggcacccggccgccagttcggatgcttccgatcctcggggagccggggcgctgcgccggagtcacttcagcccatgttgttcaggtgacacccggggaagagcagactccagtgtgcaaaacgtttcggggtttccgggccagcggttccgggcgcgcctcgcgggcggcggcgcagaactacaacccccaggctccctggcgtggcggcacgtgggcccgagccgggcggccgcggatataaagcgcggcggcggctgccgggcggagcggctgcacggacaagagcggaggcctggaaggggaaactgaagcagaaagaggttacttaatgggctcaaggtcacctacctgacctaccagcagctcaatggccttcccaaagaagaaacttcagggtcttgtggctgcaaccatcacgccaatgactgagaatggagaaatcaacttttcagtaattggtcagtatgtggattatcttgtgaaagaacagggagtgaagaacatttttgtgaatggcacaacaggagaaggcctgtccctgagcgtctcagagcgtcgccaggttgcagaggagtgggtgacaaaagggaaggacaagctggatcaggtgataattcacgtaggagcactgagcttgaaggagtcacaggaactggcccaacatgcagcagaaataggagctgatggcatcgctgtcattgcaccgttcttcctcaagccatggaccaaagatatcctgattaatttcctaaaggaagtggctgctgccgcccctgccctgccattttattactatcacattcctgccttgacaggggtaaagattcgtgctgaggagttgttggatgggattctggataagatccccaccttccaagggctgaaattcagtgatacagatctcttagacttcgggcaatgtgttgatcagaatcgccagcaacagtttgctttcctttttggggtggatgagcaactgttgagtgctctggtgatgggagcaactggagcagtgggcagtacctataactacctgggaaaaaagacaaaccagatgttggaggcttttgaacaaaaggacttctctttagccctgaactatcagttttgtatccagagatttatcaactttgttgtcaaactaggttttggagtgtcacagaccaaagccatcatgactctggtctctgggattccaatgggcccaccccggcttccactgcagaaagcctccagggagtttactgatagtgctgaagctaaactgaagagcctggatttcctttctttcactgatttaaaggatggaaacttggaagctggtagctagtgcctctctatcaaatcagggtttgcaccttgagacataatctaccttaaatagtgcatttttttctcagggaattttagatgaacttgaataaactctcctagcaaatgaaatctcacaataagcattgaggtaccttttgtgagccttaaaaagtcttattttgtgaaggggcaaaaactctaggagtcacaactctcagtcattcatttcacagatttttttgtggagaaatttctgtttatatggatgaaatggaatcaagaggaaaattgtaattgattaattccatctgtctttaggagctctcattatctcggtctctggttcctaatcctattttaaagttgtctaattttaaaccactataatatgtcttcattttaataaatattcatttggaatctaggaaaactctgagctactgcatttaggcaggcactttaataccaaactgtaacatgtctcaactgtatacaactcaaaatacaccagctcatttggctgctcagtctaactctagaatggatgcttttgaattcatttcgatgtcaccacttttcgctctttaaaaacactgggtcaggtgaggacttgtttcagttcctataactaagtaaagggcggctttctcataacaaaggaaaaagtcttccccaaagatgaatttaagtctccacttttttctatacagaaaactcaaaactcaaagtttcaaagaaccaaaggactcttcctctgggcaccacaaacttccccttcctccactgagaagactgtctctcccgcaggaccctgaattattgaaatcgaaggctgacttcctttctgcagtgagcccaggggctaatgttattatcctgtcacacttgcaactagtgacttttgtttagtgatagaagatttggggaggacccaaaggactcagaactttctctccatacctccttttactcttttctttctgtgtaatgtatcaacaactgtttaatctcccttctaacaaaccttgatataagctttctgatatcaaagtatattgacagttaacccttactgattttaaacttgactatccagtctgttaattacctaagattttgttttcatttcatctctaattgttttgatcattggcagagaaagagtatttgaaattcatatcagttttgctccttattttaatctctttgaattaaaaataaaactttttcaaaatggaaatttgaaattataagtagacttcaattatctttgctaatcctctctttaattagtcagctagttaaaagttgttatattcatatatcctcaaccctctttttgcctttgtagcttttaatttcctgaaagaagaaaatgagttgttcgtttttggttctgaggatgtgatatccgtacttactgatactaaagccaaatttaaattctaaaattaattcttgggtatccaataaacaaagaactatttttcta

SEQ ID NO: 5430 - DNA, 1488 bp, Homo Sapiens
  NM_030771
gctgggaaagcgcgtccccgccgcggctccgccagtttgaacttggcgggccagatgtgggcggcggggcgctgggggcctacttttccctcttcctacgccggtttctctgctgactgcagacccaggtctcggccctcctcggactcctgctcagtccctatgacgggcgcacgtgggcaggggctggaggtggtgcgctcgccgtcgccgccgctgccgctgagctgcagcaattccaccaggtcgctgttgtctccccttggccaccagagcttccagtttgacgaggacgacggtgacggggaggatgaggaagacgtggatgatgaggaagacgtggatgaagatgcccatgattcagaggccaaagtggcgagcctgagaggaatggagttacaggggtgcgccagcactcaggttgaatcagaaaataaccaagaagaacagaaacaggtgcgcttaccagaaagccgcctgacaccatgggaggtgtggtttattggcaaagaaaaagaagaacgtgaccggctgcaactgaaagctctagaggaattaaatcaacaactagaaaaaagaaaagaaatggaagaacgtgaaaaaagaaagataattgctgaagaaaagcacaaggaatgggttcagaaaaagaatgagcaaaaaagaaaagaaagagaacaaaaaattaataaagaaatggaggaaaaagcagcaaaggaactggagaaagaatacttgcaagaaaaagcaaaagaaaaatatcaagaatggttaaagaaaaaaaatgctgaagaatgtgagaggaagaagaaagaaaaggaaaaagaaaaacaacagcaagctgaaatacaggagaaaaaggaaatagcagaaaaaaagtttcaagaatggttggaaaatgcgaaacataaacctcgtccagctgcaaagagctatggttatgccaatggaaaacttacaggtttttacagtggaaattcctatccagaaccagccttttataatccaattccgtggaaaccaattcatatgccacctcccaaagaagctaaggatctatcaggaaggaagagtaaaagacctgtgataagtcagccacacaagtcatcatctctggtaattcataaagccaggagcaatctttgccttggaactctgtgcagaatacaaagatagcgtatgtggaaaataacatgcttttatctggagctatttaatttaaaaatcagaaattgttttttactgctcagtcaataactcaacacttaatgtgattattgacaaatagcaatttttgcatttgtatatggagtccttagagttgaggaagatattttctggattttggtttttataaacttttcaaggttgatcttggcatgttgttttgcagaataagtggctgaatatgtaagaattgtgtttgtatttagcttgtattaaaagtacactgtaataccaataaaactaacaatttttcttgaaaaa

SEQ ID NO: 5431 - DNA, 2473 bp, Homo Sapiens
  NM_030783
caatgcaccgcacaccctttactggccggccccgcgctgctctcctaagaccccgcgggccagcgccgcgaccccttcccagcgctcctcgcgctgtgtgcggcgcgtcctctcgccggtgacccggtgtgcgtggggtcgaggcgccgggcggagtggctccgggccgaaacgccatgcggaggggcgagcgcagggacgccggaggtccgcggcccgagtccccggtgcccgcgggcagggcctcgctggaggagccgcctgacgggccgtctgccggccaagccaccgggccgggcgagggccgccgcagcaccgagtccgaggtctacgacgacggcaccaacaccttcttctggcgagcccacaccttaaccgtgctcttcatcctcacctgtacgcttggctatgtgacgctgctggaggaaacacctcaggacacggcctacaacaccaagagaggtattgtggccagtattttggttttcttatgttttggagtcacacaagctaaagacgggccattttccagacctcatccagcttactggaggttttggctctgcgtgagtgtggtctacgagctgtttctcatctttatactcttccagactgtccaggacggccggcagtttctaaagtatgttgaccccaagctgggagtcccactgccagagagagactacgggggaaactgcctcatctacgacccagacaatgagactgacccctttcacaacatctgggacaagttggatggctttgttcccgcgcactttcttggctggtacctgaagaccctgatgatccgagactggtggatgtgcatgatcatcagcgtgatgttcgagttcctggagtacagcctggagcaccagctgcccaacttcagcgagtgctggtgggatcactggatcatggacgtgctcgtctgcaacgggctgggcatctactgcggcatgaagacccttgagtggctgtccctgaagacgtacaagtggcagggcctctggaacattccgacctacaagggcaagatgaagaggatcgccttccagttcacgccgtacagctgggttcgcttcgagtggaagccggcctccagcctgcgtcgctggctggccgtgtgcggcatcatcctggtgttcctgttggcagaactgaacacgttctacctgaagtttgtgctgtggatgcccccggagcactacctggtcctcctgcggctcgtcttcttcgtgaacgtgggtggcgtggccatgcgtgagatctacgacttcatggatgacccgaagccccacaagaagctgggcccgcaggcctggctggtggcggccatcacggccacggagctgctcatcgtggtgaagtacgacccccacacgctcaccctgtccctgcccttctacatctcccagtgctggaccctcggctccgtcctggcgctcacctggaccgtctggcgcttcttcctgcgggacatcacattgaggtacaaggagacccggtggcagaagtggcagaacaaggatgaccagggcagcaccgtcggcaacggggaccagcacccactggggctggacgaagacctgctggggcctggggtggccgagggcgagggagcaccaactccaaactgacctgggccgtggctgcctcgtgagcctcccagagcccaggcctccgtggcctcctcctgtgtgagtcccaccaggagccacgtgcccggccttgccctcaaggttttttgcttttctcctgtgcacctggcgaggctgaaggcgaggggtggaggaggccccagcacagcctcatctccatgtgtacacgtgtgtacgtgtgtatgcgtgtgtgtacgcgtgtgtacgcgcgtgtgtacacatgcgtggccgcctgtggtgtgcacgtgtgctctgggctccgaggcttctccagagctgggagctggctggcgtggcaagggcatgctctggggcagtgtgtccctcaggaaccagggtcctccctcccctttctgcctggtcagccccgtggcctctggcccaccaagctccctgtcacccagccatggtgtggtccaggcagggacatctcggtaccctttctgcactccgtgggccctgggtgcgctgaggcctggaggcgtctacactggctccacatccacttcccccgcagctcgtgtgggcgctcgtccacaaacactccgtggctgagaggcagcggatccaggcagcgatgctgagccacctcctccgagccttcctttcacacagaccaccccggaggacacgtggatgatggggtcagagatcactgagctgcccctcaagggggcctggaacccgggtgctggggtcatgctgcctccgtggctccaaggtgagggtcatcttcacgagcaaagagaaccaataaagtgacaacgaacgtctgaggcttccaaaaaaaaaaaaaaaaaaaaaaaaaaaaa

SEQ ID NO: 5432 - DNA, 2261 bp, Homo Sapiens
  NM_030790
ggggctttgcggctgtcgtcaagcgcggcgttgggccggcgggcgggggctgaggggctgccatggcggcggcgggccggctcccgagctcctgggccctcttctcgccgctcctcgcagggcttgcactactgggagtcgggccggtcccagcgcgggcgctgcacaacgtcacggccgagctctttggggccgaggcctggggcacccttgcggctttcggggacctcaactccgacaagcagacggatctcttcgtgctgcgggaaagaaatgacttaatcgtctttttggcagaccagaatgcaccctattttaaacccaaagtaaaggtatctttcaagaatcacagtgcattgataacaagtgtagtccctggggattatgatggagattctcaaatggatgtccttctgacatatcttcccaaaaattatgccaagagtgaattaggagctgttatcttctggggacaaaatcaaacattagatcctaacaatatgaccatactcaataggacttttcaagatgagccactaattatggatttcaatggtgatctaattcctgatatttttggtatcacaaatgaatccaaccagccacagatactattaggagggaatttatcatggcatccagcattgaccactacaagtaaaatgcgaattccacattctcatgcatttattgatctgactgaagattttacagcagatttattcctgacgacattgaatgccaccactagtaccttccagtttgaaatatgggaaaatttggatggaaacttctctgtcagtactatattggaaaaacctcaaaatatgatggtggttggacagtcagcatttgcagactttgatggagatggacacatggatcatttactgccaggctgtgaagataaaaattgccaaaagagtaccatctacttagtgagatctgggatgaagcagtgggttccagtcctacaagatttcagcaataagggcacactctggggctttgtgccatttgtggatgaacagcaaccaactgaaataccaattccaattacccttcatattggagactacaatatggatggctatccagacgctctggtcatactaaagaacacatctggaagcaaccagcaggcctttttactggagaacgtcccttgtaataatgcaagctgtgaagaggcgcgtcgaatgtttaaagtctactgggagctgacagacctaaatcaaattaaggatgccatggttgccaccttctttgacatttacgaagatggaatcttggacattgtagtgctaagtaaaggatatacaaagaatgattttgccattcatacactaaaaaataactttgaagcagatgcttattttgttaaagttattgttcttagtggtctgtgttctaatgactgtcctcgtaagataacaccctttggagtgaatcaacctggaccttatatcatgtatacaactgtagatgcaaatgggtatctgaaaaatggatcagctggccaactcagccaatccgcacatttagctctccaactaccatacaacgtgcttggtttaggtcggagcgcaaattttcttgaccatctctacgttggtattccccgtccatctggagaaaaatctatacgaaaacaagagtggactgcaatcattccaaattcccagctaattgtcattccataccctcacaatgtccctcgaagttggagtgccaaactgtatcttacaccaagtaatattgttctgcttactgctatagctctcatcggtgtctgtgttttcatcttggcaataattggcattttacattggcaggaaaagaaagcagatgatagagaaaaacgacaagaagcccaccggtttcattttgatgctatgtgacttgcctttaatattacataatggaatggctgttcacttgattagttgaaacacaaattctggcttgaaaaaataggggagattaaatattatttataaatgatgtatcccatggtaattattggaaagtattcaaataaatatggtttgaatatgtcacaaggtctttttttttaaagcactttgtatataaaaatttgggttctctattctgtagtgctgtacatttttgttcctttgtggaatgtgttgcatgtactccagtgtttgtgtatttataatcttatttgcatcatgatgatggaaaaagttgtgtaaataaaaataattaaaaaaaaaaaaaaaaaaaaaaaaaaaaaa

SEQ ID NO: 5433 - DNA, 4190 bp, Homo Sapiens
  NM_030793
aagtgtctgtagcgtccctccctctcaaccacaataacaggcggagggtcggcgtaggtactttgaactcaagtaaacaaaagggaagattttctcgttgatactggagactgcacaacaatggggccacgaaagaaaagtgtgaaaacatgtatcatgaataatgaaattccagaagaaatgacagcagatgaaacaaaggactatatgaatcaactttcacatgaagtactttgccatatttttaggtacctccctctgcaggatatcatgtgtatggaatgtctttcccggaagctaaaggaagcagtgaccctatatctgcgagttgtgagagttgtagatctctgtgcagggcggtggtgggaatacatgccaagtggctttacagatgccagttttctaacactattaaagaagatgccagatgttgaacagctatatggccttcaccctcgataccttgagaggcgaagagtaaggggccatgaggcttttagcattccaggagtcctagaagctttgcaggcatgcccaaacttagtgggtgtggaaacttctcatttggagttggtagaatccatttggacatatatgccccatgttcatattttggggaaatttcgtaatcgtaatggagcttttccaattcctcctgaaaataaactgaaaattcctataggagccaaaattcaaactttacatttagttggggtgaatgttcctgaaattccttgtatcccaatgctaaggcacctttatatgaagtgggtaagactcactaaaccacagccatttaaagacttcctttgtatcagcttaagaactttcgtcatgaggaactgtgcaggacccacaaattccttgaaatatgtccctttagtaacaggcttagcctctgcccgaaacttggaacacttagaaatggttcgagttcctttccttggaggtcttatccaacatgttgttgaagacagttggagatcaggtggttttagaaatttgcacactattgttctgggagcttgcaaaaatgctcttgaagtagatcttggttacctcatcattactgctgcccgtaggttacatgaagttcggatccagccttccctaaccaaagatggtgtcttttctgccctaaagatggcagagttggagtttccccagtttgaaacccttcatctaggatatgtagatgagtttttgctacagagcagaatggctaatgcggatctggtgaagtatggtttggctgatgtggtagaaaatcctggtatcatcactgatatagggatgaaagcagtcaatgaagttttttcctgtatcaaatatctggcaatttacaattgccctcatctacacaacccatacaattggatctcagaccactcaagatggactcgattggttgatatcaacctagtacggtgccatgctttgaagctggactcttttggccagtttattgaattattacccagcctagagtttatttcactggatcagatgtttcgtgaaccacccaagggttgtgctcgagttggtctgagtgcaggcacaggaattggtgtttcatcagctcttgttagcaaccagaactccaacaatgacgataataatgcccagaataacaatgccaacatccacgacaacaatcaccatcatccagatgactcagacgaggagaatgactttcggcaagatctgcagccaggagagcagcagtttgcagctgacgcattaaatgagatggaagacatcgtccaagaagatggagaggtggtggccgagagtggaaataatactccagctcacagccaggcaattattcctgtggatgttgatgaggaacaagcaggacccagtggtcttcagcgtgtagtaaaaccaacctcaattactgttcatgattcagagagtgatgatgaagaagatagtctagaactccaagaagtctggattcctaagaacggtactcggcgttactctgaacgtgaagaaaaaactggagagtcagtgcagtccagagaattgtcagtaagtggaaaaggcaagactccacttcgaaagaggtacaactcccatcagatgggccagtcgaagcagtttcccctcgaggaaagcagctgtgagaaaggctgtcaggtcaccagtgagcagatcaaagccgatatgaaagcagctagggatattcctgaaaagaaaaaaaacaaggatgtttatcccagctgcagcagcaccaccgccagcacagtgggaaactccagctcacacaacactgcttctcaaagccccgactttgtaaggacggtgaacagcggcggctcttccgagcctagccctacagaagtggatgtgtccaggcagtgtgcctgctcccccggtgggtcagaggactctgaggccatggaggagggagatgcagagagttctgtctgccccagatgctgctgtcacaggccccaggaatcccaaaggagaactagcaggtgttctgatgaggaacgtccttcaaccagccgagcctgtgttgtgaatggcccggatgaagtagccaaaacaaagccacgtcacgccatgaaacggaagcggacagcagataaatccactagtacaagtgatcctgtgatcgaggatgaccatgtgcaggttcttgtattaaaatccaagaatcttgttggagtcactatgaccaattgtggaatcacagatctagtgctaaaagactgtccaaagatgatgttcatccatgctaccaggtgcagggtactaaaacatttaaaggtagaaaatgcaccaattgtaaaccgatttgactatgcacagtgcaagaaactgaacatggatcaggtactagaccagatactaagaatgccacccgagagaaaccgcatcatatacctacgcccaatgcagcaggtggacactctaactttggagcagaagctatttagtggtccctacccctatcacatctgtattatccatgaattcagtaaccctcccaatgtccggaataaggtgcgcattcgcagctggatggacactatagcaaacatcaatcaagagctcattaaatatgaattcttccctgaagccactcgaagtgaagaagacttaaagaaataccccaagtacccctgggggagagaaatctatactttagaaggtgttgtggatggagctccatattccatgatttctgacttcccttggctgaggtcattacgagctgcagagcccaacagcttcgctcgatacgactttgaagacgatgaagaaagcactatctatgctcctagaaggaaaggacagctgtctgcagacatctgtatggaaacaataggagaggaaatttcagagatgcgtcagatgaagaagggtgtatttcagcgagtagtggcaatttttatccactattgtgatgtcaatggagagccagttgaagatgactacatttaattggtccctcctcctttccagctattttgtcagaaagcaagtagggccatccagctgccagagtgctccacagggacttgaggcatgcagttgggaggtcctggctcggtttgctatatagggaatatataaggaacatcgaaattgtatacaaagatttgtacataaaaaatatacaaagacgcttcctaaagtaccaactttatatcatatgtttatacaatttaatttaaaaattcattttaaggaagacagataatttgaaagacttttgtttttcttgacttaattcatgaagtatcattttttgactgagtctccatttacttcattcttaatgattattgtcatccctttaaatctgtgcctttttcttcttgagcgaagctgtttgagtaaacctgttgaagagtgtttgtgtcttttgtgcttttttgttgttattaaaacaccaactaaaccttatagtcaagacaaggctctatgtttctgtacaaagctgtagttctttcttagtattatagttgccatgtttcttaaaatcaagtaaaaagacttatgagcttaaaaaaaagtgagtttgagagggaaatggaaaagtttccagagtatttctagtaatttatttccacattgaattgtgtatatgctttatcttgaatataaaataaaagtttattaaaaactttaaaaaaaaaaaaaaaaaaaaaaaaaaaaaaaaaaaaaaa

SEQ ID NO: 5434 - DNA, 3029 bp, Homo Sapiens
  NM_030794
acccaccctgcgccccagccctctacagcgcgggcgaagggcatcggcggggaagcggctgtggttgccagatctggcagtacagagccaaggtggcagggccgcgctaggacacggatggtcccagggggagggcaacaggaaaaacaagcactgacacaactgccccatttccccatgtcccctaaaagcaggttttcttgggctgaccagggcattttcactgtggtgtccgactggggcaactcgatctgcccgcggggactcaaaaaagcttgagctgcattttttctttgcgtccgggcggaccaaaaggcgaggtgaagggaacgagtgtttataagaaagtaaacttttgtgcagaatgggctggggacacctctgagttttgctgcccgcaacgtgacctttttagcgcggtcctggacgcgttccctcgcagccaacccgtcagtctcctcaggccttatcctgccctctctgaggtggccgcctgtgggcgctgcaaacgccacacttttgctctacgaagaacctcctcgcgactttccaaggtatctttcagatgaaggcattgaagcttgcacaagctctccagacaaagtcaatgtaaatgacatcatcctgattgctctcaatatctgagaacaattggcaagaaattcctccccagtgacatcaatagtggaaaggtagaaaagctcgaaggtccatgtgttttgcaaattcaaaaaattcgcaatgttgctgcaccaaaggataatgaagaatctcaggctgcaccaaggatgctgcgattacagatgactgatggtcatataagttgcacagcagtagaatttagttatatgtcaaaaataagcctgaacacaccacctggaactaaagttaagctctcaggcattgttgacataaaaaatggattcctgctcttgaatgactctaacaccacagttcttggtggtgaagtggaacaccttattgagaaatgggagttacagagaagcttatcaaaacacaatagaagcaatattggaactgaaggtggaccaccgccttttgtgccttttggacagaagtgtgtatctcatgtccaagtggatagcagagaacttgatcgaagaaaaacattgcaagttacaatgcctgtcaaacctacaaatgataatgatgaatttgaaaagcaaaggacggctgctattgctgaagttgcaaagagcaaggaaaccaagacatttggaggaggtggtggtggtgctagaagtaatctcaatatgaatgctgctggtaaccgaaatagggaagttttacagaaagaaaagtcaaccaaatcagagggaaaacatgaaggtgtctatagagaactggttgatgagaaagctctgaagcacataacggaaatgggcttcagtaaggaagcatcgaggcaagctcttatggataatggcaacaacttagaagcagcactgaacgtacttcttacaagcaataaacagaaacctgttatgggtcctcctctgagaggtagaggaaaaggcagggggcgaataagatctgaagatgaagaggacctgggaaatgcaaggccatcagcaccaagcacattatttgatttcttggaatctaaaatgggaactttgaatgtggaagaacctaaatcacagccacagcagcttcatcagggacaatacagatcatcaaatactgagcaaaatggagtaaaagataataatcatctgagacatcctcctcgaaatgataccaggcagccaagaaatgaaaaaccgcctcgttttcaaagagactcccaaaattcaaagtcagttttagaaggcagtggattacctagaaatagaggttctgaaagaccaagtacttcttcagtatctgaagtatgggctgaagacagaatcaaatgtgatagaccgtattctagatatgacagaactaaagatacttcatatcctttaggttctcagcatagtgatggtgcttttaaaaaaagagataactctatgcaaagcagatcaggaaaaggtccctcctttgcagaggcaaaagaaaatccacttcctcaaggatctgtagattataataatcaaaaacgtggaaaaagagaaagccaaacatctattcctgattatttttatgacaggaaatcacaaacaataaataatgaagctttcagtggtataaaaattgaaaaacattttaatgtaaatactgattatcagaatccagttcgaagtaatagtttcattggtgttccaaatggagaagtagaaatgccactgaaaggaagacgaataggacctattaagccagcaggacctgtcacagctgtaccctgtgatgataaaatattttacaatagtgggcccaaacgaagatctgggccaattaagccagaaaaaatactagaatcatctattcctatggagtatgcaaaaatgtggaaacctggagatgaatgttttgcactttattgggaagacaacaagttttaccgggcagaagttgaagccctccattcttcgggtatgacagcagttgttaaattcattgactacggaaactatgaagaggtgctactgagcaatatcaagcccattcaaacagaggcatgggaggaagaaggcacctacgatcaaactctggagttccgtaggggaggtgatggccagccaagacgatccactcggccaacccaacagttttaccaaccaccccgggctcggaactaataggaaaagactctttgtgaagaaacgagccagtgactgaaacaccctggtggaaacctgttgacagaccttccactttctcttcagaataagtagctgtggtggatattattatttgaagaaagaaaaaacagattttagggtggaaaaaacagtcaactcacacaaagaatggaaaaaaatactgagttaaattaagcaaataccttttacaagtgaaaggaagaatttttcttctgccgtcaataaaaccattgtgctattattgttttaaaaaaaaaaaaa

SEQ ID NO: 5435 - DNA, 2962 bp, Homo Sapiens
  NM_030796
ggggcggagcgcagccagggctgcgcggcgcgccccggctcccgcccgctcccagccgggccccccagcggtcggcgggacggctcccggctgcagtctgcccgcccgccccgcgcgggggccgagtcgcgaagcgcgcctgcgacccggcgtccgggcgcgctggagaggacgcgaggagccatgaggcgccagcctgcgaaggtggcggcgctgctgctcgggctgctcttggagtgcacagaagccaaaaagcattgctggtatttcgaaggactctatccaacctattatatatgccgctcctacgaggactgctgtggctccaggtgctgtgtgcgggccctctccatacagaggctgtggtacttctggttccttctgatgatgggcgtgcttttctgctgcggagccggcttcttcatccggaggcgcatgtaccccccgccgctgatcgaggagccagccttcaatgtgtcctacaccaggcagcccccaaatcccggcccaggagcccagcagccggggccgccctattacaccgacccaggaggaccggggatgaaccctgtcgggaattccatggcaatggctttccaggtcccacccaactcaccccaggggagtgtggcctgcccgccccctccagcctactgcaacacgcctccgcccccgtacgaacaggtagtgaaggccaagtagtggggtgcccacgtgcaagaggagagacaggagagggcctttccctggcctttctgtcttcgttgatgttcacttccaggaacggtctcgtgggctgctaagggcagttcctctgatatcctcacagcaagcacagctctctttcaggctttccatggagtacaatatatgaactcacactttgtctcctctgttgcttctgtttctgacgcagtctgtgctctcacatggtagtgtggtgacagtccccgagggctgacgtccttacggtggcgtgaccagatctacaggagagagactgagaggaagaaggcagtgctggaggtgcaggtggcatgtagaggggccaggccgagcatcccaggcaagcatccttctgcccgggtattaataggaagccccatgccgggcggctcagccgatgaagcagcagccgactgagctgagcccagcaggtcatctgctccagcctgtcctctcgtcagccttcctcttccagaagctgttggagagacattcaggagagagcaagccccttgtcatgtttctgtctctgttcatatcctaaagatagacttctcctgcaccgccagggaagggtagcacgtgcagctctcaccgcaggatggggcctagaatcaggcttgccttggaggcctgacagtgatctgacatccactaagcaaatttatttaaattcatgggaaatcacttcctgccccaaactgagacattgcattttgtgagctcttggtctgatttggagaaaggactgttacccatttttttggtgtgtttatggaagtgcatgtagagcgtcctgccctttgaaatcagactgggtgtgtgtcttccctggacatcactgcctctccagggcattctcaggcccgggggtctccttccctcaggcagctccagtggtgggttctgaagggtgctttcaaaacggggcacatctggctgggaagtcacatggactcttccagggagagagaccagctgaggcgtctctctctgaggttgtgttgggtctaagcgggtgtgtgctgggctccaaggaggaggagcttgctgggaaaagacaggagaagtactgactcaactgcactgaccatgttgtcataattagaataaagaagaagtggtcggaaatgcacattcctggataggaatcacagctcaccccaggatctcacaggtagtctcctgagtagttgacggctagcggggagctagttccgccgcatagttatagtgttgatgtgtgaacgctgacctgtcctgtgtgctaagagctatgcagcttagctgaggcgcctagattactagatgtgctgtatcacggggaatgaggtgggggtgcttattttttaatgaactaatcagagcctcttgagaaattgttactcattgaactggagcatcaagacatctcatggaagtggatacggagtgatttggtgtccatgcttttcactctgaggacatttaatcggagaacctcctggggaattttgtgggagacacttgggaacaaaacagacaccctgggaatgcagttgcaagcacagatgctgccaccagtgtctctgaccaccctggtgtgactgctgactgccagcgtggtacctcccatgctgcaggcctccatctaaatgagacaacaaagcacaatgttcactgtttacaaccaagacaactgcgtgggtccaaacactcctcttcctccaggtcatttgttttgcatttttaatgtctttattttttgtaatgaaaaagcacactaagctgcccctggaatcgggtgcagctgaataggcacccaaaagtccgtgactaaatttcgtttgtctttttgatagcaaattatgttaagagacagtgatggctagggctcaacaattttgtattcccatgtttgtgtgagacagagtttgttttcccttgaacttggttagaattgtgctactgtgaacgctgatcctgcatatggaagtcccacttcggtgacatttcctggccattcttgtttccattgtgtggatggtgggttgtgcccacttcctggagtgagacagctcctggtgtgtagaattcccggagcgtccgtggttcagagtaaacttgaagcagatctgtgcatgcttttcctctgcaacaattggctcgtttctcttttttgttctcttttgataggatcctgtttcctatgtgtgcaaaataaaaataaatttgggcaaaaaaaaaaaaaaaaaaa

SEQ ID NO: 5436 - DNA, 2386 bp, Homo Sapiens
  NM_030798
ggctgccgtcagcgcctttgccttcaaccaggagtaaaagtggccgtagcctcttccggcgaggactggtgttaagggtcacgcaagatggcggcgcccagaggctgctgaggcgcggaacggaggatggcgctggtggcgttggtggctggggctcggctggggcggcggctgagcgggccggggctggggcgagggcactggacggcggccaggcgctcccggagccggcgcgaagcggcagaagccgaggcggaggtgcccgtggtccagtacgtgggcgagcgcgctgcccgcgccgatcgcgtcttcgtgtggggcttcagcttctcgggggcgctgggcgtgccttcctttgtggtgcccagctccgggcccgggccccgcgccggcgcccgaccgcgccgcaggatccagcccgtgccctatcgcctggagctggaccaaaagatttcatctgctgcttgcggctatggattcacactgctgtcctctaagactgcggatgttacgaaagtctgggggatgggactcaacaaagattctcagcttggatttcacaggagccggaaagataaaacgaggggctacgagtatgtgttggagccctcacccgtctccctgcctctggacagacctcaggagacacgggtgctgcaggtctcctgcggccgagctcactctcttgtgttgactgacagggaaggagtcttcagcatgggaaacaattcttatgggcaatgtggaagaaaggtggtcgaaaatgaaatttacagtgaaagtcacagagtccacaggatgcaggacttcgatggccaggtggtccaggtcgcctgtggtcaggatcatagtctgttcctgacggataaaggagaagtctattcttgtggatggggtgctgatgggcaaacaggtctgggtcactacaatatcaccagctcgcccaccaagctgggtggagacctggcgggagtgaacgttatccaagttgccacctacggtgattgctgcctggccgtgtccgccgacggaggactttttggttggggaaactcggagtacctgcagctggcctctgtcactgactccacacaggtgaatgtgccccgctgcttacacttctcaggagtggggaaggtgcgacaggctgcatgcggtggcacgggctgtgcagtgttaaacggagaaggacatgtttttgtctggggctatggaattcttgggaaaggtccaaacctagtggaaagtgccgtccctgaaatgattccacccactctctttggcttgacggagttcaacccagaaatccaggtttcccgcatccgatgtggactcagccactttgctgcactgaccaacaaaggagagctgtttgtatggggcaagaacatccgagggtgcctgggaatcggtcgcctggaggaccagtatttcccatggagggtgacgatgcctggggagcctgtggacgtggcatgtggcgtggaccacatggtgaccctggccaagtcattcatctaaacctccctcacctgcttgggcggccccgtcccgggaaccactggcactccttggcagaggccagcgcgtggccagccccccggggttcttggatggtggtggcggaggaccctgcgtgcagtgtgacgctctgtcctgaatcccttagcgggtacctaccaggaggatcagggcaaggtccctctccagctgcaggtgaggcctgcggaactcagcttggatggcagcctttggtgggccgctgtggcccgcacgtctctgttctctccaagtaacatgcgacggtgtctggtgtcacgtctcgcctgagaagcccgtcttaggaaagcttagcttgaacacagtgctcgggaggtttctgctctgtctgtcatggcagtctcttggtttgtgtctggccaaggccatgcgtgtgcctcggaccgagccccagcttaggcgagggagtcaggctggcttcggccctcggttttcattcaggccaccctgctcatggcccttcctggccgcctgccacaccgcaagctcgctggggggacactagaagcaccgtggcctgggattccatctggagctgtccgcaggcaccagccccagcctcccaccacgctcactgcctggcttggaaaagttaagaagcccctcaggaagagaatcgaggctaagttcctctgcgccgagggccccgagcatatccgccaaggctcagctgcagtgccaggcggaggaggaagatccagaaattgtgaacaatgtttgatttagtagcgtgacttgcctttccctttaaaaacatcttttacaaatctgtcttggaataaagtctattttctgccttttggtttttaagctctgaaaaaaaaaa

SEQ ID NO: 5437 - DNA, 2538 bp, Homo Sapiens
  NM_030800
tgcctttcgctgcttgttggggttacaggtgaaggggttatgggtgaagaacaacccagggccagcgcttggccttcccgccaccgtggcggccgccccgcgctgtctgtgaggcgccagttccggggcgctgctcccggcctcccctcgctctgaggctcggggtccccagctccgcgtaaactgcacgatttcgccctctgctcagctcccctctgccccctctttccaagagagacttccagatcccacattttcttgactgatttttaagcatttcttcgtttatagctgtctgtttgcattctgattgggaacactgggatcattttcatcatgccgacagtggtggtaatggatgtatccctttccatgacccgacctgtgtctattgaggggtccgaggaataccagcgtaagcacctagcagcccatggtttaacgatgctgtttgagcacatggccacaaattacaagcttgaatttacagcacttgtggttttttcatcactttgggagttgatggtccccttcacgagagattataataccctacaggaagcactaagtaatatggatgattatgacaaaacctgcttggggtctgcattagttggtgtttgcaatatcgttcagcaagaatggggtggtgcaattccttgccaggttgtcctggtgacagacggctgtcttggcattggtagagggtcactgcgacattccctagccactcaaaatcaacgaagtgagagcaacaggtttccactaccttttcctttcccatctaagttatatatcatgtgcatggcgaatttggaggagctccagagcaccgattccttggaatgccttgaacgtctcatagatttaaacaatggtgaagggcagatttttactattgatggccccctgtgcttgaagaatgtacagtctatgtttggaaaactgataggtttggcatatacgcctttccatgctgttctcaagtgtggccacctaactgctgatgtacaagtcttccccaggccagaaccttttgttgtagatgaagaaattgatcctatccctaaagtcattaacacagatttggaaatagtgggatttattgatatagctgatatctcaagtcccccagttctgtccagacatctggtcttacctatagcacttaacaaagaaggtgatgaggtgggtactggcatcactgatgacaatgaagatgaaaattcagccaatcagattgcaggcaaaatacccaacttttgtgtcctgctccatggtagcctaaaagtggaaggaatggtagcgattgttcaattaggtcctgaatggcatggaatgctctactcccaagctgacagcaagaagaaatcaaacctcatgatgtctctctttgagcctggcccagaacctctcccatggctagggaaaatggcacagttgggtcctatttcagatgctaaagaaaacccttatggcgaggatgacaataagagtccattccccctgcagcccaaaaacaagcgcagttatgcccagaatgtgactgtctggatcaaacccagcggcctgcagacagatgtacagaagattttaagaaatgcaaggaaactacctgaaaaaacacagacattctataaggagctgaaccgtttgcgaaaggccgctctagcctttggtttcctggacctgctgaaaggggtggctgacatgctggaaagggaatgcacactgctgcctgagacagcccaccctgatgctgcattccagctgacccatgctgcccagcagctcaagctggccagtaccggcacctctgagtatgccgcttatgaccagaacatcacacctttgcacacggacttctctgggagcagcactgaaagaatttgaaactgacttttggagctttccttcttttttcatttcaactgaaaatgctttaggtaaaaacctttccagtatgttcacctctagaatagccacccaaagaccttcctgaggctgcctcagaagcaccacttgctgttttgaatgactctactagtatgagaaggatgtgaaggtggttggctggttgggctttaacttcctgggattcataatttttaagcttggaagatagctgctgttcccatgatgggcacatttcctgagaagcttgaatgactgatgagcatagagcacccctgccttcctcaggaaacctgaccggcaggggctctctggcttcctgaaagcttcacctcttccctcgtttatatctcaactgtaagggcattttcaagcttctgttcatggaatgagcaactcagactgtctggagcttgctgagtacaaacacaccaccactaagtttcagaactttccttaggacttgggcaaaatgtggtggtaactcttaagtgcttttggtatctcttgagattctaacttttaaagagcaaccattaatgtgtaaaatgattcctattattcaaggtttttttttaatgaaaataaaatatttgattttctagaaaaaaaaaaaaaaaaaaa

SEQ ID NO: 5438 - DNA, 3411 bp, Homo Sapiens
  NM_030803
actagcgagcgccctgcgtaggcaccggctcctgagcccgtgcttcgggtgagggggcgggtcttccggccctctcgaaaatcatttccggcatgagccggaagaccgtcccggatggcctcggggactgccagtgtgtggaggtgagctccgggattgccggcattcccgcttctgctggttgcttcatgctgcaggctgcggccgtcagccctcgctcgcattggtggcgctgaggtgccggggcagcaagtgacatgtcgtcgggcctccgcgccgctgacttcccccgctggaagcgccacatctcggagcaactgaggcgccgggaccggctgcagagacaggcgttcgaggagatcatcctgcagtataacaaattgctggaaaagtcagatcttcattcagtgttggcccagaaactacaggctgaaaagcatgacgtaccaaacaggcacgagataagtcccggacatgatggcacatggaatgacaatcagctacaagaaatggcccaactgaggattaagcaccaagaggaactgactgaattacacaagaaacgtggggagttagctcaactggtgattgacctgaataaccaaatgcagcggaaggacagggagatgcagatgaatgaagcaaaaattgcagaatgtttgcagactatctctgacctggagacggagtgcctagacctgcgcactaagctttgtgaccttgaaagagccaaccagaccctgaaggatgaatatgatgccctgcagatcacttttactgccttggagggaaaactgaggaaaactacggaagagaaccaggagctggtcaccagatggatggctgagaaagcccaggaagccaatcggcttaatgcagagaatgaaaaagactccaggaggcggcaagcccggctgcagaaagagcttgcagaagcagcaaaggaacctctaccagtcgaacaggatgatgacattgaggtcattgtggatgaaacttctgatcacacagaagagacctctcctgtgcgagccatcagcagagcagccactaagcgactctcgcagcctgctggaggccttctggattctatcactaatatctttgggagacgctctgtctcttccttcccagtcccccaggacaatgtggatactcatcctggttctggtaaagaagtgagggtaccagctactgccttgtgtgtcttcgatgcacatgatggggaagtcaacgctgtgcagttcagtccaggttcccggttactggccactggaggcatggaccgcagggttaagctttgggaagtatttggagaaaaatgtgagttcaagggttccctatctggcagtaatgcaggaattacaagcattgaatttgatagtgctggatcttacctcttagcagcttcaaatgattttgcaagccgaatctggactgtggatgattatcgattacggcacacactcacgggacacagtgggaaagtgctgtctgctaagttcctgctggacaatgcgcggattgtctcaggaagtcacgaccggactctcaaactctgggatctacgcagcaaagtctgcataaagacagtgtttgcaggatccagttgcaatgatattgtctgcacagagcaatgtgtaatgagtggacattttgacaagaaaattcgtttctgggacattcgatcagagagcatagttcgagagatggagctgttgggaaagattactgccctggacttaaacccagaaaggactgagctcctgagctgctcccgtgatgacttgctaaaagttattgatctccgaacaaatgctatcaagcagacattcagtgcacctgggttcaagtgcggctctgactggaccagagttgtcttcagccctgatggcagttacgtggcggcaggctctgctgagggctctctgtatatctggagtgtgctcacagggaaagtggaaaaggttctttcaaagcagcacagctcatccatcaatgcggtggcgtggtcgccctctggctcgcacgttgtcagtgtggacaaaggatgcaaagctgtgctgtgggcacagtactgacggggctctcagggctgggaggaccccagtgccctcctcagaagaagcacatgggctcctgcagccctgtcctggcaggtgatgtgctgggtatagcatggacctcccagagaagctcaagctatgtggcactgtagctttgccgtgaatgggatttctgaagatttgactgaggtctctcttggcctggaagaataacactgaaaaaacctgacgctgcggtcacttagcagaggctcaggttcttgccttgggaaacactactagctctgaccttccatacctcacttgggggagcacagggccccgctgggcctcctcaccaacggcagtgccaaaatcagcccccacatcaaggtggtgttctctgtgctttctctcgtccttccaaagtcggttctggcctaacgcatgtcccaacaccttgggttcatttgcccggtgaactcactttaagcattggattaacggaaactcccgaactacagacccctccctggtgggttgcatgaatgtgtctcattactgctgaaatgtcctcacatctctttcactgttcttcagagctttctggctctctttcccccacaaaattcgacatatttaaaaatctccgtgtggctttaaaaaatggttttttgtttttttgtttttttgaggtgggagaggatgtgtgaaaatcttttccagggaaatgggttcgctgcagaggtaaggatgtgttcctgtatcgatctgcagacacccagaaggtgggtgcacactgcatgcttgggggtgccaagggattcgagacctccaacatacttgtctgaaggtggtgattctggccatggcccctctgccaagcctgtgtgcgatgcccttggtgctttagtgcaagaagcctaggctcagaagcacagcagcgccatctttccgtttcaggggttgtgatgaaggccaaggaaaaacatttatctttactattttacctacgtataaagttttagttcattgggtgtgcgaaacaccctttttatcacttttaaatttgcactttattttttttcttccatgcttgttctctggacatttggggatgtgagtgttagagctggtgagagaggagtcaggtggccttcccaccgatggtcctggcctccacctgccctctcttccctgcctgatcaccgctttccaatttgcccttcagagaacttaagtcaaggagagttgaaattcacaggccagggcacatcttttatttatttcattatgttggccaacagaacttgattgtaaataataataaagaaatctgttatatacttttcaaactccaaaaaaa

SEQ ID NO: 5439 - DNA, 2425 bp, Homo Sapiens
  NM_030805
gggcgggcttttgatgaagggtcgttggtgggaaagatggcggcgactctgggaccccttgggtcgtggcagcagtggcggcgatgtttgtcggctcgggatgggtccaggatgttactccttcttcttttgttggggtctgggcaggggccacagcaagtcggggcgggtcaaacgttcgagtacttgaaacgggagcactcgctgtcgaagccctaccagggtgtgggcacaggcagttcctcactgtggaatctgatgggcaatgccatggtgatgacccagtatatccgccttaccccagatatgcaaagtaaacagggtgccttgtggaaccgggtgccatgtttcctgagagactgggagttgcaggtgcacttcaaaatccatggacaaggaaagaagaatctgcatggggatggcttggcaatctggtacacaaaggatcggatgcagccagggcctgtgtttggaaacatggacaaatttgtggggctgggagtatttgtagacacctaccccaatgaggagaagcagcaagagcgggtattcccctacatctcagccatggtgaacaacggctccctcagctatgatcatgagcgggatgggcggcctacagagctgggaggctgcacagccattgtccgcaatcttcattacgacaccttcctggtgattcgctacgtcaagaggcatttgacgataatgatggatattgatggcaagcatgagtggagggactgcattgaagtgcccggagtccgcctgccccgcggctactacttcggcacctcctccatcactggggatctctcagataatcatgatgtcatttccttgaagttgtttgaactgacagtggagagaaccccagaagaggaaaagctccatcgagatgtgttcttgccctcagtggacaatatgaagctgcctgagatgacagctccactgccgcccctgagtggcctggccctcttcctcatcgtctttttctccctggtgttttctgtatttgccatagtcattggtatcatactctacaacaaatggcaggaacagagccgaaagcgcttctactgagccctcctgctgccaccacttttgtgactgtcacccatgaggtatggaaggagcaggcactggcctgagcatgcagcctggagagtgttcttgtctctagcagctggttggggactatattctgtcactggagttttgaatgcagggaccccgcattcccatggttgtgcatggggacatctaactctggtctgggaagccacccaccccagggcaatgctgctgtgatgtgcctttccctgcagtccttccatgtgggagcagaggtgtgaagagaatttacgtggttgtgatgccaaaatcacagaacagaatttcatagcccaggctgccgtgttgtttgactcagaaggcccttctacttcagttttgaatccacaaagaattaaaaactggtaacaccacaggctttctgaccatccattcgttgggttttgcatttgacccaaccctctgcctacctgaggagctttctttggaaaccaggatggaaacttcttccctgccttaccttcctttcactccattcattgtcctctctgtgtgcaacctgagctgggaaaggcatttggatgcctctctgttggggcctggggctgcagaacacacctgcgtttcactggccttcattaggtggccctagggagatggctttctgctttggatcactgttccctagcatgggtcttgggtctattggcatgtccatggccttcccaatcaagtctcttcaggccctcagtgaagtttggctaaaggttggtgtaaaaatcaagagaagcctggaagacatcatggatgccatggattagctgtgcaactgaccagctccaggtttgatcaaaccaaaagcaacatttgtcatgtggtctgaccatgtggagatgtttctggacttgctagagcctgcttagctgcatgttttgtagttacgatttttggaatcccactttgagtgctgaaagtgtaaggaagctttcttcttacaccttgggcttggatattgcccagagaagaaatttggctttttttttcttaatggacaagagacagttgctgttctcatgttccaagtctgagagcaacagaccctcatcatctgtgcctggaagagttcactgtcattgagcagcacagcctgagtgctggcctctgtcaacccttattccactgccttatttgacaaggggttacatgctgctcaccttactgccctgggattaaatcagttacaggccagagtctccttggagggcctggaactctgagtcctcctatgaacctctgtagcctaaatgaaattcttaaaatcaccgatggaaccaaaaaaaaaaaaaaaaaa

SEQ ID NO: 5440 - DNA, 10308 bp, Homo Sapiens
  NM_030806
ccctccctcgctcgctcctcgcaagctcccgctcgctccctgcccactcccggggggacgttccgtgccgcggccgccgcggccgctgcttctttcacactttagttgggagctgcgcgccgcgctcagttactggagagctggccgcgcgccgccgcctcccgcacgcttgcacgcgggcccggcttcggggttttgggttcttactccaagcggcggggaggagggggagccccggacacactgtggggaggaggaggaagaagaggaggagggaggaagaaaaaagacgaggaggacaggggcggggggcgggaggcttgccaccttcagcccccccgcgaacgcccaaggtgcacacatcttgaccaactcagcagcaaggtggattttctttgtgtttaaagaaaaaaaatgtccctgtgtctgtagagatgatttgcagttcagcccggctgaagctgaccgaatgagactatgggctgtgcctccgccaagcatgttgccactgttcaaaatgaagaggaagcccagaaagggaaaaactaccagaacggagatgtgtttggcgatgagtataggatcaaaccagtggaagaggtcaaatacatgaaaaatggggcagaagaagagcagaaaatagcagccaggaaccaagaaaacttggaaaaaagtgccagctcaaatgtaagacttaaaactaataaagaggttccgggattagttcatcaacccagagcaaacatgcacatctctgaaagccaacaagaattcttcagaatgctggatgaaaaaattgaaaagggtcgggattactgttcggaagaagaggatatcacatagcaccaattttaccactcaaaccaggagctactactgtgtaaataggttacaccccagttgaaatctttgcaaaggtcggttctattcagcgaacagcactatagcaaaagaagatcgttccatattgtacgccccattaaattacagtgtttcttaatgaacttgcaaaggaatattgctaaaaacaaacaaaaaaaactgttatcgaactttctttgttgctgctagttaaaacttgttgcaacttttcacttctcttgtgtccaggtatgcagcaaaattctgcaatttcaccttaaagatactgttggttttacagatgctctccaacctattttctataagatgaggtagtggtgaactcagataacaaacttctcttctaaactggttctgcttctaagacaagcatctcctgccctctctccttcctccccatctctcgcacgcagtctagagatggactgagccttgcttctcactggcagtgttgagctttggagatgggatggttgctatgccaagccttgtttctctgctcagaagaagtagagaagctattatcaattaaaagcatgctgtgatgtgactcctggaagtgacgtaggagtgagtggcaggttgtttgatttaataggtatcttaatcaagaattaagcttgcaacattggctttgctcagatgcagatggaagtgtgatcacaatcattttgaatccctcttcctcacttttttttctaagaaaataaacattttactgtttttatggatccttgtcttctcccattcatccagctcagtgttttaagatgatcctgggtgcagaagttgagccctcctttgcattgacactgataattagcctatagggctccctacccttccattaagaatctaccaagcattagcaaggctgaaagtggtctaagaggtgaggggacatcctatgactttttaggaaggcctgaaaccaccttgttacctttcattttgttagcaaataaaccatcctattttgtaactctcccccttcaaaatgctacatgagccttgccacttcctttttctcttacttccagcacactagacatagcaaaagtgtttgcctactcaaaaacataatacttttatgctgatgatggtatttggagatgtgaaagccaaaagcccctggcagtggtggggaatgttgactgagtgttcagcagagtttatttttccatactatatgaagagaatgatctcttctcaaagacagaagtgatatttttaacaaatattgtcacaagtaaatagcaatcaaaaggagaaaataacttttgtatttttttaatgtgtttgatagctttgacgagggttctctttgttactttcaggggagggcatcctattaaatgccacgccagcagtccgggtctgggtttgtcccacaaaatcacaggagcactgtatgttcctctcttttggagttgtgactttgaagggcctcaatattagccacactgccgcctgcagaaggtggagagttaagatgttctatgtcaatttgctcttgccgaaaagatgagcctcgattttaaaatctatccacatccaactgatggcaccattgatgtgcaaataatgagattccctatctccttttagacctgggacggcaaaagggaagggaaggaaacttagcagagtgctattgactatagattcacatattagcaacaaaatcccgtaattcttttggccaacagcagctattttggggagcagctgtggctgttacataaatagagatgcagccaaaattttaggccttttatcctgcttctagcagaaaaatgcagggagagtcaagtagtctagggtttcaggttgcctcccctcatatggtttttggccaagtgactaaaacagttttccacaactgtaaacaaactgctaagccccacctcaaacttgttcactggggactttgcttaccgttctgtgggtgaccttttccgggatttcttgttcttatcaagcaagaattaagcacatgctaaacgtcttccatttgacttctctactcggtgtctcagacagtgtcttcccagaaaaccaccaccctctacccaaagatgaaacatgctcatgtcatttttctcatggtcacatttaacagttttgacatgttatacttgcgcatagatccaagcgtttcttgggaacctgacttttgagtgtttaataaagccggaagtggtgttgccctgaaccagcagattttcacctgggttctggctccggtgtttaacactggatacatctttgatgtgcgaaagtgagttcatcttcagacacatttggtacatccagaaatagatccaagaaatggggtggttgagtgggtccgcacgaaatgcttgattatgtcagcaacacccaacactgtctgttttccatttgttggttttaatcataaaattgtcaagtgattcgtgtttgtactttatttttttgtgccttctgaaaggatctaaaacaaaaatattttgcctttttttccccacgtgtatctgaacattaagcagattggctcagacacaatgaaaaggataatccaatgtacgtgctggtgcactctgctagttgttatctctgtagggctcaggaagctggaaggaggaagggagggtaagtggcctggtgagtggaggtagaaaaatgatgagaaatgaactgagagcattaagcagagagggttgataggctggccgtgtccggggtgaaattggaaatccagctgcctagtggccagtgggtggggcaagactgtcaacgagatttacagctggcttacacatgccttatgtcctctgagttgtagagttgtaaaagttcagcagtgtgtgcacagctttcttttggttggcagagattcaggatcatggagtactgctctcataattgaagacgtgtttgttattggcagagaaccttaaaaaaggcctttacctcagcgatgcttcctagccccaggcttgcagagaacacagagtggtgttgtggtctatttagggacaaagaaggtataaagtccagagatgagaaaactgggtcagccctcagaaactgcagcagccacgcacacagaagcctgctggaagacaggtctctctccgtccacagtgcccatcatctgagcctgggctgggatgactcaacttagcaaagacggacccaggaggagtgctggttcttcagtctttgtactggccccatcctctcctcactgtaatgtgaggaagcacctctgtgtcagggctcacctgggcatccaaagcggccacgcccacaatccgacagcccccaggagcaggtccagggatgatgcagcccccttcttggtcccatgtgatgtcatcctgctttgttatcttcttataactttatcctgctataactttatcctcttcccagcctcatccctgtttttctgttagggcaagactcttccataagcctgctaaaaaacagagatgatacctcttacaaactttacctcatagcctgtgaagcaggttggcatgtggattacaagtcctgctttgacactgggcaagaatttaagattgttctatctctactagtcatagaaaagaaacattgttaaacatgttgagttttaaaggaagaaatattttcaaattcttaatccaagaaaatactgagttggaatcttagacttcgggactctgacacgttctttatgaaaggcaaaataattggtatctaaagttctctccttcctgcctcccctaaagaaaaaggatattagattgcacactataattttacataagatctgccttccacacttccctgctggaaggcattctcagagctttatgtcttcgtacctctcagagattggactttttcttgtttaaaaccccaaccaaaaaaaataataaggcatgattggtggggagggaatgtgtatttaggggcataataaaaaggtggctcgaagcaggaactttggcctcatggtgtcatgggtggatgcctggactccagtgtgcctgtgaggggctgggttaggcagtcggctgtcacactcacatgtgcctgcaataaaccttttggaatttcatgaacgaggtctatgaattgccttttgccaatgaatggatgtatttttccaaggggggaatagtatccttgactttggcagtcacctttttgtatgtctctagaaaggggtcaaaaaactatggtaaagatgaggcttatgagtgaatacctctgggacaaaccttaggactcacaagctatgccatgtttttcaggagactcttgtaccttatctggaatctaatcttgggagaagaggaaaaaggagctaatatttgtcatttatactcactctgtgccagatactgtgctaggcattttataattgttttgtgtcatcctcatgataatcctgtgaagtagatctattacccccgtgttctaaataatagatcttaagtgtggaatgcatctatccaacataaatgcccatgttgaaagaaggaaagatgtcattcaagtatttttcaaattctttttattatgactatgcccttcgcaacactgtgaaaacaacccctgggggcatctgccttccagaatctctctctggcttctcaccagcttggtttcctcatggggagtgttttatttggcctcccctatctgagctgcacacacaccaggggaggccactggctaacagtaggacttcagtgccctgaggaaaaggctttgggaatttaggcacacgtttctctccttggaatccttctagcatctggaaaaggaacctggtatttctgcagttagataccagatgcaaccagaacaggctttcgagtgctgtgatttctttcctgggttcccaagtcttgttgtttcatcacaaactgtatctttttaaggttaaaagtcttgaccttcatgggggtctgggacaatccgatctccaagcatggaggaaaggcaatgcctggaccactgacttgcattgaaatcctttcttgtgggctagggtttgatgtctctttttcatctttggactggggatctgcatcttccaggtccatttaagcactgaaactagatgcaaatctctttcgagaccttacatgttttagatagtcatgtaatgacttggatagacatttaaataacttgttccaaggtcggaagagcccaagaactcctcagagttcctcttcttgcttcttgaatcacatcctctaaagatgactcatgtctccatagcaactgttaaaggtgctgcctagacgggacccgctcccacctttacttactttgctcgaaggaaccaaaacaatgtccttgtgtaaaggggctgtcatatccagttttcctttgaaatctggcccccaagatcctgcttctttctaacctggcagctgtcatgtcccttcaagatgatgtgggaaatggcccttacaacttgggaaccacagaaattgctgtatttcgggaagattcacctctaaactgaaggcttcattctgatagtgtctgccctctctaccctgatttcgcccttctttgcttccatttttagcccaaggctttgaatttgattgagtaagacttagaggcagtataaagaacaccataaacttaggcagaggtcccttagggtctctagagttgaaaataattctacagccttagggggacctcttggcattgactctaaagggagagaatagcccctgtgtcctggcatttcagtctagaccttcaaggactgttctctcttgacaggcaagcaagcaaagaaagttttgcaatagatttcaagccagtttttccattcaaaccaagatgcaaattcataaaattactcttttcctggaatagatccaggcagctgccttattagaactttagattcggatctattttcttaacacacatacacatacacgcgcatacatacatatacagagagatacgtggagaaaggaaatttactctatcattgcaatacttcaagaaagagctgtattttgcctttctgtaatctccaagatagtgtctaggaaagtaatagtataactatagggataccgaaacaggaaaaaccagccatcactcttgagaaagtttgagttcgactcacatgggagaatcgaggtctgctactcgtcttgctttgtgccccatctgtgcctggatgccctactacatctgcttgactcgtctgggctgctagccggggtgttgtggctgacatcctttcctggccttacacacataatagacacatccctaacggcgtgtgcctggtccagccacatacagccaccacatgtgtcacacactgtccccctcatccatgtggacttgactggcatttcagcagctccactgggatgctctaaccccagtgtgtggagttggggtcccttcatctaggttgacccaggtatagcatttttagcattgcctttccagtcttgatgattcattcattgaactcatttatttctggagcccctggtacactccaggcactgcgctaattgccagcaaagcacaactgaactaaatccaccttcaaggaacctagccataacgagggaggcagcatggaagtaccctacaggggaaagtcctgagtgctgtgggagcatctcaccgtggcagccagcccagttttggcaatcaggggcttcctgaaagaggtgacatcaaagcccggatgtgtcagaggactgagggagagtgttactaaaggactttcaggctgagaggatagcacaggactcagcccaaaggagggccagtgtggactgtccagggccagcctgcagtacagaggctggagcttggacttgtagagggagagagaagagcaagggacgtggacggggcagtgagccaggctagccacagagggttcccggggctttgctggggattcagggagcataaataagagctttaggtggtgctgtgtcctctgcagcccactgctgaggtcctccagacaggtaaggtgtggtcacaatcagggccggggtttccctgctcactgcggcagtgcaggggtgcttgctgagatgattcatcccagggtgtcctctgtcccttacccagccccaactcctcttcctctgccaaaagctatttgaattcaaggactttaacctgggccggatctggtttggagacaaaggggacagctctgggtcagcatgaccttctttagagccactaaggcgaaaaataccgtttgggaccaggctggcctagacccagggatgagaatgcaccctaaaataaatatacgggaagcagcagagggcttccctgtctagtgtgtgatcctaactaaaggcagctctcttggacagccttcccctggattaggtcacatacacctggtggccaagcctctgctgggtcccaaatacacacccgagtcctgccaaagaaaggagatttttaaaaagcacagacaaattgtatgcaagtggaaaatacccataggcctagacagctgtggagggaagacctcgtgggtacctggaggctgccagagctgggagctctgcaggtatgagtcagggaaggctcagagacaagcagaatctctctatggagacaacttgcagtgccttttaggttttccaaataacctcggagttcagagcattgggtttttttctcccctccccacccccagaaaaataattagaaaaatgtttaggagaaaggaaaagaattagatgcatcagaataccagctataagccaacactgtttccagaaactcaagaaaaagctcaaacagaagacagttcccctgagaggctggaggcgttggtgctgaaggcaattttcctagctaaggggcactgggccttgctgcaccttggggctgaccttttttgcaaaacacccacccctgccctcctggcatactcaacagcaacgccagctttctggacccttggaaagatgttagctcaaacacccactttttccagatcttcctcttgctcttcactgaggaatttgtaattctgaggctagcgatgcccactcggatattccgcaggcccaggtgtttagattagaatttgtccagcggtaatcctgatgctggaaaccaacaaacatttggcctcatattcacccatttaaaaactagagcccctggcaggtccccttagggccatgtgttcatggaatataagccaagtttgccttaggcttgttcatggaatataagccaagtttacctctccccattttctgccctggcccacttcccactcacctccacctcattgccaggaagggatcaaaatgcctccatgccagttgttaatggctacatatttgcccttcccaagggtatttgcattttatttaggaacatggccttatattcaaggaaaatctagcatcaagattacgaggcatcacctctcaatcaggtctgggaggtatcttggggcattgctcttctgaacacctgcagaggcttcctcaggtgagtgtgggagcccggaagggtggcctccctaaccactctgcctgcacatgaattctccaaagcagtgggcccccatctgtttcaattacacatgcctgtcagcaaaaacttcgtgagatgcactctctctgtgtgtttattaatttatttaaagcatatatccctttacttttgtactactatattaggcacattataaaaagtatacagcatagaaactttaaatgaataagacacaaaatattataaacagaggttctggcattttctctctgaactcctgagggggaccttgggcacctcctggtatgtgcacaccccactttgaacacccttgctttagtgcaaatcagcacgcctaaatagcatcccaaaccactgtgcgacatttggcctgcagaataagaaagtcctaaggcagaatccccaggaacttcaaatctgggagatgaggaaagaaaactcactcacaaacaacataaatgtaaataattcaaaaccctaaaggagagctgtccctagacagtagtggctacaggtgctaagcaaaagtcaggtacactggacagagccatgcgattgattgttcatcttccctctctgggtctccagaaaaggacactggcaatatccccagctctctcctgattggaattctttgaaccctcgaagtgctccagcagtactaccccccacgtagcagtgggcccatgtcgcttgaatattatttttgatttgaccaccaagatgtaatgatgattctattccattttgaaaagggtctgagaaagtgtacaggtctaattatatatacatatttatacatgtgtatttttgtttattgttacattttgacattggactttctattaaataatttttaagagttgg

SEQ ID NO: 5441 - DNA, 1062 bp, Homo Sapiens
  NM_030811
tggcgtcccggcaccgcggccgcagtgaggagactcggccatgctacgcgcgctgagccgcctgggcgcggggaccccgtgcaggccccgggcccctctggtgctgccagcgcgcggccgcaagacccgccacgacccgctggccaaatccaagatcgagcgagtgaacatgccgcccgcggtggaccctgcggagttcttcgtgctgatggagcgttaccagcactaccgccagaccgtgcgcgccctcaggatggagttcgtgtccgaggtgcagaggaaggtgcacgaggcccgagccggggttctggcggagcgcaaggccctgaaggacgccgccgagcaccgcgagctgatggcctggaaccaggcggagaaccggcggctgcacgagctgcggatagcgaggctgcggcaggaggagcgggagcaggagcagcggcaggcgttggagcaggcccgcaaggccgaagaggtgcaggcctgggcgcagcgcaaggagcgggaagtgctgcagctgcaggaagaggtgaaaaacttcatcacccgagagaacctggaggcacgggtggaagcagcattggactcccggaagaactacaactgggccatcaccagagaggggctggtggtcaggccacaacgcagggactcctaggggcccagtaaggacagtgcccgccagggaccatgtatgtatcatggcggaagagttggccctgacctggaataaagcagttggtgttgcttatgaggaaggttcagccttatccagcacagccttcacgttttgccctctgctgtcaccacttggtcagaaacttccaaacgcagtgccctgttctgccggtgtgtacagcctcagcgcaccaggagaccctagagtggtttccatctcacagagaatcagacagggccacagccccctcaggcagccaggtcatctgagtatcattaagagtagtgatgggaagattacagtctgagggccaaacgtgcctgcttcctgtttttgtaaataaagttttgttggaacacaaaaaaaaaaaaaaaaaaaaaaaa

SEQ ID NO: 5442 - DNA, 1384 bp, Homo Sapiens
  NM_030815
accgttcttttaactgcgcaggcgcgccggaagcacctagagagcggcgcgtgcgcagcgggagtcgaagcggagatcccggggtcgcgcgagagccgcaagcggagttggtgggcgctatgctatcacccgaggcagagcgagtgctgcggtaccttgtagaagtggaggagctcgccgaggaggtgctggcggacaagcggcagattgtggacctggacactaaaaggaatcagaatcgagagggcctgagggccctgcagaaggatctcagcctctctgaagatgtgatggtttgcttcgggaacatgtttatcaagatgcctcaccctgagacaaaggaaatgattgaaaaagatcaagatcatctggataaagaaatagaaaaactgcggaagcaacttaaagtgaaggtcaaccgcctttttgaggcccaaggcaaaccggagctgaagggttttaacttgaaccccctcaaccaggatgagcttaaagctctcaaggtcatcttgaaaggatgagactcaagaaccaagatgggggaccagcaaccccccagggtcatggaggacccaggaccctccaaccttgacacctgtaaggacaggatctgccctgtaaggggccagccgtcaggaatctggccatgaaaacctctttgtagtgcttggctactctgtgatggcaggagggaaccttcagcctgtctggctgctggacctggacaccagggctcggtggacacaagatctattgacgggccttggtagccaccagtgggtgtgtggggcagtggctgtgggggtgtaagaatgactgcaacaggcacttcccaacaatggcctgctgttcacatggaccctgagcaaggaaggagggagggaggggcagagtggagtgtcattccagcattcctctcagaagggagagaggttttcaggctggtgccatgcgattggaataaagcaggaggctcatgggtggttgctgaatgaagaacagaatcttggtgctttgtggctcaccacagccatctgtggggcaggcacacacacctcccgccagctccaattttgcactttttccctgcttgattccaagagtaggtgctgcctagcagcccttcgtggccactctttactcaggagggccttgcagagtcctgcaccaggcctgggtgagtggatgcgcctcttaccatatgacacgtgtcaagatgcccttccgccccctctgaaagtggggcccggccagcactgctcgttactgtctgccttcagtggtctgaggtcccagtatgaactgccgtgaagtcaaaactcttatgtgttcattaagggctcaataaatgttagctgaatgaatgaatagcaaaaaaaaaaaa

SEQ ID NO: 5443 - DNA, 1679 bp, Homo Sapiens
  NM_030818
gtcgggaggagggcagacacgccgctttttggatgcctcctatgcctggcgggagtcttgtctgagctggcaccaccacacggcccacgacatcttcgcagggaagcctgtggaccctctgccaggctccacaagaggtcaggacagtgcagtgtgttcacaaggccagtttctgatcgtccgccccgaggctgaggaccagtaggcagctcccaagatgggtgaaaggaaaggggtcaacaagtactatcctccagacttcaaccctgagaagcatggctctctcaaccgataccacaacagccacccgcttcgggagcgggctcggaagctgtcacagggcatcctcatcatccgattcgaaatgccatataacatctggtgcgatggctgcaagaaccacatcggcatgggtgttcgttacaatgcagaaaagaagaaggtgggcaattactacacaaccccgatctacaggttccggatgaaatgccacctctgtgtcaactacatcgagatgcagacggaccccgccaactgcgactacgtgatcgtgagtggcgcccagcgcaaggaggagcgctgggacatggcggacaatgagcaggtgctgaccacagagcatgagaagaagcagaagctggagacggacgccatgttccggctggagcatggcgaggccgaccgcagcacactcaagaaggcgctgcccacactgagccacatccaggaggcccagagcgcctggaaggacgacttcgccctcaacagcatgctgcggagaaggttccgggaaaagaaaaaagccatccaggaggaggaggagagagaccaggccttgcaggccaaggcgagcctgaccatcccgctggtgcccgagacggaagatgaccgcaagctggcggctctgctgaagttccacaccctggactcctacgaggacaagcagaaactcaagcggaccgagatcatcagccgctcctggttcccctctgcccccggatccgcctccagcagcaaggtcagcggcgtcctgaagaagctggcacagagccgcagaaccgcgcttgccacctcccccatcaccgtcggggacctgggcatcgtgcggcggaggtctcgggacgtcccggagagcccccagcatgcggccgacacccccaagtctggggaaccgcgggtaccagaggaggctgcccaggaccggcccatgtcccccggagactgtcctccggaaacaactgagacccccaagtgcagcagcccgagggggcaggaagggagccgtcaggacaagcccctgtcgccagcaggctcctcccaggaggcagctgacacccccgacacgcggcacccctgcagtctcggctcctccctcgtggcggactactccgactcggagagtgagtgagcgatccccatcctggagactggacccgctctagaggcccggacacacccaggaggcccctcacagactgcagacccccggctcgcccaccagccctgggagagctcagatgccgcatcctccccagaccgcgccttcctgcaaccgtggagttatttatttggtcctggtgagggtgtttgtgccttgtgagactccgtacattaaagacctgtctcttcttcaaaaaaaaaaaaaaaaaaaaaaaaaaaaaaaaaaaaaaaaaaaaaaa

SEQ ID NO: 5444 - DNA, 2099 bp, Homo Sapiens
  NM_030819
atgcgcagtcctcctgccgtcccgcccctccctttccagagcccccagttccttagaaaccaggcggcgcgttcccggtggcggcgccctggactcccgggcccgcgcatccccgccagccttccttaaggcggatgggtggcccccgagaccccgtcggacccatggtttccagtgcagcgcggagtgggcgatgccagcgtgccaggagccatgtctgaccaggacgtttggaagatcatatccatgccagaggctcttgtgaggagatgagttggtaaagagagaggctgggatgaagatgctgccaggagtgggcgtgtttgggactggcagctccgcccgagttctggtcccactgctgagggcagaagggttcactgttgaggccctgtgggggaagactgaggaggaggcgaagcagcttgctgaggagatgaacatcgccttctacaccagccggactgatgacatcttgctgcatcaagatgtggatctggtgtgcatcagcatcccccctccactcacccggcagatatccgtgaaggctctaggtattgggaagaatgtggtttgcgagaaggcagcaacatcggtggatgccttccggatggtgacagcctcgcgctactacccgcagctcatgagcctggtagggaacgtgctgcgcttcctgcctgccttcgtgcgcatgaaacagctgatttcggaacactatgtgggagcggtgatgatctgtgatgcccgcatctactcaggcagcctgctgagccccagctatggctggatctgtgatgagctcatgggcggcgggggcttgcacaccatggggacctacattgtggacctgctgacccacctgaccggccggagagccgagaaggtgcacgggctgctcaagacattcgtgaggcagaacgctgccatccgtggcatccggcacgtcactagcgatgacttctgtttcttccagatgctcatgggtgggggtgtgtgtagcacagtgacactcaacttcaacatgccaggcgcctttgtgcatgaagtcatggtggtaggctctgcaggacgcctcgtcgcccggggagccgacctctatgggcagaagaactctgccacgcaagaggagctgctcttgagggactcgctggcagtgggcgcaggactgcctgagcaggggccccaggatgtcccgctgctgtacctgaagggcatggtctacatggtgcaggccttgcgccagtccttccaggggcagggcgaccgccgcacctgggaccgcacccctgtctccatggccgcctccttcgaggatgggctgtacatgcagagcgtggtggatgccatcaagaggtcgagccgatccggggagtgggaggctgtggaggtgctgacggaggagcccgacaccaaccagaacctgtgtgaggcacttcagcggaacaacctatgagcctgcacctgggctccttgccacagggcagagggaccagggaggggaacaggagccagacatgacagggacttggccctagcagagacagtgtctttcatttaatgagtctgggtgaagccagaggtggctctgggacttcgccccctccagtggctcatctgctcctcagacttgcagggtggcaaatgttcctgttgccaggttaccacggtgtgcacagggcagagctgccgccaggcctcctcatggtgatgccagtgagtcggaccaggaaaggctcaccctggggagcccttcagcctgatccgcagtcctaacagggtgagaaagcacaagaggggccagctcggctgaggcctgaggagaaatgatgagaagttttgtttcgttcttgggctggggcatctcaggaacagtgagggcaacaagctgtccctcagggaccctcacctgccctcccatgtgaccaggcccttcccaggtggggactggggcttgctttattaagtgagctcttgggcttttgaagtaggacagagggccctggtttggcagagaggaggcaagggagggctttagaacatctgagaaatgttaataaataattcagaaaataggaaaaaaaaaaaaaaaaaaaaaaaaa

SEQ ID NO: 5445 - DNA, 1897 bp, Homo Sapiens
  NM_030877
actttacggcagtgtggctggagccgcggctgacgggcccgcggtctgggcgtgagtgcagggaagtggagtatttgctgggccgggtaccatggacgtgggcgaacttctgagctaccagcccaataggggcacaaaacgtccccgggatgatgaagaggaggagcagaagatgcgtcggaaacaaactggtactcgagaacgcggccgctatcgggaagaagaaatgactgtggtggaggaagcggatgatgacaaaaaaaggctgctgcagattattgacagagatggggaagaggaagaggaagaggaggagccattggatgaaagctcagtgaagaaaatgatcctcacatttgaaaagagatcatataaaaaccaagaattgcggattaagtttccagacaatccagagaagttcatggaatccgagctggacctaaatgacatcattcaggagatgcacgtggtggccaccatgccagacctgtaccaccttctggtggagctgaatgctgtacagtcgcttctcggcttgctcggacacgataatacagatgtgtccatagctgtggtcgatttgcttcaggaattaacagatatagacaccctccatgagagtgaagagggagcagaagtgctcatcgatgctctggtggatgggcaggtggtagcactgctggtacagaatctggagcgcctggatgagtctgtgaaagaggaggcagatggcgtccacaacactctggctattgtggaaaacatggctgagttccggcctgagatgtgtacagagggtgcccagcagggtcttctacagtggctgttgaagaggctgaaggcaaagatgccttttgatgccaacaaactgtattgcagtgaagtgctggccatattgctccaggacaatgatgaaaacagggaattgcttggggagctggatggaatcgatgtgcttcttcagcagttatccgtgtttaaaagacacaatcccagcacggctgaggagcaggagatgatggagaatctgtttgattccctctgctcctgtctaatgcttagttccaatcgtgagcgcttcctgaagggcgagggtcttcagctgatgaatctcatgctcagggaaaagaagatctcccggagcagtgccctgaaagtgctggaccatgccatgattggccccgaaggcacagacaactgccataagtttgttgacattcttggcttacgaaccatctttcccctctttatgaaatctcccaggaagatcaagaaagtgggaaccactgagaaggaacatgaagagcatgtctgttcgatcctggcttccctcctgcggaacctgagagggcagcagcggacccggcttctgaataaattcactgaaaatgacagtgagaaggttgacagactaatggagttgcattttaaatatctgggtgcaatgcaggtggcggacaagaagattgaaggggaaaaacacgacatggtccggcgaggagagatcatcgacaatgacaccgaggaggagttctacctccggcgcctggatgcggggctctttgttctccagcacatctgctacatcatggccgagatctgcaatgccaatgtcccccagattcgccagagggttcaccagatcctaaacatgcgaggaagctccatcaaaattgtcaggcatatcatcaaggagtatgcagagaacatcggggacggccggagcccggagttccgggagaacgagcaaaagcgcatcctgggcttgctggagaacttctagaggcaccttggccctgcgcatcatggactctctcagcttccctcccaggatcagtttctacacaactctgtgtggcttttggacaaattaaagctagttttggtaaaaaaaaaa

SEQ ID NO: 5446 - DNA, 3676 bp, Homo Sapiens
  NM_030881
gagtagaagtgatttggcctcataacttcacagtggtttaccactttgttctatgttctggttttgtaaaggatagtactggaatttgcgtctgaagaccaatattggtgtaactcctgtcagtatattggtaaaatgtagcagaggcaggagtttggatgtttggatgggattcccttaggattctacagccaataaagatcctatttcctatgcatgtcccaggaatcagtaatcctcttttactctgttgggatgagtctttttttgtttctgttcagagtggttactaacttcaccttctttcctcttgctgtcatctgcattcgtgcttcccacctgttgttggcatgtcctttaccttctctttccctgccacatcaacctacacactgactcatcattgacgtggaagatgtggaagatgtcaagtttgtgatcaactatgactatccaaacagctcagaggattatgtgcaccgtattggccgaacagcccgtagcaccaacaagggtaccgcctataccttcttcaccccagggaacctaaaacaggccagagagcttatcaaagtgctggaagaggccaatcaggctatcaatccaaaactgatgcagcttgtggaccacagaggaggcggcggaggcgggggtaagggtggtcgttctcgttaccggaccacttcttcagccaacaatcccaatctgatgtatcaggatgagtgtgaccgaaggcttcgaggagtcaaggatggtggccggagagactctgcaagctatcgggatcgtagtgaaaccgatagagctggttatgctaatggcagtggctatggaagtccaaattctgcctttggagcacaagcaggccaatacacctatggtcaaggcacctatggggcagctgcttatggcaccagtagctatacagctcaagaatatggtgctggcacttatggagctagtagcaccacctcaactgggagaagttcacagagctctagccagcagtttagtgggataggccggtctgggcagcagccacagccactgatgtcacaacagtttgcacagcctccgggagctaccaatatgataggttacatggggcagactgcctaccaataccctcctcctcctccccctcctcctccttcacgtaaatgaaaccactcaagtggtagtgactccagcagacttaattacattttaaggaacactgtctttcctttttttttcctcttcgccttttctttttttttccttttttctttttttttttttaatttttccccccaaccatcgtgatttgtcttttcatgcagattagttagaattcactgccaggtttcttctgcccaccaaaatgatccagtctggaataacattttgtaaaaaaaaaaaaaatatatatatatatatatagctgactggaagagattaatttcttcccccaacttcttgcatgttgaagatatttgagctatttttcatctaaaagagtaaggtattaggcccttttgtgggagccccatgttttgtttttctgagttggtggggagggagggagggggagggctgaattgttttgcagaggaagatggcatctgtgctttaaatttctcattactgggttagaaaacaaagagggattgccctgcacattttcttttgtgcttttaaatgtttcttaagttggaacaggtttcctcgggcctgttttgactgattgctggagtgcatttgatagttaaaaattactaattggttttatttcccttcacactctgcctccccacttctccccccgttactgaaaaataaccattttagtgtcaggctagaaattgaattgctgagttttgtgtatcctttaaattaaaaaccacaagtgtttattgtagtggttaaactgtagcatctcagcatctgggtggaagctgcctatatttcttcccagtttaactggggaccatctgtgaaattaattttccatccagacagctgctgtgagcaaatgaacataaatgctcgctggaaatttactaaccagtttttatattgacctgcagtgtaaaaagcacatttaattataaacaatatattcaaaatgggcaaattttattttcaaatgcagtgtagagctagattaaaagcaactctttgccacctactctgcccttttggcaaagttaccttgaacaaagaatcttaagggtttattaagaactctttattttcttcataccctgttctctgcagtgctttctaacagcttctgggtgcagattttcttcggcatccttttgcactcagcttattacaggtaggtagtgcttaagaaaagtcatggaggactaaagcctaagtccttttcacttttcctccatctgaaggtaggtgagttcatcctcttcatggtaatgctgttttaccaagactttatagcagatggacccagaaagaattttctgctattgtgttcactacaacaggatagggacatcagacagccccagaaaccccttccagatctgatatgggactattaatttttatgctgttaattggtattcattcacaatgcagttgaagggggaaggctccactgcattctttggctaaggcctgaatgcttgctcatctgtaagatctatactcgaggttttgttttccttttaaaattctttagggagagagggatggtttctgaggggttctgaaagtatgattcaatgtgcaacatacaggtaggtcttcagcataagctgaaatatatgcatgtaaaaactttgacatctttttttttaattttccactttcttcttaactttacttctctttttgtcccccccccatcttacagaagttgaggccaagggagaatggtaggcacagaagaaacatggcaaactgctctgtgctttcaaaccaaagtgttccccccaaccccaaatttgtctaagcactggccagtctgttgtgggcattgttttctacaaccaaattctgggtttttttcttctttctttaaacatagaggtaccaccacaagggatgccctactctctcgcagctcttgaaagcatctgtttgagggaaaggtctctgggcaagcaagtggttatttggattgcttgcttccctttttccacctgggacattgtaatcataaaataacagtaaattccaaacctcaaaaactattatggcctgagcacagctgaaatctagcagagtttaactcttctgcctccatgtctgtcacttataattcaggttctgctgttggcttcagaacatgagcagaagaatcgttttatgctagttattgcattcatggttgaaactcaacttagggaaagggttccaatgtattaagcaatgggctgcttctccccaatcctccctaacaattcgttgtgtggacttctcatctaaaaggttagtggcttttgcttgggatcagtgctctctattgatgttcttgctggtctccagacacattcctgttgcattaagacttgaaagacttgtagatgtgtgatgttcaggcacaggatgctgaaagctatgttactattcttagtttgtaaattgtccttttgataccatcatcttgttttctttttgtaggtataaataaaaacactgttgacaataaaaaaaaaaaaaaaaa

SEQ ID NO: 5447 - DNA, 4686 bp, Homo Sapiens
  NM_030895
gtttccggcgcgcgacggggcggggaccgtagcgggtgcagtccagctgctctggacgctgaggccccggcttctcttgctggggtgtcgattcgggagggctgagggcgcggccgagagaacggggcggtcaccgccgccgtggcccgcgcgtcccgcgctctccttgcagtgcaggccccagccgctctcgggcgcggcgtgggggaggcggccctgcaggtgcgtacccggggtccgacacgtgcggggcttcctgcgagctgagtccccgctgcgcgtcttcaggcctttgtaagttgtcaaatttcccaccggcccagctcatcgagcttcttcccagctgtgaacaggagggcctgttccctaattcttgccgaaattgttccaactgctggtgttctgcaagatggagccaggaggagagcccacaggtgctaaagagagcagtaccctgatggagtcccttgcagctgtgaaggctgctttcctggcgcaggccccgagtggcagccggtcagccgaggtgcaggcagctcagagcacggagcctgccgcagaggcaggcgctcccgagggagagggccacagaggggggcctccccgggcgttggggtctcttggcctttgtgaaaaccaggaagccagagagaggcccggaggttcccctcgaggcccggtcacttctgagaaaactggaggacagagtggcctcgagtcagacgtccctccgaacgcaggccccggcgcagagggcgggggcagctggaaggggcggcctttcccgtgcggcgcctgtggccgcagcttcaagtgctcctcggacgcggcaaagcaccggagcatccactcgggggagaaaccgtacgagtgcagcgactgcgggaaggccttcatccacagctcgcacgtggtccggcaccagcgggcgcacagcggggagaggccctacgcgtgcgccgagtgcggcaaggccttcggccagagcttcaacctcctccggcaccagcgcgtgcacacgggcgagaagccctacgcgtgcgccgactgcggcaaggccttcggccagaggtcggacgccgccaagcaccgccgcacccacaccggggagaggctgtacgcgtgcggcgagtgcgggaagcgcttcctgcacagctcgaacgtggtccggcaccggcggacccaccacggggagaacccgtacgagtgccgggagtgcggccaggccttcagccagagctccaacctcctccagcaccagcgcgtgcacacgggggagcggcccttcgcctgccaggactgcggccgcgccttcagccgcagctccttcctccgcgagcaccgccgcatccacaccggggagaagccccaccagtgcggccactgcgggcgcgcgttccgggcgctgtcgggcttcttccggcaccagcgactccacacgggcgagaagccgttccgctgcaccgagtgcggccgcgccttccgcctgagcttccacctcatccagcaccggcgggtgcatggcgccgagtgagccggggctgcggcggaagagatgccggcggcctggtgggcgcgaggccgaggccgggggaggctcctgtccgccccgtgcgcggtgaggaagtaacagccggctgcgcgcctggttctcgggttgcgaaagcctcgccaggcctgcatccgccttggcttgggagcaatcaggagagacagggctcggggaaggcgagcgctgcccgcgggaggcgattcccagaggcggggaggtctcaggggtctgtcccgggccggccgcccgcctctgagactccccgcctcccacggtcagctgctgcggggcagtggccggtgattgaatcggtcattcctccgcaaccaggcctccatcaaaaccctgcatgagatgagggcctcgggcttcgggttggtgaaggcggggtgggggggcagttaggaagggggcgcccagacagggcatggaagcctcgcgtcctcccccgtaccttgcgggtcggtggttcatccatgtatttcaacgccttttcacagccggttcatatggtcccgacttctgtgtgcttagaaaattatggaacttggccgggtgcggtggctcccgcctgtaatcctagcactttgggaggccgaggcgggcggatcacacggtcaagagatcaagaccatcctggccaacatggcaaaacccccatctcgactaaaaatacaaaaaattaattgggcgtggtggcgtgcgcctgtaatctcagctacttgggagcctggggcaggagaatcacttgaacctgggaggcggaggttgcagtgagcggagatctgggcactgtactttagcctgggcgacagagagacccatctcaaaaaaaaaattggaacctgagaagggggtcgtggggtccccggggcccaccgtctgcacttggcatctgaagtcggggtggtcttgtgggactgaccccttaccctgtgggttctgcactagctccgggcaattggtgacagaatcgagttaaattgtaggacatcgcgttggtgtctgagagggagttggagagctggttggtgtggagggaaaggcttacacacatgtgatttcagaagcgttctgtgggtagaggaatcgttttctctttgagactgttatgagtatgtacaaatgttatttcctgtaaaatattttcattttttaaaatgttattttctagatagaaaagtagaagtgtctctttggggagcgtttttgggggcgtatagtaaagctctgtcatcatgaattaagcgaggtgggctttgagtttcttgggatgacagggaaatgtgagccgcctactggccgtgagcccctggggtgcggttgcaggattcgcccatcctggtctgggtgtggcttgtgaccacctcctgcagttctctgcccaggtaaggactaattgggaagaattctgggtcctgagctggctgccgcttccaagacagtcgctttgagggctcttggcaccgattttgttaaaatgcatgagcttagggttgtgcagcctgtaggggcaggggtggtctcagaatggatttggtggccccaccgttaattaagctcctgacccctgggccggtggtgaggtgggaagatgagcctgtgtctcccatgctgagccaagatcctcaggtaccagtagcggtcaaagcacctgctccctgaaggaagcttacctggcttagcctcattcctgctcgtaagtcaggcattcagcttgcaaagatccccaagcacacaaggagagtcagctgactgagggccaacagaaacagcaggcagccgctgtcagccacaaagaaacgcagatcctgaaactgtcatcatacaggtgagaggatagttatgtgtgaggtgttcaaagaagtcgcgcagtcagtgatgagaaagctgtagggtacatactgtcacgcatgaataggcaggactccttaaagaacttttggaaatgaaaaacaggccaggtgcagtggttcatgcctataatcccaacactttgggaggcctaagggggaggatcacttgagcctaggagttcaagaccagcctaggcaacatagggctgggcacggtggctcacgcctgtaattccagcactttgggaggctgaggcagtggatcacctgaggtcaggagtttgagaccaccctggccaacatggcaaaaccccatttctactaaaaatacaaaattagctgggcatggtggcccacacctgtaatcccagctactcgggcagctgaggcaggagaatcccttgaacctgggaggcagaagatgcagtgagccgagatcacgccattgcactccagcctgggcaaaaagagcaaaactccatcttaaaaaaataaataaataaaggaaaatgagccgagtgatggtcttagatataagatggaatggcaagcaaataaaattataaatatgaatacatatgtatatataaaagaatagtgtcaactaaaatactagacaacaatagcatgtaaattagaagggacagaaatgttctaagaccctccggttgttgggaagagggtgtaagatagtgtttaatttgactttgataagttaaatgtgcatagtgtaatttaatgttaattactaaaagagtgtaaccagtctatacatctctaatccaataaaaagaataaaacactgtgatttaaaatgtagtcccagctgcttgggagactgaggcaggaggatctcggcttggatcctcagaccaggagtttgaggcagcagtgagctacgattgtgccgctgcactccagactggacaacacagtgagagcccataaaataaataaatgaactgaacacaaacttctgtcaattaaaaaataagaacgaaatcaggctgggcctgagcgctgtggctcacacctgtaatcccagcactttggaggccaaggtgggtggatcgcttaagcccaggagttcgaaaccagcctgggcaacatagggagaacctgtctctacaaaaaatacagtaagtaagcctatagttccagccacccaggaggctgaggtgggaggatcacctgagcctgggagctcgagactgcagtgagctgtagtcataccactacactccagcctgggcaaaagagtgagaccctctctcaaaa

SEQ ID NO: 5448 - DNA, 1956 bp, Homo Sapiens
  NM_030900
gggaagcgcgccgcgcacctcatggttccggggacagttagggcggcggatggaggtcagcggtggtgctcgctgcggtttggaatcacttgctaggagtcttgtctctctgccacccaggacatcatggcagctcacctggtaaagcgatgcacgtgcctcctgagagaagctgctcgtcaggcccctgccatggctccagttggccgactgagacttgcctgggtagcccataagactctgacttcctcagccacctcacccatttcccacctcccaggttccttgatggagccggtggagaaggaacgagcatctactccctacatagagaagcaggtggaccacctcatcaagaaggccacaaggccagaggagctcctggagctacttggtggcagtcacgacttggacagcaatcaagcagcaatggtacttatccggctctctcacttgctgtctgagaagccagaagataaaggcttgctcatacaggatgcccactttcatcaacttctctgtctgctcaacagtcagattgcctcggtctggcatggtaccctctcgaagctgctgggaagcctgtatgctctgggcatccccaaggcctccaaggagctgcagtcggtggagcaggaggtccgctggcgcatgcggaagctcaagtacaagcacctggccttcctggcagagtcctgtgccaccctctcacaggagcagcactcgcaggagctgctggctgagctgctcacacacctggaaaggcgttggacagaaattgaagattcccacacattagtgaccgtcatgatgaaggtgggacacctctcggagccactaatgaaccgcctggaagacaagcacgtcctgaacagagcgcaggacatcaccctgccccacctgtgcagcgtacttctggcttttgcgcgtctgaacttccatccagaccaagaggatcagttcttcagcctggtacatgagaagctggggtcagagctgccaggcctggagccagccctgcaggtggacctggtgtgggccctgtgtgtgctgcagcaggcacgggaagcagagctgcaagccgtcctccaccctgaatttcacatccaatttctagggggcaagtctcagaaggatcagaacaccttccagaagctgctccacatcaacgccactgccctgctggagtaccccgagtactcgggtccccttctgcctgcctcggctgtggcccctgggccctcagcccttgacaggaaggtgacccccctgcaaaaggagctgcaggagacgctgaaggggctgctggggagcgccgacaagggcagcctcgaggtggccacgcagtatggctgggtgctggatgctgaggtgctgctggacagtgacggcgagtttctgcccgtaagggactttgtggcacctcaccttgcccagccaactgggagccagtcaccacctccagggtctaagaggctagcgttcttgcggtgggagttccccaacttcaacagccgaagcaaggacttgctgggtcgctttgttctggcccggcgacacatagtggctgcaggcttcctgatagtggacgtcccattctatgagtggctggaactcaagtctgaatggcagaaaggcgcctacctcaaggacaagatgcgcaaagcggtggctgaggagctggccaagtgacttgtgccagcagcatggactgcgtgcctctccgccggaggtctagctgtgggcggccaagaagggtcacccttgaggacaaacctctgtgcaggaccttggccagagtggggagggtggccagccactctgagggacagaacgtcctcttgtgtataataaacctttaattttggtgttggacccctggggccttcccaggcttggtcaccctctgcactgtcaaaaaaaaaaaaaaaaaaaaaaaaaaaaaaaaaaaaaaaa

SEQ ID NO: 5449 - DNA, 2707 bp, Homo Sapiens
  NM_030906
gccggccggctggtaaccccccagcggagggaccgggccgagcccgcggacccctccgagtgtctcctggggcccagccgttggtaccccatttcccccgggtccggtatttggggtggtctctgtctgccccggttcatctccaccgtctcaccttcaccccatcttgggacgtgaaactttttgaaagtttagaagcgaacttactgtggggaccttcctctggggttagttctctggtgccaccttcagtgatctgtgtggcagctctgctgctcacttctggctttactgggttttggtatttaactgttgcttacgcacactggaaattttcacctgcagtttttcttctgcctaagctctcacgtgtgaatatgtgtctagtgcatccttaacctgaggacttcaccagttcgaaattacagttttcaccatcaactaccttatcctttttggcctggttttcttcctcaaacagtggaaacatttttaaagttgcttttgttgcagagttaaacaaatggctgatagtggcttagataaaaaatccacaaaatgccccgactgttcatctgcttctcagaaagatgtactttgtgtatgttccagcaaaacaagggttcctccagttttggtggtggaaatgtcacagacatcaagcattggtagtgcagaatctttaatttcactggagagaaaaaaagaaaaaaatatcaacagagatataacctccaggaaagatttgccctcaagaacctcaaatgtagagagaaaagcatctcagcaacaatggggtcggggcaactttacagaaggaaaagttcctcacataaggattgagaatggagctgctattgaggaaatctatacctttggaagaatattgggaaaagggagctttggaatagtcattgaagcgacagacaaggaaacagaaacgaagtgggcaattaaaaaagtgaacaaagaaaaggctggaagctctgctgtgaagttacttgaacgagaggtgaacattctgaaaagtgtaaaacatgaacacatcatacatctggaacaagtatttgaaacgccaaagaaaatgtaccttgtgatggagctttgtgaggatggagaactcaaagaaattctggataggaaagggcatttctcagagaatgagacaaggtggatcattcaaagtctcgcatcagctatagcatatcttcacaataatgatattgtacatagagatctgaaactggaaaatataatggttaaaagcagtcttattgatgataacaatgaaataaacttaaacataaaggtgactgattttggcttagcggtgaagaagcaaagtaggagtgaagccatgctgcaggccacatgtgggactcctatctatatggcccctgaagttatcagtgcccacgactatagccagcagtgtgacatttggagcataggcgtcgtaatgtacatgttattacgtggagaaccaccctttttggcaagctcagaagagaagctttttgagttaataagaaaaggagaactacattttgaaaatgcagtctggaattccataagtgactgtgctaaaagtgttttgaaacaacttatgaaagtagatcctgctcacagaatcacagctaaggaactactagataaccagtggttaacaggcaataaactttcttcggtgagaccaaccaatgtattagagatgatgaaggaatggaaaaataacccagaaagtgttgaggaaaacacaacagaagagaagaataagccgtccactgaagaaaagttgaaaagttaccaaccctggggaaatgtccctgatgccaattacacttcagatgaagaggaggaaaaacagtctactgcttatgaaaagcaatttcctgcaaccagtaaggacaactttgatatgtgcagttcaagtttcacatctagcaaactccttccagctgaaatcaagggagaaatggagaaaacccctgtgactccaagccaaggaacagcaaccaagtaccctgctaaatccggcgccctgtccagaaccaaaaagaaactctaaggttccctccagtgttggacagtacaaaaacaaagctgctcttgttagcactttgatgagggggtaggaggggaagaagacagccctatgctgagcttgtagccttttagctccacagagccccgccatgtgtttgcaccagcttaaaattgaagctgcttatctccaaagcagcataagctgcacatggcattaaaggacagccaccagtaggcttggcagtgggctgcagtggaaatcaactcaagatgtacacgaaggttttttaggggggcagataccttcaatttaaggctgtgggcacacttgctcatttttacttcaaattcttatgtttaggcacagctatttataggggaaaacaagaggccaaatatagtaatggaggtgccaaataattatgtgcactttgcactagaagactttgttagaaaattactaataaacttgccatacgtattacagcagaagtgcttcagtcattcacatgtgttcgtgagattttaggttgctatagattgtttaagacagcttattttaaatgtagaaaaataggagattttgtaactgcttgccattaacttgctgctaaattcccaatgtattgattaaatcaataaaaaacagatgttactcagc

SEQ ID NO: 5450 - DNA, 3417 bp, Homo Sapiens
  NM_030911
atctggctgcgcctagtgggccgttgccttacagttgctgagaggaggcgagaggcgggggcgctagggccgagatcatgtctgactgggagaggtttccttggcagcagaggacgctaggtttgggatgaaagaagctgggcagatgcaaaatctggagagcgcgagggccgggcggtcagtcagcacccagactggcagcatgaccggtcagataccaaggctttctaaagtcaaccttttcactctgctcagcctctggatggagctctttccagcagaagcccagcggcaaaaatctcagaaaaatgaagagggaaagcatggacccttaggagataatgaagagaggaccagagtatctactgacaaaagacaggtaaagagaactggtcttgtggtggtgaaaaacatgaaaattgttggtctccactgttctagtgaagatttacatgccgggcagattgctcttattaaacatgggtcaaggctgaaaaactgtgatctttatttttccagaaaaccatgttctgcttgtttgaaaatgattgtaaatgctggagttaaccgaatttcatactggcctgctgatccagaaataagtttgcttacggaggcttctagttctgaagatgcaaagttagatgccaaagcagtggaaagattgaagtcaaacagtcgggcccatgtgtgtgtcttacttcaacctttggtgtgttatatggtgcagtttgtagaggagacctcttacaaatgtgactttattcaaaaaattacaaaaacattgccggatgctaacactgacttttattatgaatgtaaacaagaaagaataaaagaatatgaaatgttatttttggtttcaaatgaagaaatgcataagcaaatactgatgactataggtttggagaacctgtgtgaaaatccatactttagcaatctaaggcaaaacatgaaagaccttatcctacttttggccacagtagcttccagtgtgccgaactttaaacacttcggattttaccgtagcaatccagaacagattaatgaaattcacaatcaaagtttgccacaggaaattgcaaggcactgcatggttcaggccaggttattggcatatcgaactgaggatcataaaacaggagttggggcagtcatttgggcagaagggaaatctagaagttgtgatggaacaggtgccatgtactttgtaggatgtggttacaatgcttttcctgttggatctgagtatgctgacttcccacacatggatgacaagcagaaagacagagaaataaggaaattcagatacatcatacatgcggaacagaatgccttgacatttaggtgtcaagaaataaaaccagaagaaagaagcatgatttttgtgacaaagtgcccatgtgatgagtgtgtacctttaattaaaggtgcaggcataaaacaaatctatgcaggagatgtagatgttggaaaaaagaaggcagacatctcttacatgaggttcggggagcttgaaggtgttagcaaatttacgtggcagctgaatccatcaggagcttatggtcttgaacaaaatgagcctgaaaggagagaaaatggtgtgttgagacctgtcccacagaaggaagagcagcaccaggacaagaagctgcgcctcggaatccactaagaaggcctgtctacactgcaggggaacctcaagaacttttcattgcacttctaaaattcagccttgttcattcagaaaataaggatggattttgtgaataattgaaaagattttttaaggaagctaatttatttctaggatacaaatggtgttaataagaatatttgtcttttagatttatgtgtgggttttccataatgtagtagtgtgttattttattacacgaaatgagggagcaataacttcaaccaatgtaatcaccaacagggactgatttctatttatcttgactttatattagccaatttgaaagggtctgcttcacaagaggtcatgcctctgcagggaatcacacaccttttgagaaatattaattcttttgaattacaagagtgacagttagtaaactgctccagggaaataagtgtcatcttttaagagtcagtgtatagcaaaccaaaagatcacatttatacccaaagctttctagtaatcagaatttacttaattagaattgactcataaaaataaagttagtggactttgtctccatttttaaagtatattttgtaaatgttaattctgtggtcctgtttatcacagactttgggtagcaataggaagagagtgttattctgagacagtgtcgctgcttgatatcactgactcttgaaatcactaacagtgaacctcaaatttggttatgatgttaacagagaagaaatatttgagtctggaatattgaaactagctttcctagaattccattaataaatgctgctcccccatatagtcttcccttctgtataattaacataggttgtctcatggctttgatcttcaaaaggaagagccttttaaaaacatttgccaacctcaagaataaatactgaaagtcttgaaagtatggtcatttcagctattccagattgctgtctgtgatttctcacatttttatttgctgagaaacattcagaaaattattccaaaaatgaaggtacattttctgttctctcctaggttagagaggggtggcctggggtgcttcatgagaaatgtcttcctggatctgcggtggtcaggtttgcctctgcttttgttccctgcctttccgccacatcacacggcctcactgggcttcctaccagtttctcagaattacacgcacgaccatccaaacattggctccatgccagggctgtgactgcagcctgtgtaggaccatggggagttcagagtcatcatacaaggcagccaagaactgccataaacactacacagatggagggcatgggataggacaggagaggaggtgatgtacacttagaggtaactaaggctagtttgaaaaccgtgaattaagatattcttatcagtataaaaacactgagattgcttacctcccaaattgctttattgtattaactctcatgcttcagctcttggatttgttgtttctaactaacatgtcatgtacaccaaacattttataaatcaatcagtaaatattttgtaagacccaaaatcctggcatattgccaggtctgtggatttgcctgttgggtgttgggatgggatatcagaggaagaagcatacaagtgggaaaaactgtgattagaaagggaaaaataggcatttccacagtactattaagagaggcatgataatgccattttttttcttctgtacaactggtcagatttcaataaataatcattgatggtttacaaaaaaaaaaaaaaaa

SEQ ID NO: 5451 - DNA, 2753 bp, Homo Sapiens
  NM_030912
gagcgaccgtcggggccggctggggccggagctcggggctcggtgggcctacagcggctccggacggacccccggggctggggagtcggggaggcctgccccggccccctgcccgcggccgccatggcggagaattggaagaactgcttcgaggaggagctcatctgccctatctgcctgcacgttttcgtggagccagtgcagctgccgtgcaaacacaacttctgccggggctgcatcggcgaggcgtgggccaaggacagcggcctcgtacgctgcccagagtgcaaccaggcctacaaccagaagccgggcctggagaagaacctgaagctcaccaacatcgtggagaagttcaatgccctgcacgtggagaagccgccggcggcgctgcactgcgtgttctgccgccgcggccccccgctgcccgcgcagaaggtctgcctgcgctgcgaggcgccctgctgccagtcccacgtgcagacgcacctgcagcagccctccaccgcccgcgggcacctcctggtggaggcggacgacgtgcgggcctggagctgcccgcagcacaacgcctaccgcctctaccactgcgaggccgagcaggtggccgtgtgccagtactgctgctactacagcggcgcgcatcagggacactcggtgtgcgacgtggagatccgaaggaatgaaatccggaagatgctcatgaagcagcaggaccggctggaggagcgagagcaggacattgaggaccagctgtacaaactcgagtcagacaagcgcctggtggaggagaaagtgaaccaactgaaggaggaagttcggctgcagtacgagaagctgcaccagctgctggacgaggacctgcggcagacagtggaggtcctagacaaggcccaggccaagttctgcagcgagaacgcagcgcaggcgctgcacctcggggagcgcatgcaggaggccaagaagctgctgggctccctgcagctgctctttgataagacggaggatgtcagcttcatgaagaacaccaagtctgtgaaaatcctgatggacaggacccagacctgcacgagcagcagcctttcccccactaagatcggccacctgaactccaagctcttcctgaacgaagtggccaagaaggagaagcagctgcggaaaatgctagaaggccccttcagcacgccggtgcccttcctgcagagtgtccccctgtacccttgcggcgtgagcagctctggggcggaaaagcgcaagcactcaacggccttcccagaggccagtttcctagagacgtcgtcgggccctgtgggcggccagtacggggcggcgggcacagccagcggtgagggccagtctgggcagcccctggggccctgcagctccacgcagcacttggtggccctgccgggcggcgcccaaccagtgcactcaagccccgtgttccccccatcgcagtatcccaatggctccgccgcccagcagcccatgctcccccagtatggcggccgcaagattctcgtctgttctgtggacaactgttactgttcttccgtggccaaccatggcggccaccagccctacccccgctccggccactttccctggacagtgccctcgcaggagtactcacacccgctcccgcccacaccctccgtcccccagtcccttcccagcctggcggtcagagactggcttgacgcctcccagcagcccggccaccaggatttctacagggtgtatgggcagccgtccaccaaacactacgtgacgagctaacgccacgcaggcggcggggcgctggggaatcttcctccccagcccccgggctcgggagttatgcatccagagacctgcccttctaccttcctcgcctcccctcttcctcattccattgccccaggtcttttccttttggattttgttttggttttggctttgtttttgatttttttttattatgaatctcctggacgcagaggtgacagtgggagctggcctgggccaggacggcaggtggccctggagatgggaaagtgtctgtgtcgaggcgctgagctctctctctgtttctccttttttcctctactccttccccttcacacccccgtggctggaaggaacctcggcttccctgaaagcttgggggtcccacccttcttaccccacccgggaggaacgcccagggccccgggcttgtttctcctcttgttttccttttgggcagtttgatcactgatcgagtaaggaatgacctttagattgtgcgacttttgtttttgtttttttaaatttttttaaaccaagaatgatttctcctgcttccttctcctcaccatcttcccagacggagttcaaaggccacttctcaagcagcttttggcaccttcagcctcagagtggaatcttttaaagacaggacccctatgtccaggaaaggggaaaaggaactttgccaatgatagtgaccacagcaaaagcaaataataataatattaataataataaagagaaataaaataataaaataaaaaacaatagcacagcccttgttgaggtcagcagggaggaggggctgcccggagttgggtccttgcctggattttgacacagcaacttcctgtagtgagcactttgtatgaatcgtggacttcctgttctcaaggcgcaggtatttattctgtatctgtctagagcacacaccaaaatccaaccttctaataaacatgatggcgcagtcccacaaaaaaaaa

SEQ ID NO: 5452 - DNA, 1389 bp, Homo Sapiens
  NM_030914
ccggaaatttgcgggcgcgccggaagttgaggggagtttcctgcgagctcggcttcctcaacatggctgcgcccttgtcagtggaggtggagttcggaggtggtgcggagctcctgtttgacggtattaagaaacatcgagtcactttgcctggacaggaggaaccctgggacatccggaacctgctcatctggatcaagaagaatttgctaaaagagcggccagagttgttcatccagggagacagcgtgcggccaggaattctggtgctgattaacgatgccgactgggagctactgggtgagctggactaccagcttcaggaccaggacagcgtcctcttcatctccactctgcacggcggctgagggcccttctctgggcctgggcacccttagaggggagaacgaagcaatcagacatccccttgggccctgcttccaggtctccctgtcccccttgcctgccttcttccctgctctgtcccctaagctccctccaggcagggaaaagaggccaggtgctaaaaatgagcctttctcaagcacgtgagcagcggaaggcagacaggcgccagagcccagcactcccttttccagcagctgtggtgggggagggttcccctccagtttgtcaagagttgaaggaggctctgtggccaggtgacctggctgccttccactccttgtacctcagtctaaacatggagtggccgctgacaaggcgctccagccccagagccagcgtcttcatggggaagatgaatggacctgagtagctgaaggaaggcccctccctacccaaagactggaggcttctcagcctcaatttccctgtctgtacagctgagggctctgcctgtcccccactgctatcagtatggaaccccagctggggtcccctattgagtgccgactccccccaccgccagcagctgctcctccagccacacccctcctgctccccccacccctagcccttgaccctggctggcctgccccgctccacaggccaccagatgggctcctgagaccctccccaggctgcttacagctcattctgctgggggtagagatgaggggagggagtaagttaaaccttggactagcaagtagaagcctggggggatgcgtgtgcctcagtttcctcctccacaactgaatatagtggctgaaaactggggagatacttgatggcgcgaatgtccgttttctctcccttcccacctcctgcaggaagcaggacggggcaggcagcacctggtaggcacagtgctttgcccctcctccccttcccttctggaagtcttggggcctcagtgcttgcaacagccggccttgggcaaataaaagactaggttgtttactagcaaaaaaaaaaaaaaaaaaa

SEQ ID NO: 5453 - DNA, 2956 bp, Homo Sapiens
  NM_030915
ggggctgagtgctcagtggagagcggggagttgtgtccaccttgccgacgtcgctagccgtggggctgtcctgggaaggcggacggcgagcgcccggtgtccgcactcggccgcctgccgtgcccgtctgcgcccgtgtcatcctcactcgggacgcagggaccgtttttaaatcacaggggcgtgtgtcagcctgccctaggacttcatgtctatatatttccccattcactgccccgactatctgagatcggccaagatgactgaggtgatgatgaacacccagcccatggaggagatcggcctcagcccccgcaaggatggcctttcctaccagatcttcccagacccgtcagattttgaccgctgctgcaaactgaaggaccgtctgccctccatagtggtggaacccacagaaggggaggtggagagcggggagctccggtggccccctgaggagttcctggtccaggaggatgagcaagataactgcgaagagacagcgaaagaaaataaagagcagtagagtccctgtggactcccatgggtcataccagccagcatctgttcctgaactgtgtttttcccatcatgacggaagaagagagtgagccgcaattgttctgaaaatgtcaaacgaggcttctgttttgcacctgcagatcaccgagttggttttcttttcttttcttgcctttttttttttttgaaatttgccgagcagtggagccctctgacaatttgcaaggccctctgagaaaggaagctgcttagagccagggggttagtgggtgaggggagcgagtgctgtttttgagatcattatctgaactcaggcagcctagtagaggcagtggtgggattccaatgggtcttggtgggtgggaggtggggcatgtgcaaagcaagcaaggaacatttggggtaagaaaacaaacatgaggcaaaagaaaaaatacatgtttttaagaaaacattgagcagagaactgcagccaggatgcgctcagcagacattcactctggctgctgggacatcagaaaacaaagtcttcatctctctctccagtttcacccaccccaccctttgctttcatttcaggtgtgttggtctatatgacagggaggagagtaaaggagagcaggagcaattggctgcctgcaaagccagctggaggtgaagtgcaggaaaggaaaggtcaccccattctactccatggcctctctgctcccagctgtggtaggctcacatagccagtgtgatcggtttttaagaggcagtgcttttcagcttttctccctgatatatccattttgcttcccagcactttttaggagtagtgagagcacttcctgcccttgttggaagccccagggtggacactcagcacgaaggtctctcccttaactgctgcccttccaagacttgctcccgagatggagtgggcgtggtcttccaggctggcccttccttctcctcaccgccaccttccctgccccagccccagcagccatgggtacatgggtccccagctcacctatggattcccgccagtctgcccagctgcagtactcacgccccatgggggatcttggtctgtttttcttgtgggagcctagtggagagcagacgtggctttttatgtgtcttgttggggaggtgacttgcatggtggggacaaggctgtcgtggcaaccttgggatcgagtttgagactaaaggatgtcatgagatccctggcttctccccatgttgttcccggacaagggcagaagggaggcatggcaagggacctctgctgtccttactcaacagtggtcctcatccctccccacctcccactgcttcctgcaagggcaccagttgtatgagaaagttggcctttggacttaggatttcttattgtagctaagagccatctgaagcagcaggttgcaggacaaatgcttcagtccgccgagagcagtaccgtgtggccaagaggtggactcagagccttccttgagctaaactcggccaaccaaggcacgcagcatgtcccctcaggtctccagtcagtccaggttgaccctcagttctggacgtgtgtatatagctgtatttaatacctcaaggtcattgtggctctggggatgccggggcaggaggacgagggtgcgctgtggacacagcagtccgcggaattccgttctgggaagccaatggtcgccggcaccccttgcttcctccctctgttgtctgcctgtgtgacacacatcaatggcaataacttcttccaactcctcgcagaagtgggagaggccggcagcctgcaccgagaggggctttcctctctcttgctccccgcttcgttctgttttggctgcagagagtggttcatccatactctcattccctcgcctccccttgtggacgggggtcttgccttttcaattcctgtgttttggtgtcttcccttatctgctaccctgaatcacctgtcctggtcttgctgtgtgatgggaacatgcttgtaaactgcgtaacaaatctactttgtgtatgtgtctgtttatgggggtggtttattatttttgctggtccctagaccactttgtatgaccgtttgcagtctgagcaggccaggggctgacagctaatgtcaggaccctcagcggtggagcctgctggggggacccagctgctcttggacaagtggctgagctcctatctggcctcctctttttttttttttcaagtaatttgtgtgtatttctaactgattgtattgaaaaaattcctagtatttcagtaaaaatgcctgttgtgagatgaacctcctgtaacttctatctgttcttttttgaggctcagggagaaactagcatttttttttttccaaactactttttgtcactgtgacagttgtaaataaagtttgaaaatgctttccactctgaaaaaaaaaaaaaaaaaa

SEQ ID NO: 5454 - DNA, 2742 bp, Homo Sapiens
  NM_030928
cccgcctcttcctcccttccttctttccttgctttcgccgcgcactccgccgccatggagcagcgccgcgtcaccgacttcttcgcgcgccgccgccccgggcccccccgcatcgcgccgcccaagctggcctgccgcacccccagccccgccaggcccgcactccgcgccccggcctccgctaccagtggcagccgcaagcgcgcccgcccgcccgccgcccccggacgcgaccaggccaggccaccggcccgcaggagactgcggctgtcggtggacgaggtttccagccccagtacccccgaggccccagacatcccagcctgcccttctccgggccagaagataaagaaatccaccccggcagcaggtcagccgccccacctgacatccgcgcaggaccaggacaccatctctgagcttgcgtcatgcctgcaacgggcccgggagctgggggcaagagtccgggcgctgaaggccagtgcccaggatgctggggagtcctgcaccccagaggccgagggccgccctgaggagccatgtggcgagaaggcgcccgcctaccagcgcttccatgccctggcccagcccggcctgccgggactcgtgctgccctacaagtaccaggtgctggcggagatgttccgcagcatggacaccatcgtgggcatgctccacaaccgctccgagacgcccacctttgccaaggtccagcggggcgtccaggacatgatgcgtaggcgttttgaggagtgcaatgttggccagatcaaaaccgtgtacccggcctcctaccgcttccgccaggagcgcagtgtccccaccttcaaggatggcaccaggaggtcagattaccagctcaccatcgagccactgctggagcaggaggctgacggagcagccccccagctcacggcctcgcgcctcctgcagcgacggcagatcttcagccagaagctggtggagcatgtcaaggagcaccacaaggccttcctggcctccctgagccccgccatggtggtgccggaggaccagctgacccgctggcacccgcgcttcaacgtggatgaagtacccgacatcgagccggccgcgctgccccagccacccgccacggagaagctcaccactgctcaggaggtgctggcccgggcccgcaacctgatttcacccaggatggagaaggccttgagtcaattggccctgcgctctgctgcgcccagcagccccgggtctcccaggccagcactgccggctaccccaccagccaccccgcctgcagcctctcccagtgctctgaagggggtgtcccaggatctgctggagcggatccgagccaaggaggcacagaagcagctggcacagatgacgcggtgcccggagcaggagcagcggctgcagcgcttagaacggctgcctgagctggcccgcgtgctgcggagcgtctttgtgtccgaacgcaagcctgcgctcagcatggaggtggcctgtgccaggatggtgggcagctgttgtactatcatgagccctggggaaatggagaagcacctgctgctcctctccgagctgctgccggactggctcagcctccaccgcatccgcaccgacacctacgtcaagctggacaaggccgcggacctcgcccacatcactgcacgcctggcccaccagacacgtgctgaggaggggctgtgagcctgggggccactgtggacagacgtgggcttcagaagctcgctggcctgggcccaccagcattttcttttatgaacatgatacactttggccttcctttccccagcgcccctgagggccagaggcagatgtgggctgcaggctgcacagcccgagggtctctggctgcgggcggtgggccccttcatggggctcacctggtggattcacattaaaccggtttctgtgggcacctctgtccttgctgctggtggggaagggaagccagatccagcaccccctggggggccatcgggagtgtggctgggggtgaagggggctctgtggcaatatggggttgggtagtgtgggtggcaggccatcccctctaatcttggaacctctgaatatgggacctcccacagcaaagggtgacttttgtcattaagaaagactggggtgggtgtggtggctcacgcctgtaaccccagcactttgggaggccaaggtgggcagatcacgaggtcaagagatcgagaccatcctggcgaacatggtgaaaccccatctctactaaaaatacaaaaaattagccgggtgtggtggtgggcacctgtcgtcccagctactagggaggctgaggcaggagaatggtgtgaacccaggaggcacagcttgcagtgagcgaagatcgcaccactgcacgcactccagcctgggtgacagagcgagactccgtctcaaaaaaaaaaatttcaagactggagaggtgatcctgaattgtccagctacgccccatgtcatcacagggccttcatgacagggccagagccagccagctttgaagacgcggccctgccccgacacaggcagcctggagaagctgggcaggacaagtaggacatccctggagcctccagaagggactggcctctgcccacaccttgacttcagtatttctgacctcctaaactctaataaagtcatgcttacagccactaaaaaaaaaaaaaaaaaaaaaaaaaaaaaaaaaaaaaaaaaaaaaaaaaaaaaaaaaaaaaaaaaaaa

SEQ ID NO: 5455 - DNA, 4421 bp, Homo Sapiens
  NM_030934
agtacgcttctgcgcagtttgtggtggcgtcgtaacgcctcggggaaagggaagcggacgggcatctggaatcgctgcctctggctttctgttttctactaacaggatttggtcactggttcttcatcttttgtctgttgcacgcatcccgccctccccacttgcttccccactccttggatccagccctgtgggcattcacgtcagttctctgaccccgccgtgagccccgctccgggtccccgggcgggcttggcacggaggcggtaactatggagaatatggcggaggaggagctgctgcccctggagaaggaggaggtggaggtggcccaggtccaggtcccgaccccggcccgggactcggctggggtcccagctccggccccggattcggctctggactcggctccgactccggcctcggctccagccccagcccctgccctggcccaggctccggccctgtccccgtccctagcctctgcccctgaggaggctaaaagcaagagacacatctcaattcaaaggcagcttgctgatctagagaatttagcttttgtaactgatggaaattttgactctgccagctcattgaactcagataatcttgatgcaggcaacagacaggcttgtccattgtgccctaaggaaaaattcagagcttgtaatagccataagcttcgtcgtcacctccagaatttacactggaaagtctcagttgaatttgaaggttacaggatgtgcatctgtcacttaccttgtcgaccagtgaaaccaaacattattggagaacagataaccagtaaaatgggagcccattatcattgtatcatttgttcagcaacaatcaccagaagaactgatatgctaggacatgttaggcgccacatgaataaaggagagactaaatctagttatattgcagcttccactgctaaaccacctaaggaaattttgaaagaggcagacacggatgtacaagtttgtcccaactattctatacctcagaaaacagattcctattttaaccccaaaatgaaactaaatcggcagctaatattctgtacattggctgctttggctgaggaacgaaaacctttggaatgtctagatgcttttggagccactgggataatgggattacagtgggcaaaacatcttggaaatgcagtcaaagttacaatcaatgacttgaatgaaaattctgtgacactgattcaggaaaactgccatttaaacaaattgaaagtggtggtggacagtaaggaaaaggaaaagagtgatgatattcttgaagaaggagagaaaaatcttggtaatattaaggtgaccaaaatggatgccaatgtactgatgcatttgagatcttttgatttcatacatctagacccttttggaacatcagtgaattatctagattctgcattcagaaatataagaaaccttggcatagtgtcagtgacttctacagatatcagttctttatatgccaaggcacagcatgttgcccggcgtcactacggatgtaacattgtccgaactgaatattacaaggaactagcagccagaattgttgtagctgcagtggcaagagctgcagcccgatgcaacaaaggcatagaagtactgtttgcagtggctctggaacattttgtgttggtagttgtgagagttttgaggggacctacttcagcagatgaaacagccaagaagattcaatacctgatccattgtcagtggtgtgaagagagaatttttcagaaggatggtaatatggtagaagaaaacccatatagacagctgccttgtaactgtcatggaagcatgcctggaaagacagcaatagaacttggacctctgtggtcaagttcccttttcaatactggattcctcaaaagaatgctatttgaatctcttcaccatggtttggatgacattcagaccctaataaagacattaatctttgaatcagagtgtacgcctcaaagtcagttttcaattcatgcatcttcaaatgtcaacaagcaagaagaaaatggtgtatttattaaaactacagatgacaccacaacagataattacattgcacaaggaaagagaaaaagtaatgaaatgatcacaaatttaggcaagaagcaaaagactgatgtcagtactgaacatcctcccttttattacaacattcacagacacagcattaaaggaatgaatatgccaaagttaaaaaagtttttgtgctatttatctcaagcaggctttcgagtaagccgaactcattttgacccaatgggtgtacgcacagatgcacctctgatgcagtttaaatctatccttttaaagtacagcacccccacctacactggaggacagtcagaaagccatgtccagtcagcatctgaagatacagtaactgaaagagttgaaatgtcagtgaatgacaaagcagaagcaagtggctgcagaagatggtaaacgtagagaagaattggttctcaggtgtctgtatagatggcctaatagttctctataccaactgtagttctttttctgttctttcaattcagtagagtaaaaataaaaaacagtgtcattttcattcagaaactgagcagtttctaacttagctggtttgggagctttgctttccaagtttttttttgttttaaggcaaacttaaaattttaatggaaacatttcatatgaagccaagtctcactgagatcaccctactgcttaataattcagaaaattttcacatgcaaagtgtttggaattttatgtatgttatgaaagccatcttttacaattcttaatcacatctctgcctaaactgattcatgatgtttatgttttcctgtttgtagtgtacaaaatgaagctgaaggctcacatgttaaaatgaccctgaatagaataggaagaacaatgttcttacaggtcataatgtatttcacaattaaaaaactaaaatatgtacccatttttaagaaatcatacttctctccacattgatcttttcatttcttactagcttttaagaaattaaatacttgcctgagatagaaatactttatttttgtaactttaaggtctaaatgactaaacttcaaagtaagattttgtcagaataaattgagaccattaatctaatataatacttgttcatgagcactgaaatcctgaagaggagagatttggttataaattaaaaaggttgggtgatcttaagtgcctcagttaatgcacgtacagtattcatttggttggttgtactacctctcagaagtaaaatttgtcaccttatggaatgagagtttttgggtttgggggttgtttttttgttgttgcttggtttggtatttttggttttgtgtgtatttgtataaattttctgtataattagcccaggctgatgtaactataaaaattagttgaaaaaaaaaatattgtttccttaatggaattctcacttcatttgaatataagattttggatgaaaggatttggtataaagtttgggtttttgtctcaaggatttgatccatatttatccctaaatatttcttaagggatgtaactttttataaccattaagtggggggaagggggtggagggggtggtaataattataactgaaaggtttaaatatactacctaagaaaaaagtacttctgtgacatatacaaaaaaatctagtggataggcattagatgaatagagaatattaattttgcagaaatgaaggaaaatctcttcgtgctagtacagcgtattcccaagagagtttattttcctttctccaattaatgtggtcataaatttcggtaaaatcaagaaataggtgaagtgcaagctagtttctataatgaccattaaaaaaattctgctgtgtaattcttgccagttaaaattataacttgcaaatgagcagaataaatgaggtttttttcaattaaaaattactataaatccaggaggcaaactattttagcactcagattatctgatttaatacatattattgaatatcagtctcaaattttgctaaatgcttatcagcatgaaatatgttgatcagtgatgagttgggcttaatgcaaagatcctaatttaataaagaaacctgtaaattactgttacctaaaatatatgtgtatattaatttcacatataaaggtagatttttcaaagaaaaatttggtaggcggtagtttagaactctgatcaggtactacatcaaccaaaagaggaaatactttaaaaattccttttagcaacctgagcaatcttattctcgtaacaatagtagtaatttgggacattgcaaatgtttatcatgttgtaaagtagcatcagttgtatcctttcattaaaacttgataaacaaaagaacgagttaaggaaaaaaaaaaaaaaaa

SEQ ID NO: 5456 - DNA, 2399 bp, Homo Sapiens
  NM_030935
ggaggaggaggaggaggagaggagcagtcagcaggcccgaggaggcaggacttcctggtgtgggggttgtcaacagcccagaaagagaaagacggagaggcagagacccaggggagccgaggagcggagacacggacccagcagggtcacgcgggaggagactcgggacacccactcgctggctgccaccgggagcagaggggggctcggccgccccctcccacatcagtctccagacccttggggcttcagaggccgctcctaggctcctcggaggaggcgcgggttccttcttttccggagagcaaactttcctcggagatgcctggcaggatgagccgcggcccccggagaggacgggacagcctctgatcgccgcctgcgtgccccgccactgcccatggccaggaggccccagggaacggacagcccgacctcttaggcgccgggaccctcaggctcagatcagtggccgaggccccagagtttgcaaactcagctctggagttcagcagcaacagcagcaggaaaaacctgcccctgctcccccctcccgccacctcccctctcctcttctcccctcacccagcaggcacccccggttcccgccaggccctcctgccatgtcggacccagacgtccccaggggctcggatgtccccgccatgtggcccccttgttccaggggtgcctgagccccttcaaggagccccaacccacccccaaccttggcccagccctgagccccagggaccatgagcgggggcaagaagaagagtagtttccaaatcaccagcgtcaccacggactatgagggccctgggagcccaggggcttcggatccccctaccccacagcccccaaccgggcccccgccccgcctgcccaatggggagcccagccccgatccggggggcaagggcaccccccggaatggctccccaccacctggggccccttcctcccgtttccgggtggtgaagctgccccacggcctgggagagccttatcgccgcggtcgctggacgtgtgtggatgtttatgagcgagacctggagccccacagcttcggcggactcctggagggaattcgaggggcctcagggggcgccgggggcagatctttggattccaggttggagctggccagcctcggcctgggcgcccccaccccaccgtcaggcctgtctcagggccccacctcctggctccgtccaccccccacctctcctggacctcaggcccgctccttcactgggggactgggccagctggtggtgcccagcaaagccaaggcagagaaacccccactgtcggcctcctcaccccagcagcgccccccagagcctgagaccggtgagagtgcgggcacatcccgggctgccacgcccctgccctctctgagggtggaagcggaggctgggggctcaggggccaggacccctccactgtcccggaggaaagctgtagacatgcggctgcggatggagttgggtgctccagaagagatggggcaggtgcccccacttgactctcgccccagctccccggccctctacttcacccacgatgccagcctggttcacaaatctccagaccccttcggagcagtagcagctcagaagttcagcctggcccactccatgttggccatcagtggtcacctagacagcgacgatgatagtggctccggaagcctggttggcattgacaacaaaatcgagcaagccatggacttggtgaagtcccacctcatgtttgcggtccgggaggaggtggaggtgctgaaggagcagatccgggaactggcggagcggaacgctgcgctggagcaggagaatgggctgctgcgcgccctggccagcccggagcagctggctcagctgccctcctcgggggtcccacggcttgggccccctgcgcccaatgggccctccgtctgagcctcccttcccttacaatgtgcctttggggctgcccggccttgcgtcagccgcctgccccctcttcctatgcagctttaatgtccccgtgtccccggggtgggagttcaaggctcagtaatggcctggtcccccggcccctgccccatctcctcatcatccccagccttgatggaggagggagggcttcaggacggggcgtcagagggagccccctctgggagggaaccaacccccaccctccctcctgggaccccccagcagtagacggcttgggggagtcggaggctccccggcagacaccccacccccatcttgttcccttgaggtgcctcctctcctctgcccaggggagggagtgtggacagtatctggaagttctgggattcaggttgttattaaaataataataataattaaaaactctgaagaaacttgaaaaaaaaaaaaaaaaaa

SEQ ID NO: 5457 - DNA, 2012 bp, Homo Sapiens
  NM_030940
aggactgagggcgccgtgcgccgaagcttgtggcgtcaatgcgcccgccgtgtccatggagagaagctgaggcggccgaccttcggcccgaggcaccggggcgccgggacggcgaagatgtcggcttccttagtccgggcaactgtccgggctgtgagcaagaggaagctgcagcccacccgggcagccctcaccctgacaccttcagcagtaaacaagataaaacaacttcttaaagataagcctgagcatgtaggtgtaaaagttggtgtccgaaccaggggctgtaatggcctttcttatactctagaatatacaaagacaaaaggagattctgatgaagaagttattcaagatggagtcagagtattcatcgaaaagaaagcacagctaacacttttaggaacagaaatggactatgttgaagacaaattatccagtgagtttgtgttcaataacccaaacatcaaagggacttgtggctgtggagaaagctttaatatttgaaatctcaggactcttctggccgtaggttccaggaaagctcgtggaagctttggggctcactgcagaaatcatgtgactgtcacgtgctggaaaataaagtgatacatcttgaaaatgaatccagtgtgttggattccagaagaaatgatatttatattctctataggggacagaaaatgagaagccatcactctttttggatcatttaggtctcttgtatcctttgttttagaaccagtttcattaaagttgccttcctgggcacctgtttatccatttcctgaactgtgtgcactccttagatcgctattgatggcttgatcatccctcagcatttctcccaaccagatcggtgactcctaaaatctgagacaggacatcgtgactgctggtagtaatatggtggtgcattgttttttccacccaaacttaacatagcctttttatacatttttatgaaaaatttcattgtcagctgcctcactgcatactctttaatagtaccaggcaaagattttcttcaactatagtacagattagttctgagtgatggtatcaaaaggtgagaaagacgtcatccgcctttttttaatccatttcttttgccaccctatatgtctgttcagagatgggctctcaagctgactttgattcttttagttgagaagtctcttaaagccatctagcccacctccatcaattccctatgtgaggaagcaaaaccccagggaagccaaagggctcctgtccaccctgacaccacaggccgggggagagtagggactctacccccctctccccttgtaggtgacacatgctctgccctctgaggcagtcagcgaaggcaaatggtctgacttctttatgtggtcaacattttgatagaatttctttataatttgatagagattatattatttttattttattttgagtgggaagaattttaaaacctttttatgtcaattaccatcttgtttctttcacctttgaaacaatggtttgtagcagagatgacattgtagcaacccagaattatgcttttggaatgtggtcctcactgtacaggagaatgtgtaatcttttgttaaaattcccagtgtgcatacattttctggttcctcggtccagttgctaaagttcttagtattttagcctaacatatttatcaccaacttttctttaaaagtgttccttttgtcacttagttactgattttcctgggtttgacataagtattctatgagatgatatatatgctttttttgaaagctgattctcatgaattcaagtagctgagttcctttatgtttcgtttattcactaaagtagctgacacaaaacacaccaaaacctagagcggtagttttatgtaaatgctcatgagtttgtatcaataatataattgttgatccacttataattcgtgcaacactgtatgtatgtagagattgagttgtcaattaaaaaaaatgtggcctctttgtgatcataaaaaaaaaaaa

SEQ ID NO: 5458 - DNA, 2704 bp, Homo Sapiens
  NM_030950
gttttacgctgccgccggcatccgctcggacgcggccacgttgtcttgcgcgctttgcccgcctggccctgggactctgaccctcggctaccctttcctgccccactagcgtggccgcgagcctcggtgagccggccgtattcccgctctcgcttagggggcacaggcgcaggcatcggcccggccactccaagccttcggtgcgcgggcgcgtctgggatacgggcccgggaggcgccgccctccgtccgcccggtgcctctcaggaacagcgaaccggagagagcgccggagagttgggctcagtgcggagctcggcgccggggcccatgcccgtgcgcccccgcaggccggcgccatggcctccgggagtgtggccgagtgcctgcagcaggagaccacctgccccgtgtgcctgcagtacttcgcagagcccatgatgctcgactgcggccataacatctgttgcgcgtgcctcgcccgctgctggggcacggcagagactaacgtgtcgtgcccgcagtgccgggagaccttcccgcagaggcacatgcggcccaaccggcacctggccaacgtgacccaactggtaaagcagctgcgcaccgagcggccgtcggggcccggcggcgagatgggcgtgtgcgagaagcaccgcgagcccctgaagctgtactgcgaggaggaccagatgcccatctgcgtggtgtgcgaccgctcccgcgagcaccgcggccacagcgtgctgccgctcgaggaggcggtggagggcttcaaggagcaaatccagaaccagctcgaccatttaaaaagagtgaaagatttaaagaagagacgtcgggcccagggggaacaggcacgagctgaactcttgagcctaacccagatggagagggagaagattgtttgggagtttgagcagctgtatcactccttaaaggagcatgagtatcgcctcctggcccgccttgaggagctagacttggccatctacaatagcatcaatggtgccatcacccagttctcttgcaacatctcccacctcagcagcctgatcgctcagctagaagagaagcagcagcagcccaccagggagctcctgcaggacattggggacacattgagcagggctgaaagaatcaggattcctgaaccttggatcacacctccagatttgcaagagaaaatccacatttttgcccaaaaatgtctattcttgacggagagtctaaagcagttcacagaaaaaatgcagtcagatatggagaaaatccaagaattaagagaggctcagttatactcagtggacgtgactctggacccagacacggcctaccccagcctgatcctctctgataatctgcggcaagtgcggtacagttacctccaacaggacctgcctgacaaccccgagaggtctccttctacaacgtgacagagaggtgtcacaccttcactttctctcatgctaccttttgtgggcctgtccggccctacttcagtctgagttactcgggagggaaaagtgcagctcctctgatcatctgccccatgagtgggatagatgggttttctggccatgttgggaatcatggtcattccatggagacctccccttgaggaggtgaattcaggccaaaagggctgttggctgtaatcctacgccaggcacaaggcatcttgttgccttgccacgtcctgtcacagctgggtatccttaccatgttccacgcccttgcagtgggagacaggatgtccatgttctctaccatccttttccttcccatgcagattgtgaaatgtaatgagatgtatcaagacatcctagaaataaaaaccagatgtccacctccagtgtttcatactttctggttttacacatcgctggagggataaagagtatggataatctttggatttggagagccgttcaagatacttccagcttcttggctcagcctggcttcctctggttcagccccacataatgattatggctatttgctgtcatttctgggctagggctcctttctaacaacctagactggaataaggccctgtcagcatggctccctttatcccagttttccgtctgggaacagtacctctgcccctgattcccaatgtgccatagttttattaactccattaaagaagcctgtatgtgttttggttagttacagttattttacaataatggtgggtaatggccccacctctgttatgagataatgttctaatcaatgtctctgcctttgtatcttttctgagggctttgtctgttctcttcattctaatgaaaggtgtattctagtgctgggtgcatatcatccaggataatattctgcccaactccatcctctgttactagatcccttaccagtcacatttgtggactggtggccagtcgtataccatccctggaaggattctgggacaatattccagggattcattgacttcttggctccttttctccatttcctttgggggaagggggaattgaccatgcttaagtgcatcctatcaaggggcagctccgtccccatggccattggatcatgagacactcgaagtcagaaggctggggcagatcacttcaagcaagcccccatgatggttctcagtcctgcttctctgtgggtacgtgcccctctgtttaaaaataaactgaatatggatgtttaaaaaaaaaaaaaaaaaa

SEQ ID NO: 5459 - DNA, 3443 bp, Homo Sapiens
  NM_030952
gtgctttactgcgcgctctggtactgctgtggctccccgtcctggtgcgggacctgtgccccgcgcttcagccctccccgcacagcctactgattcccctgccgcccttgctcacctcctgctcgccatggagtcgctggttttcgcgcggcgctccggccccactccctcggccgcagagctagcccggccgctggcggaagggctgatcaagtcgcccaagcccctaatgaagaagcaggcggtgaagcggcaccaccacaagcacaacctgcggcaccgctacgagttcctggagaccctgggcaaaggcacctacgggaaggtgaagaaggcgcgggagagctcggggcgcctggtggccatcaagtcaatccggaaggacaaaatcaaagatgagcaagatctgatgcacatacggagggagattgagatcatgtcatcactcaaccaccctcacatcattgccatccatgaagtgtttgagaacagcagcaagatcgtgatcgtcatggagtatgccagccggggcgacctttatgactacatcagcgagcggcagcagctcagtgagcgcgaagctaggcatttcttccggcagatcgtctctgccgtgcactattgccatcagaacagagttgtccaccgagatctcaagctggagaacatcctcttggatgccaatgggaatatcaagattgctgacttcggcctctccaacctctaccatcaaggcaagttcctgcagacattctgtgggagccccctctatgcctcgccagagattgtcaatgggaagccctacacaggcccagaggtggacagctggtccctgggtgttctcctctacatcctggtgcatggcaccatgccctttgatgggcatgaccataagatcctagtgaaacagatcagcaacggggcctaccgggagccacctaaaccctctgatgcctgtggcctgatccggtggctgttgatggtgaaccccacccgccgggccaccctggaggatgtggccagtcactggtgggtcaactggggctacgccacccgagtgggagagcaggaggctccgcatgagggtgggcaccctggcagtgactctgcccgcgcctccatggctgactggctccggcgttcctcccgccccctcctggagaatggggccaaggtgtgcagcttcttcaagcagcatgcacctggtgggggaagcaccacccctggcctggagcgccagcattcgctcaagaagtcccgcaaggagaatgacatggcccagtctctccacagtgacacggctgatgacactgcccatcgccctggcaagagcaacctcaagctgccaaagggcattctcaagaagaaggtgtcagcctctgcagaaggggtacaggaggaccctccggagctcagcccaatccctgcgagcccagggcaggctgccccgctgctccccaagaagggcattctcaagaagccccgacagcgcgagtctggctactactcctctcccgagcccagtgaatctggggagctcttggacgcaggcgacgtgtttgtgagtggggatcccaaggagcagaagcctccgcaagcttcagggctgctcctccatcgcaaaggcatcctcaaactcaatggcaagttctcccagacagccttggagctcgcggcccccaccaccttcggctccctggatgaactcgccccacctcgccccctggcccgggccagccgaccctcaggggctgtgagcgaggacagcatcctgtcctctgagtcctttgaccagctggacttgcctgaacggctcccagagcccccactgcggggctgtgtgtctgtggacaacctcacggggcttgaggagcccccctcagagggccctggaagctgcctgaggcgctggcggcaggatcctttgggggacagctgcttttccctgacagactgccaggaggtgacagcgacctaccgacaggcactgagggtctgctcaaagctcacctgagtggagtaggcattgccccagcccggtcaggctctcagatgcagctggttgcaccccgaggggagatgccttctcccccacctcccaggacctgcatcccagctcagaaggctgagagggtttgcagtggagccctgagcagggctggatatgggaagtaggcaaatgaaatgcgccaagggttcagtgtctgtcttcagccctgctgaacgaagaggatactaaagagaggggaacgggaatgcccgcgacagagtccacattgcctgtttcttgtgtacatgggggggccacagagacctggaaagagaactctcccagggcccatctcctgcatcccatgaatactctgtacacatggtgccttctaaggacagctccttccctactcattccctgcccaagtggggccagacctctttacacacacattcccgttcctaccaaccaccagaactggatggtggcacccctaatgtgcatgaggcatcctgggaatggtctggagtaacgcttcgttatttttatttttatttttatttatttatttatttttttgagacggagtttcgctcttggtgcccaggctagagtgcaatggcgcgatctcagctcacctcaacctccgcctcccgggttcaagcgattctcctgcctcagcctccctagtagctgggattacaggcgcccgccaccatgcccggctaattttgtatttttagtagagacagggtttctccatgttggtcaggctggtctcaaactcccgacctcaggtgatccacccacctcggcctcccaaagtgctgggattacaggcgtgagccaccgcgccccacctaacccttccttatttagcctaggagtaagagaacacaatctctgtttcttcaatggttctcttcccttttccatcctccaaacctggcctgagcctcctgaagttgctgctgtgaatctgaaagacttgaaaagcctccgcctgctgtgtggacttcatctcaaggggcccagcctcctctggactccaccttggacctcagtgactcagaacttctgcctctaagctgctctaaagtccagactatggatgtgttctctaggccttcaggactctagaatgtccatatttatttttatgttcttggctttgtgttttaggaaaagtgaatcttgctgttttcaataatgtgaatgctatgttctgggaaaatccactatgacatctaagttttgtgtacagagagatatttttgcaactatttccacctcctcccacaaccccccacactccactccacactcttgagtctctttacctaatggtctctacctaatggacctccgtggccaaaaagtaccattaaaaccagaaaggtgattggaaaaaaaaaaaaaaaaaaaaaaaaaaaaaaaaaaaaaaaaaaaa

SEQ ID NO: 5460 - DNA, 3906 bp, Homo Sapiens
  NM_030954
agttcgctgcgtgtcgaggcgagcacgcgctccgccctggaggctgcggcgacgggtcctcctccgccgtccggtcgcgccctcgcggaagctcggcagtgcgcgtgcgcccgcacccgcactccaaattagaaaggggacgtctagtgggttgcccgggaggggtggcgggagcggtcctggaaataatctgtcctctgtcgccgggaactggcgaggtagttccttcgcggtggagagacctggaatggccaaatatcaaggtgaagttcaaagtttgaaactggatgatgattcagttatagaaggagtaagcgaccaagtacttgtggcagttgtggtcagtttcgctttgattgctaccctggtatatgcacttttcagaaatgtacatcaaaacattcacccagaaaaccaggagctagtaagggtacttcgagaacagcttcaaacagaacaggatgcacctgctgccactcgacagcagttctacactgacatgtactgtcccatctgcctgcaccaagcctccttcccggtggagaccaactgtggacatcttttttgtggtgcctgcattattgcttactggcgatatggttcatggcttggggcaatcagttgtccaatctgtagacaaacggtaaccttactcctaacagtatttggtgaagatgatcagtctcaggatgttctgagattgcatcaggatattaatgattataaccggagattctcagggcaacccagatctattatggagagaattatggatctacccactttactgaggcatgcattcagggaaatgttttcagtcgggggccttttctggatgtttcgcatcaggataatactttgtttaatgggagcttttttctatcttatatcacctctagattttgtacctgaagccttgtttggaattctaggctttctagatgatttctttgtcatctttttattgcttatctacatctctattatgtatcgagaagtgataacccaaaggctaactagatgaaaaagaaaacaaaactgagtttactaggatatctgagctaatgtagaacatcaaacagaaggacccatggcagtataaagcaatgaagcaatggagtattatctcacaaatataaaaccactataagacaaacatttgattatcatttgacaaatacctaggtataactggaattttcatgtttgaagttctaatattaagtttagaattataatgatctacagttgtatcttgattctatgttgtctggaaaaaatatggaattatataaaaagggatgcttttatatatttttcttttccccagaattacttagattaattagatgtatagtaaaatattgttaaatgtcagtttatccatcttatccttctcagcaggtacctatatgataatatatagctgtgaaactcatctaaatatttttgttccaataaaatattatatactattggggaaaattcagtatttcttttagtgctagctaagttttgtgcatttggagcagttctgccttttcattctggtataattaattatttgctatcagctgaaactgaaagaagaaacttgaacttcatacttcgatatcatattctagtttacagaacacattttaatcaatagaagaattaagatgaaaaacatggccgggcggggtggctcacgcctgtaatcctagcactttgggaggctgaggcgggtagatcacaaggtcaggagatcaggaccatcctggctaacatggtgaaaccccgtctctactaaaaatacaaaaaattagccaggcgtggtggcaggcgcctgtagtcccagctactcgggaggctgaggcagaagaatggcgtaaacccaggaggtggattgcgccactgcactccagcctgggcaacagagtgagactccctctcaaaaaaaaaaaaaaaaaagatgaaaaacatttatctccagtcagcacacttgatgttcacagttagacatttaaacaagagctcatcctttcgtagtagatataaaagtaatttgtaaagggaagattgttttaggaacctgggcgatgctgcaaacacagagtagcctgatgcatttctgaggaaggtgaatcttcgtgtctttgagcatcaagccaataggaaggtactgggaacggtatttacatttgacaaaagaaattactggttagctatagcaacagattggacaaattttgttagttttctgttgtcagaaatttttataatactgtctcaggatggcagcacacagctcagattcatgtcttgagccaaacaagtgaatgtatctgagaagactcagtaccacatggtactgggagatcttactcacttcagctggcgttgctcattagtgaatgtatgacagcaggatgtgaggggatgcccaggagtcagtgttagcattgtcatctgagatcactgctattaatatcatccattaatttattagtgagcttcactatatgcagactgggagataaggagaaaatctgtcacattctctctagctaatcagatcagctaccaattaatgagattctgaatgaaatatcaatatgtgtttttctaatttggacctaggacagagctgttgcttgtcatagagaaaaacaataatgcttaaacatagcacattataattaaagcaggtttctcacatacttttcattttatcctttggataattttgtgaggaacgcaggacaccaacttccctttcatagatacaatccccatgctattgatgaaagtgtttttgaatgaagtcatacaacaaataactgatcaaagtggcattacaccaaaatttcttagtaggactcctgcatagaatgtttagatagacgtgaaagttgttaagaggaacagcaagagagaaactggttctttggaagtctttcgtgctacattatacctccatcagagtaagacagcttaggcactcctaagaggaaaggtctgtggagatgacatgaatccgaattctacacttccaaatcaaataggtaaaagggtggcatacatcacagaaaaacatttcagctgcagtcaccaacttgaaaagcgagtgagtaggagtttgtcacactgccatgtaccagactggaaatgcatttcctaccaattacacatttggtgtgggggaatggtgatgtcattttttgacaggattttattttgtgtgcatgcattctgctccaagtgtcacaattctggttacaataattataatatttggagttactactaagactttcctgaaagaggtgtattgtaccaaattttgtaacataaaaaaatactaaatgatcttaaagcttcctaaattgtgaaaagggtatgtgctaacatctcagaactttagacctgcttgttgtcatctttaccgatctctgatgataaatgcagaagggatctgagagtttttaaagcaagtagagtcaatcagagttttgaacatcatagtaatacttccgtgattcagagttagatcatataaatcaaagtaacaatttggattttttttaaacaacaatatcataactgtcataaaacagatggtccaaccccaggagcagataataacttgggcagctctgtggggaacaagacggggaaaacaactgttctaactgcccactagaacagtggtttcaactactacaattctcagtgtttgagaggtacaagggaagaaaggactatgtggatcccttgtggctatgcagatacctacctcacagagttgttgtagaagactggtggtttggttcaaaccttgtgattaaagagtttgtcaagcattttattcttttgaataaaagcaacatatctaaaacattttaaaaaaaaaaaaaaaaaaaa

SEQ ID NO: 5461 - DNA, 2158 bp, Homo Sapiens
  NM_030963
ccgaggccagagagaaaagactgcgaggtggccgcagctgtggccggagagcacaaagaatgaaccagcagtggaagagaaaatactgtaagctggctgactgctggtgaagaaaatgctttatttttgtggcaggcatctgtgggatctgtaatagaaatatattggagtaattcaagattctgtggttggcccttttgactgctctctctacaggtttaatttgggcatttactcattttcatggctccaaggaccatgtatgtgttggggatcttcaatattcatgttattttctcctttggtcttatatgattgttacctttatgaagctttagtgattacaaagcactttttttgtccatttttacctgagctttgtaaactctgatttgcaggatggctggctgtggtgaaattgatcattcaataaacatgcttcctacaaacaggaaagcgaacgagtcctgttctaatactgcaccttctttaaccgtccctgaatgtgccatttgtctgcaaacatgtgttcatccagtcagtctgccctgtaagcacgttttctgctatctatgtgtaaaaggagcttcatggcttggaaagcggtgtgctctttgtcgacaagaaattcccgaggatttccttgacaagccaaccttgttgtcaccagaagaactcaaggcagcaagtagaggaaatggtgaatatgcatggtattatgaaggaagaaatgggtggtggcagtacgatgagcgcactagtagagagctggaagatgctttttccaaaggtaaaaagaacactgaaatgttaattgctggctttctgtatgtcgctgatcttgaaaacatggttcaatataggagaaatgaacatggacgtcgcaggaagattaagcgagatataatagatataccaaagaagggagtagctggacttaggctagactgtgatgctaataccgtaaacctagcaagagagagctctgctgacggagcggacagtgtatcagcacagagtggagcttctgttcagcccctagtgtcttctgtaaggcccctaacatcagtagatggtcagttaacaagccctgcaacaccatcccctgatgcaagcacttctctggaagactcttttgctcatttacaactcagtggagacaacacagctgaaaggagtcataggggagaaggagaagaagatcatgaatcaccatcttcaggcagggtaccagcaccagacacctccattgaagaaactgaatcagatgccagtagtgatagtgaggatgtatctgcagttgttgcacagcactccttgacccaacagagacttttggtttctaatgcaaaccagacagtacccgatcgatcagatcgatcgggaactgatcgatcagtagcagggggtggaacagtgagtgtcagtgtcagatctagaaggcctgatggacagtgcacagtaactgaagtttaaataaaaatgtcttcagctccatgctcaaggttgaaagggttacctgtaaatttctgcccacataacattatactcatccctagtagtgcattttgggagttggggtgggaaggggtatgggaaggatagactcataattaaaatgtctaacatgtctctgttgagaaatttatttaatgtaaggaacttgggtgttaatagttgagagctgtttagtaataacccagttttcttgaggtctgtttactttatactttttaaaaacttctgtagttcttttggccagtgtgtttgtattatctgtgcattaatggtcctcatctgactcctgcattgtgtcttatttttctgcatggattggcataagaccattactaaaatttggcacctgtgagatgtttgatattatgaacaggaaacataatttaatgtatgaatagatgtgaatttgggatttcaaaatagatgaataacaactattttatagtaaagttattgaaatggaaatgaaaacagccagtaacttatgtttcagaatgtttgtaacacacttcatggtgttcccataggctttgctgtctagtcttatagtttgaggtttttttggtctgcatttttctttttgattacaaaatttataatttaataaatactagagtttatcaaaaaaaaaaaaaaaaag

SEQ ID NO: 5462 - DNA, 4559 bp, Homo Sapiens
  NM_030972
aatgctgtgtatttacttgaactcatacatcagaagatagtgatcttaacacattatgtttgggaagtttaaaatatctcttccaaatgcttgatgaaaaaggtgggaggatcacttgagccagggagttgaaggctgcagtgagccctgtttttgccaccacactccagcttggagaggtgaggggctgtcctctggatggcaattgatgaaggatgagtctgtgccctgaaggggagatcagtccagcccagctccccactgctgcctcgtgtgtggtggcttctccaggagagaggattgattcctaaagactcatgttacgtgaggaagcagctcagaagaggaaaggaaaggagccaggcatggctcttcctcagggacgcttgactttccgggatgtggctatagaattctcattggcagagtggaaatgcctgaacccttcacagagggctttgtacagggaagtgatgttggagaactacaggaacctggaggctgtggatatctcttccaaatgcatgatgaaggaggtcttgtcaacagggcaaggcaatacagaagtgatccacacagggacattgcaaagacatgaaagtcatcacattggagatttttgcttccaggaaattgagaaagaaattcatgacattgagtttcagtgtcaagaagatgaaagaaatggccttgaagcacccatgacaaaaataaaaaagttgactggtagcacagaccaacatgatcacaggcatgctggaaacaagcctattaaagatcagcttggatcaagcttttattcacatctgcctgaactccacatatttcagatcaaaggtgaaattggtaatcaacttgagaagtctactaatgatgctccctcagtttcaacattccaaagaatttcctgtaggccccaaacccagatttctaataactatgggaataatcccctgaattcttcattactcccacaaaaacaggaagtacacatgagagaaaaatctttccaatgtaataagagtggcaaagcctttaattgtagctcactcttaaggaaacaccagataccccatttaggagacaaacaatataaatgtgatgtatgtggcaagctctttaatcacgagcaataccttgcatgccatgatagatgtcacactgttgagaaaccttacaagtgtaaagagtgtggcaagaccttcagtcaggagtcatcccttacctgccatcgtagacttcatactggagtaaaacgttacaattgtaatgagtgtggcaagatctttggtcaaaattcagcccttctaattgataaggcaattgatactggagaaaatccttacaagtgtaatgaatgtgacaaggcttttaatcaacaatcacaactttcacatcatagaattcatactggagagaaaccttacaaatgtgaagaatgtgacaaagttttcagtcggaaatcaaccattgagacacataagagaattcatactggagagaaaccatacagatgtaaggtttgtgacacagctttcacgtggcattcacagctggctcgacatagaagaattcatactgcaaagaaaacttataaatgtaatgagtgtggcaagaccttcagtcacaagtcatcccttgtatgccatcatagacttcatggtggagagaaatcttacaaatgtaaggtttgtgacaaggcttttgtgtggagttcacaactggcaaaacatactagaattgactgtggagaaaaaccttacaagtgtaatgaatgtgggaagacctttggtcaaaattcagatcttttaattcataagtcaattcatactggggagcaaccttacaaatgtgatgaatgtgaaaaggttttcagtcgtaaatcaagccttgagacacataagataggtcatactggagagaaaccatacaaatgtaaggtttgtgacaaggcttttgcgtgtcattcctatctggcaaaacatactagaattcatagtggagagaaaccttacaagtgtaatgagtgcagcaagaccttcagtcacaggtcataccttgtatgccatcatagagttcatagtggtgagaaaccttacaagtgtaatgagtgcagcaagaccttcagtcgcaggtcatcccttcattgccatcgtagacttcatagtggtgagaaaccttacaagtgtaatgagtgtggcaataccttccgtcactgctcatcccttatataccatcgtagacttcatactggagagaaatcttacaaatgtacaatttgtgacaaggctttcgtgcgtaattcactcctgtcaagacataccagaattcacactgcagagaaaccttacaagtgtaatgaatgtgggaaggcttttaatcaacaatcacacctttcacgtcatcatagaattcatactggagagaaaccttagaaatgtgaagcatgtgacaaagtttccatttggaaatcacaccttaaagacataggagaatttatactggagagaaagcttacaaatgtaaggtttctgacaagacttgggagtgattcacacctggaacaacatactggacttcacactggagagaaaccttacaagtgtaatgagtgtggcaaagcctttggcaagcagtcaacacttattcaccatcaggcaattcatggtgtagggaaacttgactaatgtaatgattgtcacaaagtcttcagtaatgctacaacgattacaaatcattggagaatccataatgaagagagatcttacaagtgtaataaatgtggcaaatttttcagagatcgttcacatattgcaggtcatcggtgaactcatactggagagaaaccttacaaatgtcatgactgtgccaaggtcttcagtcaagcttcatcctatgcaaaacataggagaatttatacaggagagaaacctcacaagtgtgatgattgtggcaaagcctttgcttcacgttcacacgtcattagacatcagagaatctatactggacagaaatcttacaaatgtcatcagtgtggcaaggtcttcagtccaagatcactccatgcagaacatcagaaaattcatttttgagataaccgttcccaatgaaatgagtatagcaaaccatcaagcattaattgacattggagtcaattcagcattgacttgagtttgtgttgacttaacattgagttcaagcctttattgacattcaagtgtttatgttaagaggatggggccaggtgtggtggctccgacctgtaatcccagcacgtcgggaggccaaggcacataggtcacttgaggtcaggagtttgaaaccagcatggccaacagatgtgagccacttttctcagcctgttttttgtttcttattttctattatttttttgagccagtactttttaaagagatagtacttttttcagttagtactttttgaaagggatatatcatagtaatttttaaaagggatatgaggccaggcacggaggctcatgcctataatcccagcactttgggaggccgaggcaggcagatcacggggtcaggagatcgagactttcctggctaacagggtgaatccctgtctctactaaaaatacaaaaaattagctgggcatggtggctggcgcctgtagtcccagctactccagatgctgaggcaggagaatggcatgaacctgtgaggcggagcttgcagggagtcgagatcgcaccactgggctccagcctgggcgacagagtgagagtctatctcaaaaaaaaaaaaaaaaaaaaggatatcaaagcctcggtacgtggtggctcatccctgcaatcagagtactttggtcgacccatgtgaactggtcacctaaggtcacaatttcaaaagcaccctaacatggtgaaaccccatctctactaaaaatacaaaagttagccgggggtgttggtgtgcacctttagttccagctacttgggaggctggggcatgagaattgcttaaacctaggaggtagaagttgcagtgaaccaaaattgtgccactatactgcagcctgggtggcagagtgagtctccatctcaaacaaacaaaaaataacaaaaaaagacctcaaaaatgcttttcttctcgtataatggacttccttctttttctttctggttcctcttcatttctctctttattttttatttatttatttatttattttgcagtttgagtttgagataaatctaagttataaaagttgtatttcttaatacataatgacttctgaaagatgcctttgcagcatcctataatcagctcacatcattcgtttctgtacttgtatattttccagttattttccggttgaccccagaattcgttagatttttttaaaaaacaatttcaaaatagttgctgttttaaattagttgcatccagttcatatcaatgtctgcatgctttctagtctttgttatttattgaaaacctttggtacctaaacttaagtttgattgtttcagtgtgtacttggtaaatatgtcagtggccttttaactaaacatcaaaatgtactttaa

SEQ ID NO: 5463 - DNA, 2051 bp, Homo Sapiens
  NM_030980
tcatttcatgttatgttttcatttcccctctgtctgagagattgctctgatgtctttccttccataagtcctacggagatcgagcttacctcatttttctcccaggcctaggagctcaattaccaggatcactttcttccccagggtgtactacagacctccacatgttggacagtaggattcagcagagaatgagtcccacatcctcttttcatccataagccactcttcccaactactcttccgccttccattgtccctatgtctactttactgctcaatctggattttggggaacctcctcccaaaaaggcattagaaggaaatgccaagcaccgaaattttgtcaagaagcggaggctcttagaacggagaggctttctgagtaaaaagaaccaaccccctagcaaggcgcctaagttgcactctgaaccttcaaagaaaggggagactcctacggtcgatggcacttggaagaccccttccttcccaaaaaagaagacagctgcttccagcaatgggtcaggacagcccctggacaagaaagctgcagtgtcttggttgacccctgccccttcaaaaaaggctgattctgttgctgctaaagtagatttgctgggggagttccagagtgcccttccaaagatcaatagccacccaacccgctctcagaagaagagctcccagaagaaatcctctaaaaagaaccatcctcagaagaatgccccacagaactccacccaagctcattcagagaataaatgctccggagcatcccagaagttgccacggaagatggtggcaattgactgtgagatggtgggcacaggaccaaaggggcatgttagttccttggctcgatgtagcattgtcaactacaacggagatgtgctttatgacgagtacattcttcccccctgccacattgtggactaccgaaccaggtggagtggtatccggaagcagcacatggtgaatgccacacccttcaagattgctcgaggccagatcttgaagatactcacagggaagatagtggtggggcatgccatccacaacgacttcaaagcccttcagtactttcaccccaaatccctcacccgtgacacctcccatatcccccccctcaaccggaaggctgactgcccggagaatgccaccatgtctctgaagcatctcaccaagaagctgctaaaccgggatatccaggttgggaagagcggacattcctctgtggaagatgcccaggccaccatggagctatataagttggttgaagtcgagtgggaagagcacctagcccggaatccccctacagactagtggcaatggggacgctggtgatatgaggaggcagaggcagcacccaggagaaacagggcagtggaccaatggacagctccaccagctccacatctttggaagctagatttggggagagagaagctctaccccagacttaatacccattgaaatttcacctcaggtgttgtgtcctgtgtctggttaagtgtcccatggaaggggaaagccttcacgtcagaacccaaccctataccttttacttcttaaatggtgctaaccacaggtgtcccagggtgctctgtgccagttaagatttttaactttcaaggggcagggcatactgggaaatgtagtttcccaaactgccttatcacttgggtggacatatgtctccttttatgccttttggtcttgagtaattaacagcatcctcttccacgctcagaagtgttctggttggggccaggcatggtggctcacgcctgtagtcccaacacttagggaggccgaggcgggcggatcacctgagatcaggagttcaagaccagcctggccaacatggcgaattcccgttctctactaaaaatacaaaaaatgtgtggggtgtggtggcaggagcctgtaatcctagctactcaggaggctgaggcaggagaatcgcttgagcccaggaggcggagattgcagtgagccgagatcgtgtcactgcactccagcctgggtgacaagagtgagactccgtctcc

SEQ ID NO: 5464 - DNA, 1955 bp, Homo Sapiens
  NM_030981
gcgggcggggcctctggggcggagcggccaccatcttggaacgggaggcggagcagagtcgactgggagcgaccgagcgggccgccgccgccgccatgaaccccgaatatgactacctgtttaagctgcttttgattggcgactcaggcgtgggcaagtcatgcctgctcctgcggtttgctgatgacacgtacacagagagctacatcagcaccatcggggtggacttcaagatccgaaccatcgagctggatggcaaaactatcaaacttcagatctgggacacagcgggccaggaacggttccggaccatcacttccagctactaccggggggctcatggcatcatcgtggtgtatgacgtcactgaccaggaatcctacgccaacgtgaagcagtggctgcaggagattgaccgctatgccagcgagaacgtcaataagctcctggtgggcaacaagagcgacctcaccaccaagaaggtggtggacaacaccacagccaaggagtttgcagactctctgggcatccccttcttggagacgagcgccaagaatgccaccaatgtcgagcaggcgttcatgaccatggctgctgaaatcaaaaagcggatggggcctggagcagcctctgggggcgagcggcccaatctcaagatcgacagcacccctgtaaagccggctggcggtggctgttgctaggaggggcacatggagtgggacaggagggggcaccttctccagatgatgtccctggagggggcaggaggtacctccctctccctctcctggggcatttgagtctgtggctttggggtgtcctgggctccccatctccttctggcccatctgcctgctgccctgagccccggttctgtcagggtccctaagggaggacactcagggcctgtggccaggcagggcggaggcctgctgtgctgttgcctctaggtgactttccaagatgcccccctacacacctttctttggaacgagggctcttctgtcggtgtccctcccacccccatgtatgctgcactgggttctctccttcttcttcctgctgtcctgcccaagaactgagggtctccccggcctctactgccctggctgcagtcagtgcccagggcgaggaatgtggccaggggatccaggacctgggatccagggccctgggctggacctcaggacaggcatggaggccacaggggcccagcagcccaccctttcctctccccactgcctcctctcccttcctacactcccagctcgagccgtccagctgcggtgggatctgagtatatctagggcgggtgggcgggtagcagtgctgggcctgtgtcttgagcctggagggagtctgctcctgccgccctctgccctgccagagacagacccatgcgctgcctgcccaccgtgcccctttgtccccatgtcaggcggaggcggaaggcccaccgtgccagaggctgggcaccagccttaaccctcactctgctagcacctcctccctttccccaaggtagcacatctggctcactccccactccgtctctggagcccaccagggaaggccctcatcccctgccgctacttctctggggaatgtgggttccatccaggattgggggcctctctgctcacccactctgcacccaggatcctagtcccctgccctctggcacagctgcttcctgcaagaaagcaagtctttggtctccctgagaagccatgtccctcgtgctgtctcttgcctgtcccacctgtgccctgccctccagcttgtatttaagtccctgggctgcccccttggggtgccccccgctcccaggttcccctctggtgtcatgtcaggcattttgcaaggaaaagccacttggggaaagatggaaaaggacaaaaaaaattaataaatttccattggccctcgggtgagctgagggtttttgcaaggaa

SEQ ID NO: 5465 - DNA, 2567 bp, Homo Sapiens
  NM_031200
gcttcctttctcgtgttgttatcgggtagctgcctgctcagaacccacaaagcctgcccctcatcccaggcagagagcaacccagctctttccccagacactgagagctggtggtgcctgctgtcccagggagagttgcatcgccctccacagagcaggcttgcatctgactgacccaccatgacacccacagacttcacaagccctattcctaacatggctgatgactatggctctgaatccacatcttccatggaagactacgttaacttcaacttcactgacttctactgtgagaaaaacaatgtcaggcagtttgcgagccatttcctcccacccttgtactggctcgtgttcatcgtgggtgccttgggcaacagtcttgttatccttgtctactggtactgcacaagagtgaagaccatgaccgacatgttccttttgaatttggcaattgctgacctcctctttcttgtcactcttcccttctgggccattgctgctgctgaccagtggaagttccagaccttcatgtgcaaggtggtcaacagcatgtacaagatgaacttctacagctgtgtgttgctgatcatgtgcatcagcgtggacaggtacattgccattgcccaggccatgagagcacatacttggagggagaaaaggcttttgtacagcaaaatggtttgctttaccatctgggtattggcagctgctctctgcatcccagaaatcttatacagccaaatcaaggaggaatccggcattgctatctgcaccatggtttaccctagcgatgagagcaccaaactgaagtcagctgtcttgaccctgaaggtcattctggggttcttccttcccttcgtggtcatggcttgctgctataccatcatcattcacaccctgatacaagccaagaagtcttccaagcacaaagccctaaaagtgaccatcactgtcctgaccgtctttgtcttgtctcagtttccctacaactgcattttgttggtgcagaccattgacgcctatgccatgttcatctccaactgtgccgtttccaccaacattgacatctgcttccaggtcacccagaccatcgccttcttccacagttgcctgaaccctgttctctatgtttttgtgggtgagagattccgccgggatctcgtgaaaaccctgaagaacttgggttgcatcagccaggcccagtgggtttcatttacaaggagagagggaagcttgaagctgtcgtctatgttgctggagacaacctcaggagcactctccctctgaggggtcttctctgaggtgcatggttcttttggaagaaatgagaaatacagaaacagtttccccactgatgggaccagagagagtgaaagagaaaagaaaactcagaaagggatgaatctgaactatatgattacttgtagtcagaatttgccaaagcaaatatttcaaaatcaactgactagtgcaggaggctgttgattggctcttgactgtgatgcccgcaattctcaaaggaggactaaggaccggcactgtggagcaccctggctttgccactcgccggagcatcaatgccgctgcctctggaggagcccttggattttctccatgcactgtgaacttctgtggcttcagttctcatgctgcctcttccaaaaggggacacagaagcactggctgctgctacagaccgcaaaagcagaaagtttcgtgaaaatgtccatctttgggaaattttctaccctgctcttgagcctgataacccatgccaggtcttatagattcctgatctagaacctttccaggcaatctcagacctaatttccttctgttctccttgttctgttctgggccagtgaaggtccttgttctgattttgaaacgatctgcaggtcttgccagtgaacccctggacaactgaccacacccacaaggcatccaaagtctgttggcttccaatccatttctgtgtcctgctggaggttttaacctagacaaggattccgcttattccttggtatggtgacagtgtctctccatggcctgagcagggagattataacagctgggttcgcaggagccagccttggccctgttgtaggcttgttctgttgagtggcacttgctttgggtccaccgtctgtctgctccctagaaaatgggctggttcttttggccctcttctttctgaggcccactttattctgaggaatacagtgagcagatatgggcagcagccaggtagggcaaaggggtgaagcgcaggccttgctggaaggctatttacttccatgcttctccttttcttactctatagtggcaacattttaaaagcttttaacttagagattaggctgaaaaaaataagtaatggaattcacctttgcatcttttgtgtctttcttatcatgatttggcaaaatgcatcacctttgaaaatatttcacatattggaaaagtgctttttaatgtgtatatgaagcattaattacttgtcactttctttaccctgtctcaatattttaagtgtgtgcaattaaagatcaaatagatacatt

SEQ ID NO: 5466 - DNA, 2499 bp, Homo Sapiens
  NM_031206
gctggtgcggtggcggttcggagtgagggtagcacgctgagctgaaggctgtgcggagcggcgcggcacagagcctgttgttgagctcagtatgtcgtgggaatccggggccgggccaggtctaggttcccaggggatggatctcgtgtggagtgcgtggtacggaaagtgcgttaaagggaaagggtcgttgccactctcggcccacggcatcgtggtcgcctggctcagcagggccgagtgggaccaggtgacggtttatctgttctgtgacgaccataagttgcagcggtacgcgcttaaccgcatcacggtgtggaggagcaggtcaggcaacgaactccctctggcagtggcttctactgctgacctgatacgctgtaagctcttggatgtaactggtggcttgggcactgatgaacttagactgctctatggcatggcattggtcaggtttgtgaatcttatctcagagaggaagacaaagtttgccaaggtccccctcaagtgtctggctcaagaggtaaatattccggattggattgttgaccttcgccatgagttgacccacaagaaaatgccccatataaatgactgccgcagaggctgctactttgtcctggattggctccagaagacctattggtgccgccaactggagaacagcctgagagagacctgggagttggaggagttcagggaagggatagaggaagaggatcaagaggaagataagaacattgttgttgatgacatcacagaacagaaaccagagcctcaggatgatgggaaaagtacggagtcagatgtaaaggccgatggagacagcaaaggcagcgaagaggtggattctcattgcaaaaaggccctgagtcataaagagctatatgaaagagcccgagaactgctggtatcatacgaagaggagcagtttacggtgctggagaaatttaggtatttacctaaggccattaaggcgtggaataacccgtccccacgtgtagaatgtgtcctggcagagctcaagggcgttacatgcgagaacagggaggctgtgctggatgcttttctggatgatggcttccttgtccccacatttgaacagttggcagctttgcagatagaatatgaagatggtcagactgaggtccagagaggggaaggtactgacccaaagtcacacaaaaacgtggacttgaatgacgtcctggtgccaaagccgttctctcagttctggcagcccctgctcaggggcctgcactcccagaacttcacgcaggccctattggagaggatgctctctgaactgccagccttggggatcagcgggatccggcctacctacatcctcagatggaccgttgaactgatcgtggccaacaccaagactggacggaatgctcgccgattttctgcaggccagtgggaagcaagaaggggctggaggctgttcaactgctccgcctcccttgactggccccggatggttgagtcctgcttgggctcaccttgctgggccagcccccaactccttcggatcatcttcaaagccatggggcagggcctgccagacgaggagcaggagaagctgctgcgcatctgttccatttatacccagagtggagaaaacagcctggtgcaggagggctctgaggcctcccccattgggaagtctccatatacactagacagcctgtattggagcgtcaagccagccagctccagcttcgggtctgaagcaaaggcccagcaacaggaggagcagggcagtgttaatgatgtcaaggaagaggagaaggaggagaaagaggtcttgccagaccaggtagaggaggaggaagaaaatgatgaccaagaggaggaagaggaggatgaagatgatgaagatgatgaagaggaagacagaatggaggtggggcctttctctacagggcaagagtcccccactgccgagaatgctaggcttctggcccagaaaagaggagctttgcagggctctgcatggcaggttagctcagaagacgtgcgatgggacacatttcccctaggccgaatgccaggtcagaccgaggacccagcagagctcatgctggagaattatgacaccatgtatcttttggaccagcctgtgctagagcagcggctggaaccctcaacatgcaagactgacaccttgggcctgagctgtggtgtcggcagtggcaactgcagcaacagcagcagcagcaacttcgagggccttctctggagccaggggcagctgcatgggctcaaaactggcctgcagctcttctgatggccatccctggtgcaagtgttcatccagccgtgccagggcaacagcccaccccctagtacaactgatgctccctgagacaacctgggagacagcctggatcagccacatcaactcagttgtccaccacaggggaattttgaatgtcttttgtttttgttttgttttgaaaaataataaacaggcaactgtaaaaaaaaaaa

SEQ ID NO: 5467 - DNA, 1352 bp, Homo Sapiens
  NM_031209
ggcccacgtggttccgacagtcaagatggcgggagcagctacccaggcttccctggagtcggccccacggatcatgcggctggtggccgaatgcagccgctccagggcccgggcaggcgagctgtggctgccgcatgggacagtggccactcctgtgttcatgccagtgggcacgcaggccaccatgaagggcatcacgaccgaacagctggacgctctgggttgccgcatctgcctgggcaatacctaccatctgggtctaaggccgggacccgagctgatccagaaagccaacggtctccacggcttcatgaattggcctcataatctgctaacggacagcggcggtttccagatggtgtcgctggtgtctctgtccgaggtgacggaggagggcgtccgcttccgctccccctacgacggcaatgagaccctgctgagcccggagaaatccgtgcagatccagaatgcgctgggctcggacatcatcatgcagctggacgacgtggttagcagtactgtgactgggccacgtgtggaggaggccatgtacaggtcaatccgctggctggaccggtgcattgcagcccatcagcggccggacaagcagaacctcttcgccattatccagggtgggctggacgcagatctccgggccacctgccttgaagagatgaccaagcgagacgtgcctggcttcgccatcgggggcctgagcgggggtgagagcaagtcgcagttctggcggatggtggcgctgagcacctctcggctgccgaaggacaagccccgatatctgatgggggttggctatgccactgatctggtagtctgcgtggctcttggatgtgacatgttcgactgcgtcttccccacacggacagcgcgctttggctctgccctggtgcccactgggaacctgcagttgaggaagaaggtgtttgagaaggacttcggccccatagacccggagtgcacctgccccacgtgccaaaagcacagccgcgccttcctgcacgcactgctgcacagtgacaacacggccgcgctgcaccacctcacggtccacaacatcgcctaccagctgcagctcatgagcgccgtccgcaccagcatcgtggagaagcgcttcccggacttcgtgcgggacttcatgggcgccatgtacggggatcccaccctctgtcccacctgggccactgacgctctggcctctgtgggaatcacactgggctgacctggcattgggagagggagggaggaaggaagggagggaggggctggaagatactgaaggattcctttttgaaaggttttttttattgtaacttacaaaaaaaaaaaaaaaaaaa

SEQ ID NO: 5468 - DNA, 1584 bp, Homo Sapiens
  NM_031212
gggccaagcgggagccggaggccccgggctctctgggccgcgcctgaggcggacactacggggccggggggcggcggcggcagtggtggcagcggcggcgggggtgggcgccgcagctggcccgggtggatggagttggaggggcggggtgctggcggtgtggcgggggggccggcggcagggcccgggcggagccccggggagtcggcgctgctggacgggtggctgcagcggggcgtgggccggggggccggcggcggggaggccggggcctgcaggcccccggtacgacaagatccggactccggcccggactacgaggcgctgccggctggagccactgtcaccacgcacatggtggcaggcgccgtggcagggatcctggagcactgcgtgatgtaccccatcgactgcgtcaagacccggatgcagagtctacagcctgacccagctgcccgctatcgcaatgtgttggaggccctctggaggattataagaacggagggcctatggaggcccatgagggggctgaacgtcacagcaacaggcgcagggcctgcccacgccctttattttgcctgctacgaaaagttaaaaaagacattgagtgatgtaatccaccctgggggcaatagccatattgccaatggtgcggccgggtgtgtggcaacattacttcatgatgcagccatgaaccctgcggaagtggtcaagcagaggatgcagatgtacaactcaccataccaccgggtgacagactgtgtacgggcagtgtggcaaaatgaaggggccggggccttttaccgcagctacaccacccagctgaccatgaacgttcctttccaagccattcacttcatgacctatgaattcctgcaggagcactttaacccccagagacggtacaacccaagctcccacgtcctctctggagcttgcgcaggagctgtagctgccgcagccacaaccccactggacgtttgcaaaacactgctcaacacccaggagtccttggctttgaactcacacattacaggacatatcacaggcatggctagtgccttcaggacggtatatcaagtaggtggggtgaccgcctatttccgaggggtgcaggccagagtaatttaccagatcccctccacagccatcgcatggtctgtgtatgagttcttcaaatacctaatcactaaaaggcaagaagagtggagggctggcaagtgaagtagcactgaacgaagccaggggttcagatgacactgctgcatcctggtcacattctctgtctcctggaatgctcccacctcaagtggagttagaaggaaggtagaggggctctcccccaggattttggtgttttgactaacaccagttcctgccaacctctgttgccaccacctttccttccaggccctaagcacgtgcagcaaagcacaccacagcacctttgataacctctctccatcctgggcctgatgacctgctctagactgttatagagggataagcagctcattcccctggttcctaataaaaagcctttaaattaaatggtaaaaaaaaaaaaaaaaaaaaaaaaaaaaa

SEQ ID NO: 5469 - DNA, 3785 bp, Homo Sapiens
  NM_031215
tctgaggatggccgcggccgcggccggtggagccccgggcccggcccccggccccgccgggcccccgccacccgccgcgccgacctcggccgctcgggccccgccgcaggcgctgcggaggcgcggggactcgcggcgccgccaggccgcgcttttcttcctcaacaacatctccctggacgggcggcccccgagcctgggcccgggcggagagaagcccccgccgccgcccgccgaggcccgcgaaccgccagcgccgccgccgccggagccccccaccgggctgcccgccaggacccccgcgccccagggcctgctcagccccacgcaggtgcccaccggcctcggcctggatgggcagcgccagaggaagcgagtcacgtcccagcgctgctccctggagtttctggaagatgccgtgggatgcgctccagcacagagaaccaaacacacatctggatcaccgagacataaaggcctgaagaagacccacttcatcaagaacatgaggcagtacgacaccaggaacagcaggatcgtgctcatctgtgccaagcggtccctgtgcgcggccttctcggtcctgccctatggggaaggcctgcggatcagtgacctgagggtggacagccagaagcagaggcacccgtccggcggcgtctctgtgtcttccgagatggtctttgagctagaaggtgtggagctaggagcagacgggaaggtcgtgtcttatgcgaagttcctgtatcccaccaacgccctggtcacacacaagagtgacagccatggcctgctgcccacacctcggcccagtgtcccccggactctgccagggtcaagacataaacctgcccccaccaagtcggcaccagccagcacagaactagggagtgacgtgggggacaccctggagtacaaccccaacctcctggatgacccgcagtggccctgcggcaagcacaaacgtgtcctcatctttgcgtcgtacatgaccacagtgatagaatacgtgaagccctcagacctcaaaaaggacatgaacgagaccttcagggagaagttcccccatgtcaaactgacgctgagcaaaatcaggagcttaaagcgggagatgcggagcctgtcggaggagtgcagcctggagcccgtgacggtggccatggcctacgtgtactttgagaagctggtcctgcagggcaagctcagcaaacagaaccgcaagctgtgcgctggcgcctgcgtgctgctggctgccaagatcagcagtgacctgcgcaagagcggcgtgacgcagctcatcgataagttagaagaaaggtttcgattcaacaggcgcgacctgatagggtttgagttcacagtgctcgtggccttggagctggccctgtatcttcccgagaaccaagtgttacctcattacaggcgcctcacccagcagttctagcagaggccccacagaaggctcagggcaccgaggtgcacttgccggcctgggaggtgtcccactgaagccccgcgcctcctcctgccagcacccccagcacctgctagcaggaggcacctggcctccgctggtgcagctttcctttttgcctctttgccatttccttggaaagagacgtcgctttcatccccaagtgcaccgtccctccgaggggatttctgagaattctcctgcatttttacataaactaaatgtgaggtttgttactggtatttttttcacgtgcctgagaccagcctggtaccaggaccttttgttcacagcgtgcagcagcgagccggctgcagtgtgtctcccctggcctcgccttctgcaaaccaccgcagccaccacagcgtcagggtggagatctgggtttctagacctcactgaacacactggaatggctgagtttaacttatttaggcattcatcttggagatgtggtttttcgggttccccagcagcatctcccgacaccaactgtgccgctggctccctgccacctgaagccgagctcctccagagctttctccgcccacctcactgcatcccaagtggagcttttggtgtccagttaggccagcgggagcagtctcctgatttattttgatctcattcttggactcttggacctctctgttcttcaagcatcgtgtcactgtgaaatcctaacgcccctgtgtcctacagaccgacggcacaacagacagctgcccatcccatgccatgctctaccctctgcctctcaccaggagacactctgggcctccaggacaattgctgcttgccggctcttatttttctaagcaatattgtgatggagaaaaataacatatttattgggatttggttttttgggtcttttttttttaagggaacaaaaaatggttaaatgaggtctgctgaagttgacttgaaaacacacttgaccctcaggcaggagggcactgaccacaccccacacaacctcaaagggtcagtgcgtcagtgccttttcttctgaggcaggaaacaggtgccatcttggccacctcggccagggcagcccaccatgctaaaaggaccccaaatggtggtcgttgtcccttctgtgcaggccagcagggccccatctctagtttttccacgtctgtctgaagttcttgcaacaaattctgcatggtccagcgctccagctagctgcctcatcaaaaacactgaataaccaaggactgctgagtttttcttcatggggggtcagctggtctcaaaactggccactgcctcagccaccaagctttttcctaccactaccttataaacctgcctggccctggaggggctctgggacgactttgtctctagcccattaatacaatacatcctatgctttctgtgcagactggtgcttccgcagaaaggagatgccaattctgctatcacagaactccaccagcaactccacccgaccccagcagtggtgcaggacagctgccagcacccacctggccctcctccttttccacagccactcactggggccaccaaaacccagagatggcaggtgtgtgggacagactggaggatgaggacaaaccaaagcctttgttctttcttattgtggagcgtccccttccatcaagcagcctgccctcaagccaaggatcatcccctggaacccagtatgcacccagaggggactcagcttcaaagctgctccaccatgctgggtcccaggcagctttcctctgaaaagcaacctctcctgccacccagatcccatctcaagagctcgcccatgttacgagcatgtaaaggactgacttcctagtaactgttgcagtttacaacctgccctccagggacacgtctccatggtttttcctacacatgaatgcgagaaatggctgataagcacagtaatttaagattgcgtattcatgtagtgagatttagtcattaaccaacccggtctttgtgatgtgtgaagccttcccttcagttatgtcccatttttatgatgccaaaagctgccactgtgtggtattcgaggattattgcaacaaagccagtagttaaaccaaactacagtctcagcctgtcattctctagaacacatccaggtgtcggagctaaggtgttcagctcggctgtgactatacagaaccaggcctggcgttgcttccgcaccggtagcagttgtggatgtcagtgtgcataagcaagtatcagacctcagaatgtttgagttattttgtcttagatatctgtttttaaatggataatgtatttgtcctttaaacctcagttttgcaatatg

SEQ ID NO: 5470 - DNA, 3513 bp, Homo Sapiens
  NM_031216
aggcaggggcggtgcgggggcgtgggcagcacaagccgtgcgctcccgggctgcgaggtctggctaggctacgggccacgcgccgccgccgctgccgccgccactgtcctcttcggaggcgcgggcccgacggaaaccatgtttgtggctcgcagcatcgcggcggaccacaaggatctcatccacgatgtctctttcgacttccacgggcggcggatggcaacctgctccagcgatcagagcgttaaggtctgggataaaagtgaaagtggtgattggcattgtactgctagctggaagacacatagtggatctgtatggcgtgtgacatgggcccatcctgaatttgggcaggttttggcttcctgttcttttgaccgaacagctgctgtatgggaagaaatagtaggagaatcaaatgataaactgcgaggacagagccactgggttaaaaggacaactctggtggatagcagaacatctgttactgatgtgaagtttgctcccaagcacatgggtcttatgttagcaacctgttccgcagatggtatagtaagaatctatgaggcaccagatgttatgaatctcagccagtggtctttgcagcatgagatctcatgtaagctaagctgtagttgtatttcttggaacccttcaagctctcgtgctcattcccccatgatcgccgtaggaagtgatgacagtagccccaacgcaatggccaaggttcagatttttgaatataatgaaaacaccaggaaatatgcaaaagctgaaactcttatgacagtcactgatcctgttcatgatattgcattcgctccaaatttgggaagatctttccatattctagcaatagcgaccaaagatgtgagaatttttacattaaagcctgtgaggaaagaactgacttcctctggtgggccaacaaagtttgaaatccatatagtggctcagttcgataatcataattctcaggtctggcgagtgagttggaatataacaggaacggtgctagcatcttcaggagatgatgggtgtgtaagattgtggaaagctaattatatggacaattggaagtgtactggtattttgaaaggtaatgggagcccagtcaatgggagttctcagcagggaacctcaaatccttccctaggttcaactattccaagtcttcagaattcattaaatggatcttctgctggcagaaagcacagctgagtacaagctaactggagtaactttgctgttttgctgcttgttgcatgcacacaggaatggaaagcgagctccttttccccttccccagcgccgtttgacctctcccaagatacaccagcagcctgcttactactaaacgcaatccaaaaggcctttaaaaatacagtgtatattttttgtactagtcagtttattgacactatttgaaacttttgaaatataaacggagaggctttctgttgagacattgtcaccaaaacaattttttgaaatgttcctgaaactaatttgggtttaaagattaaaagggttgttaccattcttatctgagtagttgggaggaggggaataccactttagttcatttggaaaatatagacatatttcttttgctttcttaaaacagcttaaaatgatgaacttttataattttaatttgaagattgaataaatattttttataaagattgttttgagtgctgatttgtttactttttgtagatttgctttatccatgatattcagtacaactctgtcatttctttgtaatatttaaaaaatattagtaaaggagtgaattaataaagtagtaatagtaaaatgaaaggaacttgactgtacagtttgtagccaggttaagcatttggtattgtttcatttacaatttgggactaagatggaaacactttttttataagtttttaattcatagtcactaaagagataaatgtttcttatatacatttgtgtatttttatggtgttatttattccatggcttagcttccttcaaatcaaaatttggacacacactattaagagaagccattaaaattttactaaaattgtgcatgtaaattaattgtcagcattccatgtctcaagattttcttaatttagttcgctgtttaaattaattcatgtcctgtaaagttctgaccttgataacaaagctataaatatttaagtttgctaatatgcgtaagtattatcggtaagttacaagatggaagaagaataacagtagggcacagtcattctgtgaatccttttacttatcaaaatttggtagctattctaaggcttttgcagaaaaataagtgttcaatgtttgtagttcttcaaaagcatgttgcagtagccagccatactatgtgtattcccagtatcatgtacgcactaaaaaaaatgtgtgcttgctgctgctgtgagtgaaccattgcttaagataaaaaacttaactagatctgtaaatgtacagaatagcatcagatgtttctgagagattagaaaatgttttgaatttataaaattaatgtttttctttgtaacatttatatatattttttaacattttaagtttaacagattgtattcctttcaagtttctatacttgcttaagcaatcttgatttgagtaagggtcttgatttgtgctattatgttctgttagttttggcatgaatatactaaagcttttttttttttttctagcatgtgttttctcctctttggttctctttgtatttactacttttctctttttcttgtgttttttttttcctgtttttgttttgtttggtgttttgttcctgtcttcattgtttcaggtatttctttacccctctggattccccacgggctggatcgagatggtccagttatgcccagctccttcctcctcctcctcctcctctggtagagcactcttgcgatgctgacactgccaacctccagtatcctcaccctcgcagacgatatctctctcggcctcttaatcccttacctgagaatgaagggatttaaaacactgatttaacattgaaaggccttattcaagtgcttgtaaatgctttcatttctggctgctttttgtttttcattttctttcagaagatttttctaacttagggtctgtcttgcatgtattacaaccagaatacagtgtttggaacctaaatctgtttgtgcgtctgcatcaaaggaacatttgcttcactgggtgataacctttgatgaaatgagatatgtccaagtaacgttaactgtgaagttacacacagtagctgacttcaaagtgcctgttctgtaaattttattttaaactgttaccatagtcttaagttgtttatgctttatcagactggctaatgtgaaagcataatattatgaagtttattctgccttatgagaccttaaaaaatggatttcattttacaggctaatgttgtaactgactagtatgtaaaataaatcattcctgtgtataaagcagcaaaacctaaaaaaaaaa

SEQ ID NO: 5471 - DNA, 1787 bp, Homo Sapiens
  NM_031219
aaaaaaaaaaaaaagccgtgggtcaggagccagagccctctgctctagtcttagctgtgccaatgtgactccctgtgtgatttgggggtaaattactgcccctcactgggtctctgtctacccacctgcaaaatgagaggatctttggatgagtctccttaattcatttcctggacaaacttcctccaaggctcccccagatttatcagtgacgcccttccctaagtatcaacttagccgtactttgaactctggcccctcaggtttcaaggggacggccttgtctgggatcagctctgtctggggaaagaagctgcaccagcctctggatagcaggctgagtcacttgtttcttgtgccttgagtcagttctctcatcagctctcctcctaggccagtgttattacctccagtaaagatggaaaagttggggttcagagagggctagagacagacagcctgctgtgtcctgtcttttctcctgtgctgtacaggttcaccaatttttaaaatccaaatatatctcatggtacagtggaagaactggccagagagtctggaagtttgggttctggtcctggctgtgccactgactcactgtgaccttgggatcttgtgctgtgaagacatttcccaagtgcttcatgttagccagcaaatctgacccacaaggcctggaaagaggtgattgttaggttgcgcagaggtggtcttatccagctcagcttcccctgggacccaccgtgggacctgaggcagaactggggtggacttggcctcctccatggcacaccggctgcagatacgactgctgacgtgggatgtgaaggacacgctgctcaggctccgccaccccttaggggaggcctatgccaccaaggcccgggcccatgggctggaggtggagccctcagccctggaacaaggcttcaggcaggcatacagggctcagagccacagcttccccaactacggcctgagccacggcctaacctcccgccagtggtggctggatgtggtcctgcagaccttccacctggcgggtgtccaggatgctcaggctgtagcccccatcgctgaacagctttataaagacttcagccacccctgcacctggcaggtgttggatggggctgaggacaccctgagggagtgccgcacacggggtctgagactggcagtgatctccaactttgaccgacggctagagggcatcctggggggccttggcctgcgtgaacacttcgactttgtgctgacctccgaggctgctggctggcccaagccggacccccgcattttccaggaggccttgcggcttgctcatatggaaccagtagtggcagcccatgttggggataattacctctgcgattaccaggggcctcgggctgtgggcatgcacagcttcctggtggttggcccacaggcactggaccccgtggtcagggattctgtacctaaagaacacatcctcccctctctggcccatctcctgcctgcccttgactgcctagagggctcaactccagggctttgaggccagtgagggaagtggctgggccctaggccatggagaaaaccttaaacaaaccctggagacagggagccccttctttctccacagctctggacctttccccctctccctgcggcctttgtcacctactgtgataataaagcagtgagtgctgagctctcacccttcccccactaaccagaaaaaaaaaaaaaaaaaaaaaaaaaaaaaaaaaaaaaaaaaaaaaaaaaaaaaaaaaaaaaaaaaa

SEQ ID NO: 5472 - DNA, 4531 bp, Homo Sapiens
  NM_031226
gggagtttctggagggctgaacacgtggaggcaaacaggaaggtgaagaagaacttatcctatcaggacggaaggtcctgtgctcgggatcttccagacgtcgcgcggtgtcagaaaccctgtggtgaaattcagcctgtggattccagaaatttggagtgttcttggggggaaaaatccgcacacacaaagcaacatttggaaatccctgtggactctaaattgccccctctgaggtcaaggaacacaagatggttttggaaatgctgaacccgatacattataacatcaccagcatcgtgcctgaagccatgcctgctgccaccatgccagtcctgctcctcactggcctttttctcttggtgtggaattatgagggcacatcctcaataccaggtcctggctactgcatgggaattggacccctcatctcccacggcagattcctgtggatggggatcggcagtgcctgcaactactacaaccgggtatatggagaattcatgcgagtctggatctctggagaggaaacactcattatcagcaagtcctcaagtatgttccacataatgaagcacaatcattacagctctcgattcggcagcaaacttgggctgcagtgcatcggtatgcatgagaaaggcatcatatttaacaacaatccagagctctggaaaacaactcgacccttctttatgaaagctctgtcaggccccggccttgttcgtatggtcacagtctgtgctgaatccctcaaaacacatctggacaggttggaggaggtgaccaatgaatcgggctatgtggacgtgttgacccttctgcgtcgtgtcatgctggacacctctaacacgctcttcttgaggatccctttggacgaaagtgctatcgtggttaaaatccaaggttattttgatgcatggcaagctctcctcatcaaaccagacatcttctttaagatttcttggctatacaaaaagtatgagaagtctgtcaaggatttgaaagatgccatagaagttctgatagcagaaaaaagacgcaggatttccacagaagagaaactggaagaatgtatggactttgccactgagttgattttagcagagaaacgtggtgacctgacaagagagaatgtgaaccagtgcatattggaaatgctgatcgcagctcctgacaccatgtctgtctctttgttcttcatgctatttctcattgcaaagcaccctaatgttgaagaggcaataataaaggaaatccagactgttattggtgagagagacataaagattgatgatatacaaaaattaaaagtgatggaaaacttcatttatgagagcatgcggtaccagcctgtcgtggacttggtcatgcgcaaagccttagaagatgatgtaatcgatggctacccagtgaaaaaggggacaaacattatcctgaatattggaaggatgcacagactcgagtttttccccaaacccaatgaatttactcttgaaaattttgcaaagaatgttccttataggtactttcagccatttggctttgggccccgtggctgtgcaggaaagtacatcgccatggtgatgatgaaagccatcctcgttacacttctgagacgattccacgtgaagacattgcaaggacagtgtgttgagagcatacagaagatacacgacttgtccttgcacccagatgagactaaaaacatgctggaaatgatctttaccccaagaaactcagacaggtgtctggaacactagagaaggctggtcagtacccactctggagcatttctcatcagtagttcacatacaaatcatccatccttgccaatagtgtcatcctcacagtgaacactcagtggcccatggcattttataggcatacctcctatgggttgtcaccaagctaggtgctatttgtcatctgctcctgttcacaccagagaaccaggctacaagagaaaaagcagaggccaagagtttgagggagaaatagtcggtgaagaaaccgtatccataaagacccgattccaccaaatgtgctttgagaaggataggccttcattaacaaaatgtatgtctggttccccagtagagctctactgcctcaacccaaggggatttttatgtctggggcagaaacactcaagttgattagaaagaccaggccaatgtcagggtacctggggccaaacccacctgctagtgtgaattaaagtactttaattttgttttctgtggaggtggaaaagcaacattcatagtctttggagaaatgcttagaaattcagcatttgacccttgctgtgaattaagcccaattaattcctgtttgtctacatatgatctgtctgtggcaaaagtttaatcagaggaaattctttcccagtctgtcgatttatgcctcagccacttgcctgtgctacaattcattgtgttacctgtagattcaggtaatacaaactatatataatcatcaagtaatacaaactaatttagtaatagcctgggttaagtattattagggccctgtgtctgctgtagaaaaaaaaattcacatgatgcacttcaaattcaaataaaaatccttttggcatgttcccatttttgcttagctcaattagtgtggctaaccaagagataactgtaaatgtgacattgatttgctcttactacagcttcagtgattgggggaggaaaagtcccaacccaatgggctcaaacttctaaggggtactcctctcatccccttatccttctccctcgacattttctccctctttcttcccatgaccccaaagccaagggcaacagatcagtaaagaacgtggtcagagtagaacccctgaagtattttttaatcctacctcaaaatttaacagttacctgagagatttaacattatctagttcattgaatcattgtatgtggtcatggataaattgcacaccttggaattcgctttctaaaggaaatcaaatgaatggaggaactttccaaacaccactttacttgtgttatatagccaatataactatctctactgaatgtcattgaaaaactaaaaaattaaacttatttacaaataggtaaatatttgtcattgaatccattgccatcccatttgactgttcttttcatcctactgtctagtaataagctgagtataagatgacagtgtaatctccctgaaagcaggagctactttctttcttttgtaatctatttccatccccatttccctgtcctgtctccctgtattcactcccaagctcagttctgaatagacattcctgctcagagatactcccaactgatgcagaaaccaaataaagaggtaggtattccaagaattcaagaatggacattagtaaagaataaaacatttatttgagcttggaattatttggatcatctatatggcctaaaaatatatggactatgcctgtgtacctgaatacgtatgtagtcaggtcaagacaatcatccaaataacttagacccctaaaagcaaggccaggatttgcaatttaatgtgtcccaattaattcacttgaaaattagtaacactctgtttacgttgcctctggctggagctgcatggtggaagaagcccaactttggatccatgtacttcacccatccaatactcttgggacatttatgtgtattttatctgtatatatgaagccaatgtctatgtctacacagtcaaagtgaaatgcatgtttgatatagctgtacatagatatctattttgcaggtacaaaaatatcctgggggaaaactgggagtggaagggtggggggtgggagtgagggacatgggggagggacaggaagaggagaagtgttggtttgaacgatccaagcaaactctcccagaatcaaattacctgggtagttgttcaacttttcactctgcttagcctgtatagacaaaccccatatatttgtagaggcttggccttggaattctggaataccattggcttttcagtaggctgatgaacacattttgaaaattctattatcttcagaattttgccccattgttaagtgcttaaccgtcactcttgaatgtgcaatgtgctgtggattccattttcatcagttctgaaagaactgcaatgtgtaaattatcagtgaaatgcatgcatataagggctctatcattatcaaattgtaaggacaattgtacccttctatatctttgggcatgctagacacccccatgccttcattgagatcccattttccccctctcaagtggaaaataatcacatccagcaagctctctcattattgagaaataccatttggaaattgccactttttattcctaagcagcacctttcactgttcatgatgctaatgttccacaaaagcatgtgccattggcccactgaaggatagagggacccttttcaatctatatcagctgggctctgggactgaatctctcacctattcttgcagaaagacatactaattaaaccttgtcaaagtaaaaaaaaaaaaaaaaaa

SEQ ID NO: 5473 - DNA, 2398 bp, Homo Sapiens
  NM_031244
tgggagggaggcaccccggggggcggggcgtgggagactgtattcgggggcgcgagctgccccagtaaatggaaatgttttctaacatataaaaacctacagaagaagaaaataattttctggatcaaattagaagtctgtattatattgatgtctccagattcaaatatattagaaagcagccgtggagacaaccatcttcattttgggagaaataactaaagcccgcctcaagcattagaactacagacaaaccctgatgcgacctctccagattgtcccaagtcgattgatttcccagctatattgtggcctgaagcctccagcgtccacacgaaaccagatttgcctgaaaatggctcggccaagttcaagtatggcagattttcgaaagttttttgcaaaagcaaagcacatagtcatcatctcaggagctggtgttagtgcagaaagtggtgttccgaccttcagaggagctggaggttattggagaaaatggcaagcccaggacctggcgactcccctggcctttgcccacaacccgtcccgggtgtgggagttctaccactaccggcgggaggtcatggggagcaaggagcccaacgccgggcaccgcgccatagccgagtgtgagacccggctgggcaagcagggccggcgagtcgtggtcatcacccagaacatcgatgagctgcaccgcaaggctggcaccaagaaccttctggagatccatggtagcttatttaaaactcgatgtacctcttgtggagttgtggctgagaattacaagagtccaatttgtccagctttatcaggaaaaggtgctccagaacctggaactcaagatgccagcatcccagttgagaaacttccccggtgtgaagaggcaggctgcgggggcttgctgcgacctcacgtcgtgtggtttggagaaaacctggatcctgccattctggaggaggttgacagagagctcgcccactgtgatttatgtctagtggtgggcacttcctctgtggtgtacccagcagccatgtttgccccccaggtggctgccaggggcgtgccagtggctgaatttaacacggagaccaccccagctacgaacagattcagtcatttgatctccatctcatctctaattattataaagaattaaaacaagtcatcattgtagaaaagcaagaaaatgcagatagagaaaaagaagaaaataaaactggagtatttccacaacccaagtttagagttggcccccacctcccatgccatggactgagcagcaggggcccagcatcccttggatatggtggctgtgtcttcatgtgaaagaaactgaacttggtggtttttcctgccagttcaggagagattcttggcatgtaatatatatcactgctcaagtcaagcctcctaaaaccacagacctgtttcagctgctacttcagccaaaattcttcagcttcatattgtcttgaaaacctatgattgtctctaacaaacaggctacttgctagttagaaattcttatcaatttggcaagctacttatcaaccagactgaccacaagaactgtcatctcatcaatgaaggagtaactgatcaatgaagccagcaatgcttttttcttggcatcatcaaagctgacatttagaagagatgctggtgatagtcatctcatcctactcaatttttcaaaggcagaaaccaaccctggagcaattgagaggactgtttaaacacagagcttaacaatggcagaattgtatatctcgtgcttaacagattttggttgaactttaccctaggtcaggggtcagcaaactactgcctgtgggccaaatttgcccaccacctgtatctgtaaataaggtttcattggaacacagctgtggccatatgtttgtatattgtgtgtggctgcttttgcattaggatgacagaggtgaatagttgcaacagagactggctggtctgcaaagcctaaaatatgtcctgtgtggccctttacagaaaaagttttctaacccctgctctaggttacggagaaaaaaaaaatggaataatgttctctgctacttttaacctgattttctttgttacctaaataggcagctagaatgctgcctatattttaataaggatttggatctcacaagacaccttaggccttacacaagttgttcagattctttgccccagttctaatctagtgacaaaggcatagaattctcctcccacaggaatgtatttctattttcaaggtgttaattagttccagttttggttttgtcgttttccccatgtccgatgcttatattggatgatttctgataaaccctgactattccaataaaccctaggcatttttgaatttaaaaaaaaaaaaaaaaaaaaa

SEQ ID NO: 5474 - DNA, 6805 bp, Homo Sapiens
  NM_031267
gcatctggtgttttcgctgccgaggataggacgacgagcgcaatcgggagctccgccgcccggattcctgcttccctggggcccggaggctgctgcgtaccccactgtgacctggaacccagggacccgagtcccgacccggattatcgtggcgcttttcccggccggctctggtgctcggtgtccctccgccgccgctcccgtttccggcgggggagatggccaggatctgacccgggaggaggccgcacccgcgccgcgctctgcggctggctctaggcgatgccgagcagctcggacacggcgctggggggaggcgggggcctgagctgggcggagaagaagttggaggaacgccgcaagcggaggcgattcctgtcccctcagcagccgccgctgctgttgccgctcctgcagccgcagctcctgcaaccgccgccgcccccgccgcctctgctcttcctggctgctcccggcacggccgccgccgcagccgccgccgccgcggcctcctcctcttgcttcagcccgggcccccctctggaggtcaagcggctggcgagaggcaagaggcgcgcaggagggcggcagaagcggcgtcgcgggccccgcgccgggcaggaggcggagaagcgtcgggtcttctcgctgccccagccgcagcaggacggcggtggcggtgctagtagcggcgggggtgtgaccccgctggtggaatacgaggatgtgagctcccagtccgagcaggggctgctgctggggggggccagcgcggcaacggcggcgacggctgccgggggaacggggggcagcggcgggagtccggcctcctcctccggcacccagcggcgcggggaggggtcggagcgcaggccccgccgggaccgccgcagcagcagtggccgcagcaaggagcgccaccgcgagcaccggcggcgggatgggcagcgcggtggcagcgaggcctccaagtcccgcagccgccacagccacagcggcgaggaacgggccgaggtcgccaagagcggcagcagcagcagcagcggcggccgccggaaaagcgcttcggccacatccagcagcagtagcagccgcaaggaccgggactcgaaggcccaccgcagccggactaagtcgtccaaggagccgccttcggcctacaaggaaccgcccaaggcctaccgggaggacaagaccgagcctaaggcctacaggcggcggcggtccctcagcccactgggaggccgggacgacagcccggtgtcccacagggcctctcagagcctgaggagccgcaagtcccccagcccggcaggaggtggcagcagcccctattctcggcggctgccgcgctccccgagcccctacagtcgccgccgctcccccagctacagccgccacagctcctacgagcggggcggcgacgtgtcccctagtccctacagcagcagcagctggcgccgctctcgcagtccctacagccctgtgctcagacggtctggaaaatcccgaagcagaagcccgtattcatctaggcattcaagatctcgtagcaggcacagattgtctagatccagaagtcgtcattctagtatttctcctagcacactaactctgaagagtagcctggcagctgaattgaacaagaataaaaaagcacgagcagcagaggcagcaagagccgcagaagcagcgaaagctgcagaagcaactaaggctgctgaggctgctgccaaggctgcaaaagcttcaaacacttctacacctaccaaggggaacacggaaactagtgccagtgcatcacaaacaaaccatgtgaaggatgtgaagaaaattaaaattgaacatgcaccttctccctcaagtggtggaactttaaaaaatgacaaagcaaaaacaaagccacctcttcaggtaacgaaggtggaaaataatttgattgtagataaagccaccaagaaagcagtcatagttggaaaggagagtaaatctgctgctacaaaggaggaatcagtatctcttaaagagaaaaccaaaccacttacaccaagcataggagccaaggagaaggagcaacatgtagctttagtcacctctacattaccaccgttacctttgcctcccatgctgcctgaagataaagaagctgatagcttacgaggaaatatttcagtaaaagcagttaaaaaagaagtagaaaagaaactccgatgtcttcttgctgatttaccgctgccccctgagctaccaggaggagatgatctttcaaagagtccagaggaaaagaaaacagcaacacagttacatagtaaaaggaggcctaaaatatgtgggcctcgctatggtgaaaccaaagaaaaagatattgactggggaaaacgctgcgtggataaatttgatatcatcggaattattggagaaggtacttacggacaagtttacaaagccagggataaagacactggagaaatggtagccttaaaaaaagtacgtctggataatgaaaaggaaggctttccaattacagcaattcgagaaattaaaattctccggcagcttacccatcagagtattatcaatatgaaggaaatagtgactgataaagaagatgctttggatttcaagaaggacaaaggtgcattttatctggtgtttgaatatatggaccatgatctgatgggactactggaatcaggcttggttcattttaatgaaaatcacataaagtcatttatgagacagctcatggagggtctggattattgtcataagaagaactttttgcatagagatattaaatgttccaatatccttctaaataatagagggcagataaaacttgcagactttggacttgctcgattgtatagctcagaagaaagtcggccgtatactaacaaggtaattactttatggtaccgtccacctgaactgctactgggagaagaacgatacacaccagccattgatgtatggagctgtggctgtatccttggcgaactcttcactaaaaaacctatatttcaagcaaatcaggaacttgcacaactagaattaataagccgaatatgtgggagtccatgtcctgcagtgtggcctgatgtaatcaaactaccatatttcaacaccatgaaaccaaagaagcaatatcgtcgaaagttaagagaagaatttgtttttattcctgcagctgcgctagacttatttgattacatgcttgccttggatcctagtaagcgctgcactgctgaacaggctcttcagtgcgagttcctccgagatgtggaaccctcaaaaatgcctccaccagatctccctttatggcaagattgtcatgagttatggagtaaaaagcgaagaagacagaagcagatgggcatgactgatgatgtttccacaattaaagcccccaggaaggacttgtctctgggcttggatgacagcagaaccaacacaccccagggtgtgctgccatcttcacagctgaaatctcagggcagctcaaatgtggcacctggtgaaaaacagacagatccatcaacaccacaacaggagtcttcgaaaccgttgggaggaattcagccttcttctcagaccatccagcctaaagtggagactgatgctgcccaggcggctgtgcagagtgcatttgcagttctgttgactcagttaataaaggctcagcagtcaaagcagaaagatgtgctactagaagagagggaaaatggatcgggacatgaagcgtcattacaactcaggccacctccagaacctagcactccggtgtcgggacaagatgacctcatccagcatcaagatatgaggatcttggagctaacgccagaaccagaccggcctcgaattctgcctcctgaccaacgacctcccgagcctcctgaaccaccaccagtcactgaggaagatctagattatcggacagaaaaccagcatgtacccaccaccagttcttcattaactgaccctcatgccggagtgaaggcagccctgttacagctgcttgctcagcatcagccccaggatgaccccaaaagagaaggtgggattgattatcaagcaggagacacttacgtgtccacttcagactacaaggacaactttggatcctcttctttctcttctgctccttatgttagcaatgatggtctaggaagcagttctgctccaccactagaacgacgtagtttcattggaaattcagatattcagtctttggataactacagtactgcttcatctcattctggtggtccacctcagccttctgccttttctgagtcatttcccagttcagtagctggatatggagacatttacctcaatgctggtcccatgttgtttagtggagacaaggaccatagatttgaatatagccatggtcctattgcagtcctggcaaacagcagtgacccttccacggggccagagagtactcatcctttgccagcaaagatgcacaactataactatggtggtaacttacaggaaaatccgagtggccccagcctcatgcatggacagacctggacttctcctgcccaaggacctggatattcacaaggatacaggggacatattagcacatcaactggcagaggcagaggcagagggttaccatactgagtatctgtttttcctcaggcacatcatttttatctggaaagacttttctagctgcaatttaaggcagcaatccaagagacttgaataataataattcaacaacagctttatttttatgtggagaagggtcttgcatacaatagtttaaaaaagacaaaaaaaacctttgcttaaattcatgctgttctaaaaactagatcgattgtacatcttcacaaattctagttaacaattttattttgtattcttgcagttttaagtggatgctaattttaggggcataagccttttatggccctcttgcagatcttctgaactatgcacatttgtgctttttttgtaagtttggaccaacttttatgtaacaaacagcccctccccacctccagttttacaacaatcagaaagggcactgatttatttggtatttttctttttacaaagctacctttagtcaaaggtcactgtcagtctttgcacctgctttcagtgttattgtgaaaggtgtactttgtgctcatttcagaaaataaaacacaacctttctcttgatgcaacagttttataaaaaaaaaaatggtcaacgttatttttgttttgttttgcagattatcaaagcctagcaaaatgcatttaaatgaaatagtgggttttatatgaaaactatgggtggggtggggagggaaagtaagtgccttaacaggtaagcttaaggtctgaaaaaaatagttaacttttacccccatttgtcttttaaagggaatcaatgcattaaaaaggcaagaaactctgaagtttcaggggctgcctgttcagttcctgttaggtccattccctctgcttgtcacactttctccttttctgcctgtctttgggctgtgttgcctttcactaccaccttctcttgataggggagtgagagcaaagaaagggagtagaactgcaatcagtacatattgtttgagaagttctacaaagttttgtcatttaaatggttgaaagtaatagctccaggagaattttagagtaccattttctttcaggctgccatattatccctgtttccatttgccatggataattggagggtcatggtatagaagcaagagttaataacagaacttgcctaaatgtgttaaagttcatgggggaggggtggcaaataccgtattttaagttatgcaattgcccttttaagaaagtcaattctattcacttgttaactagaaacattgcttagattgaatttattgaagcaaaaagaaaaggcaatgagagagaacttttatcttccttcctgtcacattctgtaaagttgattatgacttctgccagacttagagcaacaactttagttcattttaacatttttttttaatgaagagcatcaaagaatggagtagtccttatttaaactgtaatggtgtcaagtctcactgtgtgcacactctcacacatacacacacaattatactaattctagaaaggaaccaaaggtaaataaccagtgtttccattatcactaaatggaaaaattgactggaagttagagttgtgccaattaatcattttgttcatcaactgttctggtaacttatttttttttattggaatcttaaattggaacaactgttacagaatgtatattgctccagttctaaagccagttaaccctgtgccctctaacttatgaaccttcatttcaaaacagtatgtgggaagtcctgtagtttgataagagtaaaattattttaaagaggataatttaccattttactactataaaataagttgatatcagttgaccattttattttttgatggactctttttgttgggagaaagaaatgaatggaagaaaaaaatatgttgcttttatttgaatattgattactaacaacttataaactacattgcaggaaatgaagaaatattttgaaattagcaaaatagcaacagtattcaagtatctgaaattttaatatggtgagtcttagagctttagactttcctataagtgacagtatctaagttattcttaatagtcacacttgataattctgctgaccataagcagctaacctacagttgaagatatttatgtgacatgaatagcctgtgttttaaaaattaaatattttatataaaattgaaaaaaaaaaaa

SEQ ID NO: 5475 - DNA, 1131 bp, Homo Sapiens
  NM_031286
tggagagagcggctctcgtggctggggagttggatgcaccaaacctgtgtgcggctggagagggaggcttctgccagaccctctcccgggcctgtcctgccacccaggcccctccccagtctcacactgagctccagatcagggaagggccgaaaaggacgatcagggcagccgcagaaggggcgccctgcgtgggacgggtccgttgcgcgcctggtaaccgagggggaagggaaggggcctctggcgtgcggggcggtgtcgcgcaggtcccaccccgcctgcccgcgccgcccattggtcccgagcgcgatgacttggcgggcggagcaggaaggaaaccgctcccgagcacggcggcggcgtcgtctcccggcagtgcagctgccgctaccgccgccctctgcccgccggcccgtctgtctacccccagcatgagcggcctgcgcgtctacagcacgtcggtcaccggctcccgcgaaatcaagtcccagcagagcgaggtgacccgaatcctggatgggaagcgcatccaataccagctagtggacatctcccaggacaacgccctgagggatgagatgcgagccttggcaggcaaccccaaggccaccccaccccagattgtcaacggggaccagtactgtggggactatgagctcttcgtggaggctgtggaacaaaacacgctgcaggagttcctgaagctggcttgagtcaagcctgtccagagttcccctgctggactccatcaccacactccccccagccttcacctggccatgaaggaccttttgaccaactccctgtcattcctaacctaaccttagagtccctcccccaatgcaggccacttctcctccctcctctctaaatgtagtcccctctcctccatctaaaggcaacattccttacccattagtctcagaaattgtcttaagcaacagccccaaatgctggctgcccccagccaagcattggggccgccatcctgcctggcactggctgatgggcacctctgttggttccatcagccagagctctgccaaaggccccgcagtccctctcccaggaggaccctagaggcaattaaatgatgtcctgttccattggcaaaaaaaaaaaaaaaaa

SEQ ID NO: 5476 - DNA, 3876 bp, Homo Sapiens
  NM_031296
gcttcctccagagggcgggaaccttggacgtggcggggctgggtcagtcagggcgctgggcccagcctctctgcaggctggccttccgcgctgccgtgaagcccccgacaggtcccacgcctgcctaggtagaccggcgccagcccgagtgacgcctggcgtgtggccgcgggcaggcggctccgtgcggcggggcgggcgggtgccacacctgtgcgggcaagggcggggcgggaaggtgcgcaggcgcgctcggggctggtgggcggtggctcctgggaagttgcgcagccgaactggccggctgggcgcgcgctcttgcggtggcgtaatctctcagcctttctgtgtctcctttcctccgcctcagtttggggcgggtcgggggaatggctgaggagatggagtcgtcgctcgaggcaagcttttcgtccagcggggcagtgtcaggggcctcagggtttttgcctcctgcccgctcccgcatcttcaagataatcgtgatcggcgactccaatgtgggcaagacatgcctgacctaccgcttctgcgctggccgcttccccgaccgcaccgaggccacgataggggtggatttccgagaacgagcggtggagattgatggggagcgcatcaagatccagctatgggacacagcaggacaagaacgattcagaaagagcatggttcagcactactacagaaatgtacatgctgttgtcttcgtgtatgatatgaccaacatggctagttttcatagcctaccatcttggatagaagaatgcaaacaacatttgctagccaatgatataccacggattcttgttggaaataaatgtgacttgagaagtgccatacaggtacccacagacttggcacaaaaatttgctgacacacacagtatgcctttgtttgaaacgtctgctaaaaaccccaatgataatgaccatgtggaagctatatttatgaccttggctcataagcttaagagccacaaaccattaatgcttagtcagccccctgataatggaattatcctgaagcctgaaccaaagcctgcaatgacgtgctggtgctaaataacagtctttattatattatctaattttgactaaagaaatacttttgaagtatgacagtattaagtcataagatttaatctcaactataatgggtcatcttgacactttgctgtttgtcattgtcacgcttttgtattttgtatctacttaagtttgtcactgtgacaacacaggaaaagttggttttcaggtgagattgaaaatgaagcaaagataggatgaatctgaacatctctccatctagagcccaatgaaggaagcttcaaatgagaacatgatggaatcagtaaccattcaatcttttgtcctaggattggaaaaaaatgttaaaggtttaggacacacctaatagtatgtcctttgaatgggaagtgttcttaataggataaaaactggtatttgcctctccccagagtactttttttgttttttcatagagacggggtcttgctatgttgtccaggctggccttgagctcctgggctcaagcaatcctcccacctcagcctccccagtactgggactgtaggtactcaccactgcatctggcctttctttgttttattaacatatttagttttgttattattggtatgttttagagccaagactttagttccagtgggataagaaggcatagaatgttttctggttcccagtccataaagaatgacttttccaagagttctagatgtttgattttctaattaatacttatcagatctacaaaaatcattattattttaaaagagttatttgagtttctttctttctttttttttttttttttttttgagatggagtctcgctctgtctccaggctggagtgcagtggcgtcatctcggctcactgcaacctccgcctcccaggttcaagtgattctcctgcctcagcctcccgagtagctgggattacaggcgtgcactaccacacccagctgatttttgtatttttagtatagatggggtttcaccatgttggccaggatggtctcgatctcttgacctcatgatccacccgcctcagcttcccaaagtgctgggattacaggtgtgagtcactgcacccagccgagttgctttcttactaaatcctattaaaatatgcaaaaataagtcagattttaaggcaaataaagtgacataaggtgctttatattttattttggtatatttaaacagtgaaaaactaactgaaagcacatgaagagttgtaacttgggggaaaataggtaaacatagcttctagctaacacaggagacctattcttagcctttactaatttcaagcagtgtatcccatatggtatctcttgctcttccttcaactccaataaatttaatgactaaatgccaagttaacaaatcaacttccatttggattgtaggtgtgaaggcacaactctaattgctattagtctacatgtatttctgtaatagtattgtgtcatatcaatttttaagatgtctaaattttatggtcacaagttatccctcctcagtatgaaaaataaattagatattgaaaaatgtctaaacttcagtgatggaaagaatatttcaagaagttttttaacctaaatacttttattttgaatttaagtctttgcacataaaatatagcaagcttacatattaaactatttacgtaaatggaatgtaagccatgactttaactgaagtgttcacattcactaattttgatagattgctgtccttaataattttggaggaaattaagccaaatgattattgtactacagtattttcagaatatgggaaatcaattaaaaatgtaatctaatctagtttaagatttttgtttaatcatcatggtggtcctacctggataatttaactataaagacaaagtaattctattaaatgaactaactgaaaataataattataggaagtgattattccattttaagtattagagctcaaattggctttatttgcatttagggagatcatgttttcttaatcatgctggaatttaaaaattgttttacttgtatcgaaattaaccttgatttataactatttttgtaataaaacaatgacagctgtagtaactatgatgggtgtaacaacatttttttaaagaagggaatctgtttatcgcttttcaaaatattttctaaagtgggggaagaaagtttatagactttccaagcacatttatggttttttattactattattatggttttaaaaagagtaactttatttctttttgtaaggaattaagtaatatcctttacagttctgtgaaaggacttattttttaactgtaatatttattagttttaaaatatttgtatctcatttgtaacaatttgttttaattttttatatatatgtttttatttttaaaaaacataccagttgaatggggttaaagctttcaatatcttaaaatatttataaaacatttcactgttgcaaaatcacttccaaaatgatagctatctaacaactaattactaatttttaaagaacaaatcacacatttaaaaaatctgtagaatttattttaactatgacctttaattgaaaataaataattaaaatatcagacatgttttggaaaagtcttaatttgagaacaccaaaggaaactaccccagaatctaatgtagttcgctattaataacaatgcattattgaaagtatattgcaaatacatgtttcctcatgaaatctaagtaattttgttgtggaatagtgtcactgttacatttcccccaagaagttcaataaaccagcttagccacaaagaaaaaaaaaa

SEQ ID NO: 5477 - DNA, 1079 bp, Homo Sapiens
  NM_031297
cggggccccccccaggcctggcgggaccaggatgctgccctgtcacctgccccccagccccacacaacgcccccacccacccgaacatccagtctgactggagacagccggatgccctctgaccccgggcccgaggcgggcagtggctggccgggcctcctcatgtcctgcctgaagggtccccatgtcatcctcaagatggaggccatgaagattgtccaccctgaaaagttccctgagctaccggctgccccctgcttcccgcctgctccccggcccaccccaactctggcacccaagcgtgcctggccctcagacacagagatcattgtcaaccaggcctgtgggggggacatgcctgccttggaaggggcaccccataccccgccactgccacggcggccccgtaagggaagctcggagctgggctttccccgcgtggccccagaggatgaggtcattgtgaatcagtacgtgattcggcctggcccctcggcctcggcggcttcttcggcggcggcaggcgagcccctggagtgccccacctgtgggcactcctacaatgtcacccagcggaggccccgcgtgctgtcctgcctgcactctgtgtgtgagcagtgcctgcagattctctacgagtcctgccccaagtacaagttcatctcctgccccacctgccgccgtgagactgtgctcttcaccgactacggcctggccgcgctggctgtcaacacgtccatcctgagccgcctgccgcctgaggcgctgacggccccatccgggggtcagtggggggctgagcccgagggcagctgctaccagaccttccggcagtactgtggggccgcgtgcacctgccacgtgcggaacccactgtccgcctgctccatcatgtagtagcgcctgcctgcccgccactgcccgctgagcctcgctcgctgcttcttcagggacccggccctgccctgccgcccgctgacccttccttccccaccatggcttccggccccaccccgagtggcattgtcgctgcagccaactttgccattaaaactctttgccaaagtttaaaaaaaaaa

SEQ ID NO: 5478 - DNA, 1170 bp, Homo Sapiens
  NM_031299
aagtttgaaactggtaacttcgggagttgagccacgagctgttgtgcatccagaggtggaattggggcccggcattccctcctcgtcccgggctggcccttgcccccaccctgcaactcctggttgagatgggctcagccaagagcgtcccagtcacaccagcgcggcctccgccgcacaacaagcatctggctcgagtggcggacccccgttcacctagtgctggcatcctgcgcactcccatccaggtggagagctctccacagccaggcctaccagcaggggagcaactggagggtcttaaacatgcccaggactcagatccccgctctcctactcttggtattgcacggacacctatgaagaccagcagtggagaccccccaagcccactggtgaaacagctgagtgaagtatttgaaactgaagactctaaatcaaatcttcccccagagcctgttctgcccccagaggcacctttatcttctgaattggacttgcctctgggtacccagttatctgttgaggaacagatgccaccttggaaccagactgagttcccctccaaacaggtgttttccaaggaggaagcaagacagcccacagaaacccctgtggccagccagagctccgacaagccctcaagggaccctgagactcccagatcttcaggttctatgcgcaatagatggaaaccaaacagcagcaaggtactagggagatcccccctcaccatcctgcaggatgacaactcccctggcaccctgacactacgacagggtaagcggccttcacccctaagtgaaaatgttagtgaactaaaggaaggagccattcttggaactggacgacttctgaaaactggaggacgagcatgggagcaaggccaggaccatgacaaggaaaatcagcactttcccttggtggagagctaggccctgcatggccccagcaatgcagtcacccagggcctggtgatatctgtgtcctctcaccccttctttcccagggatactgaggaatggcttgttttcttagactcctcctcagctaccaaactgggactcacagctttattgggctttctttgtgtcttgtgtgtttcttttatattaaaggaagtaattttaaatgttactttaaaaaggtatatgtaaaccttgcaccgag

SEQ ID NO: 5479 - DNA, 1483 bp, Homo Sapiens
  NM_031300
ccgcggcacccacgtgcagcggctgggcccggcgctttcaggggaccaccaggcccccagagcgccgtgctatgttgggggctagtcactagcacggggctggaagctgagatcaaagacgccaatgagccggcgtgggtggatgagtgaggcgggcaagaagcagcaccggttagcctgagggttcgctccagggccaggcctggagccagcgcccttacctgcccctggaaagtctgagaccactcggggcggggcggctgccggagggtgggctgcggctccgtggcgggttccagaggggcggagccaagggctgggcgttcccgcgggcggggcgtcccgggggcggggcgggcccctgtgtttgttgcaccgtgtcagttactttgtaacaaaagtgctgcagccgcttgctccggccggcaccctaggccggcccgccgccagctgtcgccgacatggaacccttggccagcaacatccaggtcctgctgcaggcggccgagttcctggagcgccgtgagagagaggccgagcatggttatgcgtccctgtgcccgcatcgcagtccaggccccatccacaggaggaagaagcgacccccccaggctcctggcgcgcaggacagcgggcggtcagtgcacaatgaactggagaagcgcaggagggcccagttgaagcggtgcctggagcggctgaagcagcagatgcccctgggggccgactgtgcccggtacaccacgctgagcctgctgcgccgtgccaggatgcacatccagaagctggaggatcaggagcagcgggcccgacagctcaaggagaggctgcgcagcaagcagcagagcctgcagcggcagctggagcagctccgggggctggcaggggcggccgagcgggagcggctgcgggcggacagtctggactcctcaggcctctcctctgagcgctcagactcagaccaagaggagctggaggtggatgtggagagcctggtgtttgggggtgaggccgagctgctgcggggcttcgtcgccggccaggagcacagctactcgcacggcggcggcgcctggctatgatgttcctcacccagggcgggcctctgccctctactcgtgccaggcccacttgccaggcaggagccctccccaagccttcagggctgctcggagtcacctgttggaatggactaaaaggacccttgtgtgggaacaggtgctccccaaacaccctgctgctggctgccaggcaggccctctggaagggaaggggcaggactcatcaggacctccctggacccctgcagggcaggcagcttgggcccgagcccaagcatttggctctgctgcccccaaggggacaggaagcctcttgggcctcttcccttcctggacaaggccccctgcctttgcctcacataaactgtacagtattttcattaaaagcctctttcataacttccaaaaaaaaaaaaaaaaaa

SEQ ID NO: 5480 - DNA, 4205 bp, Homo Sapiens
  NM_031301
acccaccgaaccccgcccgcgccgggagcatctcgcgtccccaacgggcccccgggtcggtttccgcggtggccatgactgcggccgtgttcttcggctgcgccttcattgccttcgggcctgcgctcgccctttatgtcttcaccatcgccaccgagccgttgcgtatcatcttcctcatcgccggagctttcttctggttggtgtctctactgatttcgtcccttgtttggttcatggcaagagtcattattgacaacaaagatggaccaacacagaaatatctgctgatctttggagcgtttgtctctgtctatatccaagaaatgttccgatttgcatattataaactcttaaaaaaagccagtgaaggtttgaagagtataaacccaggtgagacagcaccctctatgcgactgctggcctatgtttctggcttgggctttggaatcatgagtggagtattttcctttgtgaataccctatctgactccttggggccaggcacagtgggcattcatggagattctcctcaattcttcctttattcagctttcatgacgctggtcattatcttgctgcatgtattctggggcattgtattttttgatggctgtgagaagaaaaagtggggcatcctccttatcgttctcctgacccacctgctggtgtcagcccagaccttcataagttcttattatggaataaacctggcgtcagcatttataatcctggtgctcatgggcacctgggcattcttagctgcgggaggcagctgccgaagcctgaaactctgcctgctctgccaagacaagaactttcttctttacaaccagcgctccagataacctcagggaaccagcacttcccaaaccgcagactacatctttagaggaagcacaactgtgcctttttctgaaaatccctttttctggtggaattgagaaagaaataaaactatgcagatatgcgttccattcacttggctttcacacaactgctctccgaaaggggtgctcagtggtgtgcgtcctggctgcacgagaatcacctgggacagtgtaaagccgactgattctgggctccaccttccagagctaattggcctgggcacgtggtgagttttaaaagcttcccaggtgattctgatgtgcagccatgttgagacccactggtttggtatccaaataggagcttcctgagaacaccttaagtggatgagaatctggtctttagctgtctcctaactcaactcgtgctgagcaagtaagtatctgaatgtcaaatcctggttatcttttatcttcctaagttctgaagtcacaaaaggctaaagggctatcacccctgctcactgtttgcgtgtacttcaccatcttaggagaacacggtaggttgggcttctaaatgcaataataaattacgctgactgtggtaacttagccaaagtaagatactgattaagccgtatttttctgaagtgcttccattccaggttttgctttctgaggcattacattgtttttgagtatagattacattttattaactaaaaatgattgttttgtgacttccttgggaaggtattttaaaatcaggaatttttatgcaatgtctataagcctgtttaaagctttccatgggctctgccccaaggccgttggctgcagcgttcaccatctgagtgccagttgctggactagttgaggtgaagtgcattgttttctctctgagcagctgtgcggggagctgagtgatgtgccctgggacaggcttcactggagctggtggaagtataaccagaagcacaaggaaatgagccaaaagggtgtcattgacacttttcatttgctcctgtgatactaacaacactttcacccaaatggcttaatgtaatattggaaatagatcttaaactgccaaatctcacactattgcataatccatatgctctttagatctagtcagtgtctctgggttttggtagcagatacagcgttccctttacaggaatacccaaggtgttctttcagcttccagacaggtcctttgatttcctttataaagggaaaattctggcaaatcgtgcctttactattagaaattgttcccagttgatgtcttttggggagctggtggcatgaaatgcaaatgacctatacattaaagtgatgtctcagtgaataccatacatgcagtagaacattcagaagagaggagcagcaatcctgaggggctgggggagtgacagtggcaggacggatgggcgggtttgacagattgtggtgggaagaagaatgatcatgtttaaagctaacatagccagtgttttgggctagccacacatcattccagagaccaaaaccttactcatgaactagacctttatcgatatcagtgaacccccatgtttaaaatattagaatgtttagagataaaatagagataatagagataaaagaagaggagggcttctatcaatgctgtaaacagtctgataagcgactgtggttattcccctaaagtttacttcagcactaacactagtgcttccgctggagtttgcagttttccagctttatacaggattttcctttgactggaagagtcaaggatatagagactcaacagtgacatttattgtacaacatcaaggggaataggatactcatcaaactgggattattcttatcaaaacatggtcttctttgaataagaaaaatacatagttggttattatggacttaaaactgtgttaaatggatattctgataaaatatttgctgctctgtagagtgtggaaagtctgagaatattagctttactcatcttgagctttgaggatgttctctgtacgccgatggtttcatattaactaaaaaagctgggtattgtaaaatctcatttataaaaactcagatgagaagaaaattttctttgatggtgagactgttgtcttagttcaggaaattatttaataatcctttgttacctgtgaatgaaggaactttgtaattctgatttatcgtaaaacatgagcctttccagagtcagcttagacactgttgtcgcaaatagccatgctttgccttatgccaaggaggcccagagggagggcctagtcttcctctgttgctgtacatatattgaaatgcttttttttttttattttgcatttgttatctataatgagctttctgagccctgatattatgtgagacaaacaggagttattgatgttatacactcccttccattcaggattttctgcttggagggaaatatgttgaccttagagaattgtgaatattgttgcaattcttgaatatattaccatgtgaataatagagactgtgttgctctctagtataagctatatttatttttgattcatttgaattactagttataactggagaaattttgttacctctatcctggcttgcctgactggctgtataatagcagcagcctcttttagagcatcttaatgaaaacatggatgaaaggaattaatgatgatatctgcagactgcgtagaaaatggcttttgttcccagcgttaacattttcttctcaatcacatttcaatgtttgtggagagtggcagattcacaccagaaacactaggtgttcatatccatagcatggatgcagaataagcagttgggagagaagcttcttcctacctggtactcctcccattcacctcagcccagccccagacaggcgttagcattcagtgtgggccctcaggcagccctgaagcctggctgggtcatcagatgggggcagcctgtgacgggcaccagcggcctgattccagggaagagttcctggagggtgttggctgtttttgttagctcagtttttttctgggctccaccattcctaactccaggtagacaagatagatgtcacacacaacaattttaaagtattttgcttagtgcattttgtttatgattgcagtgtttgtttcttatttaataggctttttacttcattctattaaattttagtgtttagaagaggcgggtactgtcactgtgtaaaatatgtaatattttatatgttataccatgtcatatatacttgcaatatcagaccttgcattcaatatacaatgcaattgactctttgcagacctgcatttttcagtgaacaataaaaagattgtctggcactcctcaaaaaaaaaaaaa

SEQ ID NO: 5481 - DNA, 4574 bp, Homo Sapiens
  NM_031305
gggagtttgaagacagaaaggaaaggggagaaacctgcagagagcatcaaaggatggggggtgctataaaagaagcaggggggtcctttgaaagaaatctatcatgcactgaaatgctttctggagaaggtgccattattttcctcccctcttgctcagatgaaaggagccagcaaggacagtcctgaaatattcctcaggggactttttgtcattgttcctctttcctcttgcacagagctatttgctgacctttccagaggaatctcagtccagctgagaagacagttcttaataaaaacaaaaaaatgcaaaaaccaattcctgctgtttgaatgggaatggtagcttgcttgctgcagttcttttcctgtgacattttggaatgtctgcagaaacttaaaaaaaagaaaaaaaaaaccttaaaaactccctggattaggcaagagaaaaggaagtttttttttgctaaacaggagtaaatgagaggtggtaacttatccctaagccaggacctggatgatcaaaaccttcaaattctagggatcagcacttcaaaaataacaagtaaacaagcatgaggagtggctgttgggtttcgctcagaggcaggttttaaaggaagccaaaaccgggttcagaacttcaggcctgtacgatgcctgaagaccggaattctggggggtgcccggctggtgccttagcctcaactcctttcatccctaaaactacatacagaagaatcaaacggtgttttagttttcggaaaggcatttttggacagaaactggaggatactgttcgttatgagaagagatatgggaaccgtctggctccgatgttggtggagcagtgcgtggactttatccgacaaagggggctgaaagaagagggtctctttcgactgccaggccaggctaatcttgttaaggagctccaagatgcctttgactgtggggagaagccatcatttgacagcaacacagatgtacacacggtggcatcacttcttaagctgtacctccgagaacttccagaaccagttattccttatgcgaagtatgaagattttttgtcatgtgccaaactgctcagcaaggaagaggaagcaggtgttaaggaattagcaaagcaggtgaagagtttgccagtggtaaattacaacctcctcaagtatatttgcagattcttggatgaagtacagtcctactcgggagttaacaaaatgagtgtgcagaacttggcaacggtctttggtcctaatatcctgcgccccaaagtggaagatcctttgactatcatggagggcactgtggtggtccagcagttgatgtcagtgatgattagcaaacatgattgcctctttcccaaagatgcagaactacaaagcaagccccaagatggagtgagcaacaacaatgaaattcagaagaaagccaccatggggcagttacagaacaaggagaacaataacaccaaggacagccctagtaggcagtgctcctgggacaagtctgagtcaccccagagaagcagcatgaacaatggatcccccacagctctatcaggcagcaaaaccaacagcccaaagaacagtgttcacaagctagatgtgtctagaagcccccctctcatggtcaaaaagaacccagcctttaataagggtagtgggatagttaccaatgggtccttcagcagcagtaatgcagaaggtcttgagaaaacccaaaccacccccaatgggagcctacaggccagaaggagctcttcactgaaggtatctggtaccaaaatgggcacgcacagtgtacagaatggaacggtgcgcatgggcattttgaacagcgacacactcgggaaccccacaaatgttcgaaacatgagctggctgccaaatggctatgtgaccctgagggataacaagcagaaagaacaagctggagagttaggccagcacaacagactgtccacctatgataatgtccatcaacagttctccatgatgaaccttgatgacaagcagagcattgacagtgctacctggtccacttcctcctgtgaaatctccctccctgagaactccaactcctgtcgctcttctaccaccacctgcccagagcaagacttttttggggggaactttgaggaccctgttttggatgggcccccgcaggacgacctttcccaccccagggactatgaaagcaaaagtgaccacaggagtgtgggaggtcgaagtagtcgtgccaccagtagcagtgacaacagtgagacatttgtgggcaacagcagcagcaaccacagtgcactgcacagtttagtttccagcctgaaacaggaaatgaccaaacagaagatagagtatgagtccaggataaagagcttagaacagcgaaacttgactttggaaacagaaatgatgagcctccatgatgaactggatcaggagaggaaaaagttcacaatgatagaaataaaaatgcgaaatgccgagcgagcaaaagaagatgccgagaaaagaaatgacatgctacagaaagaaatggagcagtttttttccacgtttggagaactgacagtggaacccaggagaaccgagagaggaaacacaatatggattcagtgagcctgctttcgcctgctgtctctgatggctctggcaaggactccagggattctggtgggatatgacttagaaccaggtggctggtcacctggatgtacagaagtctaactggtgaaggaatatcatttacagacattaaacatccatatctgcaatgtgtaccaaagttatatcatgccccataatgctactgtcaagtgttacaactggatatgtgtatatagagtagtttttcaaaagtaaactaaaaatgagaagcatatttcaagaattattttattgcaagtcttgtatttaaatgttaaatcaatatgttgttgcaatttagcttgctttcaagcttcaccccttgcacttaacataagctatttttggcattgtgttatcatcggcttattttatagatcaatatttttatttcccttttttgctgaggaaatgaagataagcaaaaatataaatatatatataaatatatgagttattaaaatcagaagaatactttgtggctgtgctgtttgtgccaatagactttgtcatgaccaaaaagagaaatgtaaatagttttataaaatacagtcgaatcaccaggaacctttgagctgcttttaaaattcttcccctggcaccactcagttttgcttttgcgaggcgatttgacataggaactttgagactccatgagaaagtccctttctgaggcccactgtctaccttgccagatcctcagtgcgtatcgccaatgcaggatgctccttagaaaagaaaaaatggtaaagaatggcatttaacgattcaggctttgaattactctgtccctctggaccgaatctctttaactgctggatagttttagaggaattctcctgctacttaggtactgggaaacaatgcttgctaaaccatgcccacgtgagcacctgtctcccactcaaacctctcccatctcccaacaactgcactttagaataccagcagtgaaatggtattactgtttccctctgagtgaaactgctagagtatatgtcacgtagtgacatttttttctcactcaggctattgccatctgggattctctccctactacagctggcaaagttggtttgcagcaagaagatagtgggagggggccaggctgcaggagaaggagaaaagtttagaagaaacaaaccattttgcttctaattttgacagtatcactttcctgttaaaacatacaataattttaaaaggtgaatgcctaaagttccaattttagcaaatatgggaacctcagcaatgctaattttctagaaaaacccagggctctttggagctagagttttgggagaacagttcttcacaataaggcaatggttttgagaggccaggcaaataatctttctcaccgtagaacaaaaagttacaaaaggcataatcggaaatagagactacatacttgagtttatggggtttgtgttgtttgaaggttcaatgcttgcatgtgtttatttattttcaagagggaaagtggtctgtactgctttcatccttgccactgtcttgcttttattttttactctcccactgagcaagcgtctgtggtcctatggtatcaaccagtatctttatagcaataatttctttaattcccttttctctctctttccaattatttaaccagttacttccacctggacatacgataggaaattcaaactcaaaatatgaaaattgatcttaataactctcccttcatatcttttcacctatttccagtccttatcatagttgataaaaacctcagactcatccagaaagctatatgatgcactagtaaaaaaaacaaagatattcaaactgcttgggttcaaatggtatacaatttgccagctgttactgaaccttctatgcataactttttttttcctctgtgcaattggaataataaaaatactactcccataga

SEQ ID NO: 5482 - DNA, 1862 bp, Homo Sapiens
  NM_031307
gcacagtgacagcttcctttctcggaaacgcggcgcggccggctgccggaaaacagggcagacctgtatggttcgtttattcctggggttgtcatatcatggctgataatgacacagacagaaaccagactgagaagctcctaaaaagagtacgagaactggagcaagaggtgcaaagacttaaaaaggaacaggccaaaaataaggaggactcaaacattagagaaaattcagcaggagctggaaaaactaagcgtgcatttgatttcagtgctcatggccgaagacacgtagccctaagaatagcctatatgggctggggataccagggctttgctagtcaggaaaacacaaataataccattgaagagaaactgtttgaagctctaaccaagactcgactagtagaaagcagacagacatccaactatcaccgatgtgggagaacagataaaggagttagtgcctttggacaggtgatctcacttgaccttcgctctcagtttccaaggggcagggattccgaggactttaatgtaaaagaggaggctaatgctgctgctgaagagatccgttatacccacattctcaatcgggtactccctccagacatccgtatattggcctgggcccctgtagaaccaagcttcagtgctaggttcagctgccttgagcggacttaccgctattttttccctcgtgctgatttagatattgtaaccatggattatgcagctcagaagtatgttggcacccatgatttcaggaacttgtgtaaaatggatgtagccaacggtgtgattaattttcagaggactattctatctgctcaagtacagctagtgggccagagcccaggtgaggggagatggcaagaacctttccagttatgtcagtttgaagtgactggccaggcattcctttatcatcaagtccgatgtatgatggctatcctctttctgattggccaaggaatggagaagccagagattattgatgagctgctgaatatagagaaaaatccccaaaagcctcaatatagtatggctgtagaatttcctctagtcttatatgactgtaagtttgaaaatgtcaagtggatctatgaccaggaggctcaggagttcaatattacccacctacaacaactgtgggctaatcatgctgtcaaaactcacatgttgtatagtatgctacaaggactggacactgttccagtaccctgtggaataggaccaaagatggatggaatgacagaatggggaaatgttaagccctctgtcataaagcagaccagtgcctttgtagaaggagtgaagatgcgcacatataagcccctcatggaccgtcctaaatgccaaggactggaatcccggatccagcattttgtacgtaggggacgaattgagcacccacatttattccatgaggaagaaacaaaagccaaaagggactgtaatgacacactagaggaagagaatactaatttggagacaccaacgaagagggtctgtgttgacacagaaattaaaagcatcatttaaccatagacaatttgccaggatctaggaaccacctaatggtaggtggacagaaaaggaaaaaaaaaaaaatttacttgcaagtactaggaattcagatgatcagctcttaaaagaaaaaaaaaagcaaaaagactaaagccctattaaggaagttattgctttaataagaaatttcaaatattctcttatcccggtccaaaaggattaagcgattaaagaacgtaaaatggagatgtatttacatacacctggaaacctgtgccttgtattcaaattcattaaagcctaatcctgcaagtaaaaaaaaaaaaaaaaaaa

SEQ ID NO: 5483 - DNA, 2317 bp, Homo Sapiens
  NM_031310
cggacgcgtgggtgagcagggacggtgcaccggacggcgggatcgagcaaatgggtctggccatggagcacggagggtcctacgctcgggcggggggcagctctcggggctgctggtattacctgcgctacttcttcctcttcgtctccctcatccaattcctcatcatcctggggctcgtgctcttcatggtctatggcaacgtgcacgtgagcacagagtccaacctgcaggccaccgagcgccgagccgagggcctatacagtcagctcctagggctcacggcctcccagtccaacttgaccaaggagctcaacttcaccacccgcgccaaggatgccatcatgcagatgtggctgaatgctcgccgcgacctggaccgcatcaatgccagcttccgccagtgccagggtgaccgggtcatctacacgaacaatcagaggtacatggctgccatcatcttgagtgagaagcaatgcagagatcaattcaaggacatgaacaagagctgcgatgccttgctcttcatgctgaatcagaaggtgaagacgctggaggtggagatagccaaggagaagaccatttgcactaaggataaggaaagcgtgctgctgaacaaacgcgtggcggaggaacagctggttgaatgcgtgaaaacccgggagctgcagcaccaagagcgccagctggccaaggagcaactgcaaaaggtgcaagccctctgcctgcccctggacaaggacaagtttgagatggaccttcgtaacctgtggagggactccattatcccacgcagcctggacaacctgggttacaacctctaccatcccctgggctcggaattggcctccatccgcagagcctgcgaccacatgcccagcctcatgagctccaaggtggaggagctggcccggagcctccgggcggatatcgaacgcgtggcccgcgagaactcagacctccaacgccagaagctggaagcccagcagggcctgcgggccagtcaggaggcgaaacagaaggtggagaaggaggctcaggcccgggaggccaagctccaagctgaatgctcccggcagacccagctagcgctggaggagaaggcggtgctgcggaaggaacgagacaacctggccaaggagctggaagagaagaagagggaggcggagcagctcaggatggagctggccatcagaaactcagccctggacacctgcatcaagaccaagtcgcagccgatgatgccagtgtcaaggcccatgggccctgtccccaacccccagcccatcgacccagctagcctggaggagttcaagaggaagatcctggagtcccagaggccccctgcaggcatccctgtagccccatccagtggctgaggaggctccaggcctgaggaccaagggatggcccgactcggcggtttgcggaggatgcagggatatgctcacagcgcccgacacaaccccctcccgccgcccccaaccacccagggccaccatcagacaactccctgcatgcaaacccctagtaccctctcacacccgcacccgcgcctcacgatccctcacccagagcacacggccgcggagatgacgtcacgcaagcaacggcgctgacgtcacatatcaccgtggtgatggcgtcacgtggccatgtagacgtcacgaagagatatagcgatggcgtcgtgcagatgcagcacgtcgcacacagacatggggaacttggcatgacgtcacaccgagatgcagcaacgacgtcacgggccatgtcgacgtcacacatattaatgtcacacagacgcggcgatggcatcacacagacggtgatgatgtcacacacagacacagtgacaacacacaccatgacaacgacacctatagatatggcaccaacatcacatgcacgcatgccctttcacacacactttctacccaattctcacctagtgtcacgttcccccgaccctggcacacgggccaaggtacccacaggatcccatcccctcccgcacagccctgggccccagcacctcccctcctccagcttcctggcctcccagccacttcctcacccccagtgcctggacccggaggtgagaacaggaagccattcacctccgctccttgagcgtgagtgtttccaggaccccctcggggccctgagccgggggtgagggtcacctgttgtcgggaggggagccactccttctcccccaactcccagccctgcctgtggcccgttgaaatgttggtggcacttaataaatattagtaaatccttaaaaaaaaaaaaaaaaaaaaaaaaaaaaaaa

SEQ ID NO: 5484 - DNA, 1691 bp, Homo Sapiens
  NM_031311
gtgactgggtggggctgcctcacttctgcctgatttgggaagcgctgcaaggacaaccggctggggtccttgcgcgccgcggctcagggaggagcaccgactgcgccgcaccctgagagatggttggtgccatgtggaaggtgattgtttcgctggtcctgttgatgcctggcccctgtgatgggctgtttcgctccctatacagaagtgtttccatgccacctaagggagactcaggacagccattatttctcaccccttacattgaagctgggaagatccaaaaaggaagagaattgagtttggtcggccctttcccaggactgaacatgaagagttatgccggcttcctcaccgtgaataagacttacaacagcaacctcttcttctggttcttcccagctcagatacagccagaagatgccccagtagttctctggctacagggtgggccgggaggttcatccatgtttggactctttgtggaacatgggccttatgttgtcacaagtaacatgaccttgcgtgacagagacttcccctggaccacaacgctctccatgctttacattgacaatccagtgggcacaggcttcagttttactgatgatacccacggatatgcagtcaatgaggacgatgtagcacgggatttatacagtgcactaattcagtttttccagatatttcctgaatataaaaataatgacttttatgtcactggggagtcttatgcagggaaatatgtgccagccattgcacacctcatccattccctcaaccctgtgagagaggtgaagatcaacctgaacggaattgctattggagatggatattctgatcccgaatcaattatagggggctatgcagaattcctgtaccaaattggcttgttggatgagaagcaaaaaaagtacttccagaagcagtgccatgaatgcatagaacacatcaggaagcagaactggtttgaggcctttgaaatactggataaactactagatggcgacttaacaagtgatccttcttacttccagaatgttacaggatgtagtaattactataactttttgcggtgcacggaacctgaggatcagctttactatgtgaaatttttgtcactcccagaggtgagacaagccatccacgtggggaatcagacttttaatgatggaactatagttgaaaagtacttgcgagaagatacagtacagtcagttaagccatggttaactgaaatcatgaataattataaggttctgatctacaatggccaactggacatcatcgtggcagctgccctgacagagcgctccttgatgggcatggactggaaaggatcccaggaatacaagaaggcagaaaaaaaagtttggaagatctttaaatctgacagtgaagtggctggttacatccggcaagcgggtgacttccatcaggtaattattcgaggtggaggacatattttaccctatgaccagcctctgagagcttttgacatgattaatcgattcatttatggaaaaggatgggatccttatgttggataaactaccttcccaaaagagaacatcagaggttttcattgctgaaaagaaaatcgtaaaaacagaaaatgtcataggaataaaaaaattatcttttcatatctgcaagatttttttcatcaataaaaattatccttgaaacaa

SEQ ID NO: 5485 - DNA, 2499 bp, Homo Sapiens
  NM_031313
tcatactccatacctgggatttccgcctcgccgctctccgactgcttccagacatgcaggggccctgggtgctgctcctgctgggcctgaggctacagctctccctgggcatcatcccagttgaggaggagaacccggacttctggaaccgccaggcagccgaggccctgggtgccgccaagaagctgcagcctgcacagacagccgccaagaacctcatcatcttcctgggtgacgggatgggggtgtctacggtgacagctgccaggatcctaaaagggcagaagaaggacaaactggggcctgagaccttcctggccatggaccgcttcccgtacgtggctctgtccaagacatacagtgtagacaagcatgtgccagacagtggagccacagccacggcctacctgtgcggggtcaagggcaacttccagaccattggcttgagtgcagccgcccgctttaaccagtgcaacacgacacgcggcaacgaggtcatctccgtgatgaatcgggccaagaaagcaggaaagtcagtgggagtggtaaccaccacacgggtgcagcatgcctcgccagccggcgcctacgcccacacggtgaaccgcaactggtactcggatgccgacgtgcctgcctcggcccgccaggaggggtgccaggacatcgccacgcagctcatctccaacatggacattgatgtgatcctaggtggaggccgaaagtacatgtttcccatggggaccccagaccctgagtacccagatgactacagccaaggtgggaccaggctggacgggaagaatctggtgcaggaatggctggcgaagcaccagggtgcccggtacgtgtggaaccgcactgagctcctgcaggcttccctggacccgtctgtgacccatctcatgggtctctttgagcctggagacatgaaatacgagatccaccgagactccacactggacccctccctgatggagatgacagaggctgccctgctcctgctgagcaggaacccccgcggcttcttcctcttcgtggagggtggtcgcatcgaccatggtcatcatgaaagcagggcttaccgggcactgactgagacgatcatgttcgacgacgccattgagagggcgggccagctcaccagcgaggaggacacgctgagcctcgtcactgccgaccactcccacgtcttctccttcggaggctaccccctgcgagggagctccatcttcgggctggcccctggcaaggcccgggacaggaaggcctacacggtcctcctatacggaaacggtccaggctatgtgctcaaggacggcgcccggccggatgttacggagagcgagagcgggagccccgagtatcggcagcagtcagcagtgcccctggacggagagacccacgcaggcgaggacgtggcggtgttcgcgcgcggcccgcaggcgcacctggttcacggcgtgcaggagcagaccttcatagcgcacgtcatggccttcgccgcctgcctggagccctacaccgcctgcgacctggcgccccgcgccggcaccaccgacgccgcgcacccggggccgtccgtggtccccgcgttgcttcctctgctggcagggaccttgctgctgctggggacggccactgctccctgagtgtcccgtccctggggctcctgcttccccatcccggagttcccctgctccccacctccagtcgtcctgccggacctccacctggagctgtcacccccggagtcgccacacagacgtcctgccatggaaccttcccctcccggtgcaccctggggaccgagcccttgacaccacgccctttgctttatcttgctcttgaaattttggccccaactccagggactggggatttgtgcctggcagctgcctgcatttcaggaaaagaggaggctcagaccatccagcccccgcccatatcctgaggtggatcaggcaggctctctccccggggacatgaggcacccatacctaggaccccctgcgccttttttagcttcagtcatggcagcacctgagggacacaaggacttgggtgcatcaggacgccttggagaagcgtggcttcctgccaccctgcaacccaccctcccagccaaggaggctgctgtggtggggatccccaggggggctttgacacagtcctctgctgtccctccactgggctaattctacacccctgtgcccctcctaggggcccatgagtcagagaggcttgccccaagtcacagccactcagatgttcgacgccccctaaggtccattccagcacccacctgagttccgaggagcacctgggaagctctgggtgcaggatagcagtccagagtccatggccccgcctaggccatctgggtgctgggcatggatttctcagcaaggaagactcattaccttccctccctgggcctccattcttctgggaaacacaaagcaataataaaaggaagtgttagacaatgtaaaaaaa

SEQ ID NO: 5486 - DNA, 2200 bp, Homo Sapiens
  NM_031369
cttccgtcggccattttaggtggtccgcggcggcgccattaaagcgaggaggaggcgagagcggccgccgctggtgcttattcttttttagtgcagcgggagagagcgggagtgtgcgccgcgcgagagtgggaggcgaagggggcaggccagggagaggcgcaggagcctttgcagccacgcgcgcgccttccctgtcttgtgtgcttcgcgaggtagagcgggcgcgcggcagcggcggggattactttgctgctagtttcggttcgcggcagcggcgggtgtagtctcggcggcagcggcggagacactagcactatgtcggaggagcagttcggcggggacggggcggcggcagcggcaacggcggcggtaggcggctcggcgggcgagcaggagggagccatggtggcggcgacacagggggcagcggcggcggcgggaagcggagccgggaccgggggcggaaccgcgtctggaggcaccgaagggggcagcgccgagtcggagggggcgaagattgacgccagtaagaacgaggaggatgaagggaaaatgtttataggaggccttagctgggacactacaaagaaagatctgaaggactacttttccaaatttggtgaagttgtagactgcactctgaagttagatcctatcacagggcgatcaaggggttttggctttgtgctatttaaagaatcggagagtgtagataaggtcatggatcaaaaagaacataaattgaatgggaaggtgattgatcctaaaagggccaaagccatgaaaacaaaagagccggttaaaaaaatttttgttggtggcctttctccagatacacctgaagagaaaataagggagtactttggtggttttggtgaggtggaatccatagagctccccatggacaacaagaccaataagaggcgtgggttctgctttattacctttaaggaagaagaaccagtgaagaagataatggaaaagaaataccacaatgttggtcttagtaaatgtgaaataaaagtagccatgtcgaaggaacaatatcagcaacagcaacagtggggatctagaggaggatttgcaggaagagctcgtggaagaggtggtggccccagtcaaaactggaaccagggatatagtaactattggaatcaaggctatggcaactatggatataacagccaaggttacggtggttatggaggatatgactacactggttacaacaactactatggatatggtgattatagcaaccagcagagtggttatgggaaggtatccaggcgaggtggtcatcaaaatagctacaaaccatactaaattattccatttgcaacttatccccaacaggtggtgaagcagtattttccaatttgaagattcatttgaaggtggctcctgccacctgctaatagcagttcaaactaaattttttgtatcaagtccctgaatggaagtatgacgttgggtccctctgaagtttaattctgagttctcattaaaagaaatttgctttcattgttttatttcttaattgctatgcttcagaatcaatttgtgttttatgccctttcccccagtattgtagagcaagtcttgtgttaaaagcccagtgtgacagtgtcatgatgtagtagtgtcttactggttttttaataaatccttttgtataaaaatgtattggctcttttatcatcagaataggaaaaattgtcatggattcaagttattaaaagcataagtttggaagacaggcttgccgaaattgaggacatgattaaaattgcagtgaagtttgaaatgtttttagcaaaatctaatttttgccataatgtgtcctccctgtccaaattgggaatgacttaatgtcaatttgtttgttggttgttttaataatacttccttatgtagccattaagatttatatgaatattttcccaaatgcccagtttttgcttaatatgtattgtgctttttagaacaaatctggataaatgtgcaaaagtacccctttgcacagatagttaatgttttatgcttccattaaataaaaaggacttaaaatctgttaattataatagaaatgcggctagttcagagagatttttagagctgtggtggacttcatagatgaattcaagtgttgagggaggattaaagaaatatataccgtgtttatgtgtgtgtgctt

SEQ ID NO: 5487 - DNA, 3510 bp, Homo Sapiens
  NM_031372
gaggccgcgcggggcccgggcttcggccgatcagcccgggaggccccgccgcgcccccttggcccgcgcgcccgtggtcacagtggaagaggcgcccgcgctgcgctgcccggaggagccgtcgcgcgcccgcttcctgttcggctggttcctgccagctcgaggacaaaacacgcgtgcgcgcggcgggcgagcgcgctcgccgcctcagtcgccagcgccgggcgcagtccgcctttttccggagcagactggccgcggtgctagtcggtagcagcggccgccgcagcggctccgcactggcgaaccgagggcagaaaaaggcggggttgacggctttttggtaggagtgggctggaccggacgccagagacaaaggctcccaaggcaagagggactgtggccctgcgtcggctctgctcgggactgctgaccccaggaatttacgccccttcgtttttctcttctgattcttctcttctcccaagcccgcgtcccctcacgcgtggcctctctccttgccgggagggccgcgatggaggtcccgcccaggctttcccatgtgccgccgccattgttcccctccgctcccgctactttagcctcccgcagcctctcccattggcggccgcggccgccgcggcagctagccccgctcctcccttcgctcgctcccagctccgcccggcagggggcgcgccgggcccagcgccacgtcaccgcccagcagccctcccgattggcgggcggggcggctataaagggagggcgcaggcggcgcccggatctcttccgccgccattttaaatccagctccatacaacgctccgccgccgctgctgccgcgacccggactgcgcgccagcacccccctgccgacagctccgtcactatggaggatatgaacgagtacagcaatatagaggaattcgcagagggatccaagatcaacgcgagcaagaatcagcaggatgacggtaaaatgtttattggaggcttgagctgggatacaagcaaaaaagatctgacagagtacttgtctcgatttggggaagttgtagactgcacaattaaaacagatccagtcactgggagatcaagaggatttggatttgtgcttttcaaagatgctgctagtgttgataaggttttggaactgaaagaacacaaactggatggcaaattgatagatcccaaaagggccaaagctttaaaagggaaagaacctcccaaaaaggtttttgtgggtggattgagcccggatacttctgaagaacaaattaaagaatattttggagcctttggagagattgaaaatattgaacttcccatggatacaaaaacaaatgaaagaagaggattttgttttatcacatatactgatgaagagccagtaaaaaaattgttagaaagcagataccatcaaattggttctgggaagtgtgaaatcaaagttgcacaacccaaagaggtatataggcagcaacagcaacaacaaaaaggtggaagaggtgctgcagctggtggacgaggtggtacgaggggtcgtggccgaggtcagggccaaaactggaaccaaggatttaataactattatgatcaaggatatggaaattacaatagtgcctatggtggtgatcaaaactatagtggctatggcggatatgattatactgggtataactatgggaactatggatatggacagggatatgcagactacagtggccaacagagcacttatggcaaggcatctcgagggggtggcaatcaccaaaacaattaccagccatactaaaggagaacattggagaaaacaggaggagatgttaaagtaacccatcttgcaggacgacattgaagattggtcttctgttgatctaagatgattattttgtaaaagactttctagtgtacaagacaccattgtgtccaactgtatatagctgccaattagttttctttgtttttactttgtcctttgctatctgtgttatgactcaatgtggatttgtttatacacattttatttgtatcatttcatgttaaacctcaaataaatgcttccttatgtgattgcttttctgcgtcaggtactacatagctctgtaaaaaatgtaatttaaaataagcaataattaaggcacagttgattttgtagagtattggtccatacagagaaactgtggtcctttataaatagccagccagcgtcaccctcttctccaatttgtaggtgtattttatgctcttaaggcttcatcttctccctgtaactgagatttctaccacacctttgaacaatgttctttcccttctggttatctgaagactgtcctgaaaggaagacataagtgttgtgattagtagaagctttctagtagaccatatttcttctggattgtaataaaattgttagtagctccttttactttgttcctgtctctggaaagccatttttgaattgctgattactttggctttaatcagtggtcacctagaaaaagctttgtaatcataacacaatgagtaattcttgataaaagttcagatacaaaaggagcactgtaaaactggtaggagctatggtttaagagcattggaagtagttacaactcaaggattttggtagaaaggtatgagtttggtcgaaaaattaaaatagtggcaaaataagatttagttgtgttttctcagagccgccacaagattgaacaaaatgttttctgtttgggcatcctgaggaagttgtattagctgttaatgctctgtgagtttagaaaaagtcttgatagtaaatctagtttttgacacagtgcatgaactaagtagttaaatatttacatattcagaaaggaatagtggaaaaggtatcttggttatgacaaagtcattacaaatgtgactaagtcattacaaatgtgactgagtcattacagtggaccctctgggtgcattgaaaagaatccgttttatatccaggtttcagaggacctggaataataaaaagctttggattttgcattcagtgtagttggattttgggaccttggcctcagtgttatttactgggattggcatacgtgttcacaggcagagtagttgatctcacacaacgggtgatctcacaaaactggtaagtttcttatgctcatgagccctccctttttttttttaatttggtgcctgcaactttcttaacaatgattctacttcctgggctatcacattataatgctcttggcctcttttttgctgctgttttgctattcttaaacttaggccaagtaccaatgttggctgttagaagggattctgttcattcaacatgcaactttagggaatggaagtaagttcatttttaagttgtgttgtcagtaggtgcggtgtctagggtagtgaatcctgtaagttcaaatttatgattaggtgacgagttgacattgagattgtccttttccctgatcaaaaaatgaataaagcctttttaaacaaaatccaaacttttaa

SEQ ID NO: 5488 - DNA, 3479 bp, Homo Sapiens
  NM_031409
aactcacacggcctcttgcaaacgttcccaaatcttcccagtcggcttgcagagactccttgctcccaggagataaccaggtaaaggagtatgaaagtttgggtacaaactcattgctgcaaattgaaaaccatgcaaaggctgtcttcctctggggagttcaatgcctctctttttcttatcactttaccattggttggactttgattccagggatcctacgattactcaataccctacaggatatacatggttaaccatttgcatttgggcaaataggcgttacttttcaataggaagtggcaatccagaacttgcttttgggcaattctagtagctcaccgcttttttcttaatgactgctagaagctgcatcttattgacagatggtcatcacattggtgagctggagtcatcagattgtggggcccggagtgaggctgaagggagtggatcagagcactgcctgagagtcacctctactttcctgctaccgctgcctgtgagctgaaggggctgaaccatacactcctttttctacaaccagcttgcattttttctgcccacaatgagcggggaatcaatgaatttcagcgatgttttcgactccagtgaagattattttgtgtcagtcaatacttcatattactcagttgattctgagatgttactgtgctccttgcaggaggtcaggcagttctccaggctatttgtaccgattgcctactccttgatctgtgtctttggcctcctggggaatattctggtggtgatcacctttgctttttataagaaggccaggtctatgacagacgtctatctcttgaacatggccattgcagacatcctctttgttcttactctcccattctgggcagtgagtcatgccaccggtgcgtgggttttcagcaatgccacgtgcaagttgctaaaaggcatctatgccatcaactttaactgcgggatgctgctcctgacttgcattagcatggaccggtacatcgccattgtacaggcgactaagtcattccggctccgatccagaacactaccgcgcagcaaaatcatctgccttgttgtgtgggggctgtcagtcatcatctccagctcaacttttgtcttcaaccaaaaatacaacacccaaggcagcgatgtctgtgaacccaagtaccagactgtctcggagcccatcaggtggaagctgctgatgttggggcttgagctactctttggtttctttatccctttgatgttcatgatattttgttacacgttcattgtcaaaaccttggtgcaagctcagaattctaaaaggcacaaagccatccgtgtaatcatagctgtggtgcttgtgtttctggcttgtcagattcctcataacatggtcctgcttgtgacggctgcaaatttgggtaaaatgaaccgatcctgccagagcgaaaagctaattggctatacgaaaactgtcacagaagtcctggctttcctgcactgctgcctgaaccctgtgctctacgcttttattgggcagaagttcagaaactactttctgaagatcttgaaggacctgtggtgtgtgagaaggaagtacaagtcctcaggcttctcctgtgccgggaggtactcagaaaacatttctcggcagaccagtgagaccgcagataacgacaatgcgtcgtccttcactatgtgatagaaagctgagtctccctaaggcatgtgtgaaacatactcatagatgttatgcaaaaaaaagtctatggccaggtatgcatggaaaatgtgggaattaagcaaaatcaagcaagcctctctcctgcgggacttaacgtgctcatgggctgtgtgatctcttcagggtggggtggtctctgataggtagcattttccagcactttgcaaggaatgttttgtagctctagggtatatatccgcctggcatttcacaaaacagcctttgggaaatgctgaattaaagtgaattgttgacaaatgtaaacattttcagaaatattcatgaagcggtcacagatcacagtgtcttttggttacagcacaaaatgatggcagtggtttgaaaaactaaaacagaaaaaaaaatggaagccaacacatcactcattttaggcaaatgtttaaacatttttatctatcagaatgtttattgttgctggttataagcagcaggattggccggctagtgtttcctctcatttccctttgatacagtcaacaagcctgaccctgtaaaatggaggtggaaagacaagctcaagtgttcacaacctggaagtgcttcgggaagaaggggacaatggcagaacaggtgttggtgacaattgtcaccaattggataaagcagctcaggttgtagtgggccattaggaaactgtcggtttgctttgatttccctgggagctgttctctgtcgtgagtgtctcttgtctaaacgtccattaagctgagagtgctatgaagacaggatctagaataatcttgctcacagctgtgctctgagtgcctagcggagttccagcaaacaaaatggactcaagagagatttgattaatgaatcgtaatgaagttggggtttattgtacagtttaaaatgttagatgtttttaattttttaaataaatggaatactttttttttttttttaaagaaagcaactttactgagacaatgtagaaagaagttttgttccgtttctttaatgtggttgaagagcaatgtgtggctgaagacttttgttatgaggagctgcagattagctaggggacagctggaattatgctggcttctgataattattttaaaggggtctgaaatttgtgatggaatcagattttaacagctctcttcaatgacatagaaagttcatggaactcatgtttttaaagggctatgtaaatatatgaacattagaaaaatagcaacttgtgttacaaaaatacaaacacatgttaggaaggtactgtcatgggctaggcatggtggctcacacctgtaatcccagcattttgggaagctaagatgggtggatcacttgaggtcaggagtttgagaccagcctggccaacatggcgaaacccctctctactaaaaatacaaaaatttgccaggcgtggtggcgggtgcctgtaatcccagctacttgggaggctgaggcaagagaatcgcttgaacccaggaggcagaggttgcagtgagccgagatcgtgccattgcactccagcctgggtgacaaagcgagactccatctcaaaaaaaaaaaaaaaaaaaaaggaaagaactgtcatgtaaacataccaacatgtttaaacctgacaatggtgttatttgaaactttatattgttcttgtaagctttaactatatctctctttaaaatgcaaaataatgtcttaagattcaaagtctgtatttttaaagcatggctttggctttgcaaaataaaaaatgtgttttgtacatgaa

SEQ ID NO: 5489 - DNA, 3934 bp, Homo Sapiens
  NM_031419
gtactggcccgcgccgtccgcccgccgacagctccctgagccagcccgggaggcagccgcgcgcagcgagccggtggcgcaggtgtcggggtcctcgagcgcccagcctgggagcatgattgtggacaagctgctggacgacagccgcggcggagaggggctgcgggacgcggcgggcggctgcggcctcatgaccagcccgctcaacctgagctacttctacggcgcgtcgccgcccgccgccgccccgggcgcctgcgacgccagctgctcggtcttgggcccctcggcgcccggctcgcccggctccgactcctccgacttctcctctgcctcgtcggtgtcctcctgcggcgccgtggagtcccggtcgagaggcggcgcccgcgccgagcgccagccagttgagccccatatgggggttggcaggcagcagagaggcccctttcaaggtgttcgggtaaagaactcagtgaaggaactcctgttgcacatccgaagtcataaacagaaggcttctggccaagctgtggatgattttaagacacaaggtgtgaacatagaacagttcagagaattgaagaacacagtatcatacagtgggaaaaggaaagggcccgattcgttgtctgatggacctgcttgcaaaaggccagctctgttgcattcccaatttttgacaccacctcaaacaccaacgcccggggagagcatggaagatgttcatctcaatgaacccaaacaggagagcagtgctgatctgcttcagaacattatcaacattaagaatgaatgcagccccgtttccctgaacacagttcaagttagctggctgaaccccgtggtggtccctcagagctcccccgcagagcagtgtcaggacttccatggagggcaggtcttttctccacctcagaaatgccaaccattccaagtcaggggctcccaacaaatgatagaccaggcttccctgtaccagtattctccacagaaccagcatgtagagcagcagccacactacacccacaaaccaactctggaatacagtccttttcccatacctccccagtcccccgcttatgaaccaaacctctttgatggtccagaatcacagttttgcccaaaccaaagcttagtttcccttcttggtgatcaaagggaatctgagaatattgctaatcccatgcagacttcctccagtgttcagcagcaaaatgatgctcacttgcacagcttcagcatgatgcccagcagcgcctgtgaggccatggtggggcacgagatggcctctgactcttcaaacacttcactgccattctcaaacatgggaaatccaatgaacaccacacagttagggaaatcactttttcagtggcaggtggagcaggaagaaagcaaattggcaaatatttcccaagaccagtttctttcaaaggatgcagatggtgacacgttccttcatattgctgttgcccaagggagaagggcactttcctatgttcttgcaagaaagatgaatgcacttcacatgctggatattaaagagcacaatggacagagtgcctttcaggtggcagtggctgccaatcagcatctcattgtgcaggatctggtgaacatcggggcacaggtgaacaccacagactgctggggaagaacacctctgcatgtgtgtgctgagaagggccactcccaggtgcttcaggcgattcagaagggagcagtgggaagtaatcagtttgtggatcttgaggcaactaactatgatggcctgactccccttcactgtgcagtcatagcccacaatgctgtggtccatgaactccagagaaatcaacagcctcattcacctgaagttcaggagcttttactgaagaataagagtctggttgataccattaagtgcctaattcaaatgggagcagcggtggaagcgaaggatcgcaaaagtggccgcacagccctgcatttggcagctgaagaagcaaatctggaactcattcgcctctttttggagctgcccagttgcctgtcttttgtgaatgcaaaggcttacaatggcaacactgccctccatgttgctgccagcttgcagtatcggttgacacaattagatgctgtccgcctgttgatgaggaagggagcagacccaagtactcggaacttggagaacgaacagccagtgcatttggttcccgatggccctgtgggagaacagatccgacgtatcctgaagggaaagtccattcagcagagagctccaccgtattagctccattagcttggagcctggctagcaacactcactgtcagttaggcagtcctgatgtatctgtacatagaccatttgccttatattggcaaatgtaagttgtttctatgaaacaaacatatttagttcactattatatagtgggttatattaaaagaaaagaagaaaaatatctaatttctcttggcagatttgcatatttcatacccaggtatctgggatctagacatctgaatttgatctcaatggtaacattgccttcaattaacagtagcttttgagtaggaaaggactttgatttgtggcacaaaacattattaatatagctattgacagtttcaaagcaggtaaattgtaaatgtttctttaagaaaaagcatgtgaaaggaaaaaggtaaatacagcattgaggcttcatttggccttagtccctgggagttactggcgttggacaggcttcagtcattggactagatgaaaggtgtccatggttagaatttgatctttgcaaactgtatataattgttatttttgtccttaaaaatattgtacatacttggttgttaacatggtcatatttgaaatgtataagtccataaaatagaaaagaacaagtgaattgttgctatttaaaaaaattttacaattcttactaaggagtttttattgtgtaatcactaagtctttgtagataaagcagatggggagttacggagttgttcctttactggctgaaagatatattcgaattgtaaagatgctttttctcatgcattgaaattatacattatttgtagggaattgcatgcttttttttttttttctcccgagacagggtcttgctctggcgcccaggctggagtacagtggcatgatcttggctcacttcagccttgacttgggctcaagtgatcctcctacctgagccttctgagtaactggaactacaggtgtgcactcctcgcctggctaattttttattttttgtacaggcaggatcttgccaccttgcccaggctggtcttgaactcctgagctcatgccatctgcctgccttagtctcccaaaatgctgggattacaggagtgagccaccatgcccggctggcagttgcatggaagagaacacctctttatggcttaccctctagaatttctaatttatgtgttctgttgaaatttttgtttttttacctttattgaaacaacaaaaagtcagtattgaaacatatcttcctgttttctgttgtcaaatgatgataatgtgccatgatgttttatatatatcattcagaaaaagttttattttttaataacattctattaacattattttgcttgccgctggcatgcctgaggaatgtatttggctttgattacacactaagtttttgtaataaatttgactcattaaaaaccttttttttttaaaaaaaaaaaaaaagaaaatctcattagtgaacttatctttgcagctgagtacttaaattctttttaaaaagataccctttggattgatcacattgtttgacccagtatgtcttgtagacacgttagttataatcaccttgtatctctaaatatggtgtgatatgaaccagtccattcacattggaaaaactgatggttttaaataaactaattcactaatattaaaaaaaaa

SEQ ID NO: 5490 - DNA, 1314 bp, Homo Sapiens
  NM_031420
ggcgcgccgcaggcagcactggcgggggcctttcctgccgccgacgccggggtcctccctcaggtctcattctgtgcctgtgaacatggcggcgcccgttgtcacggccccgggcagagctctgctgcgggcgggcgctggacggctgcttcggggaggcgtccaggagctactgcggccgcgacatgaagggaacgcccctgacctggcctgcaacttcagcctttctcaaaatcggggcacggtcatcgtggagcgctggtggaaggtaccgctggccggggagggccggaagccgcgcctgcaccggcgacatcgcgtctataagctggtggaggacacgaagcatcggcccaaagaaaacctggagctcatcctgacgcagtcggtggagaatgttggagtccggggtgacctggtctcagtgaagaaatctttaggccggaatcgactccttcctcagggactggctgtatatgcatcccctgaaaacaagaagctgtttgaagaggagaaattgctgagacaagaaggaaaattagagaagatccagaccaaggcaggtgaggcgacagtgaaatttctaaaaagctgtcgcctggaggtagggatgaagaacaatgtcaaatgggagctgaaccctgaaatagttgcccgccacttctttaagaatcttggtgttgtggttgccccacatacattaaagttaccagaagagcctatcacacggtggggcgagtattggtgtgaggtgacggtaaatgggcttgatactgtgagagtgcctatgtctgtcgtgaactttgagaagcccaagaccaaaagatataagtactggttagcccagcaagctgccaaggctatggcccccaccagcccccagatctaaatctactctccctccaaggcagcaaagcagaatcgggagcagtggagcagaaatgtgcaagcaccctgatctcactcccagctctgaccaaatacagaattttagagaacatctgaagacatcagactgcactgcgtatacatgttgaattcttcatttttgccatctttaactgtcatcactggggcagggaagtcctgttccagaagtaccaggctgtagatttgataagctagatgcagtagaccgaaaccatccaaaacctgtttagcttcttcctccattggagtttattgggacaaacaggagagccagccattgtctccagtacttgcctcattctcatcatccaaactgaacatttgtatcccaagcagaaataaagagaatatgttctttttaaaaaaaaaaaaaaaaaaaaaaaa

SEQ ID NO: 5491 - DNA, 1638 bp, Homo Sapiens
  NM_031424
cgcggctgagcctctttgtctgagcgcgctcggcttttttttttttttctctctccttccctgcagcagtggccggtgtccagctgcctactttctgcccggatctctggctcctcatctctccggtctccgcagactaaagccctcgggatatgcagcagccatgcctgtgcacacgctgagccccggagccccgtccgcccccgccctaccttgccgcctgcggaccagggtccctggctacctgctacgggggccggcagatggtggagcccggaaaccgagcgctgtggagcgcctggaggccgacaaggccaagtacgtcaagagcctgcacgtggccaacacccgccaggagcctgtgcagcccctgctgtccaaacagccgctcttcagccctgagactcgccgcacagtgctcacgcccagccgccgagccctgcctggcccctgccgacggccccagctggacctggacatcctcagcagcctcatcgacttgtgtgacagccccgtgtcccctgccgaggccagccgcactcctggacgggccgagggagccggccgtcctcccccagccacccctccgcgaccgccgcccagtacctctgcggtccgccgggtggacgtccgccccctgcccgcctcgcctgcccggccctgcccatcacccggccctgccgccgcctccagcccagcccggccgccgggtttgcaacgctccaagtcggacttgagcgagcgcttttctagggcagccgctgatctcgagcgcttttttaacttctgcggcctggacccggaggaggcgagagggttgggtgtggcccacctggcacgggccagctcggatatcgtgtccctggcagggcccagtgctgggccgggcagctctgaagggggctgctcccgccgcagctcggtgactgttgaggagcgggcccgggagcgcgttccctatggcgtgtcggtggtggagcgcaatgcccgcgtgatcaagtggttgtatgggctaaggcaggctcgggagagcccagcagctgaaggctaggcgccactgggcctggaattcgccacaggacggatcttacagaggcaagtggtccctggacctctcttgcatccattctctagacggccgtgtcagaggctccaccctgttgtgaacttggtatggaggcaaaggcttagaggctggaccagcattgttgggcaaggactgactctccaagggttttgttcttggctttggacacctgagaaccccctcctcccctcccccaatacaaggtttttgacatgagtgtactcctgcttagttcctcttgtggggctgcatttgcggtgctttgccctccccactgtgagtgaggggccaagggatctcctcaatcctgtctccccagcggctctgtttcctccttccttccttggcctctgtcctttgctgacttcctcttccttacccagcagaactcaccctggggtcggggcagtggggaggggcctatccactgctcttcctagtccttggcagctggcctaggtgggcagactataggagggactggttaggagtctgcattgctttgacttccctctccttggttaataaacacaaatgcttgtttctcaagg

SEQ ID NO: 5492 - DNA, 1807 bp, Homo Sapiens
  NM_031430
gagggctccactcaagtgaccacttgcagccctgaacctcagctcttggacgcctggctggaagttggctgtcttgtttcctgtgaccttgggggtggaaaggacagagcccaggcgacctagggcactatctccctaccccacgccttctcccttcctcgttcctccctacccttatcgcttctaccccgcccacaccgccctaaacggcttcctggggcggaactgtttcgcttttccccgtcccagtggagggtggggtgggggggtcgcagccctaagcctctgggagacatggagcccaggagggcggcgcccggggtgcctggctgggggtctcgggaggccgcggggtcggcatcggccgcggagcttgtgtaccatctagccggggccctgggcactgagctgcaggatctggcgcgccgtttcgggccggaggcggcggccgggctggtgccgctagtggtgcgggcgctggagctcttggaacaggctgccgtggggcccgccccggactcgctgcaggtgtcggcgcagccggcggagcaggagctgcggcggctgcgggaggagaacgagcgcctccgcagggagctgcgcgcggggccacaggaggagcgcgcgctgctgcggcagctcaaggaggtcacggaccgacagcgggacgaactccgggcgcacaaccgcgacctgcggcagcgcggccaggagaccgaggcgttgcaggagcagctgcagcgcctcctgctggtgaacgctgagctgcggcacaagctggcggccatgcagacccagctgcgcgccgcgcaggaccgcgagagggagcgccagcagcctggcgaagccgcgactccgcaggctaaagagcgagcgcgggggcaggccgggcggcccgggcaccagcacggacaggagcccgaatgggcgaccgccggcgcaggcgccccagggaaccctgaggacccggcggaggccgcgcagcagctcgggcgcccctcggaggcagggcagtgccgcttcagtcgggaggagtttgagcagatccttcaggagcggaatgaactcaaagccaaagtgttcctgctcaaggaggaactggcctacttccagcgggagctgctcacagaccaccgggtccccggccttctgctcgaggccatgaaggtggctgtccggaagcagcggaagaagatcaaggccaagatgttagggacaccagaggaagcagagagcagtgaggatgaggctggcccatggatcctgctctccgatgacaagggagaccatcccccacccccggagtccaaaatacagagtttctttggcctatggtatcggggtaaagctgaatcctctgaggatgagaccagcagccctgcacccagcaagctagggggagaagaggaggcccaaccacagtctccagctcctgatccgccctgttctgccctccacgaacacctttgtctgggggcctcagccgccccagaggcctgacttaggggtctggctgtggaaggatgtgtggcctcaaatgaggacagggctcccgccttcacagccctcgccaggggtctgccccaatcctggcctgcatcagggcaggacggggtctcagcccgcctccctctctacgtctctgtaccgagcctctggggccagatataagagtgcctctctgagtctcagtttccccatccatgaaatgagagctgactgcctagctcccagggctttgtgcagacggcctgagctcatgtaataaagaactgcccgtaatacacagaaaaaaaaaaaaaaaaaa

SEQ ID NO: 5493 - DNA, 1904 bp, Homo Sapiens
  NM_031443
gcgcggccggggcggagacttcgggcccggctggcgggcggcgccgggagcgcgggggcggcgggcccgggtcgagcatgtagcggctgctggcggcggggctcccggggcgggccgggcgggccgcgggagccgcacgcggcgatatggaagaggagggcaagaagggcaagaagcctggaattgtctcgccatttaaacgagtattcctaaaaggtgaaaagagtagagataagaaagcccatgagaaggtgacagagaggcgccctctgcacactgtggtgttgtcattgcctgagcgcgtcgagccagacagactgctgagcgactatattgagaaggaggtaaagtatttaggtcagttaacgtccataccaggatacctgaatccctccagtaggactgaaatcctgcatttcatagacaatgcaaagagagcccaccagcttccgggacacttgactcaggagcacgatgctgtgctcagcctgtctgcgtacaacgtcaagctggcctggagggacggggaggatatcatcctcagggtgcccatccatgacatcgccgccgtctcctatgttcgggatgacgctgcacacctggtggtcctgaagacagcccaggacccagggatctcccccagccagagtctgtgtgcggaaagttccagaggcctcagtgcaggctccctgtcggagagtgcagttgggcccgtggaggcatgctgcctggtcatcctggctgcagagagcaaggtcgctgcggaggagctttgctgtctgctaggccaggtcttccaggttgtttacacggagtccaccatcgactttctggacagagcgatatttgatggggcctctaccccgacccaccacctgtccctgcacagcgatgactcttctacaaaagtggacattaaggagacctacgaggtggaagccagcactttctgcttccctgaatctgtggatgtgggtggtgcatcaccccacagcaagaccatcagtgagagcgagctgagcgccagcgccactgagctgctgcaggactacatgctgacgctgcgcaccaagctgtcatcacaggagatccagcagtttgcagcactgctgcacgagtaccgcaatggggcctctatccacgagttctgcatcaacctgcggcagctctacggggacagccgcaagttcctgctgcttggtctgaggcccttcatccctgagaaggacagccagcacttcgagaacttcctggagaccattggcgtgaaggatggccgcggcatcatcactgacagctttggcaggcaccggcgggccctgagcaccacatccagttccaccaccaatgggaacagggccacgggcagctctgatgaccggtcggcaccctcagagggggatgagtgggaccgcatgatctcggacatcagcagcgacattgaggcgctgggctgcagcatggaccaggactcagcatgatggacagtggatgggggggcacccacaccttccgcgcagtcgtcataggccttcccagaaggagctgcccagacctgcgtgtcagcccttggtggtggccagggagaggcgcccggtgcagatggccccgggcggcccaggtcctctactgtgaaggagcagggagctgccgagggacacgagcctcagtgcggggtggaaggctctttgccttgtccaccagggctcagccaagccctgcagtgtgtccccgctcggggagggcccggccgagcgggcagggagagccagtcctgtcggctgggcccttggacggctgtcagttttgcacatgatgttcctattgtaactctcagagaccttaaaaagaagtttactgcaatgtgaataatttaatctctggttgccaagcaaaaaaaaaaa

SEQ ID NO: 5494 - DNA, 4698 bp, Homo Sapiens
  NM_031445
gttggtgaagagatcaggaagagatttcttcgagactaaggatggatgacccttagcaacagtgaccgtctcctcccggcatagcaagatggcctgccctcaggtacaggaagaaggaatggaatcggaaggaagaaaattcattccagagacaaaatagctcccctcctctgttgtagctgttcctctggcaatacaaactttctgctttcaggttctgcagcattccagaccttgagcactgaatcaggatgggaaaaagacgttgtgttcctccactcgagcccaagttggcagcaggctgttgtggggtcaagaagcccaaattatctggaagtggaacgcacagtcacgggaatcagtccacaactgtccccggctctagttcaggacctcttcaaaaccaccagcatgtggacagcagcagtggacgggagaatgtgtcagacttaactctgggacctggaaactctcccatcacacgaatgaatcccgcatcgggagcgctgagccctcttccccggcctaatggaactgccaacaccactaagaatctggtggtgactgcagagatgtgctgctactgcttcgacgtactctactgtcacctctatggcttcccacagccacgacttcctagattcaccaatgacccctatccgctctttgtgacgtggaagacagggcgggacaagcggcttcgtggctgcattgggaccttctcagccatgaatcttcattcaggactcagggaatacacgttaaccagtgcacttaaggacagccgatttccccccctgacccgagaggagctgcctaaacttttctgctctgtctccctccttactaactttgaggatgccagtgattacctggactgggaggtaggggtccatgggattcgaattgaattcattaatgaaaaaggtgtcaaacgcacagccacatatttacctgaggttgctaaggaacaagactgggatcagatccagacaatagactccttgctcaggaaaggtggctttaaagctccaattaccagtgaattcagaaaaacgatcaaactcaccaggtaccgaagtgagaaggtgacaatcagttacgcagagtatattgcttcccgacagcactgtttccagaacggcactcttcatgccccgcccctctacaatcattactcctgacacacggctgcatgaccagtcccacccccccgtggccaccaatggctatgacatcattggagcagatgcctcctcttcctggtccagttacttctattactgcaccattttatgatgctagcttccgttgccaagtctgcctcccgctgactgagggagggtagggttaccttgaacgaaacagaacttgaggggcccaagccttatctcagcctttcctcaatatggggttccgttggattggggctcctccatgactagtgggaattactgtgggttcagaagacccttgtctggtatttgccacatggggtattggccacacgctggaagctgaaattgatgatccctgaaggttgaacccacacacacccctgcagcctccccagatgaagtaggtgtattcccctggcagtctgggcaacggagaccaagaaacatttttaggttgttttaaattcctttttttaaacttccagtttattgcgtaccaagagttgattacaacctccatgcttcataagcggacgccacgttagggttggacgtgggcaccacgagtcctttgaggctcctggacagagacccacatcaagatcggaagccctttgggtggcgttgcagatctcattgctcagtaggccgtgaagattttcatcctcatcccactctcagttggattttctggcactcttcctgcattgagtctcctgattactgaacagagctccgtcatgtagcctgctgaggaatggaatggaatggagatgcccacaggaggtcctgatgtcatcactgcacgcaggtgtgagaggagagacctcttctgcaccgcctggctacctcactcctctgctggtagcagtgcctatagctggacctaagttctcagaagcgtagatgtgcaaacaagcgattgagttgggctttaggaggacacatcataggagagaatccagggtctgtaagctggttttcttttcaggtgacatcctgaggggcctgtaagcaggggagctcctttttctagtttgcctgtagaggtgggaagactgttggtgtttctgtcctttacaggacattaggaaacagttgtgtaattacacaaggtggacctttatcttgcctgacatgctgggaatcttcaccccaccagggcaaatttccaaatagctcattttattctaggtctttcaaactttcatgtgacatatttccctttcccattgttgctgatttccaaatcgctgtcagcaattttttcctctctccttgcctattcttcactcatttggtggcaaagttcatagaactaggggacttggaagatgctttgaaaatattgttacaaaggcactgctaaaatgattcacagggagagtggccagttggaagaaggatcctaaggatgtgacactggttttcaacaacatgcttagagaactcatgaagtggattgggtgtcaacccagtgaacatgtttttatttaatttattttttgaagtttatgtggtgatggtgtggctttccgaaatgggcaaatattcagaagatcttttgcattttcttctgtcaggaatggggaaggggagtgggggcacaatctgagaaaggacacctgtgctgttctaggcatcgctggcaagtttgtgggaagggatgggcaagggtgagtgggtttgctccacaccgtcctgtgctgctcgagaggacctgggacgtgcgagggaaacgtgggtgacggtgcctaggctgcggcccttcactgctgtgctgggttcctgcagcctgctacgtttcccttggcaatgtaaatgaagatggaggggtcgtttcgtgatttcctgctgctgagaataaatgtcttgttaaaaacgtggcaacggttactcttaggtgccatggatcgatgtcagggtggtcagctctggactaagccacccacctccaatttgtacaacagtattgatacatagggctacactcattactgttcaagtgttctatgttaagagttgtgtttaatttctaaagattaaaaaaagcaaaaaaattggtgctaaaccttcacccctgagcacgctcagtgagactggtcatgcaagcatttacagtgccatgctcctcaagccgattttttcttgtagaaatgttgccctatttgtcttctccaatgtatggtatgttattttattttattattttattttattttattttattttatcgagggggggtacgatacctgccatttaagaaaatgaatagaaaattttaaaacccgagaaatggggaaaaaaaaatcagtgcacaagaattgggctggttaggcccagcaccacactgaagtgggctcagtggtttttggagtgaagaagccttactccctgcacattccctcatgctcccacacaagtccagcaatggaaatgcttgggttcctcttgctttgtcaggggactcaggagtcgaccaagggaaaccatttggccccgtgaggaatgggcattgtcagtatccgtcctgaacggggcctagtcaggaagcggtctagaagtgtacggtcacggtcgcctcatgaaagtgtgtagcaggtggctctcaggaaaaataccaagtctggatcatccatgtggcagctttgcatagggagaggatagctccgaactggaactgaactgccttctctgcacgcttgaccaaagcagtgatgagggcggccagtacctgcggtgtgcgtggtaggtttaaagaaaagggaatgttttctgctgagtgtttcctttgtccttgggctgctcgagctggacagtaggtaaccactgttttcaaggaccagcccaatttctctggcttggttcggagttcgtttcatccctagctgtgagtgccttttggtctggaaagttggcttgtctcataatacccacagctaggacattctctctgtaattatgaattgtccttgttttacattaaaagagaatgtctttgatcactagagtctgtcggtgttggattatttccactgtgagattcttaaaacttttttgcttcataataataaaacaactcatgttagagaccctttcaacatgaaaggtttgtagttgagacattacatatattttattgtttataataaaaatcatctatacaaaagaagtcctgggtgttaatattttgcacaagatctgttttccatgatgtgttgacatctacaatttcactaactgttgacgttattttctattgagattctggagcctagggagctatgtgttctttttgttcatttcgttcttacttccctgaagcaagagactatatggccttcagtgcaaagacttcagaccaattctttgtattacacttggttgcctcttggctatataacttctgagtgcaaatcattgaacactttaacgaagtattgtagagaataaatcataatggataaaaaaaaaaaaaaaaaaaaaaaaaaaaaaaaaaaaaaaaaaaaaaaaaaaaaaa

SEQ ID NO: 5495 - DNA, 1057 bp, Homo Sapiens
  NM_031446
agcttgagtccggacaccaacgacggggacgctgggaagccgacttccggcgccctattttctcacctggttcccgcggcgagccagcggcagcggcggcggcgatgagacagaagcactaccttgaggctgcagcgcggggactgcacgacagctgcccgggccaagcccgctacctcctctgggcctacacttcgtcgcacgatgataagagcacttttgaagaaacgtgtccatactgtttccagctgttggttctggataactctcgagtgcgtctcaaacccaaagccaggttgacacccaaaatacagaaacttcttaatcgagaagcgagaaactatacactcagttttaaagaagcaaaaatggtgaaaaagttcaaagactccaaaagtgtattgttgatcacttgtaaaacatgcaacagaacagtgaaacatcatggtaaaagtagaagctttgtgtcaacattgaagagcaatcctgccactcctacaagtaaactcagcctgaagacaccagagagaaggactgcaaacccaaatcatgacatgtctggctcgaaaggcaagagcccagcatcggttttcagaacacctacatctggacagtcagtatctacttgctcctcaaagaacaccagcaaaacaaagaaacacttctctcaactaaaaatgttacttagtcagaatgaatcccaaaagattccaaaggtggacttcagaaatttcttatcttctctgaagggtggacttttaaaataagaaatgcctgatgtcaattctgaaactaaagttggtaaaacaactttttaaactcttattcattttttgaatacatggaaactagatctgaatgcaaacttttcttggcatccttcagtgtttatggggaaaatacctcattagtgtgaatacctgaaacctgcctacctcataggacagctgtgaggatcaaaaaatatatgaaagttccttgtagatacatatctatagatatatatgtgtatgtatataaagatagatatatacattgagtagtggcaaaaaaaaaa

SEQ ID NO: 5496 - DNA, 5159 bp, Homo Sapiens
  NM_031449
cgcatggagcggcgcgggccgggggccgccacggcgaggggccgggccaggccgggcggagccagagcagctgagttccagataaaaactgtcagacccggcctgtaggctgctccattgccaatgaactccatgaaccccatgaaacctgccctgccccctgcgccacacggtgatggttcattcgcatatgagtctgtgccttggcaacaaagcgccactcagccggctggatcgctgtctgtggtcactactgtgtggggagttggcaacgcgacacagagccaggttttggggaaccccatgggccctgcagggagtccctctggcagctccatgatgcctggtgtggcagggggcagctccgccttgacctccccacagtgcctgggacagcaggcgtttgctgaaggcggcgccaacaagggctacgtgcagcaaggcgtgtacagccgcgggggctaccctggggcccccggcttcaccaccgggtatgcaggcggcccggggggcctgggcctcccctcacatgctgcaagaccctccactgacttcacgcaagcggcagctgctgcagctgtggctgctgcggcagccactgccaccgccacagccacagccaccgtggctgctctccaggagaagcagagccaggagctgagccagtatggagcgatgggggccggacagtcttttaacagccagtttctgcagcatggaggtccccgggggcctagtgtccccgctggcatgaaccctactggcataggaggggtaatgggcccctctggcctctcccccttggctatgaaccccacccgggcagcaggaatgacacccttgtatgcagggcagcgtctgccccaacatgggtatcctgggcctccccaggcccagccactgccccgacagggggtcaagagaacctactctgaggtgtatccagggcagcagtatctgcaaggaggccagtatgcacccagcaccgcccagtttgcgcccagccctgggcagccccctgccccctccccttcctaccctgggcacaggctgcccctgcagcagggcatgacccagtccctgtccgtgcctggccccacgggactgcattataagcccacagagcagttcaacgggcagggcgccagcttcaacgggggcagcgtcagctacagccaacctggcctgagtgggcctacccgttccatcccgggctatcccagttccccactgccagggaaccccacgccacccatgaccccaagcagcagcgtcccttacatgtcaccaaaccaagaggtcaagtctcccttcttgcctgatctcaagcccaacctcaactccttgcactcatcgccctctggaagcgggccttgtgacgagttgcggctgaccttccctgtgcgcgatggggtggtcctggagcccttccgcctgcagcacaacctggctgtaagcaaccatgtcttccagctgcgagactcagtctacaagaccctgataatgaggcctgacctggagctgcaattcaagtgctaccaccacgaggaccggcagatgaacaccaactggccagcctcggtgcaggtcagcgtcaatgccacgccgctcaccatcgagcgtggcgacaacaagacctcgcacaagccactctacctgaagcatgtgtgccagccaggccgcaacaccatccagatcaccgtcaccgcctgctgctgctcccacctcttcgtgctgcagctagtgcaccgcccatccgtccgctcggtgctgcagggcctcctcaaaaagcgcctcctgcctgctgagcactgcatcaccaagataaagcggaacttcagcagcggcaccatccctggcacccctgggcccaacggagaggacggggtggagcagacagctatcaaggtgtccctgaagtgccccatcaccttccgcaggatccagctccctgcccgaggtcatgactgtcgccacatacagtgctttgacctggagtcgtacctgcagctcaactgtgagcgggggacttggaggtgtcctgtgtgcaacaagacagctttgctggagggcctggaggtggaccagtacatgctgggcatcctgatttacattcagaactctgactatgaggagatcaccatcgaccccacgtgcagctggaagccagtgcccgtgaagcctgacatgcacatcaaggaggagccggatgggccagcactgaagcgctgccgcaccgtgagccccgcccacgtgctcatgcccagcgtgatggagatgatcgccgccctgggccccggcgctgccccctttgcccccctgcagcccccctcagtccctgcccccagcgactaccctggccagggttccagcttcctggggcctggaactttccctgagtccttcccacccaccacgcccagcaccccaacccttgctgagttcaccccgggaccaccccccatctcctaccagtctgacattcccagcagcctcctgacttcagagaagtctaccgcctgcctcccaagccagatggcaccagcaggtcacctggaccccactcacaatcctgggacaccaggactacacacctccaaccttggggcccctccaggtccccagctgcaccattcaaaccctcccccagcgtcccggcagtccttgggccaagcgagcttaggacctacgggtgaactggccttcagtcctgccacaggcgtgatggggccccccagcatgtctggagccggggaggccccagaaccagctctggacctgctcccggaactgaccaaccctgatgagctactgtcctacttgggcccacccgacctccctacgaacaacaatgacgacctgctttctctgtttgagaacaactgatcctgtgtttaccccaagcccggcggggacacgctcacagatgtcaccacagccctgcccttcatgcccagccccatgggacacccggtggtctttcccaaacctcccccaaaacacacctggagccagagccttctgccgccagccctgcccctgaattggaagcagccctgtgctcgatgggaggggctcccaggccggcagcccttgccacctccctctgccaagcctgctgctgcagaacggtttttgctgaggtgcccctgcccagccctgtccagccttgtccacacacacatctcacgcccctggtctcacagcctcacaccttgtccttccacccctgcctgcccccacccagcctgcttcttgtccagcattgatccttctgtttcaacaactcctccactgggcagagctgggcatctggcagggctggctctgtcccctgggcctttggctccagtggcccctgtgcccagcagtccagctcttggaacctcgctgaatggcagcctcttgggggcctggagctctggcagcccagccgtgtgtggtgtcaggttcctctccccaccccagcttcaagcagaggcctcggggtgggggagctacaaagcacaacaatgtacatagtgtagaaacactaacagctgggagaggggagccagctgtccagccagcatgttcctgttgtacagcccggtctccctgcgcgctctgctccttcccatgtgcagacagatcagggaggaacctccaatgggtgggggacagtgagcttcggcctggccgaggtgggtgggtgggctctcagattcagctctgtgtaaagattctctagcgggctgcgctcccaagttccccttctctgtgaaagtgaagaattagtacagctgtgttttttaaagccacctctctgtctccaccccatgggcccacacccaggtgggggaggaggaagccactgcatctgttggctcagggccccagcctgtgcgagcagggcgcctgggctgttgtgtctcctgtctgtgccgatctctattaaaggactccctcttggtgggcctggccgagtccctcctttgtgctcccagggactattttctcctcgtaagccagcgacctgcctaaagcttgggctgtgcctgcaaagcttgtgcaggacctgggggccaggtcgaccttcaagtggcttttggggccccaggttgagctctggatgtttcaagccaaggctcggctattcccgccccatagtaaatttccttttccctggaattttccaagttggcttcagctgaagagctgttttgtgaagcatcccaggcttgcccaggagagacatttgccactatgtcaccttatctgggcttgccctggggcactgagacagttgtttggcagccccagcccagccaggggctcatccttctcagctcttgtccctgggaggcctctgcttgtcacttcccagagattgcagaggtgtgtcctgcctaccatctgcctgtccagcttggtgggggtccgggtcaccatttcctccagtcctgggccccatccttgagggccttcccagccagccagcaggagaggcaagaactgggggaacacaggaacctaggggaggaggggagcgctgggcatcctcaggctggcggccaaggcctgcccctggaggcactagaggagggcatctgtctgtgggagcccagaggctgcagggaggaggaggagggaggtatctggtgtgagcgttgcccctgcgacatttgggaccacacaggtgggcttccttattccctgacaaagcctctgtttccagctcttccgccctctctggatgagggaacagaagtggaggaaacaaaagaagcagcagcacgcacagtcctgtcgctgggtgcggagacagcctggcaaagtcccactcagccatggcctgatgcaggccccaggccctcctttcttgggtgtcaaatgactgtgtcctggacatctgatgcaccacctgccctgcctgttgcaaacgtgatgctcccggatggagtggagaaactaggagactgggacaagcaaaaggctgcaaacaacccagaagcccatcctcagaagactggagaaatgattgaggaatgcatgggcaccgtggccctgtgctccatcacaaacacctctcagaaacaacgtgggatgaaaaagcaagacagttcatacagtatgatgccatttttataaagctcaaaaccaaaaaaaaaaaaaaaaaa

SEQ ID NO: 5497 - DNA, 3785 bp, Homo Sapiens
  NM_031453
acagaaggaagagcgcgaaattgcccaggatggacactttcaaaggggccccagcggctaagtgactctcagggaaggtggccttgccatcccaacttctatttaggggcaaccactagcaagttcttctcttcgggcaattggaaagagttcctataagcaaagtggaggtgatgtggacccctggaaaatttccttgccccgtttgaactttgcaatgattcactgcaagtcatgtccacgtggaaagcaagactcaccaaaagactgaagtctccctctagaagcatgcatccatttccgtgctcagctctgctcgcctgttttgggaatacgagggagagtgcttccttcaatcagtccggcgtggctgatactcattccaccgtccgtgtgcagcctgtggccaaagcaggcagacagccaagacacccaagcgcagaaggagctccagagaaaaggcaagattcgagcacccatgcagagagaaatggcagtgcgaatcggaattcaagtcaccgcactgcggcccagcccgcggagacgcctgaagatgtgcccgggtccctggatgatggggcggactgtgaagcagtggtgtttcacgcttccatccccagaccatcaattattgacacgcccaaggaagaagaatttcgagaagaacctaaatgcctcgagctggagcagaaaatgacatcagacagcccacctgaggatattgaccataaggactcatatctcattacaagaagcatcatggccgagccagactacatagaagatgacaatcctgaactcattaggcctcagaaactgatcaatcctgtaaaaacctcccggaaccatcaagatcttcacagagaacttcttatgaatcaaaaaaggggtcttgctcctcagaacaaaccagaattgcagaaggtgatggaaaaaagaaaacgagaccaagtaataaagcagaaggaagaagaagcacagaagaagaaatctgacttggaaatagagctattaaaacggcagcagaagttggagcagcttgaacttgagaagcagaaattgcaagaagagcaagaaaatgcccccgagtttgtgaaggtgaaaggcaatctcaggagaacaggccaagaagtcgcccaagcccaggagtcctaggctgaggctgcaccaagacctcgtgtgtcaccccacagagctgtctgtgggtgccttctcaatctcagggcaatagcccctggagaatatttcagccagcagagaattttgacttgcagtaggatttggtttgattttcctacgatctgggtggatgccttgcctgtgacagttgcagttcctattcgccaaatgaagggcagtgccccgcacgtaagttggaatgatggacctgtgttcagagacttaacagaaccaacaagcaaaacaagtgagaacaggaaaaaggaagaggacactggaatcaattcttgagagttgcactacttggtttttcttccattccaagtttcgtgggacccagagccttttttcttttaaaagctaaaaaacaagtgtttaattcctctttttgttatctgttagataattgagatcacctagaaatgcgtttaatctgttcactcactgtaaattttgaggacccagaattgtcttgtttaatttatactttcacccctgttgcagttaacaccagagaaggaacgtgaatgtcgagcacagccactacccttgttggcacttaatttagaaatagggtgagaagtttaaaagcccatcttgattttattttcattccttttggttctctgtgtaataatagcaggctacatagtgacattccagttccaagaaggtacatcctgtccattcattaattgctttgattactaggagggtttctgttcagttttgtttttaaatgtcttgctgatctagttctttcagatggaataaccttccagtcccttagagagtggaactagtccatataacccagcttcagtagcaaaagtagaagccgccacatcttttcatttctccaagaggagagtggggaaggttcccatgaccagctgggcagtcaggatttctctaggcattctaatgtgaaataagtgtagactgctgtcaaggaggcttcatcagaagatgtatagcatttgaatgtctaatgataatgcatatcattagaatccaagctttgaaaatttctgattaatgctcatgtatttctttatctttgtttttccttgtgaagaaagactttcaccactgtctgagtgatgatgctgttgataaggatgatgtcgatgactactatattgcatctctcaggaacagctgatgggaagggaggggctgctgagttcccttgttctagctagcagcacgctcctcagagagggggccgagttacagacagcagccgcattctcatgcaaaattagttttaaactgctagtgtgggcatcggtaccttttgcctgggtgataccgaagaattgttgaggatttagtatgctccgtagagacagttcagccagtcatttctgcattggagagacttctcatactttctttgaagactcatagaaagctggatctagagctcttgaatccttaattagcacagtagaaattagctttctatgggaatgctttagtgttagcagttgacaattaggcccatattcaatctgaatgggaacaaaagtaaatgcaatgataatatactgctagttagagaaacatgttagttgattatacctgaaatggattatttatctcatcagcaagtattatttgaataaaatgagaaatgcttaagaaaaattgttgctctacagtaatttggtttcgaagaatggaatggtaactattttttcccatcgttcttttgagagaaggaagtgtgatgactgatgatcttgaaaagcccatttctgattgcacgttgactggaattctttctttgtgtctgtggactagcgatgctgtttgtaaaatgaagattcgggactggctcatatctttttatctaactagatgtcagatcttgaaatctgtattctcgaagcaattctgccacttgatcgtattcacaggggccctggtaggctcctttagaaggaccatttctgttcctagagcttaactagaattcattcttcactgaaaaaaaaaaaagttacttaagaaagcatttctttcctaatctcactcaaatctgcagaattatttgtaattagtaatacaaaatctggccaaaaggagacttgtaaatagcgtaaagtggtgtcttatgctaaacggtggaatgtataggcagagaagctctttgaagttgtcagatgagctgggctcacaagcctgattcaaacaggctgtcggtctcctctcaccccttaatactgtgcagcccaaactcctaggactcttgaacatctgagcagttttgtgctttgagccactttttgacaaaaatggctccatttttccacagcgtggttttcttaaaatagtttaatgttttatagtctcatagtagtagtgttgctttctaagctataacagtcgaccttattcttctactctgaaaaatcttgacttgtttgagtgtatataatatatataaagggagccttaatggattggttttcataatttaatattttttgtatttgctcttgtataattgtttttaacggaaagtattaaagaattgagggtggaattcttagaaccaaagttattcttaataaaaatcaccacatgcttggaccatg

SEQ ID NO: 5498 - DNA, 3359 bp, Homo Sapiens
  NM_031458
cgcctggaaacccgggggccgggcccccagagggctttcgcagcctggccgcccgaagctcacctgccctttcactgaactccacccggaaggtgcccggggcttcgtgttcctgggtgctgaccgtgcactccccgccgcccgaggacttagagctctggaagtagctctccagcttccttcgtactcgggggccggacttgtacacccgcacgaggagcggggacggcgggcgcagaagtgggccaccatatctggaaactacagtctatgctttgaagcgcaaaagggaataaacatttaaagactcccccggggacctggaggatggacttttccatggtggccggagcagcagcttacaatgaaaaatcaggtaggattacctcgctctcactcttgtttcagaaagtctttgctcagatctttcctcagtggagaaaggggaatacagaagaatgtctcccctacaagtgctcagagactggtgctcttggagaaaactatagttggcaaattcccattaaccacaatgacttcaaaattttaaaaaataatgagcgtcagctgtgtgaagtcctccagaataagtttggctgtatctctaccctggtctctccagttcaggaaggcaacagcaaatctctgcaagtgttcagaaaaatgctgactcctaggatagagttatcagtctggaaagatgacctcaccacacatgctgttgatgctgtggtgaatgcagccaatgaagatcttctgcatgggggaggcctggccctggccctggtaaaagctggtggatttgaaatccaagaagagagcaaacagtttgttgccagatatggtaaagtgtcagctggtgagatagctgtcacgggagcagggaggcttccctgcaaacagatcatccatgctgttgggcctcggtggatggaatgggataaacagggatgtactggaaagctgcagagggccattgtaagtattctgaattatgtcatctataaaaatactcacattaagacagtagcaattccagccttgagctctgggatttttcagttccctctgaatttgtgtacaaagactattgtagagactatccgggttagtttgcaagggaagccaatgatgagtaatttgaaagaaattcacctggtgagcaatgaggaccctactgttgctgcctttaaagctgcttcagaattcatcctagggaagagtgagctgggacaagaaaccaccccttctttcaatgcaatggtcgtgaacaacctgaccctccagattgtccagggccacattgaatggcagacggcagatgtaattgttaattctgtaaacccacatgatattacagttggacctgtggcaaagtcaattctacaacaagcaggagttgaaatgaaatcggaatttcttgccacaaaggctaaacagtttcaacggtcccagttggtactggtcacaaaaggatttaacttgttctgtaaatatatataccatgtactgtggcattcagaatttcctaaacctcagatattaaaacatgcaatgaaggagtgtttggaaaaatgcattgagcaaaatataacttccatttcctttcctgcccttgggactggaaacatggaaataaagaaggaaacagcagcagagattttgtttgatgaagttttaacatttgccaaagaccatgtaaaacaccagttaactgtaaaatttgtgatctttccaacagatttggagatatataaggctttcagttctgaaatggcaaagaggtccaagatgctgagtttgaacaattacagtgtcccccagtcaaccagagaggagaaaagagaaaatgggcttgaagctagatctcctgccatcaatctgatgggattcaacgtggaagagatgtatgaggcccacgcatggatccaaagaatcctgagtctccagaaccaccacatcattgagaataatcatattctgtaccttgggagaaaggaacatgacattttgtctcagcttcagaaaacttcaagtgtctccatcacagaaattatcagcccaggaaggacagagttagagattgaaggagcccgggctgacctcattgaggtggttatgaacattgaagatatgctttgtaaagtacaggaggaaatggcaaggaaaaaggagcgaggcctttggcgctcgttaggacagtggactattcagcaacaaaaaacccaagacgaaatgaaagaaaatatcatatttctgaaatgtcctgtgcctccaactcaagagcttctagatcaaaagaaacagtttgaaaaatgtggtttgcaggttctaaaggtggagaagatagacaatgaggtccttatggctgcctttcaaagaaagaagaaaatgatggaagaaaaactgcacaggcaacctgtgagccataggctgtttcagcaagtcccataccagttctgcaatgtggtatgcagagttggctttcaaagaatgtactcgacaccttgcgatccaaaatacggagctggcatatacttcaccaagaacctcaaaaacctggcagagaaggccaagaaaatctctgctgcagataagctgatctatgtgtttgaggctgaagtactcacaggcttcttctgccagggacatccgttaaatattgttcccccaccactgagtcctggagctatagatggtcatgacagtgtggttgacaatgtctccagccctgaaacctttgttatttttagtggcatgcaggctatacctcagtatttgtggacatgcacccaggaatatgtacagtcacaagattactcatcaggaccaatgagaccctttgcacagcatccttggaggggattcgcaagtggcagccctgttgattaatctctacatcattttaacagctggtatggccttaccttgggtgaactaaccaaataatgaccatcgatggctcaaagagtggcttgaatatatcccatgggttatctgtatggactgactgggttattgaaaggactagccacatactagcatcttagtgcctttatctgtctttatgtcttggggttggggtaggtagataccaaatgaaacactttcaggaccttccttcctcttgcagttgttctttaatctcctttactagaggagataaatattttgcatataatgaagaaatttttctagtatataacgcaggccttttattttctaaaatgatgatagtataaaaatgttaggataacagaatgattttagattttccagagaatattataaagtgctttaggtatgaaaataaatcatctttgtctgattaactggctctgaaaaaaaaaaaaaaaaaa

SEQ ID NO: 5499 - DNA, 3503 bp, Homo Sapiens
  NM_031459
gctggtgtcagagcccggcgagcgctggcagttccgcggcggggatgctgaggagcgctgggtccgggagcagccctggcccctgcggacttccgaggccgtgaaaacccctgcgctgcggcccttcccaggcccccgaggccgttcgccgttcccgaagcccgactgggggaagagtccagcaccaaagcggccgttctcggattccggagcgttctggagccccgagagacgccccggggttctagaagctccccggcggcgcccagtcccggcttcattcgggcgtccctccgaaacccactcgggtgcacgggtcgtcggcgagccgcgaccgggtcctggcgcgcaccatgatcgtggcggactccgagtgccgcgcagagctcaaggactacctgcggttcgccccgggcggcgtcggcgactcgggccccggagaggagcagagggagagccgggctcggcgaggccctcgagggcccagcgccttcatccccgtggaggaggtccttcgggagggggctgagagcctcgagcagcacctggggctggaggcactgatgtcctctgggcgagtagacaacctggcagtggtgatgggcctgcaccctgactactttaccagcttctggcgcctgcactacctgctgctgcacacggatggtcccttggccagctcctggcgccactacattgccatcatggctgccgcccgccatcagtgttcttacctggtaggctcccacatggccgagtttctgcagactggtggtgaccctgagtggctgctgggcctccaccgggcccccgagaagctgcgcaaactcagcgagatcaacaagttgctggcgcatcggccatggctcatcaccaaggaacacatccaggccttgctgaagaccggcgagcacacttggtccctggccgagctcattcaggctctggtcctgctcacccactgccactcgctctcctccttcgtgtttggctgtggcatcctccctgagggggatgcagatggcagccctgccccccaggcacctacaccccctagtgaacagagcagccccccaagcagggacccgttgaacaactctgggggctttgagtctgcccgcgacgtggaggcgctgatggagcgcatgcagcagctgcaggagagcctgctgcgggatgaggggacgtcccaggaggagatggagagccgctttgagctggagaagtcagagagcctgctggtgaccccctcagctgacatcctggagccctctccacacccagacatgctgtgctttgtggaagaccctactttcggatatgaggacttcactcggagaggggctcaggcaccccctaccttccgggcccaggattatacctgggaagaccatggctactcgctgatccagcggctttaccctgagggtgggcagctgctggatgagaagttccaggcagcctatagcctcacctacaataccatcgccatgcacagtggtgtggacacctccgtgctccgcagggccatctggaactatatccactgcgtctttggcatcagatatgatgactatgattatggggaggtgaaccagctcctggagcggaacctcaaggtctatatcaagacagtggcctgctacccagagaagaccacccgaagaatgtacaacctcttctggaggcacttccgccactcagagaaggtccacgtgaacttgctgctcctggaggcgcgcatgcaagccgctctgctgtacgccctccgtgccatcacccgctacatgacctgactcctgagcaggacctgggcccggttcagctccccacaaggacttctctgtctggagacagccccagacccttttgtgtcccatgcccaccctccccacgctgcagtgggcttgtgtgtgatgtgcagtcccgaagccacaccctcccttttcctcactggaatggacagttcattgcactgactctgggatctcagccctgctcctgggagctggaagagcacttggagatcctaagggaccacacccttcctccttcccctgcccacagaggcagagggcacaggaaagaagccgggccaagctcggaattaatgtgccacaagtgttgtggccttcctgaactgggaagtccctggctggcccccgggggagaggggcaaatgcctccgggactgacactccaggcagctttgccttctctcccctgtcatttccagatttcattacctcctacttgccattcacccatcaatgtgaaagtcagggtcacagctggtctgtgtgtccagttccctaaaagcctgttctgttgggcagcctgaggctgttgcccgaatcctagttcagttttttgacttcctttgccctttttcccttttctccatgcttaatggtgtgaggcgtcaggagagaggccaagtacataaaaaaaaaaaaagcagattatctctagagagtttgagcctttgctggtcacattgccttctgaagaggagggagtattagattataaatcctctttattttggtcctttatgcttgaggttccaacctggagccacagtgtgtgagaggaggaggagagggagaattctgttctcccagagctgcacctgcctcgcagaggccagcaccccactctcctgcctccagtggccctgccgcagatgtctcccaaaaagttgagcctttctagatggcttaggtggcaccatggctcagcaggaggggcgggaggcaccagggttcttgtttggaccctgcccctgggccatggccaggtgaccatggctacattgccaaacctctgactgccacagctgcagactgagagggtgggtctgagtccccacaatgtctgaagctgcccctgggattctcaggccaacctgccaacagcaagcggattttcttgcaagatcagggaccccatttctgcagccagtgtctcctgggtgccttctgaggactcccacccccatcccagtatctcatctgtcccctctcctggggcttaagtgggttgcttccaggcagaagcagccaaggaccgattccaggcactttctgtagcaaatgactgtgaattacgacttctcttgcccttcttctagcagtctgtgcctcctctctgaccagtttggagggcactgaagaaaggcaagggccgtgctgctgctgggcggggcaggagaggagcctggccagtgtgccacattaaatacccgtgcaggcgcggagaagcaaccggcacccccttccggcctgaaagccctccctgcaagaaggtgtgcaggagagaagaggccccggcatggggatctgggttctagagggcatgtgatgactgtaaatgttcactgggtgggtagggagtggtatccagtgttcaagtgcagaaatctttggctttgctaccagttccatatgatgagaaataaacgttcgctgaggttttgtttcataaaaaaaaaaaaaaaaaaa

SEQ ID NO: 5500 - DNA, 1872 bp, Homo Sapiens
  NM_031465
attccgggctcgaaggctgtgcggtctgccaggagctgcggccccgtccggcccgggctggcatgggttggaattggagcctatcccccaacccgaaggctaacagcatcatgtggttactaactgttcctcattcaccggttgatgcctcccagaaaaaaacgccgccagccttcccagaaagccccgctgctgttccaccaacaaccactggagggccccaaacacagctgtgcatctacacagcttcccatcactcacactcgacaggtgcccagcaagcccattgaccacagcaccatcacttcctgggtatcacctgattttgatacagcagcaggaagcttgttcccagcctaccagaaacaccaaaaccgggcgagacactcaagtcgaaaacctaccacctccaagtttccacatctaacttttgagagtccgcaatcttccagttcagagacattggggatccccttaatccgagagtgccccagtgaatcagaaaaggatgtttccagaagacccttagttccagtgctcagtccccaaagctgtgggaacatgtcagtgcaggcacttcagagcttaccttatgtgttcattccacctgatatccagaccccagagtcatcgtctgtgaaggaagaactcattccccaagatcagaaggaaaacagccttctaagctgcactcttcacactggcactcctaatagcccagagcctggacctgttctggttaaagacacccccgaggacaagtatggaataaaggtcacatggaggagacgacagcacctgcttgcttacctcagggagagagggaagctgagcagaagccaattccttgtgaaaagctgactgccatcagtaatctcaatagaaaagagatatgttttctggagtcataaaggaattcaattcctagggtttttgtttttgtttttgagatgtaatattgctctgttgcccaggctggagtgcagtggtatgatctcaccttactgcaaccaccacttcctgggttcaagcgattctcctgcctcagcctccccagtagctgggattacaggcaccagccaccatgcctggctaatttttttgtatttttagtagagatgtggtttctccatgttggccaggctggtctcaaaatcctgacctcaagtcatctgctggccttgacctcacaaagtgctggcccagccgagatttgttttctaagatactttgtgtcatgaacagttcagtttagtgtcatgaactattcacttcatatttttcttgtattaactgtttaaatttttaaaatatcttgtagtaactctttaaaatgtatgtaagtaaatggctgcagaaagtttttttagagaatcctgcttccatcagtaatacagcaatattaccccatccactaatggtctttgtttccttaaccactactcattaatccttaatcacctcattcaaactaattcattctgcatttttgagtaccaactcttgtcaggctcagtggcagcttctacgacctgatggatggaaaaaaatcaaactctgtgactctatggttgactgccacctctgcaaccttgactcatctgctgaaaaggcaagaagaagaaagggcagcaagccctgttttagggactacataagatgaggggagataagggggacatagatgagttctttaggattgcgtgtgttttgagtttttgtttctaactgaagaaatctgtcaatattaaatagggtgggaaaatggtttcttagaataactgttcaactgtgtgtaaataaggaaagttttcaatgagtattacttattgtaattaatgcagaaggacttccccagtcaaaaaaaaaaaa

SEQ ID NO: 5501 - DNA, 2558 bp, Homo Sapiens
  NM_031471
ccgccctgctcgtgataaggcacaagcaagggctgccctgaaggaagctccaaagagaaaggagggcaggaagcccacggcccacaggggtgtagcccgagacccacctgcagcccccagcccttgccaggaaagcagcagccgcagccatggcggggatgaagacagcctccggggactacatcgactcgtcatgggagctgcgggtgtttgtgggagaggaggacccagaggccgagtcggtcaccctgcgggtcactggggagtcgcacatcggcggggtgctcctgaagattgtggagcagatcaatcgcaagcaggactggtcagaccatgctatttggtgggaacagaagaggcagtggctgctgcagacccactggacactggacaagtacgggatcctggccgacgcacgcctcttctttgggccccagcaccggcccgtcatccttcggttgcccaaccgccgcgcactgcgcctccgtgccagcttctcccagcccctcttccaggctgtggctgccatctgccgcctcctcagcatccggcaccccgaggagctgtccctgctccgggctcctgagaagaaggagaagaagaagaaagagaaggagccagaggaagagctctatgacttgagcaaggttgtcttggctgggggcgtggcacctgcactgttccgggggatgccagctcacttctcggacagcgcccagactgaggcctgctaccacatgctgagccggccccagccgccacccgaccccctcctgctccagcgtctgccacggcccagctccctgtcagacaagacccagctccacagcaggtggctggactcgtcgcggtgtctcatgcagcagggcatcaaggccggggacgcactctggctgcgcttcaagtactacagcttcttcgatttggatcccaagacagaccccgtgcggctgacacagctgtatgagcaggcccggtgggacctgctgctggaggagattgactgcaccgaggaggagatgatggtgtttgccgccctgcagtaccacatcaacaagctgtcccagagcggggaggtgggggagccggctggcacagacccagggctggacgacctggatgtggccctgagcaacctggaggtgaagctggaggggtcggcgcccacagatgtgctggacagcctcaccaccatcccagagctcaaggaccatctccgaatctttcggccccggaagctgaccctgaagggctaccgccaacactgggtggtgttcaaggagaccacactgtcctactacaagagccaggacgaggcccctggggaccccattcagcagctcaacctcaagggctgtgaggtggttcccgatgttaacgtctccggccagaagttctgcattaaactcctagtgccctcccctgagggcatgagtgagatctacctgcggtgccaggatgagcagcagtatgcccgctggatggctggctgccgcctggcctccaaaggccgcaccatggccgacagcagctacaccagcgaggtgcaggccatcctggccttcctcagcctgcagcgcacgggcagtgggggcccgggcaaccacccccacggccctgatgcctctgccgagggcctcaacccctacggcctcgttgccccccgtttccagcgaaagttcaaggccaagcagctcaccccacggatcctggaagcccaccagaatgtggcccagttgtcgctggcagaggcccagctgcgcttcatccaggcctggcagtccctgcccgacttcggcatctcctatgtcatggtcaggttcaagggcagcaggaaagacgagatcctgggcatcgccaacaaccgactgatccgcatcgacttggccgtgggcgacgtggtcaagacctggcgtttcagcaacatgcgccagtggaatgtcaactgggacatccggcaggtggccatcgagtttgatgaacacatcaatgtggccttcagctgcgtgtctgccagctgccgaattgtacacgagtatatcgggggctacattttcctgtcgacgcgggagcgggcccgtggggaggagctggatgaagacctcttcctgcagctcaccgggggccatgaggccttctgagggctgtctgattgcccctgccctgctcaccaccctgtcacagccactcccaagcccacacccacaggggctcactgccccacacccgctccaggcaggcacccagctgggcatttcacctgctgtcactgactttgtgcaggccaaggacctggcagggccagacgctgtaccatcacccaggccagggatgggggtgggggtccctgagctcatgtggtgccccctttccttgtctgagtggctgaggctgatacccctgacctatctgcagtcccccagcacacaaggaagaccagatgtagctacaggatgatgaaacatggtttcaaacgagttctttcttgttactttttaaaatttcttttttataaattaatattttattgttggatcctcaaaaaaaaaaaaaaaaaa

SEQ ID NO: 5502 - DNA, 987 bp, Homo Sapiens
  NM_031472
agtgcccgccccctttccacgcggcttttcattggcgggtccgccgcggtcgaggatcctggaggtttgtccccgccgccccgacgcttccgcccggtccgtcggcacgtcggccctgcctcccggaccaccctgcggggcgcaccagcgatctggggtgcggggctcggcctccctgcgctcctggctgacggtgtgaccttgggaccgagacgtgcagctgtccaaggctctgtcctatgccctgcgccatggggccttgaagctggggcttcccatgggagctgatggcttcgtgcccctgggcaccctcctgcagttgccccagttccgcggcttctctgctgaagatgtgcagcgcgtggtggacaccaataggaagcagcggttcgccctgcagctgggggatcccagcactggccttctcatccgggccaaccagggccattccctgcaggtacctaagttggagctgatgcccctggagacaccgcaggccctgcccccgatgctagtccatggtacattctggaagcactggccatccatcctactcaaaggcctgtcctgccagggaaggacgcacattcacctggccccaggactgcctggagaccccggtatcatcagtggcatgcggtcccattgtgaaatagctgtgttcatcgatggacccctggctctggcagatggaatacccttcttccgctctgccaatggggtgattctgactccagggaatactgatggcttcctccttcccaagtacttcaaggaggccctgcagctacgccctacccgaaagcccctttccttggctggtgatgaagagacagagtgtcagagtagccccaagcacagctccagagaaaggaggaggatccaacaataaaatattaatttataaaaaagaaattttaaaaagtaacaagaaagaactcgtttgaaaccatgtttcatcatcctgtaaaaaaaaaaaaaaaaaaa

SEQ ID NO: 5503 - DNA, 4607 bp, Homo Sapiens
  NM_031476
acccactcgcatcccagggcgtctccggctgctcctattgagctgtctgctcgctgtgcccgctgtgcctgctgtgcccgcgctgtcgccgctgctaccgcgtctgctggacgcgggagacgccagcgagctggtgattggagccctgcggagagctcaagcgcccagctctgcccgaggagcccaggctgccccgtgagtcccatagttgctgcaggagtggagccatgagctgcgtcctgggtggtgtcatccccttggggctgctgttcctggtctgcggatcccaaggctacctcctgcccaacgtcactctcttagaggagctgctcagcaaataccagcacaacgagtctcactcccgggtccgcagagccatccccagggaggacaaggaggagatcctcatgctgcacaacaagcttcggggccaggtgcagcctcaggcctccaacatggagtacatgacctgggatgacgaactggagaagtctgctgcagcgtgggccagtcagtgcatctgggagcacgggcccaccagtctgctggtgtccatcgggcagaacctgggcgctcactggggcaggtatcgctctccggggttccatgtgcagtcctggtatgacgaggtgaaggactacacctacccctacccgagcgagtgcaacccctggtgtccagagaggtgctcggggcccatgtgcacgcactacacacagatagtttgggccaccaccaacaagatcggttgtgctgtgaacacctgccggaagatgactgtctggggagaagtttgggagaacgcggtctactttgtctgcaattattctccaaaggggaactggattggagaagccccctacaagaatggccggccctgctctgagtgcccacccagctatggaggcagctgcaggaacaacttgtgttaccgagaagaaacctacactccaaaacctgaaacggacgagatgaatgaggtggaaacggctcccattcctgaagaaaaccatgtttggctccaaccgagggtgatgagacccaccaagcccaagaaaacctctgcggtcaactacatgacccaagtcgtcagatgtgacaccaagatgaaggacaggtgcaaagggtccacgtgtaacaggtaccagtgcccagcaggctgcctgaaccacaaggcgaagatctttggaactctgttctatgaaagctcgtctagcatatgccgcgccgccatccactacgggatcctggatgacaagggaggcctggtggatatcaccaggaacgggaaggtccccttcttcgtgaagtctgagagacacggcgtgcagtccctcagcaaatacaaaccttccagctcattcatggtgtcaaaagtgaaagtgcaggatttggactgctacacgaccgttgctcagctgtgcccgtttgaaaagccagcaactcactgcccaagaatccattgtccggcacactgcaaagacgaaccttcctactgggctccggtgtttggaaccaacatctatgcagatacctcaagcatctgcaagacagccgtgcacgcgggagtcatcagcaacgagagtgggggtgacgtggacgtgatgcccgtggataaaaagaagacctacgtgggctcgctcaggaatggagttcagtctgaaagcctggggactcctcgggatggaaaggccttccggatctttgctgtcaggcagtgaatttccagcaccaggggagaaggggcgtcttcaggagggcttcggggttttgcttttatttttattttgtcattgcggggtatatggagagtcaggaaacttcctttgactgatgttcagtgtccatcactttgtggcctgtgggtgaggtgacatctcatcccctcactgaagcaacagcatcccaaggtgctcagccggactccctggtgcctgatcctgctggggcctgggggtctccatctggacgtcctctctcctttagagatctgagctgtctcttaaaggggacagttgcccaaaatgttccttgctatgtgttcttctgttggtggaggaagttgatttcaacctccctgccaaaagaacaaaccatttgaagctcacaattgtgaagcattcacggcgtcggaagaggccttttgagcaagcgccaatgagtttcaggaatgaagtagaaggtagttatttaaaaataaaaaacacagtccgtccctaccaatagaggaaaatggttttaatgtttgctggtcagacagacaaatgggctagagtaagagggctgcgggtatgagagaccccggctccgccctggcacgtgtccttgctggcggcccgccacaggcccccttcaatggccgcattcaggatggctctatacacagcagtgctggtttatgtagagttcagcagtcacttcagagatgtatcttgtctttgtcaggcccttcgtcttcatggcccacctgttttctgccgtgacctttggtcccattgaggactaaggatcgggaccctttctttaccccctacccgttgtggctcccaccctgcctcggactggtttacgtgtcctggttcacacccaggacttttctttgcaagcgaacctgtttgaagcccaagtcttaactcctggtctcgtaaggttccactgagacgagatgtctgagaacaaccaaagaaggcctgctctttgctgcttttaaaaaatgacaattaaatgtgcagattccccacgcacccgatgacctattttttcagccgtgggaggaatggagtctttggtacattcctcaccgaggttagcagctcagtttgtggttatgaaaccgtctgtggcctcatgacagcgagagatgggaatacactagaaggatctcttttcctgttttcgtgaaacgactcttgccaaacgttcccgaggcgccaaggagtgtagtacaccctggctgccatcactctataaaagtgcttcatgagcccagaccaaaagcccacagtgaaatgaagtacccttttgtaaatagcatttttttgcagaaggtgaaaattccactctctaccaccgggccagccaatagatcactttggtgaatgctagtttcaaatttgattcaaaatatttcttaggtgaaagaactagcagaaagtcaaaaactaagatactgtagactggacaagaaattctacctgggcacctaggtgatgccttctttctttgattgcctttctaataaatgcagaatctgaaggtaaataggtttaaaacaaaacaaaaacccacccctttaaggagttggtaaaaagcagttcaactcttagcttgactgagctaaaattcacaggactacgtgctttgtgcattgtagtctagtcgtaattcataggtactgactcctcagccccaaatgtcggagaggaagaattcggtcagcctgtcaggtcgtgagtccagttaccaccaaacatctgggaaacttctgggtgctgggtgctctgctgctggacttttgtggctgtgtctgtgtctgcaagataaattagatcgccctgtggggtttgcagaattagtgaagggtccaggacgatcccagtgggctcgcttccaaagcatcccactcaagggagacttgaaacttccagtgtgagttgaccccatcatttaaaaataaagtccccgggttccttaatgcctccttcactgggccttcctagcaggatagaaagtccttgcccagagcaggacctggctgtctttttttttttttttttttttttcccgagaccaagtttcactctgttgcccaaggtagagtgcagtggcgtgatctctgctcattgcaactgccgcctcccgggttcaagcaattctcatgcatcagcctcccaagtacctgggactacaggcgtgagctaccatgcccggctaatttttgtatttttagtagagatggggtttcattatgttggccaggctggtctcgaactccttacctcaggtgatccacccaccttggcctcccgaagtgctgggattacaggcatgagccactgcgcccggccatggacctggctgtctttatcatccccacaaacattttgaaactggaatatttgtcttcagaaaatggaaacaagactataaatgataagccctgtccctagcaccacctctcctgtgtgtggaatagaggcccctcgtgctaccaacacttaccctgtgtttaaaaagatcttgtaccaagccaacggcgttcctggctctcctgcccacaggatgaacattttcggcttccttaggagttttgccctaccgtattccaaagcgtgtgctggtttctcatattgtctgtaggctcactcagcccgcagtttatgtgtgtgcttttttctatgaaaaatgatgtattttgctacttcctgtgtacaaagttttattgtaaatgttttttgtgctttgcatgaacaggggccacgttgttgcaattgtttcagtagaactggtttgatttctaaaatgttcctgtaacatatcttttatgaacaaatctgaacaatttgtgaaataaaacattgaaaaccatcaaaaaaaaaaaaaaaaaa

SEQ ID NO: 5504 - DNA, 2495 bp, Homo Sapiens
  NM_031480
gggtggtggatctgtcggtcccgttttcccgtcgcacgtggtggccactgttggcttctgaatggtttgcaaggcggatatccacgccaaggcctttggatcggccgtgggtacatccgtctgagccgttcctttccatcgcagagcggcggcctccggcggcgctctccagtcatggactaccggcggcttctcatgagccgggtggtccccgggcaattcgacgacgcggactcctctgacagtgaaaacagagacttgaagacagtcaaagagaaggatgacattctgtttgaagaccttcaagacaatgtgaatgagaatggtgaaggtgaaatagaagatgaggaggaggagggttatgacgatgatgatgatgactgggactgggatgaaggagttggaaaactcgccaagggttatgtctggaatggaggaagcaacccacaggcaaatcgacagacctccgacagcagttcagccaaaatgtctactccagcagacaaggtcttacggaaatttgagaataaaattaatttagataagctaaatgttactgattccgtcataaataaagtcaccgaaaagtctagacaaaaggaagcagatatgtatcgcatcaaagataaggcagacagagcaactgtagaacaggtgttggatcccagaacaagaatgattttattcaagatgttgactagaggaatcataacagagataaatggctgcattagcacaggaaaagaagctaatgtataccatgctagcacagcaaatggagagagcagagcaatcaaaatttataaaacttctattttggtgttcaaagatcgggataaatatgtaagtggagaattcagatttcgtcatggctattgtaaaggaaaccctaggaaaatggtgaaaacttgggcagaaaaagaaatgaggaacttaatcaggctaaacacagcagagataccatgtccagaaccaataatgctaagaagtcatgttcttgtcatgagtttcatcggtaaagatgacatgcctgcaccactcttgaaaaatgtccagttatcagaatccaaggctcgggagttgtacctgcaggtcattcagtacatgagaagaatgtatcaggatgccagacttgtccatgcagatctcagtgaatttaacatgctgtaccacggtggaggcgtgtatatcattgacgtgtctcagtccgtggagcacgaccacccacatgccttggagttcttgagaaaggattgcgccaacgtcaatgatttctttatgaggcacagtgttgctgtcatgactgtgcgggagctctttgaatttgtcacagatccatccattacacatgagaacatggatgcttatctctcaaaggccatggaaatagcatctcaaaggaccaaggaagaacggtctagccaagatcatgtggatgaagaggtgtttaagcgagcatatattcctagaaccttgaatgaagtgaaaaattatgagagggatatggacataattatgaaattgaaggaagaggacatggccatgaatgcccaacaagataatattctataccagactgttacaggattgaagaaagatttgtcaggagttcagaaggtccctgcactcctagaaaatcaagtggaggaaaggacttgttctgattcagaagatattggaagctctgagtgctctgacacagactctgaagagcagggagaccatgcccgccccaagaaacacaccacggaccctgacattgataaaaaagaaagaaaaaagatggtcaaggaagcccagagagagaaaagaaaaaacaaaattcctaaacatgtgaaaaaaagaaaggagaagacagccaagacgaaaaaaggcaaatagaatgagaaccatattatgtacagtcattttcctcagttccttttctcgcctgaactcttaagctgcatctggaagatggcttattggttttaaccagattgtcatcgtggcactgtctgtgaagacggattcaaatgttttcatgtaactatgtaaaaagctctaagctctagagtctagatccagtcactgactctgtctggtgttgacagaggatttatttaagctattattttaataaagaactttgtacatttttatttttatatttttttctcttacaaatatgtttttggaagcatgataaatgtttaaatgtagtcaacatctgtaactcttacatgagtgtccagaggcactcatgggaaaattggttttgctttctttgtacacaccagagacccatctgaggtcatctgattataaggccatgtttatataaagggaatttcacccacagttcagctggctgttgattttcactgcaactctgcctttgtgtgtattggcgatcatttgtaatgctcttacacttcgtctttaatgttctttttggagttaggacctctcagttcataaagttttttacaattcaaaaaaaaaaaaaaaaaaaa

SEQ ID NO: 5505 - DNA, 6379 bp, Homo Sapiens
  NM_031483
agctgctaactcgctctagtagctgtggtcggggctcgggaccggctgccatcttagtctagggactgaggagtcgccgccgccccgagtcccggtaccatgcatttcacggtggccttgtggagacaacgccttaacccaaggaagtgactcaaactgtgagaacttcaggttttccaacctattggtggtatgtctgacagtggatcacaacttggttcaatgggtagcctcaccatgaaatcacagcttcagatcactgtcatctcagcaaaacttaaggaaaataagaagaattggtttggaccaagtccttacgtagaggtcacagtagatggacagtcaaagaagacagaaaaatgcaacaacacaaacagtcccaagtggaagcaaccccttacagttatcgttacccctgtgagtaaattacattttcgtgtgtggagtcaccagacactgaaatctgatgttttgttgggaactgctgcattagatatttatgaaacattaaagtcaaacaatatgaaacttgaagaagtagttgtgactttgcagcttggaggtgacaaagagccaacagagacaataggagacttgtcaatttgtcttgatgggctacagttagagtctgaagttgttaccaatggtgaaactacatgttcagaaagtgcttctcagaatgatgatggctccagatccaaggatgaaacaagagtgagcacaaatggatcagatgaccctgaagatgcaggagctggtgaaaataggagagtcagtgggaataattctccatcactctcaaatggtggttttaaaccttctagacctccaagaccttcacgaccaccaccacccaccccacgtagaccagcatctgtcaatggttcaccatctgccacttctgaaagtgatgggtctagtacaggctctctgccgccgacaaatacaaatacaaatacatctgaaggagcaacatctggattaataattcctcttactatatctggaggctcaggccctaggccattaaatcctgtaactcaagctcccttgccacctggttgggagcagagagtggaccagcacgggcgagtttactatgtagatcatgttgagaaaagaacaacatgggatagaccagaacctctacctcctggctgggaacggcgggttgacaacatgggacgtatttattatgttgaccatttcacaagaacaacaacgtggcagaggccaacactggaatccgtccggaactatgaacaatggcagctacagcgtagtcagcttcaaggagcaatgcagcagtttaaccagagattcatttatgggaatcaagatttatttgctacatcacaaagtaaagaatttgatcctcttggtccattgccacctggatgggagaagagaacagacagcaatggcagagtatatttcgtcaaccacaacacacgaattacacaatgggaagaccccagaagtcaaggtcaattaaatgaaaagcccttacctgaaggttgggaaatgagattcacagtggatggaattccatattttgtggaccacaatagaagaactaccacctatatagatccccgcacaggaaaatctgccctagacaatggacctcagatagcctatgttcgggacttcaaagcaaaggttcagtatttccggttctggtgtcagcaactggccatgccacagcacataaagattacagtgacaagaaaaacattgtttgaggattcctttcaacagataatgagcttcagtccccaagatctgcgaagacgtttgtgggtgatttttccaggagaagaaggtttagattatggaggtgtagcaagagaatggttctttcttttgtcacatgaagtgttgaacccaatgtattgcctgtttgaatatgcagggaaggataactactgcttgcagataaaccccgcttcttacatcaatccagatcacctgaaatattttcgttttattggcagatttattgccatggctctgttccatgggaaattcatagacacgggtttttctttaccattctataagcgtatcttgaacaaaccagttggactcaaggatttagaatctattgatccagaattttacaattctctcatctgggttaaggaaaacaatattgaggaatgtgatttggaaatgtacttctccgttgacaaagaaattctaggtgaaattaagagtcatgatctgaaacctaatggtggcaatattcttgtaacagaagaaaataaagaggaatacatcagaatggtagctgagtggaggttgtctcgaggtgttgaagaacagacacaagctttctttgaaggctttaatgaaattcttccccagcaatatttgcaatactttgatgcaaaggaattagaggtccttttatgtggaatgcaagagattgatttgaatgactggcaaagacatgccatctaccgtcattatgcaaggaccagcaaacaaatcatgtggttttggcagtttgttaaagaaattgataatgagaagagaatgagacttctgcagtttgttactggaacctgccgattgccagtaggaggatttgctgatctcatggggagcaatggaccacagaaattctgcattgaaaaagttgggaaagaaaattggctacccagaagtcatacctgttttaatcgcctggacctgccaccatacaagagctatgagcaactgaaggaaaagctgttgtttgccatagaagaaacagaaggatttggacaagagtaacttctgagaacttgcaccatgaatgggcaagaacttatttgcaatgtttgtccttctctgcctgttgcacatcttgtaaaattggacaatggctctttagagagttatctgagtgtaagtaaattaatgttctcatttagatttatctcccagtgatttctactcagcgtttccagaaatcaggtctgcaaatgactagtcagaaccttgcttaacatgagattttaacacaacaatgaaatttgccttgtcttattccactagtttattcctttaacaacaatattttatgtgtgtcaaaagtctcacttgggagtagtgtttttttcttttagacattctgcagacatgcagggaagtcctttggtaactgcaatatacaagattttcctattaagcctcttggtaagaggcatttgttaaaagtgcaagcttactcctgcttctggggatgtgagcaaaattcgggcttgtgttctccctctcattttagtctgacttgactattgtttttcctttctggcgcatgaatccatacatcattcctggaagtgaggcaagactcttgcatctctacaaagtagttttgtcaatttgaattcagggaaaagttggtcacagcctgcaaatgacttcatttggaagtctgattgtttcagttgcctgacaaatactacactttacaaacaatgttaacactgtgattccttcattgttttaagaagttaacctagggccgggcatggtggctcatacctgtaatcctagcactctgggaggccgaggcaggaggatccctttagcccaggagttaaagaccagcctgggcaacatagggagaccctgtcttttttttgggcagcgtggtgggggataaataaataaaaggaaaaaaaacttagcctagaattagaattaatttaattgaattcatctaaagatgtctctggtgatttttatatgttccgctatataattgatgctttatagttttatcataatccaacaacttcagttatatttaattattgttaaggagtttaagactagaaagactagagtgctttctagtccaaatagaggtcagtgaaacagcttttgacatcagattttcatttgagagggagagctgtggtactggctaaaaagaaaggaagataacatccagtaaccacaggaatatattctctgtgaattaaaagtcttcaaagttatcatttctctgacatatgttggagtagtcatttccattctttacattgtcatgaactggattgataaccctcatctgcaatattttcacccctaaaatttttaacagggtttcctttttttctcacgactatttaagtttagattgctccattattaactgattaatgcactttgaagttctctggaattaattattttaacttggcctagcttcgactgtcaaggtggctgttataaatttgacttcattggcagtggatgaagcctaagccagctgagtctctatcatagctgaaccctgaggacagcctcatagctcatgtatcagggacttttgccacatttcagaggcatagcatgaacaagtaatattaagccaagaataagcagcagaaccctgttccatatggaaaaaagaaaaacaattttttgtccctaatgttcttccttttacatcctggaacaacaataaaaacatttttttaaacttgtctactgtaagatactgccatcataaagcagagacttacatgagtgaaagggttgcctcatcaagcagctcagtgtaaatggggaggctaggctctccccagccctatggtttttttatttcatgtaccccaggaaatactgtgtggtttctaaaagccctggttgttaaaagtagggactctgcctttttgttggtagggagaaaaaacgctattgctttgtcttacagagcgaatgtctgccaactacccgttcattatataagtctgaacttggtaatatatggctaatgaagattaagccctctataaagacttcctgttgaggtgaattctcatactgaaatgtagttacctacaatatttactagagatttatgaaattaaattaagagataatgtaagaaaatacatttttttggttctatataatgcttcatgattcatttagggacctagaaatattgtgtgaaaatatataaatatcacccaaaaggctttctgccctatatttttaaaatacagaatagttatatttgaagtagccctggccctagttctatagggcttggctatttaatatttttatggaagaagtgtttagttctggaaaaggtaaatgcttgtatatatttttgcagcctgggatctccctactccattttttcctttaatttaagtggccacatgtatatgtcttccctgctgtgttaggaaaatgggggctggatatcccaagaatcagaggttatataaaaatactgcaaatagaccgcagacataaatatctaccaaatgctatcttaaattttggtccaaactgaacatatggaaatagatttattgtaagtatttacttagagctttttcttaaatctgaactaacttgcttttagaagtctttttctttgtaagcattgtaaatgctaataaatcctgttaatttttttttttttttttttttttttttactgcatgttacattgaaataaaaacaaagtaaaatgagcaattgccttattgttctgctcttttgcagggggtgggggttggggaagacagcattccacagcctggtcaggagggaaggacctcacttgtttcatcaaatggagtggtttaaaactgatcaagcagctcataataatgaattcctgctctgtcttttattatcttatgtcagagtgcagcaaaatctcatttcataagacttacaataactctatttaaaattcaggtattgtactcgggaggctgaggtgggaggatcccaggagttcaaatcctgcctgggcaacatagcaagaccctgtctcttaaaaaaacaaaaagacatattcaggtactgatttttcatcaagagattgacataccaatgatcagaaattttagtgaaacttgactcaactatacacaaagttctcatcctaaatgaactatttcagtcaagcccactctaccactttttacttatctggttaataatccgaaatgttaccggggttgactcacggaattaaatttttcctctatttttatatcctttcctgttgtggatgtaacttacctttctaaactcctttagagttaacgacttctatttagtattgttggtatctccagcccccctcctttttttgtttttcttttagttatttactttgtttgtataatttgctttcattaactaaaaatggaattggcagcactggattgtatattactgtattaagagtacctttgttttcttgatctgttacttttaatactcaggtaatgctacaaatattacagggagtcaaatgcttttataaagttccttcagtggttgcctcacttgcgttttcctacaagatgtaagactgtttataattaaacttttttggtccttc

SEQ ID NO: 5506 - DNA, 2456 bp, Homo Sapiens
  NM_031485
actaccgcgaggaacagcgcccaaagtcacgcgaagatgcagtttctccgtatccgcaggcttctttcgctggcgccattacctgagttctcctccagcgtttccgcaccctctccgattagcggtcccaggagtttccaaggtaaccgcgcagtagggcggatctcattaggcggaaagcgaaacccggaagtgacgctcttaccgggtgtcagcagcgagagggttcgaagatggcggcgcgcaagggtcggcggcgcacgtgtgaaaccggggaacccatggaagccgagtccggcgacacaagttccgagggcccggcccaggtctacctgcccggccgggggccgccgctacgcgaaggggaggagctggtcatggacgaggaggcctatgtgctctaccaccgagcgcagactggcgccccctgtctcagctttgacatagtccgggatcacctgggagacaaccggacagagcttcctcttacactttacttgtgtgctgggacccaggctgagagcgcccagagcaacagactgatgatgcttcggatgcacaatctgcatgggacaaagcccccaccctcagagggcagtgatgaagaagaagaggaggaagatgaagaggatgaagaagagcggaaacctcagctggagctggccatggtgccccactatggtggcatcaaccgagttcgggtgtcatggctgggtgaagagcctgtggctggggtgtggtcagagaagggccaggtggaggtgtttgcgctgcggcggcttctgcaggtggtggaggagccccaggccctggcagccttcctccgggatgagcaggcccaaatgaagcccatcttctccttcgctggacacatgggcgagggctttgcccttgactggtccccccgggtgaccggtcgcctgctgaccggtgactgtcaaaagaacatccacctctggacacctacggacggcggctcctggcacgtggaccagcggccattcgtgggccacacacgctctgtggaggacctgcagtggtcaccgactgagaacacggtgtttgcctcctgctcagctgacgcctccatccgcatctgggacatccgggcagcccccagcaaggcctgcatgctcaccacagccaccgcccatgatggggacgtcaatgtcatcagctggagccgccgggagcccttcctgctcagtggcggggatgatggggccctcaagatctgggaccttcggcagttcaagtctggttccccagtggccaccttcaagcagcacgtggcccccgtgacctccgtcgagtggcacccccaggacagcggggtctttgcagcctcgggtgcagaccaccagatcacacagtgggacctggcagtggagcgggaccctgaggcgggcgacgtggaggccgaccccggactggccgacctcccgcagcagctgctgttcgtgcaccagggcgagaccgagctgaaggagctgcactggcacccgcagtgcccagggctcctggtcagcacggcgctgtcaggcttcaccatcttccgcaccatcagcgtctgaggcgtcccactggctctgatcttgcttcctgcttggaaactgaagtcgaattgggctcccctggaaggggttcattcaggtctgttgactgagactggccggcctgtgggctgccgtgatggattctgtttgacgtattgttctctagaaggcctggctctgatccagtgacccctctcaccaaagaactcggtttaaccagggctctgtaagaccactcccacccagagacttgtgtggcctggtgtggcctgtgtgtcggattccttcctgtcagctgtgacccatttgacctgtgtccccagaacccagttttttgtttgtttgtttgagacggagtcttggtctgtcgcccaggctggagtgcagtagcacgatcttggctcactgcaacctccgcctcctgggttaaagtgattctctcagctcagtctcccaggtagctgggattacaggcatgtgccaccacaccccgttaatttttgtatttttagtagagacggggtttcaccatgttggccaggctggtctcaaattcttgatctcaagtgatctgtccgccccggcctcccagagtgctgggttgggattacaggcgtgagccaccgcgtccggctcaggacccagttttggctgctggttcccagcaggggactcgggggatatacagtggctgcaccaaattggaggtgtgggttcctccaacacaatttgcttctgcccgttgtcttcctgccagctgggtttggccaggatttctccgtgtgggggctacatgcgaccctctcccctcctccctgactttagaggctggtgctgtgtcgggaggaaggtcagggctcctgagcagcaataaaggaccaggaagaggcctgaggtgta

SEQ ID NO: 5507 - DNA, 3205 bp, Homo Sapiens
  NM_031488
ggcaggccaatatggcttcctgcacctggtgacgcttggcgaaactgaggtctcatggagaagccccggagtattgaggagaccccatcttcagaaccaatggaggaagaggaagatgacgacttggagctgtttggtggctatgatagtttccggagttataacagcagtgtgggcagtgagagcagctcctatctggaggagtcaagtgaagcagaaaatgaggatcgggaagcaggggaactgccgacctccccgctgcatttgctcagccctgggactcctcgctccttggatggcagtggttctgagccagctgtctgtgagatgtgtggtatcgtgggtacaagggaagccttcttctccaagaccaagaggttctgcagcgtctcctgctccaggagctactcctccaactccaagaaagccagtatcttggctaggttacagggaaaaccaccgaccaaaaaagccaaagtcctgcacaaggctgcctggtctgccaaaattggagccttcctccactctcaagggacaggacagctggcagatgggacaccaacaggacaagacgctctggtcttgggcttcgactgggggaagttcctgaaggatcacagttacaaggctgctcccgtcagctgtttcaagcacgtcccactctatgaccagtgggaggatgtgatgaaagggatgaaggtggaggtgctcaacagtgatgctgtgctccccagccgggtgtactggatcgcctctgtcatccagacagcagggtatcgggtgctgcttcggtatgaaggctttgaaaatgacgccagccatgacttctggtgcaacctgggaacagtggatgtccaccccattggctggtgtgccatcaacagcaagatcctagtgcccccacggaccatccatgccaagttcaccgactggaagggctacctcatgaaacggctggtgggctccaggacgcttcccgtggatttccacatcaagatggtggagagcatgaagtacccctttaggcagggcatgcggctggaagtggtggacaagtcccaggtgtcacgcactcgcatggctgtggtggacacagtaatcgggggtcgcctacggctcctctacgaggatggtgacagtgacgacgacttctggtgccacatgtggagccccctgatccacccagtgggttggtcacgacgtgtgggccacggcatcaagatgtcagagaggcgaagtgacatggcccatcaccccaccttccggaagatctactgtgatgccgttccttacctcttcaagaaggtacgagcagtctacacagaaggcggttggtttgaggaagggatgaagctggaggccattgaccccctgaatctgggcaacatctgcgtggcaactgtctgtaaggttctcctggatggatacctgatgatctgtgtggacggggggccctccacagatggcttggactggttctgctaccatgcctcttcccacgccatcttcccggccaccttctgtcagaagaatgacattgagctcacaccgccaaaaggttatgaggcacagactttcaactgggagaactacttggagaagaccaagtcgaaagccgctccatcgagactctttaacatggattgcccaaaccatggcttcaaggtgggcatgaagctggaggccgtggacctgatggagccccggctcatctgtgtggccacggtgaaacgagtggtgcatcggctcctcagcatccactttgacggctgggacagcgagtacgaccagtgggtggactgcgagtccccagacatctaccccgtcggctggtgtgagctcaccggctaccagctccagcctcctgtggccgcagaaccggccacaccgctgaaggccaaagaggccacaaagaagaaaaagaaacagtttgggaagaaaaggaaaagaatcccgcccactaagacgcgacccctcagacaggggtccaagaagcccctgctggaggacgaccctcagggtgccaggaagatctcgtcggagcctgttcctggcgagatcattgctgtgcgtgtgaaggaagagcatctagacgtggcctcgcccgacaaggcttcaagtccagagctgcctgtctccgtcgagaacatcaagcaggaaacagacgactgagccttcctgcctccagcctggcttctagctggaagccagcccagcgtttctctaccaccaccaccatgcctccacctgactttggcttggagactgatcctctctgtgtaaattctgcccggtgctgtgaaggctggacggtggaggacctgctggggtctcctgggacccgcctgttgcttctgccctcccctgtggaaaggtctatatgacgggccgcctgaggccccagaactcgtctgtgaaccaccttttccagccagagttcccaaagctggaacgctagctgcctgctcttccttaagatggcctccccccgacccgccacggccctcagttgccagggatggggccaccactgtcacactgtggaatacaagacagtgaactctgtctgcctgaacgagccatgtaaattaagttctagagcagctctctgagcaggataaggtcccctgacagtgagttgtgtggtgggggcagcctctgcctcaaaaattcaccaagcagaatgcctctcagcctcatgtgttggtcctctgctcctcctagctccccagggatgttggggacccagcttgtctcggcagctaagaagcagtgaccaggatgtggattttggcgacctgtgtggtggccttgagctgctttctgtgtttgtgaggactgactcccatttcctaaaggaaatgcccccggggaggacattgggaggaagatggcctgagtgtgcactttggctctgctacctgctcctgaagccccgctaaaaataattcatccaagattcctttgtagttaaagggtccagttctgactggagcctctagagagctgggcttgtatgttcttttggccttttgttcctacctaaatgaagaaaccatgcctggaggggccgtgaacacagaaccctcaagacaaggatgacagagctggaggacacatctagctgccattgcaacctcactgggctccccagactctgtgtgtgagaaattaaaccccctgcttgcttgaaaaaaaaaaaaaa

SEQ ID NO: 5508 - DNA, 4342 bp, Homo Sapiens
  NM_031490
gggtctgaggtttggtgactgcggggcaggccgggggcagctgtctgtctggctctttttgacagcccccagtgcgaaaggctgccagcatgtcatcagtgagccccatccagatccccagtcgcctcccgctgctgctcacccacgagggcgtcctgctgcccggctccaccatgcgcaccagcgtggactcggcccgcaacctgcagctggtgcggagccgccttctgaagggcacgtcgctgcaaagcaccatcctgggcgtcatccccaacacgcctgaccccgccagcgacgcgcaggacctgccgccgctgcacaggattggcacagctgcactggccgttcaggttgtgggcagtaactggcccaagccccactacactctgttgattacaggcctatgccgtttccagattgtacaggtcttaaaagagaagccatatcccattgctgaagtggagcagttggaccgacttgaggagtttcccaacacctgtaaaatgagggaggagctaggagaactatcagagcagttttacaaatatgcagtacaattggttgaaatgttggatatgtctgtccctgcagttgctaaattgagacgtcttttagatagtcttccaagggaagctttaccagacatcttgacatcaattatccgaacaagcaacaaagagaaactccagattttagatgctgtgagcctagaggagcggttcaagatgactataccactgcttgtcagacaaattgaaggcctgaaattgcttcaaaaaaccagaaaacccaagcaagatgatgataagagggttatagcaatacgccctattaggagaattacacatatctcaggtactttagaagatgaagatgaagatgaagataatgatgacattgtcatgctagagaaaaaaatacgaacatctagtatgccagagcaggcccataaagtctgtgtcaaagagataaagagactcaaaaaaatgcctcagtcaatgccagaatatgctctgactagaaattatttggaacttatggtagaacttccttggaacaaaagtacaactgaccgcctggacattagggcagcccggattcttctggataatgaccattacgccatggaaaaattgaagaaaagagtactggaatacttggctgtcagacagctcaaaaataacctgaagggcccaatcctatgctttgttggccctcctggagttggtaaaacaagtgtgggaagatcagtggccaagactctaggtcgagagttccacaggattgcacttggaggagtatgtgatcagtctgacattcgaggacacaggcgcacctatgttggcagcatgcctggtcgcatcatcaacggcttgaagactgtgggagtgaacaacccagtgttcctattagatgaggttgacaaactgggaaaaagtctacagggtgatccagcagcagctctgcttgaggtgttggatcctgaacaaaaccataacttcacagatcattatctaaatgtggcctttgacctttctcaagttctttttatagctactgccaacaccactgctaccattccagctgccttgttggacagaatggagatcattcaggttccaggttatacacaggaggagaagatagagattgcccataggcacttgatccccaagcagctggaacaacatgggctgactccacagcagattcagataccccaggtcaccactcttgacatcatcaccaggtataccagagaggcaggggttcgttctctggatagaaaacttggggccatttgccgagctgtggccgtgaaggtggcagaaggacagcataaggaagccaagttggaccgttctgatgtgactgagagagaaggttgcagagaacacatcttagaagatgaaaaacctgaatctatcagtgacactactgacttggctctaccacctgaaatgccgattttgattgatttccatgctctgaaagacatccttgggcccccgatgtatgaaatggaggtatctcagcgtttgagtcagccaggagtagcaataggtttggcttggactcccttaggtggagaaatcatgttcgtggaggcgagtcgaatggatggcgagggccagttaactctgaccggccagctcggggacgtgatgaaggagtccgcccacctcgctatcagctggctccgcagcaacgcaaagaagtaccagctgaccaatgcttttggaagttttgatcttcttgacaacacagacatccatctgcacttcccagctggagctgtcacaaaagatggaccatctgctggagttaccatagtaacctgtctcgcctcactttttagtgggcggctggtacgttcagatgtagccatgactggagaaattacactgagaggtcttgttcttccagtgggtggaattaaagacaaagtgctggcggcacacagagcgggactgaagcaagtcattattcctcggagaaatgaaaaagaccttgagggaatcccaggcaacgtacgacaggatttaagttttgtcacagcaagctgcctggatgaggttcttaatgcagcttttgatggtggctttactgtcaagaccagacctggtctgttaaatagcaaactgtaggtccaaatctcaattttttagaattttaagttatgaagtgctcaaaggtactgacacagttgattttattcacaccattaggggtatgcaagatgtccctgttttataaacataatcacaacagtaataaacctcaagtagtggctagtgtttagtatagaaatataagatgttgatttagtaaactgataaaaatcgaattcttgtctttttagtgggatccttactgtccctggaaagatatagcatagtggttctcagcacagtctccagaacagaagcatctgtagtacctggtaacttgttagaaatgtacattctcaggctccacagcaggccgcctgaatcaaatcctgggaggtggggacagaaatctgtgttttaagaagccttccaggtaattctgctgcacactcaagttcaggaaccaccggtatagaccattaccttagtggatttacctgtagagtttattggatcctgaaaccaatcaattacttagaactaggcaaagatgaaagtatagccaactattcttggctatatatatatattcaagtgggccgggcgtgatggctcacacctgtaattccagcactttgggaggtcgaggtaggcagatcaccgagcccaagagttcaagacaatcctggccaacggcgaaactctgtctctacaaaaaatatacaggcgtgttagcatgtgcctgtaatcccagcttcttgggaagctgaggcacaagaattgcctgaacccaggaggtggaggttgcagtgagctgggatcgcgccattgcactccagcctggctgacagagcgagactgtctctaaaaaaaaaagactcaagtggaccctacaatgaagcctacacatcccaatagaagccccttcttatgctgagggaagcagccctcagaacatgatagcttgtatccagcagagtggcacgtgctggcacacctcacagaagcaccctggccctggatgcctgcaacctcagaagagtgcagctcccagagggaggcagccatccatctgggatggtcctaagcatggaatcctaactcctgattccgtctcctatttcttgcttggctacgccagttcccaaatctggtagatgtccatgcccatgtgctcctgctgggactcaattcaggctatgtatgactatgaagtcaggctcatctgcttactggctgtgtgaactttttgtatcttggttttcttcatccatgaaatccaagtaatactacctaattgttactgtggagattaagttcaaatgcaatgtatagtaatattaagcaatttctagttattattctagccagtaatggacttcagaatcttttattacacaatataagaatatgtatgtaaagacattttggaatttcctggatgagaaggaagtctgggctgggcatggtggctcacccctgtaaccctagcactttaggaaatcgaggcgagtggatcacttaagctcaggagttcaaggccagcctgggcaacatggcaaaaccccatttctacaaaaaatacaaaaattagctgggcatggtggcacccgcctgtagtccagctacttgaggctgagatgggaggatgagggaggtcggggctgcagtgagccaagatcacgccactgcactccagcaccctgggcgacagagtgagaccctgtctc

SEQ ID NO: 5509 - DNA, 968 bp, Homo Sapiens
  NM_031491
ggagctggctggaatctctcagcctcacctgccagacaacaccccctccttcctcaccctgtctcctgcattctcctgaaaccttcatccacacaatgcctcccaacctcactggctactaccgctttgtctcgcagaagaacatggaggactacctgcaagccctaaacatcagcttggctgtgcggaagatcgcgctgctgctgaagccggacaaggagatcgaacaccagggcaaccacatgacggtgaggacgctcagcaccttccgaaactacactgtgcagtttgatgtgggagtggagtttgaggaggacctcaggagcgtggacggacgaaaatgccagaccatagtaacctgggaggaggagcacctggtgtgtgtgcagaaaggggaggtccccaaccggggctggagacactggctggagggagagatgctgtatctggaactgactgcaagggatgcagtgtgcgagcaggtcttcaggaaggtcagatagccggagaggagccaagatccctccagacagcaccagctcacagacgctcttgttgtgcccccttcaagcccagattgtgccaggtcagctgtcccttcctctggccacctttcctccctctgggtccctcctcacccctccccgtgttaatctgtaacttgcagcccccaggccaaagtcctttctcacactccactgcccaatagtgacctcacttccaggtcaaggtctggcgtcccaaatgaaagaagcaggcaaagggaaggagcccctgagaacaaccaatctccgctctctcctgtccatttgacctcttcttttccttctaagaaagaactaagctttgggcatttggcgattagtgaaaattctatcctgatggacttctggaaaactgtgactggggttcaagagtttaaacaggggctactggcagaaaaaaaaaaaaaaaaaaaaaaaaaaaaa

SEQ ID NO: 5510 - DNA, 1814 bp, Homo Sapiens
  NM_031492
ctctctgacgtgggagccgccgtcgctgccgccacccggaggctcttgtcaggatggtgaagctgttcatcggaaaccttccccgggaggctacagagcaggagattcgctcactcttcgagcagtatgggaaggtgctggaatgtgacatcattaagaattacggctttgtgcacatagaagacaagacggcagctgaggatgccatacgcaacctgcaccattacaagcttcatggggtgaacatcaacgtggaagccagcaagaataagagcaaagcttcaaccaagttacacgtgggtaacatcagccccacttgtaccaaccaagagcttcgagccaagtttgaggagtatggtccggtcatcgaatgtgacatcgtgaaagattatgccttcgtacacatggagcgggcagaggatgcagtggaggccatcaggggccttgacaacacagagtttcaaggcaaaagaatgcatgtgcagttgtccacaagccggcttcggactgcccctggtatgggagaccagagtggctgctatcggtgtgggaaagaagggcactggtccaaagagtgcccagtagatcgtacgggtcgtgtggcagactttactgagcagtataatgaacaatatggagcagttcgaacaccttacaccatgggctacggggaatccatgtattacaacgatgcatatggagcactcgactactataagcgataccgggtccgctcttatgaggcagtagcagcggcggcagcggcttctgcatacaactacgcagagcagaccatgtcccatctgcctcaagtccaaagcacaactgtgaccagccacctcaactctacttctgttgatccctatgacagacacctattgccaaactctggcgctgctgccacttcagctgctatggctgctgctgcagccaccacttcctcctactatggaagggacaggagcccactgcgtcgtgctgcagccatgctccccacagttggagagggctacggttatgggccagagagtgaattatctcaggcttccgcagctacacggaattctctgtatgacatggcccggtatgaacgggagcagtatgtggaccgagcccggtactcagccttttaaaaactggaggtaggataattgcggactgaaccctcgggctgcggtcatatatgagaacttgctccgcgcggtcccctttgccgggatgtttccattgcttcatgtttcagtaaacaaaaggagtttgtgaccaactatgttttctttcttaattcttctaagttgacttttctttcctcctgaaactagtctctgtagcctttcactctgttccttatattctcagcctctgagcagccctaggtaaggattatgctggcatcccctttttcctgtgcagtggaacccctcttatcttgctttccctaggagttgaatccttctccctgcctacctgcagcatctcctttccctttaaaatgaccatgtagtggcaagcagccttttactcttctgttagctctggactcttaacacttaagttactcttctgaaattgctaggaccattgggggttttgttgttttgtttgttttttatgtccgacctgtgatcgtggtacagcattagctgaaatttacccttgttttactccactcctcccttttttaaaaaaattttttgacaaataaatgtttctaacacttaaaaaaaaaaaaaaaaaaaaaaaaaaaaaaaaaaaaaaaaaaaaaaaaaaaaaaaaaaaaaaaaaaaaaaaaaaaaaaaaaaaaaaaaaaaaaa

SEQ ID NO: 5511 - DNA, 1057 bp, Homo Sapiens
  NM_031498
tgaagagtgagctaggagaacttcgtaaggtgaaactgtggggatccaatgggcaacacaaagcatcttggttaaggaggttaggggccggtctaggacttgcctcaggaggaaggacagcctcagagcatgctcagaggtgggaagggaaggaggagaaagcaggcgaagcggggccatctgctttatctgaagattttcagctgatgaagaactaggaggctcaaacactatcttacctgagtccaggacaagtgacttggagagtgtgctcttctgtggcaggatcaggtctgtctagggcaggatggcccaggatctcagcgagaaggacctgttgaagatggaggtggagcagctgaagaaagaagtgaaaaacacaagaattccgatttccaaagcgggaaaggaaatcaaggagtacgtggaggcccaagcaggaaacgatccttttctcaaaggcatccctgaggacaagaatcccttcaaggagaaaggtggctgtctgataagctgatggcatggagccctgccctgagtgtctgtccctcttcagccaagcccaagtctcctagacccccagggagccagtgaactgtcaccttctcttcatcacagaatgagtaaagatccctgaacaaatgcattgtgaacccattccccactcccaccttcaactcttttctcccattatttcctccacctgctgggtctctgctgaccttgctgggaacactctgaggacagtgtggctggccgagcggttggccccatgggtggtggggtgtgagaagcctgcaataccccaagaccccagagggcagtccttaggaagcacttacaccacctgggaacccctccgtcttttccctctactctcatcctaggaataaagcatttccacgccagagtagtttgggctgggggccagggttgggtggtcctgtccctccatatcatgtcctaccctatggtcctgttcctagtcatttagatcaccccagatggcctgatgacaacaagagtttgtgaagttatgaaaaaaaaaaaaaaaaaa

SEQ ID NO: 5512 - DNA, 6846 bp, Homo Sapiens
  NM_031844
ctcgcgccaggcgagtctccgcgtctccctcgcgaactcggtgaaaggaattggcgccgttcgacaccaggcggatccgctctgcagcacgaacccatctccagccgcagccgcagccgccgcccgggccgaggagcagccgcagcagccgccaccagtggccgagtgagcggagccgagtttgaggcagcgcctagcggtgaatcggggccctcaccatgagttcctcgcctgttaatgtaaaaaagctgaaggtgtcggagctgaaagaggagctcaagaagcgacgcctttctgacaagggtctcaaggccgagctcatggagcgactccaggctgcgctggacgacgaggaggccgggggccgccccgccatggagcccgggaacggcagcctagacctgggcggggattccgctgggcgctcgggagcaggcctcgagcaggaggccgcggccggcggcgatgaagaggaggaggaagaggaagaggaggaggaaggaatctccgctctggacggcgaccagatggagctaggagaggagaacggggccgcgggggcggccgactcgggcccgatggaggaggaggaggccgcctcggaagacgagaacggcgacgatcagggtttccaggaaggggaagatgagctcggggacgaagaggaaggcgcgggcgacgagaacgggcacggggagcagcagcctcaaccgccggcgacgcagcagcaacagccccaacagcagcgcggggccgccaaggaggccgcggggaagagcagcggccccacctcgctgttcgcggtgacggtggcgccgcccggggcgaggcagggccagcagcaggcgggaggtaagaagaaggcggaaggcggcggaggcggcggtcgccccggggctccggcggcgggggacggcaaaacagaacagaaaggcggagataaaaagaggggtgttaaaagaccacgagaagatcatggccgtggatattttgagtacattgaagagaacaagtatagcagagccaaatctcctcagccacctgttgaagaagaagatgaacacttcgatgacacagtggtttgtcttgatacttataattgtgatctacattttaaaatatcaagagatcgtctcagtgcttcttcccttacaatggagagttttgcttttctttgggctggaggaagagcatcctatggtgtgtcaaaaggcaaagtgtgttttgagatgaaggttacagagaagatcccagtaaggcatttatatacaaaagatattgacatacatgaagttcgtattggctggtcactaactacaagtggaatgttacttggtgaagaagaattttcttatgggtattctctaaaaggaataaaaacatgcaactgtgagactgaagattatggagaaaagtttgatgaaaatgatgtgattacatgttttgctaactttgaaagtgatgaagtagaactctcgtatgctaagaatggacaagatcttggcgttgccttcaaaatcagtaaggaagttcttgctggacggccactgttcccgcatgttctctgccacaactgtgcagttgaatttaattttggtcagaaggaaaagccatattttccaatacctgaagagtatactttcatccagaacgtccccttagaggatcgagttagaggaccaaaggggcctgaagagaagaaagattgtgaagttgtgatgatgattggcttgccaggagctggaaaaactacctgggttactaaacatgcagcagaaaatccagggaaatataacattcttggcacaaatactattatggataagatgatggtggcaggttttaagaagcaaatggcagatactggaaaactgaacacactgttgcagagagccccccagtgtcttgggaaatttattgagattgctgcccgaaagaagcgaaattttattctggatcagacaaatgtgtctgctgctgcccagaggagaaaaatgtgcctgtttgcaggcttccagcgaaaagctgttgtagtttgcccaaaagatgaagactataagcaaagaacacagaagaaagcagaagtagaggggaaagacctaccagaacatgcggtcctcaaaatgaaaggaaactttaccctcccagaggtagctgagtgctttgatgaaataacctatgttgaacttcagaaggaagaagcccaaaaactcttggagcaatataaggaagaaagcaaaaaggctcttccaccagaaaagaaacagaacactggctcaaagaaaagcaataaaaataagagtggcaagaaccagtttaacagaggtggtggccatagaggacgtggaggattcaatatgcgtggtggaaatttcagaggaggagcccctgggaatcgtggcggatataataggaggggcaacatgccacagagaggtggtggcggtggaggaagtggtggaatcggctatccataccctcgtgcccctgtttttcctggccgtggtagttactcaaacagagggaactacaacagaggtggaatgcccaacagagggaactacaaccagaacttcagaggacgaggaaacaatcgtggctacaaaaatcaatctcagggctacaaccagtggcagcagggtcaattctggggtcagaagccatggagtcagcattatcaccaaggatattattgaatacccaaataaaacgaactgatacatatttctccaaaaccttcacaagaagtcgactgttttctttagtaggctaactttttaaacattccacaagaggaagtgcctgcgggttccttttttagaagctttgtgggttgattttttttcttttcttttttgtacatttttaattgcagtttaaaagtgaatcgtaagagaacctcagcattgtgcacgataagagaatgtgtcagtatttcagggttctacattttatctgtaaaatgtgacttttttttttttttatcacaacagaagtaaaatgttgctttgtacctggtgtcttttattaagaatttactccccccatttctcacagagaataacagtcgggagtcattgtcacaatataatagaaatgttagcaaccagattcatgtaaggactaagtggtcctcatgaattgcattaagactctgtactgctcatattacactccatcctctctgtagtttgctgggtagtggagggggtaagctaaatcatagtttctgacaataactgggaaggttttttcttaaaataacaatggaattggtataattgggattgaaaactaaaacttggaactaagatagagaagatggagtgtatgtagaagggctgttaaaaatgtaaaacttggttgcattatttgtggaggctcaaacttgtgaaggttaataccataatttttccatttgttctgcattttgattctgaaaagaaagctggctttgcccatttcttattaaaaaaacttgttgtaaatccagttgtctaatgggatctatatgaagttagccatgtctgtatgcccttctcccacaaaatactgtataactagtgtgcttgtagtagttaactccaccatctttgtaagctaatgaaattgtgagtcacccatttatatcttaatttttaatcatgtcagttcttgaatgggtatctccttagcctgctgatttctttttctttctaaagaaagtgggtggagaaattaatttagacgtttgtttgcaataaaaagaattcattttactcttgttttgggattctcgccatcaaggttcaaaatccctttatataactcccaagaggagaaatttattaagtgtgtgctttctggacagcttattctttactctgcatagaacatttaggttttaaaaacttaaatgtatactgacaattgatacataattatgaagtaaagttgaattcttcccttcccctcccccccagacaacttttaacatatttaatgaggggaaaaggtactggctgggagaagttaacactgagtttatcatctttacagaatgctaatgctgtcctcaactgattattttatatacatatatatgatacatgaaactctgggatcagatgcttttagaagccatcatgcaagccagtcattgatgtcactgctacacaacactgctaacttgactgtagctatgtaataacattagatcccctaattgtaattatattgggtttgcacagaacactttaatcttcccctcaccaatgtgaagtgaggaatcaggagtcaaactgtagaactaaaatttgacttcagtctagcgtttccttggtgtttttaggttgctttggtaagtttaggtttgctatatttctgattgcttagaattttgttttagccctttaaaatcagatcataaatatgaattcatacttctaaggaattttcttgctataagctggagtttaggtgatgtataggttcagttgagacatttttggaacaggcaaatccttagttaacataagatatttaacagttgaagatagtgtcatggatttttatcttttttagcaagtaatgctaagaaccactggcctgagctactactcttcagtatacattattaggattgcatagacttactagaggaacagtttcaggttttgatgctaatcagtgttgtgtcctaaagttgtcctttgtgcctttaaaaagttttggatatatcttctagtttaaaattgcttattaaggaattcattttataattgcagtgggaaagtaatggtcaagtaacactaggtagactatcatgcctgtttagcccagagaatttggggggagagagaatagataaaaatggcacccagaaaaatgttaaaatctttagtcaagactagaattaatacaattgtctacacttgtatggcagaaataaccttataaagtgtttaaggaattcagagaagggaatgtaccaaataagcaacagggagaaaattaggtaagaagtaagatacgaacgagaaacctgatttattgctcatccttcccttgcctccctaatggcaagcaaaactctgaacatctgaaaaggatgtagttctggacaaatcctgactacccagaggaaactcactgtgagattgctgttgatttgaagggtgctttcactaaggttatattttaaagtagaataacacatgctgagtgtaaactggctttggattggtcagctgcagtagtacaaaaacagcatagaatttgagaaaactaaaactgctatgagatagctatgagaaaactaaaactgctatgagatagaaatgatgtaaaattatgtggaaagttttccctcatatactcacatacagcctttgaagggctctggctctgaccggttgatggccttgagcgagatgaaatcatgaaattgagtcaaatcaatttgacattgaaatgacaagaggaaactcttaaatacataaaaacaagctctcatttgcctaggatagatactgtcttaaaaataaagactgaacctagatgttctgagcactagcaacaaggtattttaacaagtttaaaggaattctctgaaaaagttataaaattattctaggaaacataaccataatagtgttttaagggactttcacctggggattttatattcatgaacagagtgtattctgtatttaaaatgtctcatttgtgggaattggatgacatgttttttgataaatttattcacaatataaattgactttttattctaggaccatgtgaataatgggttccattgcacaaatacaaatattttaatagcttcttaggcagtggtgtagacatcttggatataaataattgtagatcttgtatatttgatttttaaaaaactagaataaacagagaggcataaacatatcttagagtccaagtggtagtgtttagcattggatataataaatggatgttttacaaagtgtttccataattctcttcctatacataaatgtcttgttttcaaaagtggatggaacttggctgggtgtggtggctcacgcctgtaatcctagcactttgggaggccaaggcgggaggatcacttgagctcaggagtttgagaccatcctgggcaacatagtgagacctggtctcttgaaaaaaaaaaagtggatggaacttgtagcagagaattttatctacttctcaacctgcttcagaatacccatttgagatgttcccctggaaagatgaacacaatactgcatctgaagccatttcttcccacctaacattcttaaaatgattagagtctaaactttgtcattcattcctaattctggagctctgaggttgaggtgttcagagtttggtgaataattgggtttaagttttaacattttagtaataataaaagcaaacacatacatgttaaggcctgacaataggttgcaatacccatgcattgggactcatacccagcataaatggtgagggactgaacattagtgctttgagcaagaattggttaactacctgagatctctaaaacagtaatttgaattactaatacataaaccacaagtctcttcgaattgttaattgcctaaatttaccctaaaacttagttaacgctgcagtgcctttattaaagcttttttttgggggggggtgtgggcacagctactccataactttaaattttaaagcatgaaggtgatctagctagtgttagtgcttgagttggtagttacataggctgctcttgaatcgtcctgttttctttgcctagtattagcaccacaggtacatatttgtaaaataagcattaaaagtactttgtccagc

SEQ ID NO: 5513 - DNA, 2814 bp, Homo Sapiens
  NM_031885
cacagaaggcgccgaggctccaccgcgcagccgcaaaaagagcggacgggtctgcgccgccgcaggaggagcaggcggtacctggacgggttcgtcccgggctgtttcgcgtccggcctgaggcggctggggccgcgcaggtagtgtccctgcacttcttgcccgggcgcgtgaggccagctccgctgcgcttgtctccagcttccagccctcctcccctaagccgccgccatcatgctgctgcctgtgttcaccctgaaactgcgccacaaaatcagcccccgaatggtggccatagggcgctacgacgggactcacccgtgcctggcggccgccacccaaacgggcaaggtttttattcataatcctcatacacggaaccagcatgtcagtgcatccagggtcttccagagccccctggaatctgatgtttctcttctcaacattaaccaggcagtcagctgtctgactgcaggcgtattgaaccctgagcttggctatgatgcccttttagtggggacacagactaatcttttggcttatgatgtctacaataattcggatttgttctacagagaggtagcagatggggcaaatgcaattgtgctggggacattgggagacatttcttcccctcttgcgattattggtggcaattgtgctctgcaaggtttcaatcatgaaggaagtgatctcttttggacggttactggagacaatgttaattccttggccttgtgtgactttgatggtgatggaaagaaagagcttcttgttggatctgaggattttgatatccgagtttttaaggaagatgagattgtggcagaaatgacagaaacagagatagtcacctctctttgtcccatgtatggcagtcgatttggttatgccctttccaatggcacagttggagtttatgacaaaacatcccgatactggagaattaaatcgaaaaatcatgccatgagcattcatgcttttgaccttaattctgatggagtgaatgaactgataactggttggtccaatgggaaggttgatgctcgaagtgaccgaactggggaggtcatctttaaggacaatttttcttctgcaattgccggtgtggtagagggagattaccggatggatggccacatacagttaatctgctgctcagtggatggggaaatccggggctacctgcctggcacggctgagatgaggggcaacctcatggacaccagtgcagagcaggacctgatccgagagctgagtcagaagaagcagaatctgttgctggaactccgtaactatgaggaaaatgccaaggctgaattggccagtccactgaacgaggctgatgggcatcggggcataatcccagccaataccaggctccacaccacgctctcagtcagcctggggaatgagacccaaactgctcatacagaattacgcatttccacttctaatgacaccatcatccgagcagtattgatttttgcagaaggaatttttacaggtgaaagccacgtggtacatcccagcattcacaacctctccagttccatctgcatccctattgtgcctcccaaagatgtccctgtggatctgcacttgaaggcattcgtgggttacagaagcagcacccagtttcatgtatttgaatcgacaagacagctccctcgattctccatgtatgcgctgaccagcctggaccctgccagtgagccaatcagttatgttaactttaccattgcagaacgggcacagagggttgttgtatggctcggtcagaactttctgttaccagaagacactcacattcagaatgctccatttcaagtgtgtttcacatctttacggaatggcggccacctgcatataaaaataaaacttagtggagagatcactataaatactgatgatattgatttggctggtgatatcatccagtcaatggcatcattttttgctattgaagaccttcaagtagaagcggattttcctgtctattttgaggaattacgaaaggtgctagttaaggtggatgaatatcattcagtgcatcagaagctcagtgctgatatggctgatcattctaatttgatccgaagtttgctggtcggagctgaggatgctcgtctgatgagggacatgaaaacaatgaagagtcgttatatggaactctatgaccttaatagagacttgctaaatggatataaaattcgctgtaacaatcacacagagctgttgggaaacctcaaagcagtaaatcaagcaattcaaagagcaggtcgtctgcgggttggaaaaccaaagaaccaggtgatcactgcttgtcgggatgcaattcgaagcaataacatcaacacactgttcaaaatcatgcgagtggggacagcttcttcctaggtgaggaaaatacaggtcatgaagttcctggcaaagattttctgttaaaaacctatgctggtttgctttggatcacaccctggtgaaccccgggtgctaagaatgaaaataaccttggtgagttgtacaaattaaagacaaagaactacatgtgaagatagacttgctttctatttttaaatcagtagtagtactgttgctgaataatactaggtttttatggaataggatgaatgcttttgaagtattagggcttcagagtccaattttgcttatttatggtatataaatacatatttttttcttgaaattgcaattgagtttgtacttttcaaatagattatctactttttcattaaaatgtaaagatgttaaactttgtgttgattgattataaaatcaccaccaaatcag

SEQ ID NO: 5514 - DNA, 1673 bp, Homo Sapiens
  NM_031897
ccaagtcctctgttctcaaactctgagcccaagggaaccccggccacatctcctccaaacacacacaggacctcaggtcccttcctgggtaccccaaactcttagccctagtggggtgctcagatctctcaggaaaaccagtttcccttttgttaaccccccagcggggaccccaaagcagccccttggagctgcagggagcttcagcgggcaccagttctcattcctctggagctcttggggggactccctcctgggaagccgaattctatctctaaacctcagggtgggggccttgtttttcctctgggccccgtcttctttgccaagttcttgagggcaacctagaccctcctctgaaccccagaggcttccccagccctggggatcatttttctcttctgaaccccagaagcaatctcgactttcgcatttgagattccagacaggactcggctctccctctttcatacccaggggaaactgagtccctcacccccttcaagaccccaggccgctcctcgctcccgcccctcgaggcccttcgccggctctgcctcctcccccttcccgaccccaccggccataagatgatgtggtccaacttcttcctgcaagaggagaaccggcggcggggggccgcgggccggcggcgggcgcacgggcagggcaggtcggggctgacgcccgagcgcgaggggaaggtgaagctggcgctgctgctggccgccgtgggcgccacgctggcggtgctgtccgtgggcaccgagttctgggtggagctcaacacctacaaggccaacggcagcgccgtgtgcgaagcggcccacctggggctgtggaaggcgtgcaccaagcggctgtggcaggcggacgtgcccgtggacagggacacctgcggccccgcggagctgcccggaggcctgctgctcttggtgagcctggaggtgttccggcattccgtgagggccctgctgcagagagtcagcccggagcctcccccggccccacgcctcacctacgagtactcctggtccctgggctgcggcgtgggggccggcctgatcctgctgttgggggccggctgctttctgctgctcacactgccttcctggccctgggggtccctctgtcccaagcgggggcaccgggccacctagagccacgcgtgagacttctctaagcaaccaccgagccctttgaccttctccattgtacccccaagatctttttgccccatctcctagagaaactgtgttctccctgctcgggggcccatgtttttttacacgcctgcctcctgtccccttatcctttctccctctgtaaatacgtttttctctgtggctgtatgtgggttgcttgggggtgggatgggaagaggctctttgcaaacgagggtccccagagaagactggcggggacctgatggggtagctggggtgtggggttgggggatgaggtcagggggtcttgggtgggagttgggggccccttcatttcccaggtctggatcgattcacttgccgggagagactttttacaactcatctgcagctccgggtgcggttgggggagatagcgaagggtctggcctcgctgtgatctgatttgggattaaaggtttggaaatttaaaaaaaaaaaaaaaaaaaaaaaaaaaaaaaaaaaaaa

SEQ ID NO: 5515 - DNA, 2629 bp, Homo Sapiens
  NM_031905
accgccccgcgctccgctgccaggggcgggagggaggaatggttgcttcacgccccgggggaagagacgggaagctcggctctgggttgcgggccccggcgtctccgcgtggggcgcaccgtccgacccccccctcccggtgtgcagcgccccgcaccgccccgcctcgcctgggagaagccgccgggacgcgccgggctggagtgggcggttataggctttgagctaggccgtttccgggaggcggagctcagaccccatttcctttctccacatccaggtcaggtggcgtttgctgtggcggctaggcccgcgtgcgctggagacctccgcgctggcccccgcgagcctcctgccctggcccggcgctgcggctctgccgcggcggcagcatgggtggcccccggggcgcgggctgggtggcggcgggcctgctgctcggcgcgggcgcctgctactgcatttacaggctgacccggggtcggcggcggggcgaccgcgagctcgggatacgctcttcgaagtccgcaggtgccctggaagaagggacgtcagagggtcagttgtgcgggcgctcggcccggcctcagacgggaggtacctgggagtcacagtggtccaagacctcgcagcctgaagacttaactgatggttcatatgatgatgttctaaatgctgaacaacttcagaaactcctttacctgctggagtcaacggaggatcctgtaattattgaaagagctttgattactttgggtaacaatgcagccttttcagttaaccaagctattattcgtgaattgggtggtattccaattgttgcaaacaaaatcaaccattccaaccagagtattaaagagaaagctttaaatgcactaaataacctgagtgtgaatgttgaaaatcaaatcaagataaagatatacatcagtcaagtatgtgaggatgtcttctctggtcctctgaactctgctgtgcagctggctggactgacattgttgacaaacatgactgttaccaatgaccaccagcacatgcttcacagttacattacagacctgttccaggtgttacttactggaaatggaaacacgaaggtgcaagttttgaaactgcttttgaatttgtctgaaaatccagccatgacagaaggacttctccgtgcccaagtggattcatcattcctttccctttatgacagccacgtagcaaaggagattcttcttcgagtacttacgctatttcagaatataaagaactgcctcaaaatagaaggccatttagctgtgcagcctactttcactgaaggttcattgtttttcctgttacatggagaagaatgtgcccagaaaataagagctttagttgatcaccatgatgcagaggtgaaggaaaaggttgtaacaataatacccaaaatctgattggtcatatttttccaaagagtaatgcagtctggatataaacgtattttctgtcttccttataaggggattctcccagctgctaaatttaaacagtaaatatcacattttgtcattaacacagctataacttgccgtggttctcagatttattttggactattttgatgccaagtgaatataagagcttgtactgaaaccatttatttctttctattttgctatttgcaaatgcttgttatcttccctacatgaagtggcagtaacctttttcacatttaagctacccttctaccttttgaagtgatttgcagttactcatctgagacagcatcagtatttgactaaatcattgtttcacaactgaatagtcttgttcttttagtagcaacgaaatcctaagctcttgaggccattcacctgccaacctgaccatactgctttcaaaagtcttttctcatcagtagaatctattttggtcacttctagtcaatgaaaaatgtaaacttttaggagagaatgtttcttaggactcacccactccattcaatgttatatataaaatagtgtgatcaatcacaatgtccatctttagacagttggttaaataaattatctggtctttgaaaagaccgtgctgggcgcggtggctcttgcctgtaatcccagcactttgggaggctgaggcgggcagatcacctgagatcgggagtttgagaccaagcctgaccaatatggagaaaccctgtctctactaagaacacaaaattagctgggcatggtggtgcatgcctgtaatcccagctacttgggaggccgaggcaggagaattgcttgaacccgggaggcagaggttgcagtgagctgagatagcgccattgcactccagcctgggcaacaagagcaaaactctgtctcaaaaaaaaaaaaaaatgatggagctccgaatgtgcttaagtggaaagatatctatgaaatatggtggttttttaaaacacaaaaattatagaatatgggatcccgtgtgtgtgtgtgtgtgtttgaatgaaaaatgcttatgtattgacagaacacttctagaatgatacccaaactcctggagtgggagtggggaatgccttctacgtacacactgttctactgtttgaattttttaatatgagcccaaattgtataatctttttttaataaaggggagaaaaatc

SEQ ID NO: 5516 - DNA, 2954 bp, Homo Sapiens
  NM_031910
tccctcctctgctgggcctgggggtctgggccagcaacaagttagtattgcagacatgggccaaggagccagaggccatgcagtggctcagggtccgtgagtcgcctggggaggccacaggacacagggtcaccatggggacagccgccctgggtcccgtctgggcagcgctcctgctctttctcctgatgtgtgagatccctatggtggagctcacctttgacagagctgtggccagcggctgccaacggtgctgtgactctgaggaccccctggatcctgcccatgtatcctcagcctcttcctccggccgcccccacgccctgcctgagatcagaccctacattaatatcaccatcctgaagggtgacaaaggggacccaggcccaatgggcctgccagggtacatgggcagggagggtccccaaggggagcctggccctcagggcagcaagggtgacaagggggagatgggcagccccggcgccccgtgccagaagcgcttcttcgccttctcagtgggccgcaagacggccctgcacagcggcgaggacttccagacgctgctcttcgaaagggtctttgtgaaccttgatgggtgctttgacatggcgaccggccagtttgctgctcccctgcgtggcatctacttcttcagcctcaatgtgcacagctggaattacaaggagacgtacgtgcacattatgcataaccagaaagaggctgtcatcctgtacgcgcagcccagcgagcgcagcatcatgcagagccagagtgtgatgctggacctggcctacggggaccgcgtctgggtgcggctcttcaagcgccagcgcgagaacgccatctacagcaacgacttcgacacctacatcaccttcagcggccacctcatcaaggccgaggacgactgagggcctctgggccaccctcccggctggagagctcaggtgctggtcccgtcccctgcagggctcagtttgcactgctgtgaagcaggaaggccagggaggtccccggggacctggcattctggggagaccctgcttctatcttggctgccatcatccctcccagcctatttctgctcctctcttctctcttggacctattttaagaagcttgctaacctaaatattctagaactttcccagcctcgtagcccagcacttctcaaacttggaaatgcatgcgaatcacccggggttcgtgttaaatgcagattctgactcagcaggtctgagtgggtccaggattctgtgtttctcatatgttcctgggtgatgctgatggggtcagtctatgaaccacactggagcaaccaggttctaggactttctcaatattctagtactttctgaacattctggaatcctccccacattctagaattctcccaacatttttttttcttgagacagagtcttgctctgttgcccaggctagagtgcagtggtgcaatctcagttcactgcaacctctgcctcccgggttcaagcgattcttctgcctcagcctccctagtggctgggattacaggcgcctgctaccatgcctggctaatttttgtatttttagtagagatggggtttcaccatattggccaggctggtcttgaactcctgacttcaggtgacccacccgcctcggcctctcaaaatgctgggattacaggtgtgagccaccgtgcctggccaattccaacattcttaaattctctcatccctccagggctccccgtgctatgttctctttaccccttccccctcttctcttgctcaggcctgcaccactgcagccaccgttcatttattcattcattaaacactgagcactcactctgtgctgggtcccgggaagggtgagggggtcagacacaggccctgcccctgccctcagtgactggccagtccagcccaggcggggagagatgtgtacataggttttaaagcagacccagagctcatgggggcctgtgttctgggtgttcaggtgctgctggtcctccattacccactgctccccaaggctggtgggacggggtcccggtggcaggggcaggtatctccttcccgttcctcatccacctgcccagtgctcatcgttacagcaaaccccagggggccttggccaggtcaagggttctgtgaggagaggacccaggagtgtgggggcatttggggggtgaagtggcccccgaagaatggaacccacacccatagctctccccacagctgatacggcatcctgcgagaagacctgccctcctcactgggatccccttcctgcctcctcccagggctctgccagggccttgctcagtcccttccaccaaagtcatctgaacttccgtttccccagggcctccagctgccctcagacactgatgtctgtccccaggtgctctctgcccctcatgcccctctcaccggcccagtgccccgactctccaggctttatcaaggtgctaaggcccgggtgggcagctcctcgtctcagagccctcctccggcctggtgctgcctttacaaacacctgcaggagaagggccacggaagccccaggctttagagccctcagcaggtctggggagctagagcaaaggagggacctcaggccttccgtttcttcttccagggtggggtggcctggtgttcccctagccttccaaacccaggtggcctgcccttctccccagagggaggcggcctccgcccattggtgctcatgcagactctggggctgaggtgccccggggggtgatctctggtgctcacagccgaggagccgtggctccatggccagatgacggaaacagggtctgaccaagtgccaggaagacctgtgctataaaccaccctgcctgatcctgcccctgcctgaccccgccacgccctgccgtccagcatgattaaagaatgctgtctcctcttggcaaaaaaaaaaaaaaaaaa

SEQ ID NO: 5517 - DNA, 6236 bp, Homo Sapiens
  NM_031915
atccccggtagaggcagggcgggactgttgtggttgagatgaaggctagtaaatggtgaagtacttcccggccagagggcacctgcgctcgggaggtttgggcggcttggcgtcggaggagagccccacccgcggaggaacccagccttgccaacggagctggcggagctcactcctcaggtcaggcgggcggcgtagaaaacgcagcggagccaggtgaaaccaaggcaccgccgtggctggcccccgacagttcctctagccgggaggttggaggagctgaaaacgccgcggagccctcggccgcccgagcaggggctggaccccagcccttgcagcctcccttctcctggcacccaagtgcagtcctggctgcagaaggggccgcgggcgcactgagtttccaacctccatttcagcctgtctgtctcagggtgcagccttaatgagaggtgattcctaagctgctgggaacctgaggttgtcaaaggggcggcaggaaatggacagcagtataaaacccagaagcagaacttgaaggttaaaccactagcccatttcacagaatgtttcatccatttgtggaccaaaagatggagttggtttttatttttaaaaagataatgttaatgatctgataccactacaaatatttacgtgagaagattcatggacttgtcttttggttggactgtcactcatttctgaaagtttcttcagccacaatttctatttgaaaattcaagtatcaaaggataccaggtttagaatggtataatgatgtattttgtctgaggactgcaaattttatagagaccacagttggattccagtgatattctgcaatcaaagtgatttgataaacctaattttgaagcattttatatttataagcgacatcaaaagatgggagaaaaaaatggcgatgcaaaaactttctggatggagctagaagatgatggaaaagtggacttcatttttgaacaagtacaaaatgtgctgcagtcactgaaacaaaagatcaaagatgggtctgccaccaataaagaatacatccaagcaatgattctagtgaatgaagcaactataattaacagttcaacatcaataaagggagcatcacagaaagaagtgaatgcccaaagcagtgatcctatgcctgtgactcagaaggaacaggaaaacaaatccaatgcatttccctctacatcatgtgaaaactcctttccagaagactgtacatttctaacaacagaaaataaggaaattctctctcttgaagataaagttgtagactttagagaaaaagactcatcttcgaatttatcttaccaaagtcatgactgctctggtgcttgtctgatgaaaatgccactgaacttgaagggagaaaaccctctgcagctgccaatcaaatgtcacttccaaagacgacatgcaaagacaaactctcattcttcagcactccacgtgagttataaaaccccttgtggaaggagtctacgaaacgtggaggaagtttttcgttacctgcttgagacagagtgtaactttttatttacagataacttttctttcaatacctatgttcagttggctcggaattacccaaagcaaaaagaagttgtttctgatgtggatattagcaatggagtggaatcagtgcccatttctttctgtaatgaaattgacagtagaaagctcccacagtttaagtacagaaagactgtgtggcctcgagcatataatctaaccaacttttccagcatgtttactgattcctgtgactgctctgagggctgcatagacataacaaaatgtgcatgtcttcaactgacagcaaggaatgccaaaacttcccccttgtcaagtgacaaaataaccactggatataaatataaaagactacagagacagattcctactggcatttatgaatgcagccttttgtgcaaatgtaatcgacaattgtgtcaaaaccgagttgtccaacatggtcctcaagtgaggttacaggtgttcaaaactgagcagaagggatggggtgtacgctgtctagatgacattgacagagggacatttgtttgcatttattcaggaagattactaagcagagctaacactgaaaaatcttatggtattgatgaaaacgggagagatgagaatactatgaaaaatatattttcaaaaaagaggaaattagaagttgcatgttcagattgtgaagttgaagttctcccattaggattggaaacacatcctagaactgctaaaactgagaaatgtccaccaaagttcagtaataatcccaaggagcttactgtggaaacgaaatatgataatatttcaagaattcaatatcattcagttattagagatcctgaatccaagacagccatttttcaacacaatgggaaaaaaatggaatttgtttcctcggagtctgtcactccagaagataatgatggatttaaaccaccccgagagcatctgaactctaaaaccaagggagcacaaaaggactcaagttcaaaccatgttgatgagtttgaagataatctgctgattgaatcagatgtgatagatataactaaatatagagaagaaactccaccaaggagcagatgtaaccaggcgaccacattggataatcagaatattaaaaaggcaattgaggttcaaattcagaaaccccaagagggacgatctacagcatgtcaaagacagcaggtattttgtgatgaagagttgctaagtgaaaccaagaatacttcatctgattctctaacaaagttcaataaagggaatgtgtttttattggatgccacaaaagaaggaaatgtcggccgcttccttaatcatagttgttgcccaaatctcttggtacagaatgtttttgtagaaacacacaacaggaattttccattggtggcattcttcaccaacaggtatgtgaaagcaagaacagagctaacatgggattatggctatgaagctgggactgtgcctgagaaggaaatcttctgccaatgtggggttaataaatgtagaaaaaaaatattataaatatgtaactaacgcctgtttgtgaaattagcttatcaggctgaaattaaagccatgcaaaagaaggtctaggtccatcaaggaaattcccctccgttttcctttgtcatggggtttatgttttatttcagattttatttgtgtgacttagaaattccaggaacacaattaggatattttcatacacatagggtatcttgttcactgctgtgctactttacatgagtaggatggaagtgtatattttatatgaaataccactgtacaatttataatttatttacaaattatatattaagagaaacaaatgtcataacagaactcagctgtttctaattgcttttgtgactgttaccttttagttcatgcccccccaaagagctaaatttcacatttttacctacaaaattgatttttaattcctggcaaataatttaccattatgagctacaaggtgggcaacagcgcctgaggatctaattttatgcatattactcccaagtattttaacacttgttggagaagcaatatctggatcgataaaacactgtcccatcaaccatttgagtggggagagggagaagctcttctgtaagtaagattctggcaagctctttgaaatgagtcttctttcccacagattttctctactctttctatacaaacagataggagaagagggaatagaaacctggaggaacttgaatatttttgttctagatagagatacagttactgaaaaggaaacctagaaagtagtcacacgttgcttatttaggccagaagtaattgtactgggcaaaaatttcacttaaaaaacacaagaagtccaggtatggtggctcagacctgtaatcccagcactttgagaggccgaggcaggtggattacttgagcctaggggttcaagaccagcttgggcaacatgtcaaaaccctgtctctacaaaaaatacaaaaattagcctggcatgatggcatgtgcccgtagtctcagctactcaggagtgaggtgggaggatcatttgagctcagaaggtcaaggctgcaatgagacataatttcaccatagtacttccagcctgggcaatagagcaagactctctctcaaaaaaaacagcacacacacacacacacgaaaacaattctgaactatgaaatctgaaacagccccttggtatctcctgggcatgatttgcaaatcttttttttttacagaaaaaaggcaaagagtaagcactttgccataggttacttggccgtgatcatctatctagtggaaaaggggactgggaagcccaagcagactgggaaaccagacagctaggaaaaggagcaaaacatagcccagcaacctacagatgaagaaagttgagaaatccatttattcaccatagagacgcaggaatttcaggcaatgcactaaaatgaaatgggggaaaaaagcttgatcagtatgggaaccatttttgtgcaaaagggaatattatggatcagccagtatttctttgagctctgcctgtggagtccatttgacctttagaaatatgaggtattctgtcagttttatcttcttggagaaatttctcctaaaatcttgatttgctttagtctggactggttcatagccatcatcttccatcagtaccccagagattcactttgtctcttatgtgggatctgtttccagttagatgccattattttccttttccttggtttactcttccacatattggtaaagctcttccaatagcttttggaaaggaaaaatgaaaagtaaatgttttgaatctctgtgtgtttgacaatgtctttattttacccttatacctgattgctgttttggttggcaaggtataggattctttagtggtctccatgcccagttttgaagacatctgctagctttcagtgctgttgctgtggagtctgaaaatctgtcttctggcttccagggtgactactggaaattgaatgccattctgttccttctcttttgcatatataatccatttttatctctcttgaagcttataggtttatctttgtctcaatgttctgtccctgttaagagtccattttcatcctttgtactaggtgcctggtgggatcattccgtctgaaactaatgatttcccatctcttcactgtttctggaattcctgttttccagatgttagacctccagaatttgatctctaattttcctatcttttctcttaactttcagctctgtcttcttgctaggaccttttcctaggagcatttctcaatttaatcttccagttcatctgttgcattttatttttctagtctcatattgtctcatatttttaatttctaagagctccccttctccgaatattctttttttttaatagcatcctattttggctcatggttgcagtattttatctccttgaagatgtttgtgtgtttatgtatgtatatgcacacacgtatacatacacatacaggcatgcatctctgtattctttcggcataatctgtgtcctccagggtttgtttctttgtttcccctgtatgtttgttttggtcgttcacattataggctttcctcagagttaatggtcttggtagtctactcatatttaagtgtggaacaccaaaaagcttactataagctgagagtgtggtaaagggctctttgttttactatgacctacctgagctatcttgctggggaacaccctaatgtcagtctctttataaagggcctttcattttggcctggcaagaaatactctttcatcctcctgcatggagggcaaaaaaaaatttaaaaattggctgctagggtctgtctgctcacttccctgttttgcagaccccacactcttctgcaattcatttcatagttgtcaagactatacaaattgtcctttttaatgttctctcttctgctatccctagttggcagtcttcctctttacaacctgctgaaagtggaagacctccagttttcctttaattcctcagcaaaccaccaactattatatgtcttttttccagaacaacttattttttaactataattatatgcatttatgttagattcactgaaaacctcatcttgtatggtgctctgtaccctatgggtgctaaataaaggcttgctactggcaactggaaaaaaaaaaaaaaaaa

SEQ ID NO: 5518 - DNA, 1093 bp, Homo Sapiens
  NM_031916
aggggcggggcctgctcgcgtcccgggtgcctggataccgagcgcgtccgtagtggcggctggcgctagggaactgcagggtctagggtgttgtcggagtggcagttggtccgaatttctcccgaagcccgcggaggagcgggtaagagccccgcgaatccggccccaacctcgggaacgggatgggaggcggccctggccgcaagccccgcgctgctagcgggtccaccgcgtcgtagccgacagccgcccttcttcctcgcagcgcgccgcgattcaccagcctggtcccttctgcggagagcgatgccgcttcccgacaccatgttctgcgctcagcagatccacattcccccggagctgccggacatcctgaagcaattcaccaaggctgccatccgcacccagccggccgacgtgctgcggtggtccgcgggctatttttcagctctgtcgagaggagatccacttcctgtaaaggacagaatggaaatgcccacggcaacccagaaaacagacacaggcctgactcaaggactcctgaaagttttgcacaagcagtgtcaccacaagcggtatgtggaattaacagatcttgagcagaagtggaagaacttgtgcctgccgaaggaaaaattcaaagcgctcttacaactggatccttgtgaaaacaaaatcaagtggataaactttttagcgcttggatgcagcatgcttggtgggtccttgaacactgcgctgaagcacctgtgcgagatcctcacggacgatccggagggcgggcccgctcgcatccccttcaagacgttttcctacgtttaccgctacttggccagattagactcagatgtgtctcccttggagacggaatcctaccttgcctctctaaaggaaaatatagacgccaggaagaacggcatgataggtctttcagatttcttctttccaaagaggaaacttttagaaagcattgaaaactctgaagatgtaggccattaatacagagaagaatacattttaatgtcaaaatagtgctctttaaaattctggcaccaaatacaacttaccctgaatcacaaaaaaaaaaaaaaaa

SEQ ID NO: 5519 - DNA, 2824 bp, Homo Sapiens
  NM_031920
acaccactgcactccagcctggatgacaaagcaggactctgcctctaaaaagaaaaaaaaaaggtatctgagagcaagcagcaatagaaatttcctgcttaccatgagaccatttttaaaaagggccattttggtcctaagttatgtgcttgtcattttgtacttccgtctgtggataatgggaggatctatgcccctcttttcagagcaggataatccagcttcattttcgccttacattcttacgagattcctcacctattcctacctcttggccttcaatgtgtggcttctgcttgcacccgtgaccctgtgctatgactggcaggtcggcagtattcctctggtagagaccatatgggacatgcggaacttagccaccatctttctggcggttgtgatggccttattgagcctgcactgcttagcagcctttaagagactggagcacaaggaggttttagtcggcttgttgttcctggtgttcccgttcattccagccagcaacctcttcttcagggtgggttttgtggtggcggagagagtcctttacatgcctagcatgggctactgcatcctttttgtgcacggactgagcaagctctgcacttggctgaatcgatgtggggccaccaccctgattgtgtccactgtgttgctgctgttgcttttctcttggaaaactgtgaaacagaatgaaatttggctgtcaagagagtccctattcaggtctggagttcaaactctgccccacaatgccaaggttcactacaactatgccaatttcctgaaggaccaaggtcggaacaaggaagcgatctaccactacagaacagctctcaagttgtatccacgccatgcaagtgcgctcaacaaccttggaacactgacgagagacacagcagaggcaaagatgtactatcagagggctctccagctccatccacagcataaccgggctcttttcaatctggggaatctcctcaagtcccaggagaaaaaggaagaagctatcaccttactgaaggattccatcaaatatggtccagagtttgcagatgcatattcaagcttagcttcgttattggctgagcaggagcggtttaaagaagctgaagaaatataccaaactggaataaagaactgtccagacagctcagatttacacaacaactatggggttttcttagttgatactggcttaccagaaaaggcagtggcccattaccagcaggccatcaaacttagccccagtcatcacgtggccatggtgaacttgggaagactctacaggtcactgggagagaacagcatggctgaagaatggtacaagcgcgccctgcaggtggcacacaaagctgagatattgtcacctttgggagcactgtattacaacactggccgatacgaagaggctttgcagatttaccaggaagctgcagcacttcagccttctcagagggagctccgcttggcactggctcaggttttggccgtgatgggtcagacaaaagaagctgaaaagatgaccaatcacattgtgtcagaggagaccggatgccttgaatgctatcgcctcttgtcagccatctatagcaagcaggagaaccacgacaaggcacttgatgctatagacaaggctctccagctgaaaccaaaggacccaaaagtcatttctgaactttttttcacaaaaggaaaccaattaagagagcagaaccttctcgacaaagcttttgagagctatagagtggctgtgcaactaaacccagaccaagcacaggcctggatgaacatgggtggcatccaacacatcaagggaaaatatgtgtctgcaagagcttattatgagagagccttacagctggttccagacagcaaactgctgaaggaaaatcttgccaaattggatcgcctagaaaaacgattacaagaagttcgagaaaaggatcaaacatagcaccaccgtctgacccaacctcataggataatgtggtgcctctgaaaggggagtgatggaagccttgctttcacatcagcaggggcacaactaatgagattttctctcattccgagttcagggtgacacattttgggacatctgctggtagcccagtgctgaaggacttgcttttccatgaagaagacgaaaacagcaaacaagggcaagaaggtctgagagggaaggagaatgacatttacacattttacagatttttgtttggtttaactccagatttctcttgatatatctctgtgcttttgagacctggagatctaattctgtttagacattttttgtcccagaaatacagaagcttgaaatgctatgaaggcagagcttctattctttatgggatgaaatatttcaaaagaggataaatcctctgtggtaagccatttggaaaatcctaccaagaattggcttatttaattttccagaaccaggaatgagtatctaatagcttttgtagaaccttccagaatatgtggggaaaaagggctattgctaagtgagctttatctaatatcctcctaagagttttactagtgcttttttgaggaattacagggaagctcctggaattgtacatggatatctttatccctagggggaaatcaaggagctgggcacccctaattctttatggaagtgtttaaaactattttaattttattacaagtattactagagtagtggttctactctaagatttcaaaagtgcatttaaaatcatacatgttcccgcctgcaaatatattgttattttggtggagaaaaaaatagtatattctacataaaaaattaaagatattaactaag

SEQ ID NO: 5520 - DNA, 2201 bp, Homo Sapiens
  NM_031924
ggctgccaggggcgtgttatcgcgggggcagcctgggagcgctgctgcgccgcggcaggagaaacagccgaggacaccctggaagagcaggagcacgtgggcctgcgagaatggcgccaacaccagccctgcaaagccacattccaaagccgggccaaggacagccaccgttgccccgcaggcctcaaggatgacggtcaagccagccaaggccgcctccctagccaggaacctcgcaaagcgcaggcgcacctacctgggtggcgcggctgggcggagtcaagagccggaagtcccttgtgccgcagtccttcccgggaaacctggggaccggaactgcccggagttcccgcccccagacagaaccctgggttgctgggcaaccgatgcggcccccgcagctggtctctgtggtgctgggagcgagcccagtatagctcccacctcctgcgctggtaacctcccgtcccgcccgcctcccttgttgtcgcctctcctcgcgtcgcggaatccttgcccttggcactacttacatctctccgggtcccacaacaccttagcgcccacctgcttcaaagccaagctccaccgaaagcgaggcagtcagcccccggacatggcctcagcgctgactgatcgcacctctcgggccccgagcacctacacctacaccagccggccccgagcactgccctgccagcgcagccgttaccgggacagcctgacgcagccagatgaagaacctatgcattatggaaacataatgtatgacagaagggtaattcgaggtaacacttatgcactccagacagggccactgctcggacggcctgattctctagagctccagagacaacgggaggctaggaagagggctcttgccagaaaacaagcccaagagcagctcagaccacaaacacctgaacctgtggaaggcagaaagcatgtcgatgtgcaaacagaattataccttgaagaaattgctgatcgcataatagaagttgatatggaatgccaaacagatgcatttttggacagaccaccaacaccactctttattcctgccaaaactggcaaagatgtggccacccaaatactagaaggagagctctttgactttgatcttgaagttaaaccagtgttagaagttttggtggggaagacaattgagcagtctcttctggaagtaatggaagaagaagagctggctaacctgcgggccagtcagcgtgagtatgaagaactacggaatagtgaacgtgctgaagttcaacgacttgaagagcaagagaggcgacaccgagaagaaaaagaacggcgtaagaaacagcagtgggaaataatgcacaagcacaacgagacatcacaaaaaatcgccgcccgagcatttgcacagcgttacctggctgaccttctcccgtctgtttttggcagcctcagggatagtggctacttttatgatcccattgaaagagatattgagataggatttcttccatggctaatgaatgaagttgaaaaaaccatggaatatagcatggtgggaagaacagtgcttgacatgttgatccgtgaggtggttgaaaagaggctgtgtatgtatgagcatggggaagacacacatcagtctccagaacccgaggatgagcctggtggtcctggagcaatgacagagtcactggaggcctctgaattcctggagcagagcatgtcacagacacgggagctgcttttagatggaggctacctacaaagaacaacatatgacagaaggtcatcccaggaaaggaagtttatggaagagagagaactcttagggcaagatgaagaaacagcaatgaggaagtccttaggggaggaagaattgtcataggagggaagcttcaaagtcatgaaaccaatcaacagccaagtcagcaagcaatcaggtaatgatgtgcgagtcccctcaggttatagaaattatgttgtatttagtcagtatgtctttttgtgtaatggactgggccaatcaaatgtgataaaattaatttgagaatgaaacttaaattgaattcatttatttaatagaatattcaaaggctatattgtaattctaatgagaattatatttaattactagctttctattaccattatatgtaaccagcaaatatatttttccttagcccttctaaaaaaaaaaaaaaaaaaaaaaaaaa

SEQ ID NO: 5521 - DNA, 1497 bp, Homo Sapiens
  NM_031925
gtggcggcgcgagcccggaagcggacgggggcggtggcggaggagcctcgggtgggccggggttgctgcgccgtcctccactactggctactggcgctgcagccatgcagcccccgcccccgggcccgctgggcgactgcctgcgggactgggaggatctacagcaggacttccagaacatccaggagacccatcggctctaccgcctgaagctggaggagctgaccaaacttcagaacaattgcaccagctccatcacgcggcagaagaagcggctccaggagctggccctcgccctgaagaaatgcaaaccctccctcccagcagaggccgagggggccgcacaggagctggagaaccagatgaaagagcgccaaggcctcttctttgacatggaggcctatttgcctaagaagaatggattgtacctgagcctggttctggggaacgtcaacgtcacgctcctgagcaagcaggctaagtttgcctacaaggacgagtatgagaagttcaagctctacctcaccatcatcctcatcctcatctccttcacttgccgcttcctgctcaactccagggtgacagatgctgccttcaacttcctgctggtctggtactactgcaccctgaccatccgggagagcatcctcatcaacaacggctcccggatcaaaggctggtgggtgttccatcactacgtgtccaccttcctgtcgggagtcatgctgacgtggcccgacggtctcatgtaccagaaattccggaaccaattcctctccttttccatgtaccagagcttcgtgcagtttctccagtactactaccagagcggctgcctctaccgcctgcgggcgctgggcgagcggcacaccatggacctcactgtggagggcttccagtcctggatgtggcggggcctcaccttcctgctgccttttcttttctttggacacttctggcagctttttaacgcgctgacgttgttcaacctggcccaggaccctcagtgcaaggagtggcaggtgcttatgtgcggctttcccttcctcctccttttcctcggcaatttcttcaccaccctgagggttgtgcaccacaagtttcacagtcagcggcacgggagcaagaaggattgaggctgggccttcccctgccggcccagaggggcttctgtcctgtgtgttgtgggaggggatgggaggcgcccctcgagtgtgcgtgtatcagggggtctcttctattctcccttgggttttatgggcgctgtgggccctgaaggaagacctgggcccagtgccctcaataaagagaggcccagaggtggcctgagcgtgtgtgttctcctgggggaggggagggctgggtggccccaccacatgggttcctggggtctgagttagttaagttgatgcaggtggaggtcccagatctactcacacaataccaggcaaatacagaaaacagaactttaaaaaaaaaaaaaaaaaaaaaaaaaaa

SEQ ID NO: 5522 - DNA, 1973 bp, Homo Sapiens
  NM_031937
gctcaggcggcgggcgcggctaggatggcgaagagcaacggagagaatgggccgcgcgcgcccgcggccggggaaagcctgtcgggaacccgggagagcctggcccagggccccgacgccgcaaccaccgacgaactcagctctctcgggtctgactcggaggccaacggcttcgccgagcgccgcatcgacaagttcggcttcatcgtgggctcgcagggcgccgagggcgcgctggaggaagtacccctggaggtgctgaggcagagggagtccaagtggctggacatgctcaacaactgggacaaatggatggccaagaagcacaaaaagattcgtctgcggtgccaaaagggcatcccgccttctctgcggggccgtgcttggcagtacctgtcaggaggcaaggtgaagttacagcagaaccctggaaagtttgacgagctggacatgtcccctggggaccccaagtggctggacgtgattgagcgtgacctgcaccggcagttcccattccatgagatgtttgtgtcccgggggggccacggccagcaggacctattccgtgtgctgaaggcctacacgctgtaccggcccgaggagggctactgccaggcccaggcgcccattgccgctgtcttgctcatgcatatgcctgctgagcaagccttctggtgcctggtacagatctgtgagaagtacctgcccggctactacagcgagaaactggaggcgatccagctggacggggagatccttttctcgctgttgcagaaggtgtcgccggtggcccacaagcacctcagccgtcagaagatcgacccgctcctctatatgacagaatggttcatgtgcgccttctcccgaaccttgccctggagctctgtgctgcgtgtctgggacatgttcttctgtgaaggggtcaagatcatcttccgggtggggctggtgctgctgaagcacgcgctgggctcccctgagaaggtcaaagcctgccagggccagtacgagaccatcgagcgactgcggagcctcagccccaagatcatgcaggaggcctttctggtccaggaggtagtggagttgcccgtgacagagcgccagattgagcgcgaacacctcattcagctgcggcgctggcaggagacccggggtgagctgcagtgccgctccccgcccaggctgcatggtgccaaggctatcttggatgcagaacctggtccccggcctgccctacaaccttcaccatccatccgcctgcccctagatgcccccctccctggctccaaagccaagcccaagccacccaagcaggcccagaaggagcagcggaaacagatgaaggggagagggcagctggagaagcccccagccccaaatcaagccatggtggtggccgctgcaggagatgcatgtcccccacagcatgtgcccccgaaggactcagcccccaaggactcagcccctcaggatttggctccccaggtctcagcccaccaccgctcccaggagagcttgacgtcccaagagagtgaggacacctacttgtaaccctggcagctaaggcctccagggcggggtctccatataactacacggttcatgaactgacattccacatcctgcccaccctctgagggccaagctgcctggccactgggctgggctggagtctggctggtccaacacagattctgcctggtccaacacagattctgcctgagcctccttatttattttctttacagtggcactcaggctggcccagccagggcaggcagaagctagggcctggggggtggggcctccttcagccccctcctcctgggggatgctccccagggttagggtgctggtgtgaggggaaagggtggggtgttctttgtgtaaaatagaaacatggttttgtacagaaataaacagccttgtatagagaaaaaaaaaaaaaaaaaaaaaaaaaaaaaaaaaaaaaa

SEQ ID NO: 5523 - DNA, 1239 bp, Homo Sapiens
  NM_031943
ccatgactatctttattcacactcttctctgagcctgaaatgctccactcctcctttccaacctcccaccctcacccctaccccattccctcctcacgccccctgccccctgccccgtgttcatgccctgtgctggctctgcctccacacctgcctgctgcctcccacagagcccgcaaggcaggaacccagaccctggcctcagcacaagctccagtgcagaccccagcacccactctgcctggtcctgctcttccagggcccttccctggtggccgtgtggtcaggctgcacccagtccttttggcctccactgtggacagctatgagagacgcaacaagggtgctgcccgagttatcgggaccctgttgggaactgtcaacaaacactctgtggaggtcaccaattgcttttcagtgtcatacaatgagtcagatgaagtggttgttgacatggaatttgctaagaacatgtatgaactgcataaaaaagtttctccaaatgagctcatcttggggtggtacgctgccggccatgacatcacagagcactctgtgctgatccatgagtactacagccgagaggcccccaaccccatccacctcactgtggacacaagtctccagaacggccatatgagcatcaaagcctatgtcagcactttaatgggtgtccctgggaggaccgtgggagtgttcacacctttgacagtgaaatatgcatactatgacactgaatgcatcagagttgacctgatcatgaagacctgctttagccccaacagagtggttggactctcaagtgacctgcagcaagtaggaggggcatcagctcacatccaggatgccctgagcatagtgttgcaatatgcagaggatatactatctgcaaaggtgtcagctgacaatacaatcaggaaggtgggccacttcctgatgagcctggttaaccaagtaccgaaaatagttcccgatgactttgagaccatgctccacagcaacatcaatgacctgttgatggtggcctacctggccaacctcacacagtcacagattgccctcaatgaaaaacgtgtaaacctgtgaagccaccccaagcagtacgcttgctggtctaagtcttaaccccaggactcagaagtgaaggaaaaatgggttttttgtggtcttgagtcacactgagacagtcaactgtgtgtgactctaataaacgtagcctaccttttgtaaattaaagaa

SEQ ID NO: 5524 - DNA, 3247 bp, Homo Sapiens
  NM_031946
gccatgaacttccaggcgggcggggggcagagcccgcagcagcagcagagcctggcggctccggggggcggcggcgctgccgcgcagcagctcgtctgcggcgggcagttcggcggcgcggggcccggggccgggggcggcggcggcccctcgcagcagctggccggcgggcccccccagcagttcgcgctctccaactccgcggccatccgggccgagatccagcgcttcgagtccgtgcatcccaatatctacgccatctacgacctgatcgagcgcatcgaggatttggcgctgcagaaccagatccgggagcacgtcatctccatcgaggactcgtttgtgaacagccaggagtggacgctgagccgctccgtaccggagcttaaagtgggcatagtggggaacctgtctagcgggaagtcagccctggtgcaccgctatctgacggggacctatgtccaggaggagtcccctgaaggggggcggtttaagaaggagattgtggtggatggccagagttacctgctgctgatccgagatgaaggaggcccccctgagctccagtttgctgcctgggtggatgcagtggtgtttgtgttcagcctggaggatgaaatcagtttccagacggtgtacaactacttcctgcgtctctgcagcttccgcaacgccagcgaggtgcccatggtgcttgtgggcacgcaggatgccatcagcgctgcgaatccccgggttatcgacgacagcagagcccgcaagctctccacagatctgaagcggtgcacctactatgagacgtgcgcgacctacgggctcaatgtggagcgtgtcttccaggacgtggcccagaaggtagtggccttgcgaaagaagcagcaactggccatcgggccctgcaagtcactgcccaactcgcccagccactcggccgtgtccgccgcctccatcccggccgtgcacatcaaccaggccacgaatggcggcggcagcgccttcagcgactactcgtcctcagtcccctccacccccagcatcagccagcgggagctgcgcatcgagaccatcgctgcctcctccacccccacacccatccgaaagcagtccaagcggcgctccaacatcttcacgtctcggaagggtgctgacctggaccgggagaagaaggctgccgagtgcaaggtggacagcatcgggagcggccgcgccatccccatcaagcaggggatcctgctaaagcggagcggcaagtccctgaacaaggagtggaagaagaagtatgtgacgctctgtgacaacgggctgctcacctatcaccccagcctgcatgattacatgcagaacatccacggcaaggagattgacctgctgcggacaacggtgaaagtgccagggaagcgcctgccccgagccacacctgccacagccccgggcaccagcccccgtgccaacgggctgtccgtggagcggagtaacacacagctgggtgggggcacaggtgccccccactcggccagcagcgcatccctgcactctgagcgccccctcagcagctcggcctgggctggcccgcgccctgaggggctgcaccagcgctcctgctccgtttccagcgccgaccagtggagtgaggccaccacttccctgcccccaggcatgcagcaccctgccagtggcccagctgaggtactcagttccagccccaagctggatcctcccccatctccccactccaaccggaagaagcaccggaggaaaaagagcaccgggaccccccgaccagacggccccagcagtgctactgaagaggcagaggagtcgtttgaatttgtggtggtgtccctcactgggcagacgtggcacttcgaggcttcaacggcggaggagcgggagctgtgggttcagagtgtgcaggcccagatccttgccagcctgcaaggctgccgcagtgccaaggacaagactcgactggggaaccagaacgcagctctggctgtgcaggccgtccgcaccgtccgcggcaacagcttttgtatcgactgcgatgcacccaatccagactgggccagcctgaacctgggtgccctgatgtgcattgagtgctcaggcatccaccgacacctgggggctcacctgtcccgggtgcgctcccttgacctcgatgactggccgcctgagctgctggctgtcatgactgccatgggcaatgccctcgccaacagcgtctgggagggggccttgggtggctactccaagccagggcctgatgcctgcagagaggagaaggaacgctggatacgggccaagtatgaacagaagctcttcctggccccactgccaagctcagatgtgccactggggcagcagctgctccgggccgtggtggaagatgacctgcggctgttggtgatgctcctggcacatggctccaaagaggaggtgaatgagacctatggggacggggacgggcggacggctctacatctctccagtgccatggccaacgttgtcttcacgcagctgctcatctggtacggggtggacgtgaggagccgggacgcccggggcctgactccactggcatatgctcgccgggccggcagccaggagtgtgcagacatcttgatccagcatggctgccctggggagggctgtggcttagcgcctacccccaacagagagcctgccaatggcaccaacccctctgctgagctgcaccgtagtcctagcctcctataaggcccaggaagagggcagaggggccagaaggactccatggcccaaagaccctcctccctgcaggcactgtgggaacagacacagagatggagaagcagggacatgctgagaggacgaagccaaggaaattagggaggagagtcaaagggatcaaggagagttggggatttgagctgcagcagagagggatgagggatttagccctctgccctaaggtgccattgaaaagggacaggacccttcggaggtgcctgtgaggagaggggagcaggacctctccctcctccagatccctgcctcctagtgccagcccctcacacgccttcatcctgaaacaggaagaggacggcaccaagttgggggtgctggatgaaagagacgaggggtgatctgtgagtcccatgtaaactttgtacattggaatatttatgtttgtgtacatatttgatgtgtgtgtgtatgatgagccaataaaccagactgtgtgcgtggcaaaaaaaaaaaaaaa

SEQ ID NO: 5525 - DNA, 1188 bp, Homo Sapiens
  NM_031950
cttgcagagaaagagtcttttgtgcagcaccctttaaagggtgactcgtcccacttgtgttctctctcctggtgcagagttgcaagcaagtttatcggagtatcgccatgaagttcgtcccctgcctcctgctggtgaccttgtcctgcctggggactttgggtcaggccccgaggcaaaagcaaggaagcactggggaggaattccatttccagactggagggagagattcctgcactatgcgtcccagcagcttggggcaaggtgctggagaagtctggcttcgtgtcgactgccgcaacacagaccagacctactggtgtgagtacagggggcagcccagcatgtgccaggctttcgctgctgaccccaaaccttactggaatcaagccctgcaggagctgaggcgccttcaccatgcgtgccagggggccccggtgcttaggccatccgtgtgcagggaggctggaccccaggcccatatgcagcaggtgacttccagcctcaagggcagcccagagcccaaccagcagcctgaggctgggacgccatctctgaggcccaaggccacagtgaaactcacagaagcaacacagctgggaaaggactcgatggaagagctgggaaaagccaaacccaccacccgacccacagccaaacctacccagcctggacccaggcccggagggaatgaggaagcaaagaagaaggcctgggaacattgttggaaacccttccaggccctgtgcgcctttctcatcagcttcttccgagggtgacaggtgaaagacccctacagatctgacctctccctgacagacaaccatctctttttatattatgccgctttcaatccaacgttctcacactggaagaagagagtttctaatcagatgcaacggcccaaattcttgatctgcagcttctctgaagtttggaaaagaaaccttcctttctggagtttgcagagttcagcaatatgatagggaacaggtgctgatgggcccaagagtgacaagcatacacaactacttattatctgtagaagttttgctttgttgatctgagccttctatgaaagtttaaatatgtaacgcattcatgaatttccagtgttcagtaaatagcagctatgtgtgtgcaaaataaaagaatgatttcagaaatacgaaaaaaaaaaaaaaaaaa

SEQ ID NO: 5526 - DNA, 3237 bp, Homo Sapiens
  NM_031953
gcggccgccttcctgctggggatcctgtttgccctcgtctgccggagcccgcgcgcccagccgcccgacttcgccgccgcctggagccggctggccgcgacctcagccgcccgccgcccgccggggagtcctgtgtatggaaactcacatgagtcagctcagtctagaagggtagtaatttctcataatatggataaagctctgaaagaagtgttcgactacagttatagagattacattctgtcctggtatggaaacctcagcagagatgagggacaactttaccatctgctcttggaagacttttgggaaattgccagacagctgcaccacagactgagtcacgtggatgtggttaaagttgtctgcaatgatgttgtgaggactttactcactcatttctgtgacctgaaagctgccaatgccagacatgaagaacagccaagaccttttgtgttgcacgcatgcttgaggaactcagatgatgaagtaagatttctacaaacgtgttctcgggttctggtgttttgtctcctcccctcaaaggatgtgcagtctctcagcttacgtataatgcttgcagaaattctcacaacaaaagtcttgaagccggtagtggagttactgagtaatccagattacattaaccaaatgctgcttgcccagctggcgtacagagagcaaatgaatgagcatcacaagagagcctacacctatgccccctcttacgaggacttcatcaagctcattaacagcaactctgatgtggagttcttgaagcaactaaggtatcaaattgtagtggaaataatccaggcgactacaattagcagctttccccaactgaagaggcacaaaggtaaagaaactgcggcaatgaaagctgatctcctgagggccaggaacatgaagaggtacatcaaccaactgactgtggcaaagaagcagtgtgagaagagaatccgaatcctgggaggccctgcctatgaccagcaagaggatggggccctggatgagggggaagggcctcaaagccagaagattcttcagtttgaagatatcttggccaatacgttctaccgagagcactttggaatgtacatggaaaggatggacaaaagagctctgattagtttttgggaatctgtggaacatttaaagaatgctaacaagaatgaaattccacaattagttggtgaaatttatcagaatttctttgtggagagcaaagaaatatctgtggaaaaatcactttacaaagaaattcagcagtgtcttgtaggaaataaaggtattgaagtattctacaaaatccaggaagatgtttatgagaccctaaaggataggtattacccttcatttattgtcagtgacctgtatgagaaattgttgataaaagaggaagaaaaacatgcctcacagatgatttccaacaaggatgagatgggcccaagagatgaggctggtgaggaagccgtggatgatggtaccaatcagatcaatgaacaagccagttttgctgtaaacaaactgcgagaactaaatgagaaacttgaatataaaaggcaagctctaaattctattcaaaatgcaccaaaacctgacaagaagattgtttccaagttgaaggatgaaataatcctaatagagaaagaacgcacagaccttcagctgcacatggcaagaacggattggtggtgtgaaaaccttggcatgtggaaagcctccatcaccagtggagaggttacagaagagaatggtgagcaattgccatgttactttgtcatggtaagcctacaagaagttggaggagttgaaactaagaactggacggtccccagaaggctcagcgagtttcagaatttacaccggaaactcagtgagtgcgtcccttctttaaaaaaagtccagttgccttctcttagcaagctgcctttcaaatctatagatcaaaagtttatggaaaagtcgaagaatcaattaaataagtttttacagaatctgctttcagatgaaagactgtgtcagagtgaagcactttatgccttcttgagcccttctcctgactacctcaaggttatcgacgtgcaggggaaaaaaaattctttttcattatcctcatttttggaaagacttcctcgcgacttcttctcccaccaggaggaggagacagaggaggacagtgacctgtcagattatggtgatgatgtggatgggaggaaagacgccttggctgaaccatgtttcatgttgattggggagatttttgaacttcgaggaatgtttaaatgggtgagaagaacattaattgccctcgttcaggtcacttttggaagaaccatcaacaaacaaatccgggacacagtcagctggattttcagtgagcaaatgttggtttactacatcaatattttccgggatgctttttggccaaatgggaagttggcaccaccgaccacaatcagaagcaaagagcaaagtcaggaaacaaaacagagagcacagcaaaagctgcttgaaaacattccagatatgcttcagagccttgttggacagcaaaatgcccgccacggtataataaaaatattcaatgcactgcaagaaacaagagccaacaagcatctgttatatgcgctgatggaactgctgctaattgaactgtgtcctgagctgagagttcatttagatcaacttaaagctggccaagtttgagactacacaaataaaccaccagaaaaatgtctgtgtaataatagacatgaaacattttcctcttttccacagagggcttaactgagaaccgtattgatttttattttagttacctccctctagttttatgtgaaattagtagaatcagggaggacgggacttatgctgtggtaggcaacagaaaaaaacttctattgattttaatttaatatgaatactttaaagatcaacataccgattgaaatacaaatgttaatatgtgagaacctaggaagtattttaaatatttatgaaaatattttgttttaaaatgaactatgaatattgtacagttaatttcctcactgaggactgtgaacattcttatattatttcatgtatattgaagaacattgttatgcaatgctttgtgtaaagttattgtgaagattttattgtctttatttttaccaaagatttcccatagtttgagcattcaaagcaataaaatataaaaatgaaaaaaaaaaaaaaaaaaaaaaaaaa

SEQ ID NO: 5527 - DNA, 2820 bp, Homo Sapiens
  NM_031988
gcagagtgttgctgtgtgtgcttgtgatttgtattttatttgatgtaaacgtgaaggcagagtattttctaacactgtaattcaactaggttttgtgtctcctggatctatttttttttcttgttgttctgaggagctgatatacttggaaatattaggtttaagatatgcagatgtccaacttatatacatagtcaagggtttagagtctggagacaggaggctggcaatttcaactagggggcaggtcaggcaagaagcgaaaccctggccttaaaattccaaaagaagcatttgaacaacctcagaccagttccacaccacctcgagatttagactccaaggcttgcatttctattggaaatcagaactttgaggtgaaggcagatgacctggagcctataatggaactgggacgaggtgcgtacggggtggtggagaagatgcggcacgtgcccagcgggcagatcatggcagtgaagcggatccgagccacagtaaatagccaggaacagaaacggctactgatggatttggatatttccatgaggacggtggactgtccattcactgtcaccttttatggcgcactgtttcgggagggtgatatgtggatctgcatggagctcatggatacatcactagataaattctacaaacaagttattgataaaggccagacaattccagaggacatcttagggaaaatagcagtttctattgtaaaagcattagaacatttacatagtaagctgtctgtcattcacagagacgtcaagccttctaatgtactcatcaatgctctcggtcaagtgaagatgtgcgattttggaatcagtggctacttggtggactctgttgctaaaacaattgatgcaggttgcaaaccatacatggcccctgaaagaataaacccagagctcaaccagaagggatacagtgtgaagtctgacatttggagtctgggcatcacgatgattgagttggccatccttcgatttccctatgattcatggggaactccatttcagcagctcaaacaggtggtagaggagccatcgccacaactcccagcagacaagttctctgcagagtttgttgactttacctcacagtgcttaaagaagaattccaaagaacggcctacatacccagagctaatgcaacatccatttttcaccctacatgaatccaaaggaacagatgtggcatcttttgtaaaactgattcttggagactaaaaagcagtggacttaatcggttgaccctactgtggattggtgggtttcggggtgaagcaagttcactacagcatcaatagaaagtcatctttgagataatttaaccctgcctctcagagggttttctctcccaattttctttttactccccctcttaagggggccttggaatctatagtatagaatgaactgtctagatggatgaattatgataaaggcttaggacttcaaaaggtgattaaatatttaatgatgtgtcatatgagtcctcaagcttctcagacttctcttattctttacaaaatgaatgcattggccctgacaaaaaggtgctacggtagtgatgaaattataagtagatttgtagtttgtcccatttattattttaatatttatgtttaagtgcttggttgaaaagattccattttatacaagaagggagattcaaaaaaaaaatataaggttgggttagcaatatttatagggcttttattttttaagttcaattgtgtctgtggtccagaagaaattatttaatatgcatctttgagaatattataaaaatatcaaaaaggagctcttcttgtgaaatgtctgttccagctgttgtgactgctgccatttttggaaacatctgcccaatcctgggtgatcaccacatcttttaggggaagtgacaagatgctctggtcatactctttttcccaactttggaaaacataaaaatcactcatataacagctcaaagagtaaaacatttggttcttctgacacttgtggtatagtattagtggaaagtgatttgtaatatgattttatatccacctacctattcatctacctgtgtgtatgtgtgtgtttgtgtgtctatttggcaattcacaagtcctgccaagtggtttctatgagcatctctgtttggtaaggaggacaattgtcagttttgagggggacatgtgttaaatcacagaaaaaaatggtgccttcttctgcgtttgtccctcctgccatgtgtaagttgtaaggattgcctttgtagttaatgtactctttggctttgtttgtttgttttcttcttcagtgaagcagccttactattcatagaagggctagaataggagaaaatgaaaggtagtgagtaattctttgataagatgaggaaataatgggaaaggttgaattaattcctgggcatggactaccagatgaccacaagttgcgttgaggccgcatctttcttcagcagcgtgcaatagctggctcctctataggagatgagcttcattgggagttcctagcaagttgactaaacagcaaaagttctttctcgtgggtaaatatacccacaggttctatgatttgtagctctaggtttcttgatgatcaaggagtgaagtaattgacagggaaaatatagacctatgataaataaccaggaagcattgcttttggacaaggaagaacagagggttttgattttaaaaagaagaaaaaaaaaccttattttttctttcttggcctcaagttcaatatggagaggattgcttccctgaatcctctcttccttccccttttagag

SEQ ID NO: 5528 - DNA, 8006 bp, Homo Sapiens
  NM_032012
cgcccctcgggggcggctgtggcggaggaacgatggccgacggcggcggccctaaggacgcgccaagcctgcggagctctcccgggccggcgccgcgggtcccgcgcgcggtcgggccgagtggcggtggcggggagaccccgcggaccgcggcgctggcgctgcgcttcgacaagcccattaagcaggccttctacaacaccggggccgtgctgttcgtgtgcctgtgctgcggcgccgcggtgctggtctacttcatcctggaggccttcctgcggccgctgctctgggccgtgctatgcggcacttttctgcaccccttcaagagctcgctgacgcgcctgggccgccactggctgcagcgcctgcaccgcgcgcacacgcccatcgtcctggccgcgctgctcctgccgctctgcttcgtcgactacggcgtcgaggccctgggcgagcaggcgctgcgccgccgccgcctgctcctgctgctcggcgccggcggcccgctcctgtacggcctctactgcctcggcagctacttgggcgtgcaggtgctgctggtgcacgctgccacgctcatctgccgcgggctggactacttcagcagcctgtggatctggacgttggtggttggctatgtgttgactgtttcattcaagtggaatgcaagcactgaacgctacttgagagcagtttcaattcctgtctggattatattgctttttcatttagcatccctggctggctcatggagaattccagtattcctggttattgttttcctgatgtctgtgggtaccctctatgaaaaacagaatggaaaagagtcttctggggcagagttaccagggcaggttatctccatggcagcttctactctggcaaacttggccatctctatcacagggtatgaatcaagcagtgaagaccagccctccactcagcctgcagaagcagtggacaggggagaatccgctccaacgttgtccacctccccttcaccctcctccccttcacccacttccccttcacctactctgggcagacgaaggcctgaaataggaacgtttcttagaaagaagaaaactagtgacatctactttgtgtctctagtttgggccattgtcgtcatgcagatctggttgaacctgtggattgtgcagttgctgccagtgccgattgcagtctggatactcaaaaagcttgtcattcactttggagttgtggatttcctagagaaacgctaccatgtgtggtggggcattatagaaagcttcctgaaggagcggcagggagctctcgcgccttggcccattgtcgggcttggaaaattcttgttaaaagttgatagcaagctctggcactggctaaataagaagatgatcatctggttggagaagatgttagataaaataattagcattttcatcatatttttgttagtgataggaactcttcttttagccctactcctgactgcaaaggtacatcaagagagtgtacacatgattgaagtcacaagtaatttgattaatgaaactctagcaaatcaccctgagtgggcaaattggcttcctgaggctcaggtagtccaaagagccctgaattctgcggctaacaacgtgtatcagtatggacgagaatggataactcacaagctccataaaattctaggagataaggtgaacaatactgctgtaattgaaaagcaagtactagaactttgggacagactgtatcactcttggtttgtaaagaatgtaacacactctggaaggcacaaaggacagaagttgcatgtcagtcgtcagaatagctggctgggagacattctggactggcaggatattgtttcctttgttcacgagaacattgagacatttctttcgatcttggagtctctgtggatcgttatgagccggaatgtgagcctgctgttcaccactgtcactacactcttgaccatcctcttctacagcgggacagcccttctcaattttgtactctctctgataattttcctgaccacactattttatctattaagttccagtgatgagtactacaagccagtgaagtgggtgataagcctgactccactatctcagccaggtccttcttctaatattattggccagtctgtggaagaagctatcagaggggtgtttgatgcttccctcaaaatggctggcttctatggattgtatacctggctgactcatactatgtttggcatcaatattgtcttcataccatcagcattagcagcaatccttggagcagtgccattcctggggacatactgggcagcagtacctgcagttcttgacctgtggctgacacaagggttaggatgcaaggccattttactgttgatttttcatctcttgccaacatactttgtagatactgcaatctactctgacatatcaggaggtggccatccttacctgacaggcttggcagtggccggtggagcatactacctaggcctggaaggagcaatcatcggtcctattcttctctgcatacttgtggttgcttccaatatctatagtgccatgctagtgagtcccacgaattcagttcccacgccaaaccagaccccatggcctgctcagcctcagcggactttccgtgacatttctgaagatctgaaatcttcagtaggttgatgtggtttcctctgcagtgatttttctaggaagttcaaatttgacagcgagttcagctcagctgtggccctctgcccttccagctgtgcctagcaagcaaaacccaggaaagaagcagaagcctcctggccttacatacagaatgcctggacaagagagaacttgctgcgggctgctttgtattttaaaacacagcttgagagttcagagttggtggtttgctcacttaactgttgttaagatggcttgaaaagtttcattttatacactggtaccctggcttgaaatttttccactttggttatctatgttactatattatatatttataaagttattttaagaactctaaactacctgctgttaaaagaatagatggtgtaattttttcctggtttaagaaatgtattgttaaacttttctaagacagtcacttttcaaggaagagggctttcacttttgagtgtgtagttgagtgagcaggaaaaatgaatcttctacccttctcccacaatgtattatacgctctttaagaaataataaatcataagtataagggtggggtggcttatttgatgttcagttttatattataaccctgggagatacaaagactgaagctcttcctcctcttccttttctcttcacgcttctttacactattgccaaattataaaacttggctgaccacgttgaagtgaaatacttattaagctgctatgaatggtaacagtatgataaaattcatgctgttattaggttttctccttccaggtggttgaagtgaaaaatctcaggtgtagcaatactctgatttgttaaatgtatccgtttcattatttggaactctgccaataagttagttttcagcagaattttgtatttatgtagtattttcccatctcttagcacagtgccttgcacatgactctaaatgaatgcttgttgaattgaattgcaactttaaaaatatctcagatatcacaataaccagcatagtgctttacattttacaaagtccttttgcacatactatttcacaagtacatcacatcagctttcatatagctttatattattttacatcagttttacactgatggagaagctaaggttcagaaaagtgaccaactcaaagtcgtaaagtgtagtaggatttggcctcagatctttgactccgttgtgtgcagattctgctgtattagtgttccttctaaatattgtatgcagttttcccagtgttacgagattggtgttgctatccatttgttgtgaatgaagacttgtcctatagtacatgacagggctgagagtggactgtagttcttagctgaaccctttctactgtttaaaacaatcatcaggcctatcctctgctcccaggggaatgtgggagagaaaagggttcttggccaggctgtaggtggtggctcacatctgtaatcccagcactttggaaggctgaggtgggtggattgcttgagcccagggatttgagatcagcctaggcaacatggcaaaaccccatctctacaaaaaaaaaaaaaaaaaaaaaaaaattagctgggcacggtggtgtggctatagtctgagctactcaggaggctgatgtatgaggatcacctgagtccaggaggtcgaggctgcagtgagccaagatggcgccactgcactccagcctgggtgagagagtgagacactgtcccaaggaaaaaaaaaagtgttggggggtagttcttaagcgttgaagatttcctttttggaaagtatttaaaggtagaaatattaataatttttcctaaaacatctccctaagaagtcactgataattataattagtttaaatttattcttacactacttaagaaaaatttcatttagaaaaggctaccatgagatcttttgactatatggagtagactgcatacagatctctttatttctattatgaatattttagcgattataatcagctattccactgagtattagatttggtcactaagtaactcatgtttttctttagtcaatcattcattcattcactaaaacatttgttgagagttggctaaactctagattctgtgccaggcactgtacagggtgatggagatcactcataagaaggcctcttgctcttagccagatcatatgtaatactaaatttaaattttttgcattaaaaggctaaaaaatcatttgtttttgttaattatatactggttgatttatagatgtaattagcacatattcataagagacaaatatatacaatgagttactatacatatacaaagtgattttagctgtataaagtgatattgcaaaaaactacagctaatgtttcttgctgggtaattattagcataaatatcaggttcttagaggtctttaagagaatactttagagctaccaaaattagcagcagtgatgtaatatcaccctgaaataccaggagcagaggtgccccagagtgcttcacagctatgatcaggaaacttgacctgccccattgctacagcaacggcataaggactaggaaggtccactagctggggaggtcttggaaccctccgagccagaaagaagcattccagcatgattcctcagatgcaatgaggaaggtttacagaattttcacagggcaacagagatcaagtggtatgaaaaggtaggagttttaagctcaagtctcaaagataacctacctttacattctcagtcagaatttgacccagaaagaggaagtttcttcaggaacagaccgtacgttgatgaagtagaagtcatttcagtaaaaacggagtacagaacttggtcataatatcttgcattttatagatttattaaagattagtttcaagttcacattcgctattcagttgtaaaccgaatggatgggaggggagaaaatacaagctctccacacaggtatgctcctctcttttctgagagagaaggcatgggattttcagcataaattccatgttatgtgagtgctgtttgagttctgaagttcctatcaatatctgttcctgcaagtgatctctgtaagaccaccttacatgctggtcttagttattgttaaaattgcaaggtttcttcacaccctctttgataagaagtgtttagctggcagagctttcccttgacttctgagtctagtgtgggttggcccatgacagtgggaagaaatccaacatgttacatggagaccttgtatgtaaacaaactctgtagcctttgaaagtggaactgctttttacagttaaagggctgctaaatggcttgcagatgagatcttctggctcaccttgatcttcacatgaacccattgtgacctatctggatttcctaggacctgtagtttccatttgggttatattagtgcctcaggaatgtgtcactactggtcaagcaatactcagaaattcaggctgtgaggggttagattagaggaaagtaatttaggtgagctatccagagctttcaacctcagggtttataggaaaaaaaaacaaaatacaaaaacccttaggacttctcatactctagccctgaccttgcagtctcctctgaggggcctcctaagacccttaaaataatattacaataggactttgagtgtgcatttcacagtggaaatagcctctggctagcattacttccaaatgctagttccagctaaaaacaagtactttttattagtttcttgtctttcaacattctgccatcaaaatatattcattttattaacttaccgattattgggaacctgcaaaaaaaaaaaaaaaaaaaaacacacatgctgtctgcagccactgtttggttatttttgatagtttaagagaattataaatcaagttgttctgtctactagagtcagaaattctgtgctagaatgggacttctaaaattaggtggtcctgtcactttctagagaaagacccaaattcataggtttaagtggcttgtctgacatacacatacagccagttagtaacagaattcagaatagaatagagttcttttttttctgtcagtccgttgttctacttctctttccttttcttcatggttgagcagcttttggcaaaatgtgttccatatagcagtagttccaagagatgttaatagatgtaagaaaaaaagtgtgtgtgtgttgggggtgggggattgcatggtcaattaaaatgaaggaatgctgagtttgtttccttactgtaggacttctaagagttttgaacatgctattacacattgtgaatttataaaaggggacaaacactgtttgaccttagactgcactccccttctttattcctcagagcatctcaaaggactacagggtcctttgagaaacatggcccttgatcaagtttacaactctttgagaagacatccctaatggaaatactgaatggcagatctattactgtggtaccatgtagtgtgtaataaatcttgaagtccagaaagcaagtatatttgctgtttagagctatacttaaggtatagagattcttttccacctgtggtgtgtaaaatcagtattgtgtttaattttgcaggtttttcaaggatcaactaatgtgcaaatacagtggtgatatattgatattacattttaataatgcttttgtatggcactttatagttttcagacaccttttgtaacagccctgtgagacagacaatattatccttattgtacagatgggggggctctggaggctctgaaaagtttttggtgatattcccctaagtttataccacaaaatgatggagccagaatttagttgcagaacttctgactccaagtccagagttctttactagacatctggtttcttactagctttttgctagctttttattttacagtgaaaagtatggaagcaaatcctgataattttggcttattatcaaatatcatttattttttattgcagagacccagcagatgtaactctcattgtagccatcccaaagaaaacccttctttgccctttgcagtgccacttatttaggtaactgaagtgtatttccagtacaatttgattttgaactaagatttgatatagagttgtaattgcttacataactctttgaaaatgtatcatccctgggttctcaggtgaaggaggcaattcaaaagtaaaaaagaatattcgaatacaataaataccctctgttctcacacaaatgctgtttcttagctaacttgctttgacaacctactgatgtaacttctttattaatgtgaaatatttatattttgaaataaaattactagtgttgaatgaatcatgtggtaaacttaaaaaaaaaaa

SEQ ID NO: 5529 - DNA, 715 bp, Homo Sapiens
  NM_032014
tccccacccctcagcgcgctgtggtacgtcccgcgctccgcttggcccaagatggcggcctccgtgtgcagcgggttgctggggccacgggtgctgtcctggagccgagagctgccttgcgcttggcgcgccctgcacacctccccggtctgcgccaagaaccgggcggcccgagtacgcgtaagcaagggggacaagccggtgacctacgaggaggcacacgcgccgcactacatcgcccaccgtaaaggctggctgtcgctgcacacaggtaacctggatggagaggaccatgccgcagagcgaacggtggaggatgttttccttcgcaagttcatgtggggtaccttcccaggctgcctggctgaccagctggttttaaagcgccggggtaaccagttggagatctgtgccgtggtcctgaggcagttgtctccacacaagtactacttcctcgtgggctacagtgaaactttgctgtcctacttttacaaatgtcctgtgcgactccacctccaaactgtgccctcaaaggttgtgtataagtacctctagaacaatccccttttttccatcaagctgtagcctgcagagaatggaaacgtgggaaaggaatggtatgtgggggaaatgcatcccctcagaggactgaggcatagtctctcatctgctattgaataaagaccttctatcttgaaaaaaaaaaaaaaaaaaa

SEQ ID NO: 5530 - DNA, 2803 bp, Homo Sapiens
  NM_032015
acacaagatggcggcgcccagcggagtaggggctgcgcttggggtttgctgaagctggctgcctctcccactccccttttgggtgcaaagcgccgctagcgggaagacgggggccgggcggggacaggggcacctgcgtagctggactgagagcctgcgcccagcttacatcgaccccacccggccccggcccgacccgacgcgacccgatccgatccgatcccattccatccgttcctcgtctcctcccggtctgacccgttgcccggccgtggttcgccacaccaggcatccaaagctgaggtcgctcctacggcctgggctcgccttcgctttagagatgtttggcctcttccctcccaaacagcccatcttcaaaacctggactcttggactggcacctggccacctttccctctaccaagactccacttccgtcttacccacttcttcctcagattcttggtaccccctgggttggagactgctcattttccttccaaattaatcccagaccccctaaaatattgacaaccttgacaaccccccaaccgaggagccagactttgttttggactaacttccatagccctatcatggaggcagtgtacctggtagtgaatgggttgggcctggtgctggacgtgctgaccttggtgttggacctcaacttcctgctggtgtcctccctcctggcttccctggcctggctcctggccttcgtctacaacctgccgcacacggtactgactagtcttctgcacttgggccgcggagtcttgctttcattgctggccttgatcgaagccgtggtccggttcacatgtgggggcttgcaggccttgtgtactctgctgtatagctgctgctctggcctagagagcctaaagctcctggggcacctggcctctcatggggcactgcggagcagggagatactgcaccggggcgtcctcaatgtggtctccagtggccatgctttgctgcgccaggcctgtgacatctgtgccattgccatgagcctggtggcttatgtgatcaacagcctggtcaacatctgcctcatcggcactcagaacctcttttccctggtgctggccctgtgggatgcagtgaccgggcctctgtggaggatgacggacgtagtggctgccttcctagcccacatttccagcagtgctgtggccatggccatcctcctttggacaccctgccaactagccctggagctgctggcctcagctgcccgcctcctggccagctttgtgcttgtcaatctcactggcttggtgttgctagcttgtgtgctggcagtgacggtgactgtgttgcatccggacttcaccctgaggctggctacccaggcactcagccagctccatgcccggccatcctaccaccgtcttcgagaggatgtcatgcggctctctcgcctagcactgggctcagaggcctggcgccgagtctggagccgcagtctgcagctggcgagttggccaaaccggggaggggcacctggagctccccagggtgaccctatgagggtattctcagttaggacccggagacaggacactcttcctgaagcggggcgcagatcagaggcagaagaggaggaggccaggaccatcagagtgacacctgtcaggggccgagagaggctcaatgaggaggagcctccaggtgggcaagacccttggaaattgctgaaggagcaagaggagcggaagaagtgtgtcatctgccaggaccagagcaagacagtgttgctcctgccctgccggcatctgtgcctgtgccaggcctgcactgaaatcctgatgcgccaccccgtctaccaccgcaattgcccgctctgccgccggggcatcctgcagaccctcaatgtctacctctgaagcctccttccctgcctgcccacccctccatgctccacgcaggcactcacgctaggacagcattaacacctcatctccgggtcctggtctgaatcccctcctacccctgtggccatcctgccatacatccaggacattgagttggaagactatgatctgggtgggggcaggataacatggcttctctttacccagtgggtcccttcgatgctgagggtggtgagtatgtcactatgcaagggccctgagactatttgctgtgggctctcctccagcctgcccagggcccacccagatgcctctggggttacccctgtctgcttctggtttttctgttggagatctataggtccttttcctgcctccttcacatttcctccccagcttttgcggccacaacacatcagtgtcatttgggtgttttggcaactcaggggccttcggatgatcttaaacctttgtgttcagccagagcccctgtgccctggtaggcgttggggttagtatctctcgggtgccctcagagccacctctgcctgtgatcgtctgatgaggctccctcccaacctgatccaaaagccagtctcaggagtttacccctgggatgggggatgcatctgcacctgactttggggccacgtgccctgtggcaccccagctcactgggagtctcaggagggataaccggatttctgctctttcccctgtcactcccacatcacacagaaaaatggcattcctctctgtctctccctggcatggagagggcagactgtgcacatttcactagggtccaaatacagaagggcccagggcccaggggcttgcagcttcgtgaggggtctctggcccagtttccaatgaataaagttctcttgacagctctgaaaaaaaaaaaaaaaaaa

SEQ ID NO: 5531 - DNA, 2509 bp, Homo Sapiens
  NM_032023
ctgaagcctggggtcagcaggcgctgcgggcgcagctccggtgcaagcgaggacacgacacatgcagtggcttctggactgcgcgatgactggacgcaagtaacttctaggtctgcagacaagaggaagagaagatgaaggaagactgtctgccgagttctcacgtgcccatcagtgacagcaagtccattcagaagtcggagctcttaggcctgctgaaaacctacaactgctaccatgagggcaagagcttccagctgagacaccgtgaggaagaagggactctgatcatcgaggggctcctcaacattgcctgggggctgaggcggcccatccggctgcagatgcaggatgaccgggagcaggtgcacctcccctccacctcatggatgcccagacggcctagctgccctctaaaggagccatcgccccagaacgggaacatcacagcccaggggccaagcattcagccagtgcacaaggctgagagttccacagacagctcggggcccctggaggaggcagaggaggccccccagctgatgcggaccaagagcgacgccagttgcatgagccagaggaggcccaagtgccgcgcccccggtgaggcccagcgcatccggcgacaccggttctctatcaacggccacttctacaatcataagacctccgtgtttactccagcctatggatccgtgaccaatgtgagggtcaacagcaccatgacaaccctgcaggtgctcaccctgctgctgaacaaatttagggtggaagatggccccagtgagttcgcactctacatcgttcacgagtctggggagcggacaaaattaaaagactgcgagtacccgctgatttccagaatcctgcatgggccatgtgagaagatcgccaggatcttcctgatggaagctgacttgggcgtggaagtcccccatgaagtcgctcagtacattaagtttgaaatgccggtgctggacagttttgttgaaaaattaaaagaagaggaagaaagagaaataatcaaactgaccatgaagttccaagccctgcgtctgacgatgctgcagcgcctggagcagctggtggaggccaagtaactggccaacacctgcctcttccaaagtccccagcagtggcaggtgtacactgagccctggttgctggccccggccggtcacattgactgatggccaccgcctgacgaatcgagtgcctgtgtgtctacctctctgaagcctgagcaccatgattcccacagccagctcttggctccaagatgagcacccacaggaagccgacccaggcctgaggggccaggaacttgctgggtcagatctgtgtggccagccctgtccacaccatgcctctcctgcactggagagcagtgctggcccagcccctgcggcttaggcttcatctgcttgcacattgcctgtcccagagcccctgtgggtccacaagcccctgtcctcttccttcatatgagattcttgtctgccctcatatcacgctgccccacaggaatgctgctgggaaaagcagggcctgccagcaggtatgagatctagcctgctttcagccatcaccttgccacagtgtccccggcttctaagcctccaatatcaccctgtgagcctcgcacagctcagccccaacacagaggtgagaccaggaataaggccacaagtatctcactttctctgcagaaatcaatctttacttcatcagagagacctaaagcgattcttacaaggagcttgctgcaagaaacacggtcattcaatcacattgaggagggtccacatggcattgagagggtgctgcccgctcaatgcccagcagcagctctggaaggcagtgctcagccccatcaccactgtcccgtggatgcctgtgtacctcttgccttttctgggcttgcgtttctctcctctagtgggtggggatgactttcaatgactttcaatacttcccctgaaggaagaatgataaggagaaatgtctgttttgaggaaagggctttgaattccccagatactgaacaatttgtgtttgtgactgatggagaatttcaggaatgaatgagaaagcctttgcgaaactatgcaacagtttacatcagtcatgtgaagtatttgtctaaaacagagcaaactgaagaccaaattattctcctgttgaggtccgtggatggcagatttaaagggaagaaccacaaaggcttgcaaagataggagaggctccatctctaatgcatgtagaagctccttacgggtgcccatcaagagcatagcttggaagccaccatgctgtgcggaactgcgtcagggcaaatgtcacagcaggatttccccaacccagctccatcatcacagacacagagagctgcaggggaggcctgcccactgttttgtcgactctgccctcctctggcagcatagatccttaggtgctcaataaaggtgtgctgtattgaactgaagaagtgagaaaaaaaaaaaaaaaa

SEQ ID NO: 5532 - DNA, 896 bp, Homo Sapiens
  NM_032024
gttgaagaaagaggatctggctgaaagacccgcaactttcacttgttgagaacctttagccagcgccggcgtgcatgtgttttagttttattctttttcccttgcccccaaagccgtggagtacctgctgttgctctcatgcctcttgccaacagtggcatctgctcagtgtagccatcaagaatttgaatgtcaatatctttgccttgaaatgaatggaaaagtatttgtcactcagcggcaatcattcttcaaataaaaggtcactggaaggactgagcgcattcaggagcctggaggaactcatcttggacaacaatcagctgggggacgaccttgtgttgccagggttacccagactgcataccttaaccctcaacaagaaccgaatcactgatttggagaacctgctggatcacttggcagaagtgacaccagctctggagtacctcagtctgctgggcaacgtggcctgtcccaacgagctggtcagcttggaaaaggatgaggaagactacaagagatacagatgctttgttctgtacaagctgcccaacttgaaatttctggatgcccagaaagtaaccagacaagaacgagaggaggcgttggtcagaggagtcttcatgaaggtggtgaagcccaaggcttctagtgaggacgttgccagctccccggagcgccactacacgcccttgccttctgcttccagggaactcaccagtcaccaaggtgtcctggggaagtgtcgctacgtttactatgggaaaaactcagagggcaacaggtttatccgagatgaccagctctgaagccaacttctgtataccttcacccatttcatgaaaataaaatcaaaagggaaatcaaaaataaagaaaacgctaaagaaaaaa

SEQ ID NO: 5533 - DNA, 3894 bp, Homo Sapiens
  NM_032025
ctctttccgggacaacatggcgccgtccacgccgctcttgacagtccgaggatcagaaggactgtacatggtgaatggaccaccacattttacagaaagcacagtgtttccaagggaatctgggaagaattgcaaagtctgtatctttagtaaggatgggaccttgtttgcctggggcaatggagaaaaagtaaatattatcagtgtcactaacaagggactactgcactccttcgacctcctgaaggcagtttgccttgaattctcacccaaaaatactgtcctggcaacgtggcagccttacactacttctaaagatggcacagctgggatacccaacctacaactttatgatgtgaaaactgggacatgtttgaaatctttcatccagaaaaaaatgcaaaattggtgtccatcctggtcagaagatgaaactctttgtgcccgcaatgttaacaatgaagttcacttctttgaaaacaacaattttaacacaattgcaaataaattgcatttgcaaaaaattaatgattttgtattatcacctggaccccaaccatacaaggtggctgtctatgttccaggaagtaaaggtgcaccttcatttgttagattatatcagtaccccaactttgctggacctcatgcagctttagctaataaaagtttctttaaggcagataaagttacaatgctgtggaataaaaaagctactgctgtgttggtaatagctagcacagatgttgacaagacaggagcttcctactatggagaacaaactctacactacattgcaacaaatggagaaagtgctgtagtgcaattaccaaaaaatggccccatttatgatgtagtttggaattctagttctactgagttttgtgctgtatatggttttatgcctgccaaagcgacaattttcaacttgaaatgtgatcctgtatttgactttggaactggtcctcgtaatgcagcctactatagccctcatggacatatattagtattagctggatttggaaatctgaggggacaaatggaagtgtgggatgtgaaaaactacaaacttatttctaaaccggtggcttctgattctacatattttgcttggtgcccggatggtgagcatattttaacagctacatgtgctcccaggttacgggttaataatggatacaaaatttggcattatactggctctatcttgcacaagtatgatgtgccatcaaatgcagaattatggcaggtttcttggcagccatttttggatggaatatttccagcaaaaacaataacttaccaagcagttccaagtgaagtacccaatgaggaacctaaagttgcaacagcttatagacccccagctttaagaaataaaccaatcaccaattccaaattgcatgaagaggaaccacctcagaatatgaaaccacaatcaggaaacgataagccattatcaaaaacagctcttaaaaatcaaaggaagcatgaagctaagaaagctgcaaagcaggaagcaagaagtgacaagagtccagatttggcacctactcctgccccacagagcacaccacgaaacactgtctctcagtcaatttctggggaccctgagatagacaaaaaaatcaagaacctaaagaagaaactgaaagcaatcgaacaactgaaagaacaagcagcaactggaaaacagctagaaaaaaatcagttggagaaaattcagaaagaaacagcccttctccaggagctggaagatttggaattgggtatttaaagattcacggaaagcaagttgatgaccagaaatcagtgcaaacacatcttctgttaaacccattggtatacacagaatattcctgtgcccacacttaatgtcaatctataattttaaccatttatccaagattctactaagtgtaaaattatttaataatgtctattaaattgatatttatatcttgcatcctatatcatgtcaatatgtgatatagaaaagagatacgtgaattttttagctaagcttgacagattgaaagacaagtgtcatttttttttgtagagggtgatatataccatgtaaatgaataaagacattttaaatttaatcactgtttttattataagttccttagttcagatatcctttattaatttataagatgtgtaaaactacttaattctcacaagactctatgaagtaattcttttaatctctattttataaatgaaaaaactaaggccataaatttaagaaatttgtcagtgtctcaaagctaggaaatggccatctaatcccagagcctatgctttaggtcactatgatatatactactcctgtatcctcaagtaatgtatcatttagtaacactaagcaccctgcttagttttcatggatactgccaaattgccctatctcaagctttatacttgcaccatttaaagttttccacactgttggcaatatcagaagtgataaggctttgaaatgttcgccactttgataaagaggaaatgattgtttgttactgttatatacatgtatttttatcagagatgggttatgtacttttccacgtttgatagttggttgtatttctttagtgaattgatttttcttttcctttgcccatttttctgtttggatgtttgactttcttcttaatttgtaagagtatcctatgtagtaacaaaatccttttttaaaaatttttaaagaaaaagtatacacacaggacttttttttttctaattcaaaaaatacaaaggcatgcaatgaaaattaagtctgttccactaccacattttccagttttttgtgtatctttctaatgatagataccatatgagtattcaaatatacatacacatacacttaaaaaaaaaagatggcatatactaactgttctgtttggggctttttggtggtggtgtttgtttgacagggtctcactctgcctcccaggttggagtgcaccttgaactcctggactcaagtgatccttcacctcctccttccaagtatctgacactacaggcttgcatcactatgcccagcttatactcaccatagtggttctgtactcccttaaaatattctggaggccaggcatgctggctcacacctgtaatcccagcaccttgggaggccaaggtgggtggatcacctgaggtcaggagttcaagaccagcctgatcaacatggtgaaaccccatctctactaaaaatacaaaagtatccaggcgtggtagcacatacctgtaatcccagctacttgggaggctgaggtaggaaaattgtttgaacccggcagacagaggttgcagtgagccgacatcgtgccattgcactccaagcctgggcaacaagagtgaaaccgtctcacacacacacaaaaaaaaatattttggagctccttctatatgagtctctctctcttatctctctcaggatgtgtgtatgtgtttgtttctctggaaaaccctgactaatacagattagctatgtattaggtaatacataatgcctaatacataactaatatatggacaggaagttaatagactgactgtgccaccttaaaactcgtatgttgaagccctaacctccaacgtggtggtattgggagatgggccttttggaaggtaagtgtgtttgaatgaggtgaagaggttggggacttcgtgatgggattattgtccttacaagaaaagacaccagagagcttgttctgtctctttgggccatgtgaagacatggtgagaaagcagccagctgtaagccagagagtcctcaccagaacctaaccatgctggtgatatcctcatctcagacttctaacctccagaactgtgagaaaataaacttctttgtttaaaccaaaaaaaaaaaaaaaa

SEQ ID NO: 5534 - DNA, 1250 bp, Homo Sapiens
  NM_032027
agcgggtgaagcacctgattgcctaaaccactcgtttccttcctccagcactcaaagattaaccttagctccttccaagggttcgtgggggaaaattcgcctcgagggactgggtacatgcatattttaaaagggtctcccaatgtgattccacgggctcacgggcagaagaacacgcgaagagacggaactggcctctatcctatgcgaggtccctttaagaacctcgccctgttgcccttctccctcccgctcctgggcggaggcggaagcggaagtggcgagaaagtgtcggtctccaagatggcggccgcctggccgtctggtccgtctgctccggaggccgtgacggccagactcgttggtgtcctgtggttcgtctcagtcactacaggaccctggggggctgttgccacctccgccgggggcgaggagtcgcttaagtgcgaggacctcaaagtgggacaatatatttgtaaagatccaaaaataaatgacgctacgcaagaaccagttaactgtacaaactacacagctcatgtttcctgttttccagcacccaacataacttgtaaggattccagtggcaatgaaacacattttactgggaacgaagttggttttttcaagcccatatcttgccgaaatgtaaatggctattcctacaaagtggcagtcgcattgtctctttttcttggatggttgggagcagatcgattttaccttggataccctgctttgggtttgttaaagttttgcactgtagggttttgtggaattgggagcctaattgatttcattcttatttcaatgcagattgttggaccttcagatggaagtagttacattatagattactatggaaccagacttacaagactgagtattactaatgaaacatttagaaaaacgcaattatatccataaatattttttaaaagaaacagatttgagcctccttgattttaatagagaacttctagtgtatggatttaaagatttctctttttcattcatataccattttatgagttctgtataattttttgtggtttttgttttgttgagttaaagtatattattgtgagatttatttaataggacttcctttgaaagctgtataatagtgtttctcgggcttctgtctctatgagagatagcttattactctgatactctttaatcttttacaaaggcaagttgccacttgtcatttttgtttctgaaaaataaaagtataacttattcac

SEQ ID NO: 5535 - DNA, 469 bp, Homo Sapiens
  NM_032036
acaccccaagaacgctgtcatttcctgggccaagttgggacccggacggcctcaccatgatgaaacgggcagctgctgctgcagtgggaggagccctggcagtgggggctgtgcccgtggtgctcagtgccatgggcttcactggggcaggaatcgccgcgtcctccatagcagccaagatgatgtccgcagcagccattgccaacgggggtggtgtttctgcggggagcctggtggctactctgcagtccgtgggggcagctggactctccacatcatccaacatcctcctggcctctgttgggtcagtgttgggggcctgcttggggaattcaccttcttcttctctcccagctgaacccgaggctaaagaagatgaggcaagagaaaatgtaccccaaggtgaacctccaaaacccccactcaagtcagagaaacatgaggaataaaggtcacatgcagatgcaaa

SEQ ID NO: 5536 - DNA, 2230 bp, Homo Sapiens
  NM_032038
gtcacatgaccggctttaagcaacatggcggctgccgtggtgcagcgcccgggctgagcgacagcaagtgcagcgggctcctaccccgggtgaggggtggcctccgcgtgggatcgtgccctcttcagcccgctcctgtccccgacatcacgtgtattccgcacgtcccctccgcgctgtgtgtctactgagacggggaggcgtgacagggcccgggtcccttctcagtggtgctctgtgcttcagggcaagctccccgtctccgggcgcacttccctcgcctgtgttcggtccatcctcctttctccagcctcctcccctcgcaggtgggatcgtcggtgggaccggagcgcgggcgggcgcggccccccgggaccatggccgggtccgacaccgcgcccttcctcagccaggcggatgacccggacgacgggccagtgcctggcaccccggggttgccagggtccacggggaacccgaagtccgaggagcccgaggtcccggaccaggaggggctgcagcgcatcaccggcctgtctcccggccgttcggctctcatagtggcggtgctgtgctacatcaatctcctgaactacatggaccgcttcaccgtggctggcgtccttcccgacatcgagcagttcttcaacatcggggacagtagctctgggctcatccagaccgtgttcatctccagttacatggtgttggcacctgtgtttggctacctgggtgacaggtacaatcggaagtatctcatgtgcgggggcattgccttctggtccctggtgacactggggtcatccttcatccccggagagcatttctggctgctcctcctgacccggggcctggtgggggtcggggaggccagttattccaccatcgcgcccactctcattgccgacctctttgtggccgaccagcggagccggatgctcagcatcttctactttgccattccggtgggcagtggtctgggctacattgcaggctccaaagtgaaggatatggctggagactggcactgggctctgagggtgacaccgggtctaggagtggtggccgttctgctgctgttcctggtagtgcgggagccgccaaggggagccgtggagcgccactcagatttgccacccctgaaccccacctcgtggtgggcagatctgagggctctggcaagaaatcctagtttcgtcctgtcttccctgggcttcactgctgtggcctttgtcacgggctccctggctctgtgggctccggcattcctgctgcgttcccgcgtggtccttggggagaccccaccctgccttcccggagactcctgctcttcctctgacagtctcatctttggactcatcacctgcctgaccggagtcctgggtgtgggcctgggtgtggagatcagccgccggctccgccactccaacccccgggctgatcccctggtctgtgccactggcctcctgggctctgcacccttcctcttcctgtcccttgcctgcgcccgtggtagcatcgtggccacttatattttcatcttcattggagagaccctcctgtccatgaactgggccatcgtggccgacattctgctgtacgtggtgatccctacccgacgctccaccgccgaggccttccagatcgtgctgtcccacctgctgggtgatgctgggagcccctacctcattggcctgatctctgaccgcctgcgccggaactggcccccctccttcttgtccgagttccgggctctgcagttctcgctcatgctctgcgcgtttgttggggcactgggcggcgcagccttcctgggcaccgccatcttcattgaggccgaccgccggcgggcacagctgcacgtgcagggcctgctgcacgaagcagggtccacagacgaccggattgtggtgccccagcggggccgctccacccgcgtgcccgtggccagtgtgctcatctgagaggctgccgctcacctacctgcacatctgccacagctggccctgggcccaccccacgaagggcctgggcctaaccccttggcctggcccagcttccagagggaccctgggccgtgtgccagctcccagacactacctgggtagctcaggggaggaggtgggggtccaggagggggatccctctccacaggggcagccccaagggctcggtgctatttgtaacggaataaaatttgtagccagaccccaaaaaaaaaaaaaaaaaa

SEQ ID NO: 5537 - DNA, 3735 bp, Homo Sapiens
  NM_032041
agtcacaacttcgggggttgaggttgtcaaggagctgtccgtgatggttctatggtgtgtgcgtacacacatactctctctctcacacacacacaccacagtgacagatgacctattgaaataatttcagagccggtctgtggttgctacgacaaccaatgatctcttggctttcatctggccatgtgacagggactttgacgtcagctagaggcagagtctgtggctgagtccacacagtcaaaggcttgtgagaatctggtggatgctggaccttgctgctgctgctactgctgtttccaggggctgcagagcatggactgttaaatcttgcacttcttctgagtgagctgaattcttgccgccaggatggggaaacagaacagcaagctgcgcccggaggtcatgcaggacttgctggaaagcacagactttacagagcatgagatccaggaatggtataaaggcttcttgagagactgccccagtggacatttgtcaatggaagagtttaagaaaatatatgggaactttttcccttatggggatgcttccaaatttgcagagcatgtcttccgcaccttcgatgcaaatggagatgggacaatagactttagagaattcatcatcgccttgagtgtaacttcgagggggaagctggagcagaagctgaaatgggccttcagcatgtacgacctggacggaaatggctatatcagcaaggcagagatgctagagatcgtgcaggcaatctataagatggtttcctctgtaatgaaaatgcctgaagatgagtcaaccccagagaaaagaacagaaaagatcttccgccagatggacaccaatagagacggaaaactctccctggaagagttcatccgaggagccaaaagcgacccgtccattgtgcgcctcctgcagtgcgacccgagcagtgccggccagttctgagccctgcgcccaccaatcgaattgtagagctgcttgtgttcccttttgattcttctttttaacaatttttttttttttttgccaaacaatatcaatggtgatgccgtcccctgtgcggtctgatgcgccttcctccgtgacgccttcagcttcttttgtcgtggatgcttcgtgggaatgcccagagccccagtgtgcttgtggagagcatggacagacttcgtggtgttcattgtttgatgatttttaatcgttactattatttttttttattctaatgtctctgttctaaaacgtaagactcgggggttggggcaaaagaagggaaacccatccagtcctgtgattctattgcaagcttcaaggggcttttgtttgaaagacaaaactccccacctgaatctgttgtcacacgtgccgtaggggtgatggatggcaccggatgctggattccccaagaacaagttaccctctggggtgaggctattccagcgagctgggacatttccccatgggggcccactcccctctcttccccagcaggctgtagtttctaagctgtgaacatttcaagataaattaacagaggagaggaaaaagatggctcagctattttttcacaggtttacactagttgagctaatatgcgtgtctttggaaattaaacacaaatggtaacatattccaaaaccagacccatcttgttgcctattgtgataaaataaaaagacggctgtatataacatattgggtaatgcagaccaaattaagtgttttgccttgtttaaatgaaatgcatgtttagtgagcactaatacaatcttattccagaagactgtttttagtagcttattgtgaagtaagacaactataatgaatgtctgtcttgtttggaagtcatatctgtctttgcacaaatgtaccaatcgacaagtatattttatatattccataaaaatacaaagtaaccctgactagggcccaactttaattttgaatgcatttccagagtggccatgcctagagggcagatgcagagcaggtggtagtgggacaggacaattggagcacaggaatgttaacatgtatgacaggggaccagtagggtggtttccctctcaggcccagcagcccattgacagcattagactggcggcatggtgcttttctgagcagatcaatactctgcagactcgaaaaaacatcacatacattcttggaacttcccagtggtttaatctatgtgcatggttagggagccaggtctggaatattcagtttccctgcccctgttaaagaatcagaggttgggcagtcatcaaattcatcataaagacatgggcaagtgtgtctgtggtttccaaggcccccctatggagaatccaaaagtattttccattgccgtgctctttgaatgcagacttctatttccagaagtgacagcacaagtctgagttgctgtttggtctggtgacctcagacacactaatttgaattgaaagctaagagtaaaaatttgctggttacaggcgagtcatactcttgcaagtagttagcaaagggaggcccaaattctcaaggttgttgatggggaacttgccactaagagaaggcagagaggtccctagtgggtatatttgctgccaagccacttgccaaagaagaggaaccacagaaagagagacatcatgaccaggagaaaaatgtgactagacatgctaacctccaggtttttatatatgacttgagtctgctgtaattggcagcagaaatccaaatttgtatggtagaccaaaaagaaccaaatccatagggtgaaattttgagacctagactctgtaaaaataatcctagtcttcctccaggggtcagttcctcacagtggttctgtaccaaaacttgccaaattcctccatggccaagtgttaaaatctgtgtttggaaaatagcgaattaacctaagacacagaaggcagactgggtgaggagacctagcatgccctattggcagtgctcaggagctgcatcccacttttccctgctctgaatcgaagtcctagttccttcctttgattctcctttggtaggtggaatcagttaatgttttgagaaacctgcctgggctctgcccttagtcatgacatctcgctgagccagacccactctgttccttggaacctagagctggagtgaggagtagaggtctccggctattccagaaagaaaagtgagccacatgcaggctgatgaatgccgacacttccagaatgtatagaaatagtccctgtcctggcctgccactgaccctgtctgtattttctcggaggttgtttttctccttctccttcccaggaaggtctttgtatgtcgaatccagtgcactcaagtttggccaagggactccacagcacccagaagactgcatgcctcaaggtttatgtcactcctctgctgggctgttcattgtcattgctgtgttcagggacctttggaaataaaacctgttctgtcccaaataaaaccagcctgtgatgttcaagggactggaataaagtggcttacgacctgaaggattctacagagtgctcaactgttcatacatcattcagagtgggagggagctgggggtgctgtcccatcccatctgtatgcccacggtggatttaataatatataatttataaatcatagcctatggagtggcccgtaaatcagttgactgtgtagctcttgcctggcattaaagcatgtttttggtttaacatgaaaaaaaaaaaaaaaaaa

SEQ ID NO: 5538 - DNA, 4720 bp, Homo Sapiens
  NM_032042
gctgccgtcaagtgcgtaatgacgtatcaatctcctgaagaccccggaagtgcaactcgaacttggtcggggcgcggatcccgagagggaaagtcataacaaccgcacgagggagttcgactggcgaactggaaggccacgcctcctcccgcctgccccctcagccctgtggctgggggcagagctcagactgtcttctgaagattgatgtctatttccttgagctctttaattttgttgccaatttggataaacatggcacaaatccagcagggaggtccagatgaaaaagaaaagactaccgcactgaaagatttattatctaggatagatttggatgaactaatgaaaaaagatgaaccgcctcttgattttcctgataccctggaaggatttgaatatgcttttaatgaaaagggacagttaagacacataaaaactggggaaccatttgtttttaactaccgggaagatttacacagatggaaccagaaaagatacgaggctctaggagagatcatcacgaagtatgtatatgagctcctggaaaaggattgtaatttgaaaaaagtatctattccagtagatgccactgagagtgaaccaaagagttttatctttatgagtgaggatgctttgacaaatccacagaaactgatggttttaattcatggtagtggtgttgtcagggcagggcagtgggctagaagacttattataaatgaagatctggacagtggcacacagataccgtttattaaaagagctgtggctgaaggatatggagtaatagtactaaatcccaatgaaaactatattgaagtagaaaagccgaagatacacgtacagtcatcatctgatagttcagatgaaccagcagaaaaacgggaaagaaaagataaagtttctaaagaaacaaagaagcgacgtgatttctatgagaagtatcgtaacccccaaagagaaaaagaaatgatgcaattgtatatcagagaaaatggttctcctgaagaacatgcaatctatgtttgggatcatttcatagctcaggctgctgctgagaatgtgtttttcgttgctcacagctatggaggacttgcttttgttgaactgatgattcaacgagaagccgatgtaaaaaataaggtaactgctgtggcattgacagactctgttcacaatgtgtggcatcaagaagctggcaaaacgattcgagaatggatgagagagaactgttgtaattgggtctctagctcagaaccattagacacatcagtggagtccatgctacctgattgcccccgggtctcagcaggcaccgaccgtcacgagctaacttcctggaagagctttccgtctattttcaaattctttaccgaagcctcagaggccaagaccagctccctgaagccggctgtgacgcgccgctcccaccgcatcaagcacgaagagctgtaagaggagcgagcgcgacgggggaggccgccctggcgcacccacccgcacgcctcctcactgcttgtgtcgagcggactcccagcccctcattagattgttttcttcccagagcccagggtcgtgatatatacatctaaatagcgttttgcattatttctagatgagtgcaactgtcaaagcaatatgggttcactggtcgtgcttcctgcgggctgagcgcgggctgagcgctgccagtcagcgctcacattaaggctgacagcgccctgcctggctcggccggcgaagctctaattgccctgaaggagaccgcgcgggcgctgcgggtccggcggcgtcggcgcggtcctagcgcccgccgtagcggagccgctgctgcttccccctccttaatcatgtccatctttccccgctctcaactggagcaaacttctattccagacttcagatttccattttcactaggtttttccctgagggcatcttattacccacctctttttttttttttttaaggaagttccacacacactccaaagccgatttcaaattcagaacctgaatgccatgatgtaccatgtagtttggggaatgcaaattgttctctccctgttttcatttcgggaccagaaaaaaaaacaactctgcataaaaatctataaagtactgaatccgcattactgctgaaaatccttttgccagctaattgtgagagtttacacaagtctctgatttcagaagagactgttaaaaccaaaacaatgatgggcagctcttttaagtgtaggtgtgaaggtcccattttcaatggaatttccaactgttatcactgggattgactttactttttaaacacataatgtgtactgtgtggcattgtaatttagatataacacacttaagttttgctttttaaatctctctgtggagaaaggttgttgttaatcctttccagaatgatctattctgagctttcctggagttaggcccttctagggagagaatttttttattgtcatcaggaaacgaaacctttgtgctctgcagcctttttcttctgaaaggctaagtggggctaaaattatccttttagttttctgctttaacaagaagagaaggacttggtgtgaaagaatttcttctctcagtccaatggtataatttttagcactccgcttcctctgtagggtttagccctacagtttgaacaattattttaatccagctaagatgtggccaacactgtgaaatacaggagatgttaaggttttgctgacttttagattaaaatcttaaaatttcacattatattttaattacttgaaaagtttaattacctagtaaagattgtttctaatagatgagaacataaatttaatagttttcatccttttttaaagtgtgtgcaacaattaatatgcctgccttatttgaggacatgataaaatgtacccaaaatgacttcgaactgtctaatgcctcagaaaagtaacttaaaatcaaccacttcgtgcttaaatgtttttatattatgaaccgatttcaacaagttttaaagctgttaatatctcattgctgtgtttgacatacaagtacattcattggttctatagtcttaatgatgacaaattaaagatgttttttcagtgctcaggtatgcatatattttcgtgttacttaagcaaaatcaactatataggaggaaaaatcaaaatggcattttattcagctaccagatggcttaaaatgagtaaaccccaacaacatcaagcacatttgtctgtgatattgaccctttttatccaatcattactattttagaagtagtggtgaactgtgtaaaataatggtatcttcagcagtgttccggaatcttagttgagggacaaacattccttccagtgagagattcaagaattgatgtgaattgaatatatttttcaaggtattataaattgtgttgtgttttcagtataagaaaatgttgacaggaaacaattttatagcatttataaaaaaccaacacttgtgcaatgctaaattggcgaagcttctgcacctgaattagagcacaataaatatgctgtttataaaccaaatcactgctattccttctctgaaatcatctctcctctttttaaacctttacttatagctagaataaatcactatttaattgcctctaatactttaaaactactggatggttaggcctggtttaactatttatggagagctatttgcaaacttaagttgtgtaaatgtaatttctacttgtgaatctgagctgtagcagcccagagggagctaggcaaactattccagaccaccaactgataagtgatcagattctttgtaatgtaggattttttaacctgttgattatgggtttgttgatataaatgtaataatgttcacctcgattttcctggagtaacaaccagcgttggtagtagcccacctgcatgaggacggccagtgttaacaatatttttgttctgatcttcttccccatttttgtttcctcaaacaggtttttaggagagtggagatttaaagtcaggatgtggcctttttattttaattatatacttaattcttagaacaagtagaatgggaaaggagtgactgataaatctaagattcaaaatagtcccgtcgaaacttaaaggccagattattgctttggagctttctataggtactagccatcccgtcgttaaatgttttcatggatatttgaaaagaagaccatgtacctttaataactgttcttttctcgagtttctgcctcgtgctttgacctggattgcattattattgtttatgcgaagtaaaaaaaaaaaaggaaagcacaagcttttcctgtatattatatttccatttccattttaaaataaaaacaattttcccaacaacagcggtgttattattcttgctcagaagaattcttgcttattcaccaattgcatagagattttttaaagcaaaaacataaaaggaaggatgagacagcatccgtcaatattttaaaccttctggctactttttatttctgttagtattgctgtaaggtaatatcctaactttagttgagtcactatttggcttgcaccttttacaaagctaacatttctaagacagttgtttttaatatctaaaatatctccttagcaaggaaatctgaacaacctatcaattaaattgttgttttataaaatacacttgaatatgccataaataaatgtgttttccaagagga

SEQ ID NO: 5539 - DNA, 2759 bp, Homo Sapiens
  NM_032045
cgcgctgccccctttaccccgggccgcgccccggggccccgcactgacggcccatggcgccgccagccgcccgcctcgccctgctctccgccgcggcgctcacgctggcggcccggcccgcgcctagccccggcctcggccccggacccgagtgtttcacagccaatggtgcggattataggggaacacagaactggacagcactacaaggcgggaagccatgtctgttttggaacgagactttccagcatccatacaacactctgaaataccccaacggggaggggggcctgggtgagcacaactattgcagaaatccagatggagacgtgagcccctggtgctatgtggcagagcacgaggatggtgtctactggaagtactgtgagatacctgcttgccagatgcctggaaaccttggctgctacaaggatcatggaaacccacctcctctaactggcaccagtaaaacgtccaacaaactcaccatacaaacttgcatcagtttttgtcggagtcagaggttcaagtttgctgggatggagtcaggctatgcttgcttctgtggaaacaatcctgattactggaagtacggggaggcagccagtaccgaatgcaacagcgtctgcttcggggatcacacccaaccctgtggtggcgatggcaggatcatcctctttgatactctcgtgggcgcctgcggtgggaactactcagccatgtcttctgtggtctattcccctgacttccccgacacctatgccacggggagggtctgctactggaccatccgggttccgggggcctcccacatccacttcagcttccccctatttgacatcagggactcggcggacatggtggagcttctggatggctacacccaccgtgtcctagcccgcttccacgggaggagccgcccacctctgtccttcaacgtctctctggacttcgtcatcttgtatttcttctctgatcgcatcaatcaggcccagggatttgctgttttataccaagccgtcaaggaagaactgccacaggagaggcccgctgtcaaccagacggtggccgaggtgatcacggagcaggccaacctcagtgtcagcgctgcccggtcctccaaagtcctctatgtcatcaccaccagccccagccacccacctcagactgtcccaggtagcaattcctgggcgccacccatgggggctggaagccacagagttgaaggatggacagtctatggtctggcaactctcctcatcctcacagtcacagccattgtagcaaagatacttctgcacgtcacattcaaatcccatcgtgttcctgcttcaggggaccttagggattgtcatcaaccagggacttcgggggaaatctggagcattttttacaagccttccacttcaatttccatctttaagaagaaactcaagggtcagagtcaacaagatgaccgcaatccccttgcaattcaggactcggaagtgacatcactcatctggtctcaggggcagcccagaagtatctgactgtagacacaactaggctccgtgggcatatctgggtggcaatttcagagggcagaggggacaccttcattgcctctcctcgcacagaaatggtgggctctctctggcccagcgtggtggttcatgcctgtaataccagcgttttgggaggctgagatgggaggattgcttgagcccaggaggtcgaggctgcagtgagctatgatcacaccaccacactccagcctgagcagcagagcgggacctcgtctctaagaatagaaagaaagaaagagaaacggtgtcctccgcacagccggtcagaactgtgtgactcacttgaggcaggaccgagagtgacatccagttgcacctttctcacctactttgggacctttgggggtgagttcccctttgtcctctcgtggaaacagcacacagcaagcaaccacaaaaccagagcggaaggagggacttcccaccggcatccggccccagtgccatgttttatcatctggaacggttgtgaagctttgtgtgacttgctcaggatcagcagtcaccatggtctaatcccaagagggactcgtcacccagagacctcaaaaggccccaggcctactgtggttttttctgagaggctcccagaaccaagtggcacgttggtttcctgtgcgtctgtgtctttgtgcctgtatctcgctgggggacttcacaggaagcaggatttgggcattcctgaagctcccagctggacaccactcctgagcgccacatcccatgatcacttcaaccacaggcctttgactttgccacatggcaaggcacccagcagaagatgaggatgacgggtgatgctagatggatgtgtacctggtggatggcccacgcacgaagactcaagaccctcaggactggccatataatctgcaaggtccagtatgaaataagaataagcagcccacacaactgggcatagtggttcatgcctgtaatcccagcactttgggaggctgaggagggtggatcacttgaggccaggaattcgagaccagcctggccaacatggcgaaaacccatctctactaaaaatacaaaaattagttgggcatggtggcacacacctgtaatcccagctactcggaggctgaggcacaagaattgcttgaacctgggaggcggaggttgcagtgagctgagataacgccactgcactccagtgtaggcaacagagtgagaccctgtctc

SEQ ID NO: 5540 - DNA, 3324 bp, Homo Sapiens
  NM_032046
cgcccgggcaggttgagaagccaggggccaagatggatcttctcctcgacatcagctaagcctggaggactcttcccctcagagaccatggagagggacagccacgggaatgcatctccagcaagaacaccttcagctggagcatctccagcccaggcatctccagctgggacacctccaggccgggcatctccagcccaggcatctccagcccaggcatctccagctgggacacctccgggccgggcatctccagcccaggcatctccagctggtacacctccaggccgggcatctccaggccgggcatctccagcccaggcatctccagcccaggcatctccagcccaggcatctccagcccgggcatctccggctctggcatcactttccaggtcctcatccggcaggtcatcatccgccaggtcagcctcggtgacaacctccccaaccagagtgtaccttgttagagcaacaccagtgggggctgtacccatccgatcatctcctgccaggtcagcaccagcaaccagggccaccagggagagcccagtccagttctggcagggccacacagggatcaggtacaaggagcagagggagagctgtcccaagcacgctgttcgctgtgacggggtggtggactgcaagctgaagagtgacgagctgggctgcgtgaggtttgactgggacaagtctctgcttaaaatctactctgggtcctcccatcagtggcttcccatctgtagcagcaactggaatgactcctactcagagaagacctgccagcagctgggtttcgagagtgctcaccggacaaccgaggttgcccacagggattttgccaacagcttctcaatcttgagatacaactccaccatccaggaaagcctccacaggtctgaatgcccttcccagcggtatatctccctccagtgttcccactgcggactgagggccatgaccgggcggatcgtgggaggggcgctggcctcggatagcaagtggccttggcaagtgagtctgcacttcggcaccacccacatctgtggaggcacgctcattgacgcccagtgggtgctcactgccgcccactgcttcttcgtgacccgggagaaggtcctggagggctggaaggtgtacgcgggcaccagcaacctgcaccagttgcctgaggcagcctccattgccgagatcatcatcaacagcaattacaccgatgaggaggacgactatgacatcgccctcatgcggctgtccaagcccctgaccctgtccgctcacatccaccctgcttgcctccccatgcatggacagacctttagcctcaatgagacctgctggatcacaggctttggcaagaccagggagacagatgacaagacatcccccttcctccgggaggtgcaggtcaatctcatcgacttcaagaaatgcaatgactacttggtctatgacagttaccttaccccaaggatgatgtgtgctggggaccttcgtgggggcagagactcctgccagggagacagcggggggcctcttgtctgtgagcagaacaaccgctggtacctggcaggtgtcaccagctggggcacaggctgtggccagagaaacaaacctggtgtgtacaccaaagtgacagaagttcttccctggatttacagcaagatggagagcgaggtgcgattcagaaaatcctaaccagctggcctgctgctctgcacagcaccggctgctgtgaagactctggccatggtgactggccatgtgtggcatcatctgggctaatggccaccgggcaccatcagactcccacctccactgtctgctgcctctgtgtgtgtgtgtgtgtgtgtgtgtgtgcatatgtgtgcattgccactctcccaagtttttcagaaaccagcagagctgtcaactcttctcaaaatcccaggctggaaattacctggagacaagagttgagtaccgtggatgttcctacaggagtgtccatagatggatggaggaggtggagcccagagcccaaggaagagctgggaattcttgcttctctgaccctcacttacagactagcccagtgtgggcagatgccagcggcccaggtggcgccattgctgtcctgggatggatcgtgggttttggtggatgcagcttcccagggcctggaccgtcttcggtgaaaagctgctcccgttggctttatgagcatcaagtcctcacccagaccccctgctggtgccgtggatgtcaccagtcggactgtgctgtggctaaccaggctgacaactgagatgaggattcactgtactcatttggtcacaagctgctggggcgggttttattttattttatttttatatttaagaaatgaaaatacgggtatttttaaagattctccaaaaagtccagaagccttgagagctggcatcaatcagcccaagacccccaggggattcatgggaaatgtcgtattttagagtcctacagaatatttctggcctcaaggaactggatgaagagactggacaaagtccccaggatgggcatcccccaagtcactacagcatctggagcccctaggagatactcagggaagcaaatccttgtttgggctggcaagcaaatccgacacgacgaggtccacaaactgtttctgcatcccagggctctgacgaaggcgttaagaaacagatgctgttcccgcgtaggctcccaggggccccagggaggtccaggtggactgcctctctcattcccaggagctgtcctgggactttgggatttcttctcagctttctccacctttcagtttctcagttgtttcagaaacatagcaatgacataaaaactgctatggagagaaagctaacatggtcccatgccttccaggcagccctgctgaaggatctaagttggccctgttcctgcaaatcatcaacgtgcctggactcgccagctaaaagcctgggccttccccagccttttttctggggcacctattcctctgccagtcctgctcccctcaccttccttgggcccgtcagagtcttttgtggtgctgtgcttctcagaggcaggatccaagcagatcagcccagcctagcccagctcaggcaggccatggccgctcaagggaaagactgccccagaagagcaagctggagaggctgggcaggggctgatggggctgggtacactggggaatgttagcaagactgggaaggaggccacattcctgtctgcagcagcccccagcgatggtcttcagcaataaaagttgtgtgacctaaaaaaaaaaaaaaaaaaaaaaaaaaaaaaaaa

SEQ ID NO: 5541 - DNA, 4131 bp, Homo Sapiens
  NM_032047
atcccgcccgcatacagcccgcatcccgccggggaagcgagcccagtccagcgctgcccgtccagtcctcgcccaagatttaaagcccgcaagttttgttcttgagaccagcgactttagctccgatgcgggaaggaaagccgacctccgatttggacatttaaagagctgggcttgaacttcgtgagtttcgctctaaactgcccttgaaatgaagctggacttggaggtggcatggaatattcacatgggagagccgcatgaggccgcccaccacgcttcctgaaggatgcccgtgtggaagaattttgacgtgccagtgtcctcgttctacagggtgttccattcttccgcaatctcagaaaaatgggactaaaagaaactattttgtaaaataagaagacttccatttttaatgaccaacatgtattaagatggacacctactctacgaaacacgaagttctatggtctcgaagaagcccgtgcctgtttaaaactgatcctaactaaaaacagacttgagtggatatgagaatgttggttagtggcagaagagtcaaaaaatggcagttaattattcagttatttgctacttgttttttagcgagcctcatgtttttttgggaaccaatcgataatcacattgtgagccatatgaagtcatattcttacagatacctcataaatagctatgactttgtgaatgataccctgtctcttaagcacacctcagcggggcctcgctaccaatacttgattaaccacaaggaaaagtgtcaagctcaagacgtcctccttttactgtttgtaaaaactgctcctgaaaactatgatcgacgttccggaattagaaggacgtggggcaatgaaaattatgttcggtctcagctgaatgccaacatcaaaactctgtttgccttaggaactcctaatccactggagggagaagaactacaaagaaaactggcttgggaagatcaaaggtacaatgatataattcagcaagactttgttgattctttctacaatcttactctgaaattacttatgcagttcagttgggcaaatacctattgtccacatgccaaatttcttatgactgctgatgatgacatatttattcacatgccaaatctgattgagtaccttcaaagtttagaacaaattggtgttcaagacttttggattggtcgtgttcatcgtggtgcccctcccattagagataaaagcagcaaatactacgtgtcctatgaaatgtaccagtggccagcttaccctgactacacagccggagctgcctatgtaatctccggtgatgtagctgccaaagtctatgaggcatcacagacactaaattcaagtctttacatagacgatgtgttcatgggcctctgtgccaataaaatagggatagtaccgcaggaccatgtgtttttttctggagagggtaaaactccttatcatccctgcatctatgaaaaaatgatgacatctcatggacacttagaagatctccaggacctttggaagaatgctacagatcctaaagtaaaaaccatttccaaaggtttttttggtcaaatatactgcagattaatgaagataattctcctttgtaaaattagctatgtggacacatacccttgtagggctgcgtttatctaatagtacttgaatgttgtatgttttcactgtcactgagtcaaacctggatgaaaaaaacctttaaatgttcgtctataccctaagtaaaatgaggacgaaagacaaatattttgaaagcctagtccatcagaatgtttctttgattctagaagctgtttaatatcacttatctacttcattgcctaagttcatttcaaagaatttgtatttagaaaaggtttatattattagtgaaaacaaaactaaagggaagttcaagttctcatgtaatgccacatatatacttgaggtgtagagatgttattaagaagttttgatgttagaataattgcttttggaaaataccaaatgaacgtacagtacaacatttcaaggaaatgaatatattgttagaccaggtaagcaagtttatttttgttaaagagcacttggtggaggtagtaggggcagggaaaggtcagcataggagagaaagttcatgaatctggtaaaacagtctcttgttcttaagaggagatgtagaaaaatgtgtacaatgttattataaacagacaaatcacgtcttaccacatccatgtagctactggtgttagagtcattaaaatacctttttttgcatcttttttcaaagtttaatgtgaacttttagaaaagtgattaatgttgccctaatactttatatgtttttaatggatttttttttaagtattagaaaatgacacataacacgggcagctggttgctcatagggtccttctctagggagaaaccattgttaattcaaataagctgattttaatgacgttttcaactggtttttaaatattcaatattggtctgtgtttaagtttgttatttgaatgtaatttacatagaggaatataataatggagagacttcaaatggaaagacagaacattacaagcctaatgtctccataattttataaaatgaaatcttagtgtctaaatccttgtactgattactaaaattaacccactcctccccaacaaggtcttataaaccacagcactttgttccaagttcagagttttaaattgagagcattaaacatcaaagttataatatctaaaacaatttatttttcatcaataactgtcagaggtgatctttattttctaaatatttcaaacttgaaaacagagtaaaaaagtgatagaaaagttgccagtttggggttaaagcatttttaaagctgcatgttccttgtaatcaaagagatgtgtctgagatctaatagagtaagttacatttattttacaaagcaggataaaaatgtggctataatacacactacctcccttcactacagaaagaactaggtggtgtctactgctagggagattatatgaaggccaaaataatgacttcagcaagagtgactgaactcactctaaggcctttgactgcagaggcacctgttagggaaaatcagatgtctcatataataaggtgatgtcggaaacacgcaaaacaaaacgaaaaaagatttctcagtatacacaactgaatgatgatacttacaatttttagcaggtagctttttaatgtttacagaaattttaatttttttctattttgaaatttgaggcttgtttacattgcttagataatttagaatttttaactaatgtcaaaactacagtgtcaaacattctaggttgtagttactttcagagtagatacagggttttagatcattacagtttaagttttctgaccaattaaaaaaacatagagaacaaaagcatatttgaccaagcaacaagcttataattaatttttattagttgattgattaatgatgtattgccttttgcccatatataccctgtgtatctatacttggaagtgtttaaggttgccattggttgaaaacataagtgtctctggccatcaaagtgatcttgtttacagcagtgcttttgtgaaacaattatttatttgctgaaagagctcttctgaactgtgtccttttaatttttgcttagaatagaatggaacaagtttaaatttcaaggaaatatgaaggcacttcctttttttctaagaaggaagttgctagatgattccttcatcacacttacttaaagtactgagaagagtatctgtaaataaaagggttccaaccttttaaaaaagaaggaaaaaactttttggtgctccagtgtagggctatctttttaaaaaatgtcaacaaagggaaaataaactatcagcttggatggtcacttgaatagaagatggttatacacagtgttattgttaaaatttttttaccttttggttggtttgcatcttttttccatattgttaattttataccaaaatgttaaatatttgtattacttgaattttgctcttgtatggcaaaataattagtgagtttaaaaaaaatctatagtttccaataaacaactgaaaaattatcatgaaaaaaaaa

SEQ ID NO: 5542 - DNA, 4009 bp, Homo Sapiens
  NM_032048
ccggagggggcggccgcggagcactggttggagcgccgcgaagcgcccgagcctcttgccttcgcgggcggcgccctggccgccggcagccttgtggccggtgccccgatccgccgcgctccggacccgggcaggcggggcgcgcccgctgcgcgcgggatgtggcagcccagacggccctggccccgcgtgccctggcgctgggcgctggcgctgctggccctggttggcgcggggctgtgccacgccggcccgcagcccgggtatcccgcgcggcccagcgccaggaacaagaactggtgcgcctacatcgtgaacaagaatgtgagctgctccgtgctggagggaagtgagagttttattcaggctcagtacaactgtgcctggaaccagatgccctgtccgtcggcgctggtgtatcgagtgaacttcagacctagatatgtcactaggtataagacagtgacacagttggaatggaggtgctgtcctggctttagagggggagattgccaagaaggtcccaaagaccccgtgaagaccctccgccccacgccggctcggcctcgaaacagcttgaagaaagccacagataatgaacccagccaattctcagagcccaggaagactttgtccccaactggtacagcacaaccaagctggggggtagatccaaaagaggggcctcaggaacttcaggaaaagaagatacaggtgctagaggagaaggttcttcgactcacaaggacggttcttgacctccagtcttcccttgctggagtgagtgaaaatctcaaacatgccactcaggatgatgccagtagaacacgggcaccagggctcagcagccagcaccccaagcctgacaccactgttagtggagacacagaaacgggccagagtcctggtgtcttcaacactaaggaatctggcatgaaggacatcaagtctgaattggctgaagtcaaagatactctaaagaacaaaagtgacaagctggaagagctggatggaaaagtgaagggctacgaagggcagctcagacagctccaggaagcagctcagggcccgacggtgaccatgacaaccaacgaactctaccaagcctatgtggacagtaagatcgacgccctgagagaggagctcatggagggcatggacagaaagctggctgacctgaaaaactcatgtgagtacaagctcactggcctccagcagcagtgtgatgactatgggagcagctacctgggagtgatagagctcataggggagaaggaaacaagcctgagaaaagaaataaataacctccgagcccggctacaggagccttcagcccaggcaaattgctgcgacagtgaaaagaatggtgacattggtcaacagatcaagacattggaccagaaaatcgagagagttgctgaagccaccagaatgctgaatggaagactggacaatgagtttgaccgccttatagttccagagccagatgtggattttgatgcaaaatggaatgaactcgatgcaaggatcaatgtgacggagaagaacgctgaagaacattgcttttacattgaggaaacccttcggggcgccattaatggagaggtgggtgacttgaagcagcttgttgatcagaaaatacagtctctggaagaccgtctggggagcgttctcctacagatgaccaataacactggtgcagagctcagtcccccaggggcagcagccctgccaggagtgtcagggtcaggagatgaacgggtcatgatggaattaaaccacctgaaggacaaagttcaagttgttgaagacatttgcctgctgaacatccagggaaagcctcatgggatggaaggtgccttgccaaacagggaagaccgcgcagtacgcgacagcctgcaccttttgaaatctctcaacgacacgatgcacaggaagtttcaagaaaccgaacaaaccatccagaaacttcaacaggattttagttttctttattctcaattaaaccacacagaaaatgatgtgactcatcttcaaaaggaaatgagcaattgtagagcaggtgaaaacgctggcatgggtaggttcactaaggtgggtgagcaagaaaggacagtggacaccctgccgtccccccagcaccccgtggctcattgctgcagtcagctggaggagaggtggcagaggttgcagagccaggtcatctcggagctggatgcttgtaaggaatgcacgcagggggtccagagggaggtctccatggtggagggcagggtgtctcatatggagaaaacttgcagcaagctggactctatctcaggaaatcttcagaggatcaaggaggggctcaacaagcatgtcagcagcctgtggaactgtgtcaggcagatgaacggaacgctcaggtcgcattccagagacatttctggcctgaagaattcagtccagcagttctacagccacgtcttccagatttctactgatttgcaagatctggtcaaatttcagccatcagcaaaggcgccctcgcccccgccgcccgcagaggccccgaaggagccgctgcagcccgagcccgccccgccgaggcccagcggccccgcaaccgcagaggaccctgggcgacggcccgtcctgccccagcggccccccgaggagaggccgccccagccgccaggctccaccggggtcatcgcggagacgggccaggccgggccccccgcaggcgcaggcgtgtctgggcggggtctgccgcggggcgtggacggccagaccgggagcggcaccgtccccggcgcagaaggcttcgcgggcgcaccaggatacccgaagtcacctcctgtagcttccccaggagctccggtgccttctctggtgtctttttctgcggggctcacccagaagcctttccccagtgatgggggcgttgtcctctttaacaaagtgctggtgaacgacggggatgtttacaaccccagcaccggggtcttcacggctccttatgatgggcgctacctgatcacggccaccctcacccccgagagagacgcctacgtggaagcagtgctgtcggtctccaacgccagcgtggcccagctgcataccgctgggtacaggagagagttcctggaataccaccgccctccaggagctttgcatacctgcgggggcccgggggcattccacctcatcgtgcacctgaaggcgggagatgcagtcaacgtcgtggtgactgggggcaagctggctcacacagactttgatgaaatgtactccacatttagtggggttttcttatatcctttcctttcccacctctaaggtggctggggagatgtcaggggaaagatagatagttgtaaaaactctaaagctttaatatattcggtttgtatgtaatggaagcacggggctagagtttccacataggccccaacataaaggccttccctcgctgttgaggccaccatgccttactgcatccagccaggctgcagggagtgaggcacacggtgaacatggccactgacttttctgccactctaactggacaactggaagacttggaaaggcctccacctgtatctacactctgagggccctggactgggcctgagcttgccacagaggctccgtctgactgtgggctgggaggagggaggcaggggagagccggtcacggtggctggtctttactgcagggcagcactgtggccagctgtctgtctttacactgcatgcagaagtttaaacactgaagtgccgaagtggcccgtgccgccgcacagagaccccgactttagtttgggctgttccacgcttggctcaccattgccgcctgggacttaacctgctcaggcgggccttcgcccagctgcaaatagggatgcgttagagactgttcccaaagcttgttgggctccttaaatggcatgtacaatttaagtgcaaagacagggagtgtcaataaagatggaaagccatttccagttaacttttgttaatttaa

SEQ ID NO: 5543 - DNA, 3961 bp, Homo Sapiens
  NM_032108
gaggtcttcctgtttttggagggggcaggcaccccagggccgattgtcgcgaatcaccttcacctctgggggctcagaatccctgagccagaaggccagggcagggctgggggatacccctgctgctcagacaggaaaatgggctcggagcttgcccaatacttcccagaaggacgaggctgctgaacttctcattcggggctccgggacctggactgtacccctttctggcgtcacctcctcctgtcgcctggccctcgccatgcagaccccgcgagcgtcccctccccgcccggccctgctgcttctgctgctgctactggggggcgcccacggcctctttcctgaggagccgccgccgcttagcgtggcccccagggactacctgaaccactatcccgtgtttgtgggcagcgggcccggacgcctgacccccgcagaaggtgctgacgacctcaacatccagcgagtcctgcgggtcaacaggacgctgttcattggggacagggacaacctctaccgcgtagagctggagccccccacgtccacggagctgcggtaccagaggaagctgacctggagatctaaccccagcgacataaacgtgtgtcggatgaagggcaaacaggagggcgagtgtcgaaacttcgtaaaggtgctgctccttcgggacgagtccacgctctttgtgtgcggttccaacgccttcaacccggtgtgcgccaactacagcatagacaccctgcagcccgtcggagacaacatcagcggtatggcccgctgcccgtacgaccccaagcacgccaatgttgccctcttctctgacgggatgctcttcacagctactgttaccgacttcctagccattgatgctgtcatctaccgcagcctcggggacaggcccaccctgcgcaccgtgaaacatgactccaagtggttcaaagagccttactttgtccatgcggtggagtggggcagccatgtctacttcttcttccgggagattgcgatggagtttaactacctggagaaggtggtggtgtcccgcgtggcccgagtgtgcaagaacgacgtgggaggctccccccgcgtgctggagaagcagtggacgtccttcctgaaggcgcggctcaactgctctgtacccggagactcccatttctacttcaacgtgctgcaggctgtcacgggcgtggtcagcctcgggggccggcccgtggtcctggccgttttttccacgcccagcaacagcatccctggctcggctgtctgcgcctttgacctgacacaggtggcagctgtgtttgaaggccgcttccgagagcagaagtcccccgagtccatctggacgccggtgccggaggatcaggtgcctcgaccccggcccgggtgctgcgcagcccccgggatgcagtacaatgcctccagcgccttgccggatgacatcctcaactttgtcaagacccaccctctgatggacgaggcggtgccctcgctgggccatgcgccctggatcctgcggaccctgatgaggcaccagctgactcgagtggctgtggacgtgggagccggcccctggggcaaccagaccgttgtcttcctgggttctgaggcggggacggtcctcaagttcctcgtccggcccaatgccagcacctcagggacgtctgggctcagtgtcttcctggaggagtttgagacctaccggccggacaggtgtggacggcccggcggtggcgagacagggcagcggctgctgagcttggagctggacgcagcttcggggggcctgctggctgccttcccccgctgcgtggtccgagtgcctgtggctcgctgccagcagtactcggggtgtatgaagaactgtatcggcagtcaggacccctactgcgggtgggcccccgacggctcctgcatcttcctcagcccgggcaccagagccgcctttgagcaggacgtgtccggggccagcacctcaggcttaggggactgcacaggactcctgcgggccagcctctccgaggaccgcgcggggctggtgtcggtgaacctgctggtaacgtcgtcggtggcggccttcgtggtgggagccgtggtgtccggcttcagcgtgggctggttcgtgggcctccgtgagcggcgggagctggcccggcgcaaggacaaggaggccatcctggcgcacggggcgggcgaggcggtgctgagcgtcagccgcctgggcgagcgcagggcgcagggtcccgggggccggggcggaggcggtggcggtggcgccggggttcccccggaggccctgctggcgcccctgatgcagaacggctgggccaaggccacgctgctgcagggcgggccccacgacctggactcggggctgctgcccacgcccgagcagacgccgctgccgcagaagcgcctgcccactccgcacccgcacccccacgccctgggcccccgcgcctgggaccacggccaccccctgctcccggcctccgcttcatcctccctcctgctgctggcgcccgcccgggcccccgagcagccccccgcgcctggggagccgacccccgacggccgcctctatgctgcccggcccggccgcgcctcccacggcgacttcccgctcaccccccacgccagcccggaccgccggcgggtggtgtccgcgcccacgggccccttggacccagcctcagccgccgatggcctcccgcggccctggagcccgcccccgacgggcagcctgaggaggccactgggcccccacgcccctccggccgccaccctgcgccgcacccacacgttcaacagcggcgaggcccggcctggggaccgccaccgcggctgccacgcccggccgggcacagacttggcccacctcctcccctatgggggggcggacaggactgcgccccccgtgccctaggccgggggccccccgatgccttggcagtgccagccacgggaaccaggagcgagagacggtgccagaacgccggggcccggggcaactccgagtgggtgctcaagtcccccccgcgacccacccgcggagtggggggccccctccgccacaaggaagcacaaccagctcgccctccccctacccggggccgcaggacgctgagacggtttgggggtgggtgggcgggaggactttgctatggatttgaggttgaccttatgcgcgtaggttttggttttttttgcagttttggtttcttttgcggttttctaaccaattgcacaactccgttctcggggtggcggcaggcaggggaggcttggacgccggtggggaatggggggccacagctgcagacctaagccctcccccacccctggaaaggtccctccccaacccaggcccctggcgtgtgtgggtgtgcgtgcgtgtgcgtgccgtgttcgtgtgcaaggggccggggaggtgggcgtgtgtgtgcgtgccagcgaaggctgctgtgggcgtgtgtgtcaagtgggccacgcgtgcagggtgtgtgtccacgagcgacgatcgtggtggccccagcggcctgggcgttggctgagccgacgctggggcttccagaaggcccgggggtctccgaggtgccggttaggagtttgaaccccccccactctgcagagggaagcggggacaatgccggggtttcaggcaggagacacgaggagggcctgcccggaagtcacatcggcagcagctgtctaaagggcttgggggcctggggggcggcgaaggtgggtggggcccctctgtaaatacggccccagggtggtgagagagtcccatgccacccgtccccttgtgacctcccccctctgacctccagctgaccatgcatgccacgtggctggctgggtcctctgccctctctggagtttgcctcccccagccccctccccatcaataaaactctgtttacaaccaccggcaaaaaaaaaaaaaaaaaaa

SEQ ID NO: 5544 - DNA, 791 bp, Homo Sapiens
  NM_032111
gcgtccgccgggctgggcctggcgcgcaggcgctaggaagaggccgcgtggggcgaaggcggcgcttggctggtggggcccgcggcgggattttcccgggcggcgagagcggatctatcttgggatcccatggctttctttactgggctctggggccccttcacctgtgtaagcagagtgctgagccatcactgtttcagcaccactgggagtctgagtgcgattcagaagatgacgcgggtacgagtggtggacaacagtgccctggggaacagcccataccatcgggctcctcgctgcatccatgtctataagaagaatggagtgggcaaggtgggcgaccagatactactggccatcaagggacagaagaaaaaggcgctcattgtggggcactgcatgcctggcccccgaatgacccccagattcgactccaacaacgtggtcctcattgaggacaacgggaaccctgtggggacacgaattaagacacccatccccaccagcctgcgcaagcgggaaggcgagtattccaaggtgctggccattgctcagaactttgtgtgagttgagcccaggcctctggttgcaggactcgtgaatggagcagttctgagaaccacccttttgctaagggagcttgggagccacatggctgctcccttcacactgggtaacagtgtagtatcctgtgagagaataaatgtattcatttatgtgtttttccagagctttctgggatgtgggaaaataaattacactgaagcagttgaaaaaaaaaaaaaaaaaaa

SEQ ID NO: 5545 - DNA, 1016 bp, Homo Sapiens
  NM_032112
ccggaagcctcgaggtttagtcccgcccccctctcctcgctgcttaggctccgcggcctccaagctgtagctatgacggcgcgcgggactccgagccgcttcttggccagcgttctccacaacggactgggtcgctatgtgcagcagctgcagcgtctgagcttcagcgtcagccgcgacggcgcctcgtctcgcggcgccagggagttcgtggagcgggaggtgatcgacttcgcccgacggaatccaggggtcgtaatatatgtaaactcgcgtccgtgctgcgtgcccagagtagtggccgaataccttaacggggctgtgcgcgaggagagcatccactgcaagtcggtcgaggagatctcgacgctggtgcagaagctggccgaccagtcgggcttggacgtgatccgcatccgcaagcccttccacaccgacaaccctagcatccagggccagtggcaccccttcaccaacaagccgaccacgttccgcgggctacgcccccgagaggttcaggatcctgccccagcccaggtgcaagcacagtgaagagttgccccaccaactgcagccccaggctttggactgttactccggtaaaggtggttcttcccctttgggattccaagcccaggcaaatggaacccatcaatgggcaagttgacagaggttctgcttgggataatgaagagctgcctgtttctttccagtgcctgcttctgggggcagtgaccttgtgaaccactcatttttatgcaagtggcatccctaaaacctgagatgaggaagacttcaagggttttacagggcccttgttttttaaatccaaattgataataatgatctcaaaacacagtgagaggtctgaaggctggcttctgaagaatccctgatgtcttattggaacaaccactgagctacggagagctctgctgtgatgggctaggcactttatatctgtgtgaatacagatttataaaacaggttaataaacttatccaaggtcacatttc

SEQ ID NO: 5546 - DNA, 1223 bp, Homo Sapiens
  NM_032118
cggcggatttggagggaccctacgaaccaggagtcaggcgagccgatctggggctgcaggatgttccgctgggagcgctccattcccctgcgaggctcggccgccgccctgtgcaacaacctcagtgtgctgcagctgccggctcgcaacctcacgtattttggcgtggttcatggaccaagcgcccagcttctcagcgctgctcctgagggtgtgcccttggcccagcgccagctccacgctaaggagggtgctggagtgagtcccccacttatcactcaggtccactggtgtgtcctccccttccgagtgctgctggtactcacctcacatcgaggaatacagatgtacgagtccaatggctacaccatggtctactggcatgcactggactctggagatgcctccccagtacaggctgtgtttgcccggggaattgctgccagtggccacttcatctgtgtgggaacgtggtcaggccgggtgctggtgtttgacatcccagcaaagggtcccaacattgtactgagcgaggagctggctgggcaccagatgccaatcacagacattgccaccgagcctgcccagggacaggattgtgtggctgacatggtgacggcagatgactcaggcttgctgtgtgtctggcggtcagggccagaattcacattattgacccgcattccaggatttggagttccgtgcccctctgtgcagctgtggcaggggatcatagcagcaggctatgggaacggacaagtgcatctatatgaggccactacaggaaatctacatgtccagatcaatgcccatgcccgggccatctgcgccctggacctggcttctgaggtgggcaagctactctctgcaggtgaggacacctttgtgcatatctggaagctgagcagaaacccagagagtggctacattgaggtggaacactgtcatggtgagtgtgtcgccgacacccagctgtgtggtgctcgattttgtgattcctcaggcaactcctttgctgtgactggctatgaccttgcggagatccggagattcagcagtgtgtgagaagagcagccttcctttgtccctgtggtattcataaagtacccgctccacccaaaaaaaaaaaaaaaaaaaaaaaaaaaaaaaaaaaaaaaaaaaaaaaaaaaaaaaaaaaaaaaaaaaaaaaaaaaaaaaaaaaaaaaaaaaaaaaaaaaaaaaaa

SEQ ID NO: 5547 - DNA, 1734 bp, Homo Sapiens
  NM_032120
gggcggatgttgtcctccctgcgaggatcaaagtaggcaagatggcgtcgagcggcggggagctagggagtttatttgatcaccacgtccagagggcggtatgcgacacacgggccaaatatcgagagggacgacggcctcgtgctgtgaaggtatatacaatcaatttggaatctcagtacttattaatacaaggagttcctgctgtgggagtcatgaaggaattagttgagcgattcgctttatatggtgcaattgaacagtacaatgctctagatgaatacccagcagaagactttactgaagtttatcttattaaatttatgaacttacaaagtgcaaggacagccaagagaaaaatggatgaacagagtttcttcggtggattgcttcatgtgtgctatgctccagaatttgaaacagttgaagaaactagaaaaaaactacaaatgcggaaggcatatgtagtaaaaactactgaaaataaagaccattacgtgacaaagaagaaattggttacagagcataaagacacagaggattttagacaagacttccactcagagatgtctggattttgtaaagctgctttgaacacttctgcagggaactcaaatccttatcttccgtattcctgtgaattgcctttatgttatttctcctcaaaatgtatgtgttcatccgggggacctgtagacagagcaccagactcctctaaggatggtagaaaccatcataaaacaatggggcattataaccacaatgactctttgcggaaaacacagataaactctttgaaaaactcagtggcctgccctggtgcacaaaaggctattacgtcttcagaggcagttgacagatttatgcctaggacaacacaactgcaggagcgcaaaagaagaagagaagatgatcgtaaacttggaacttttcttcaaacaaacccaactggtaatgagattatgattggacctctgttaccagacatctctaaagtggatatgcacgatgactcattgaatacaacggcgaatttaattcggcataaacttaaagaggtaatttcatctgtgccaaagcctccagaggacaagccagaagatgtacatacaagtcatccattaaaacaaagaagaagaatatagagtgccagcagcaacttagtattttctaaaaagaacatttattatttatttttagcctgtcattttaattcttcaagagattttactgctggtattttttaatgcactcctctttgtaatttcattcaagccatttgtctaaagtcatttctttgttttttgggagatggagtcttgctctgttgcccaggctggaatgcagtggcgtgatctcggctcactgcaacctccacctcccgggttcaagcgattctcctgcctcagcctcctgagtatctgggattacaggcgtgcaccaccatgcctggctaagttttgtgttttttttagtagagatgggttttcaccatattggtcaggctggtctcgaactcctgaccttgtgatacacctgcctcagcctcccaaagggatgagccaccgcgcctggcccatttcttctttttttgacccatacttaatgttgcagaaactattcttgtcataacattatctctcatgtacagtaattatatgtaaattaattgaagcaaatatggaaactttacaatagaaataaagataggcagccaaaaaaaaaaaaaaaaaa

SEQ ID NO: 5548 - DNA, 1629 bp, Homo Sapiens
  NM_032125
atggggacgagcggcaccagagccggggccagtcggagcggggcgcgcgccgcatggcggaagcggaagggagttctctgctcttgttgccgccgccgccacccccgcccaggatggcggaagtggaggcgccgacggcggccgagacggacatgaagcaatatcaaggctccggcggcgtcgccatggatgtggaacggagtcgcttcccctactgcgtggtgtggacgcccatcccggtgctcacgtggtttttccccatcatcggccacatgggcatctgcacatccacaggagtcattcgggacttcgcgggcccctactttgtctcagaggacaacatggcctttggaaagcctgccaagtactggaagttggaccctgctcaggtctatgctagcgggcccaacgcatgggacacggctgtgcacgacgcctctgaggagtacaagcaccgcatgcacaatctctgctgtgacaactgccactcgcacgtggcattggccctgaatctgatgcgctacaacaacagcaccaactggaatatggtgacgctctgcttcttctgcctgctctacgggaagtacgtcagcgttggggccttcgtgaagacctggctgcccttcatccttctcctgggcatcatcctcaccgtcagcctggtctttaacctccggtgatggctgctcggtggccccacacccaccagggtcccgaggaaacagccgccatcccttttggttccagatttttttctcctcaccccaaaaggcagggttgggcctgctgttgtggaccgggggtcggggctggcaggatggaaggactgaggaccagcatgaagtgggggtttgttgtctccctgcctctcagaagcaccctgtcccctcctccccaggcctgtgactccggccctggaagcccctttgttcttctgttgaaaggctttggcttcccgctgtagagctgctcccgccaccacctgctggggtcctgcctcagcccagtgcccagtatggggagaggaggacatttgggctcacctgtcaaggtggccctgggaccagagctggtcccagcatggggtgcaccgggtacacttaacgtgtctctataagccaagttgcttcaggaccttcaccactggcctctagaatggtccagaggggctggctgggtccctttgtcagactcctgccggcagctgccctgggggacatgtgtgcccatctggcatcctccagcccgtgcagtccgctcttcactgttccacggcctcccagtgcctcccagcattggacccatctccccctgcagtttgaggccagagaggtgagtggacctgacaagtgccagagtaaccgtgtagacagagcagtgtagacagcactcagccccagccccaggtgtggacctcatgctggtgatggctcccctgggtggcctgccagcacagccagtgccatcagggagctgaaggggctgtcccccacctaactccagctcccccttcacgttgtcaccaaggccctgtgccgcccgcctcgcccccctgctctgtggattcctttgggaagggctccctgggcaggacaataaagagttttgactccaaaaaaaaaaaaaaaa

SEQ ID NO: 5549 - DNA, 1628 bp, Homo Sapiens
  NM_032140
gtggcagcggctggcggcaaaacctctcgagtgagcccctgcccgagtgccgcgggggagaggccgcgagcgggaccgagaagtgggctgggagcagaggtcgcggaggtggcgagcgaggccggggcccaggcggggaccggcaggggcccgggagtggcgggcacgccagggtcagggtgccgggcgagggagggggcccggggttggggaagggggcccggggagggaggtaaacagccctgcaggcctcggggcaccgttgctgggcggcgccggcggcatgtgcgagggcccgtcccgcatctcggggcccatccccccagacccgacgctctgtcctgacaactacaggcggccgacctcggctcaagggcgcctcgagggaaacgcgctgaagctggacttgctgacttccgaccgggccctggacaccaccgctccccgtggcccctgcatcggtcccggtgccggagagatcctggagcgcggccagcgcggcgtcggggacgtgctgttgcaactcgaggggatctccctaggtcctggggcctctctcaagaggaaggaccctaaggaccatgagaaggagaacctgaggcggatcagggagattcagaagcgcttcagagaacaggagcgcagccgggagcagggccagcccaggcccctgaaagctctgtggcgctcacccaagtacgacaaggtggagtcccgggtcaaggcccagctccaggagcctggccctgcctctgggacagagtctgcccacttcctgcgggcgcactcccgctgcggccctggcctcccaccaccccatgtatctagtccccagccaaccccaccaggtcccgaagctaaggagccaggcctgggggtggacttcattcgtcacaatgcacgagctgccaagagagccccccggaggcattcctgctcactgcaggtcctggcacaagtgctagagcagcagcggcaggcccaggagcactacaatgccacgcagaagggccatgtgccacattacttgttggagcgcagggacctgtggcggcgggaggccgaggcccgcaagcagagccagccggaccctgccatgcccccaggccacacgcgcatgcctgagaaccagcggctggaaacactgaccaagctgctccagagccagagccagctgctgcgtgagctggtactgctgcctgctggggcagactcactgagagcccagagccaccgtgctgagctggaccggaagctggtgcaggtagaggaggccatcaagatcttttctcggcccaaagtcttcgtgaagatggacgactgagcccctttgggggacagtggcaaggagctccatgctgaggatcgccacatggctgcaaaggacagggttggacccaatcccagagcagaggtctgaagacaggagcaggggggtggccagtgtccctagagcactcttcccagtcaccagtggctgcagaagggccaccctagccttttaactgctttgtcaaaattaaacattttgtacacagaaaaaaaaaaaaaaaaaaaaaaaaaaaaaaaaaaaaaaaaaaaaaaaaaaaaaaaaaaaaaaaaaaaaaaaaaaaaaaaaaaaaaaaaaa

SEQ ID NO: 5550 - DNA, 7995 bp, Homo Sapiens
  NM_032142
agtgccctgggacacctcttcagtccgtggactttcccgctgcacactgccctccgaagtcggggacgcgggctcgtgagatggaagattttcgaggtatagcagaagaatcatttccaagctttctcaccaattcattatttggtaacagtgggattttggaaaatgtcactctttcttcaaatcttggcttgcctgttgctgtttctacacttgctagggatagatccagcactgataacaggtatcctgatatccaggcatcttacttagtagaagggagattttcagttccatccgggtcatctcccggaagccagagtgatgctgaaccaagagagaggttacagcttagcttccaggatgatgattctatctctaggaaaaagagctatgtggaaagtcaacgtttgtcaaatgctctcagcaaacagtcagctttacaaatggagacagcaggaccagaagaggagccagccggagctacagaatccttgcagggccaagatctcttcaacagggcttcaccactggaacaagcacaagactcacctattgattttcatttacagtcatggatgaataataaggaacccaagattgttgtgcttgatgctggaaaacattttgaagacaagactctaaagagtgacctaagccacactagcttattagaaaatgagaaacttatcttaccgacaagcttggaagattcttctgatgatgatattgatgatgaaatgttttatgatgatcatttggaggcttattttgaacaactggcaattccaggaatgatatatgaagacctagaaggaccagaacctccagaaaaaggttttaagttacctacaaatggtcttagacaggcaaatgaaaacggtagcttaaactgcaagtttcaatcagaaaataacagctctctgatttccctcgactcacactcttctgaaacaactcacaaagagtctgaggaaagccaagttatttgtctacctgggactagtaattctataggtactggagatagtagaaggtacacagatggtatgttaccattttcctctggtacttggggaactgagaaagaaatagaaaatttgaagggtattgttccagatcttaacagtgaatgtgcaagtaaagatgttctggtgaagaccctcagggctattgatgtgaaacttaactctgataattttcatgatgcaaatgccaatagaggtggttttgatctgactgaccctgtaaaacagggggcagagtgtcctcaccaaaataagacagttttgcacatggatggatgtttagacactgagactcctacggtgtccattcaagaaaatgtggatgtagcctctttgaagcccattagtgacagtggaattaatttcactgatgccatttggtcaccaacttgtgaaaggcgaacatgtgaatgtcacgagtccatcgaaaagaataaagacaaaacagatctcccacagagtgtggtctatcaaaatgaagagggtaggtgggtcacagaccttgcctattacacatcttttaatagcaaacaaaatttaaatgtgtctctaagtgatgagatgaatgaagacttcagatctggttctgaagcatttgatttgattgcacaagatgaagaagaatttaataaagagcatcaatttatacaggaagaaaacatagatgctcataatacttcggttgcactgggcgatacgtcctggggagctacaattaattacagtctgttgaggaaatcacgtagcacatcagatttggataaagatgatgccagttatttacgtctgtctttaggagagttctttgctcaaagatctgaagctcttggttgccttggtggtggtaacaatgtgaaaagaccatcatttggctattttattagatcaccagagaagagagaacctattgccttaataagaaaatctgatgtatcaagaggtaatttggaaaaagaaatggctcatcttaaccatgatctatattcaggagatttaaatgaacagtcccaggcacagctaagtgaaggatcaattacacttcaggttgaagcagtagagagtacttcacaagtggatgaaaatgatgtgacgttaacggctgataaaggcaaaacagaggacactttcttcatgagcaacaaaccccaaagatacaaagacaagctaccagatagtggtgattctatgcttaggatcagcaccattgcttcagccattgcagaggcatcagttaatactgatccttcccaacttgctgcaatgatcaaggcactttcaaataaaaccagagacaagacttttcaggaagatgagaaacaaaaggactattctcatgtgcgtcatttcttacctaatgatttagaaaaaagtaatggatccaatgcacttgatatggagaaataccttaaaaaaacagaagttagtagatatgaaagtgcattggaaaacttttcaagggctagtatgtctgatacttgggatttatctttgcccaaagaacaaactactcaagacattcatccggtggacttaagtgctactagtgtaagtgtgagggcaccagaagaaaacacagcagctattgtttatgttgaaaatggagagagtgagaatcaagagtcatttagaaccataaactcctcaaattcagttacaaatagagagaataacagtgcagtagttgatgtgaagacatgttccattgacaacaaattacaagatgttggtaacgatgaaaaagctacctcaatttccactccatctgatagttattcatcagtgaggaaccccagaataacatccctttgtctgttaaaagactgtgaagaaatacgagataacagagaaaatcagaggcaaaatgagtgtgtcagtgaaataagcaacagtgagaagcatgtgacttttgaaaaccatcgcatagtctcacctaaaaatagtgatttgaaaaatacctctcctgagcatggtggacgtggctcagaggatgagcaggagagcttcagaccttccacgtcaccactgagtcattcttctcctagtgaaatttctggaacgagttcatcagggtgtgcgttagagtcctttggttcagcagctcagcagcagcagcctccctgtgagcaggagttgtctcccttggtgtgctcgcctgctggggtgagcaggctgacgtatgtgtctgaaccagagagctcctatcctaccacagccacagatgatgccctggaggaccgcaagagtgatatcaccagcgagttgagtaccacaattattcaaggcagtccagccgcattggaggaacgggctatggaaaaattgagagaaaaagttccatttcagaatagaggaaaaggaacattatcatctattatccagaataactctgatacaagaaaagcaactgaaactacttctctgagtagcaagcctgaatatgtaaaacctgactttagatggagtaaagatccttcctccaaaagtggaaatctgttggaaaccagtgaggtaggttggacatcaaaccctgaggaattggacccgatcaggctggctctcctgggcaagtcaggtctgagctgtcaggtggggtcagccacatcacaccctgtgtcctgccaggagcctatagatgaagatcaaagaataagtcctaaagataagtcaactgctggccgtgagttcagtggccaggtttctcatcagaccacctctgaaaaccagtgtactcctattcccagcagcacagttcacagctctgtggctgacatgcagaacatgcctgctgctgtgcacgcactcttgacacaaccctctctcagcgctgctccttttgctcagcggtatttgggaacactcccttcaactggaagcaccaccttgcctcagtgccatgctggcaatgccacagtctgtggcttctcaggaggccttccctatccagctgttgcaggagagcctgtgcagaactctgtggctgtgggaatttgtctaggatcaaatatcggctctggatggatgggtacctcttccctctgtaacccatattctaataccttaaatcagaacctgctaagcacaacaaaaccttttcctgtgccgtctgttggtacaaactgtggaattgaaccatgggattcaggagtgacatcaggattggggagtgtccgagtgcccgaggagttgaagcttcctcatgcttgctgtgtcgggatcgcttcccagaccctcctcagtgtgcttaatccaactgaccgctggctgcaagtcagcattggggtcctcagcattagtgttaatggtgaaaaggtggatctttcaacatatcgttgtttagttttcaagaataaagccatcataagacctcatgccacagaagagataaaagtgctttttataccatccagtcctggggttttcagatgcacattcagtgttgcttcttggccatgttcgacagatgctgagaccatcgtacaggcagaagctttggccagcaccgtcactctcactgccattgccgagagtcctgttattgaggtagaaacagaaaagaaagacgttcttgattttggtgacttgacttatggaggctggaaagccctcccactaaaattgataaaccgaacgcatgccactgtgccaattagactgattattaatgctaacgctgtagcctggcgctgtttcacgttttccaaggaatccgtccgagctcctgtggaagttgctccttgcgctgatgtggtcactcggctagcaggcccttctgtggtcaaccacatgatgcctgctagttatgatggacaggatccagaatttctgatgatttgggttcttttccatagtccaaagaaacagatcagctcttcagatattctggactcagcagaagaattctcggcaaaagttgatatcgaagttgacagcccaaaccctacgcccgttcttagaagtgtgagtctccgagcaagagcaggaatagctaggatccatgctcccagggacttgcagacgatgcatttcttggccaaagtggcttcctcaagaaagcagcacttacctttgaaaaatgctgggaacattgaagtttatttggatatcaaggtcccagaacaaggaagtcacttttcagtggatccaaagaatctactccttaaacctggagaagaacatgaggttattgtttcatttactccaaaggatcctgaagcctgcgaggaaaggatcttgaaaatatttgtgcagccatttggacctcagtatgaggtagtgttaaaaggcgaagtcatttcttcaggaagtaaacctctgtcacctggaccttgcttagatattccatcgattttgtccaacaaacaatttctggcttggggaggagtccctctaggtagaacacagcttcagaaactagctttaagaaataattctgcatctacaactcaacatttacgactgcttattagaggacaagatcaggactgctttcagcttcagaacacttttggttcagaacagcgattgaccagtaactgtgagatcagaattcacccaaaggaagacattttcatctctgtattatttgcacctactcgattatcttgcatgttggctagactagaaatcaaacaacttggaaatcgatcacaaccaggcattaagttcacaatacctttgtctggatatggaggaacaagcaatcttattttggaaggcgttaaaaaattatctgacagttacatggtaacagtgaatggcttagtacctggcaaagaaagtaaaattgttttttctgtccgcaacactggctcccgagcagcttttgttaaagcagtaggttttaaggattctcagaaaaaagttttgctggatcctaaagtattgaggatttttccagataaatttgtactcaaggaaagaacacaagaaaatgttactttaatatataatccatcagacagaggaatcaataataaaactgcaacagaactatcaactgtatacttatttggtggagatgaaatttcaagacagcagtatcgcagggccctgttacataaaccagagatgataaaacagatacttccagaacatagtgtgcttcaaaacattaattttgttgaagcatttcaagatgagctattagtaactgaagtatatgatcttccccaacgacctaatgatgttcagctcttttatggaagcatgtgtaaaattatactttcagtaattggagaattcagagattgcatttctagcagagaattccttcagccttcttccaaagctagcttggaatctacaagcgacttgggagcttctgggaaacatggtggcaacgtctctttggatgttttaccagtcaaaggtcctcagggttctcctcttctctcacgggcggctcgcccgcctctggatcagctggcctccgaagagccgtggactgtcctacccgagcacttgattctggtagctccttctccttgtgacatggcaaaaactggacgtttccagattgtgaataactctgtgaggttactgagatttgagctgtgctggccagcgcattgcctcacagtcacgccgcagcatggatgtgtcgcgccagagagtaaactacaaattcttgtgagtcctaattcctccttatccacaaaacagtcaatgttcccgtggagtggtttgatctatatacactgtgacgatggacagaagaaaattgtgaaagttcaaattcgagaagatttaactcaagtggaacttttaactcgtttgacctccaaaccatttggaattctttccccagtatctgagccttcagttagtcatttggtcaaaccaatgacaaaaccgccttccacaaaagttgaaataagaaacaagagtattacttttcctacaacagaacctggtgaaacttcagagagctgtctagaactcgagaatcatggcaccacagacgtgaaatggcatctgtcatctttagcgccaccttatgtcaagggagttgatgaaagtggagatgtttttagagctacctatgcagcattcagatgttctcctatttctggtctgctggaaagccatgggatccaaaaagtctccatcacatttttgcccagaggtaggggggattatgcccagttttgggatgttgaatgtcaccctcttaaggagcctcacatgaaacacacgttgagattccaactctctggacaaagcatcgaagcagaaaatgagcctgaaaacgcatgcctttccacggattccctcattaaaatagatcatttagttaagccccgaagacaagctgtgtcagaggcttctgctcgcatacctgagcagcttgatgtgactgctcgtggagtttatgccccagaggatgtgtacaggttccggccgactagtgtgggggaatcacggacacttaaagtcaatctgcgaaataattcttttattacacactcactgaagtttttgagtcccagagagccattctatgtcaaacattccaagtactctttgagagcccagcattacatcaacatgcccgtgcagttcaaaccgaagtccgcaggcaaatttgaagctttgcttgtcattcaaacagatgaaggcaagagtattgctattcgactaattggtgaagctcttggaaaaaattaactagaatacatttttgtgtaaagtaaattacataagttgtattttgttaactttatctttctacactacaattatgcttttgtatatatattttgtatgatggatatctataattgtagattttgtttttacaagctaatactgaagactcgactgaaatattatgtatctagcccatagtattgtacttaacttttacaggtgagaagagagttctgtgtttgcattgattatgatattctgaataaatatggaatatattttaatgtggtatatccagaaaaaaaaaaaaaaaaaaaaa

SEQ ID NO: 5551 - DNA, 4420 bp, Homo Sapiens
  NM_032145
ggtggctgcctctggagcaggccgggagaagagaaaaggcggcggcccggctggggaagaggggcggaggaggcggttcggacggctgtgtggggtacggagcgtcgccgggacagagcggagcagctgggcacggcgtccagggcagctagggcctgggccgcggttcggccgcgccggccgagctggactggccattatggaggaggagctgcagcattcccattgtgtgaattgtgtcagtagacggtgcatgaccaggccagagccagggatttcctgtgatttgattggttgtccattggtttgtggtgcagttttccattcttgtaaagctgatgagcatcgacttttatgtccatttgaacgagtgccttgcttaaatagtgactttggatgtccatttaccatggcccgaaataaagttgctgaacatctagaaatgtgtcctgcaagtgtggtgtgctgtactatggaatggaatcgatggccagttagttatgcagaccggaaatcatatgaaaatctaagcagagatgtcgatgaagtggcacaattggatatggccttggctcttcaagaccaaaggatgctcttagaatccctcaaagtagccaccatgatgtcaaaagcaactgataaagtatccaaacctagagaacaaatctcagttaaatcaagtgtcccagaaataccacatgctaatggtttagtgtctgttgatgaagaatcttatggtgcactttatcaagctactgtagaaacaaccagaagtttggctgctgctttggatatcctgaatactgctacaagagacattggcatgttaaatacaagtgtcccaaatgacatggatgaacagcaaaatgcgagagaaagcttagaggatcaaaacttgaaagaccaagatcatctttatgaggaggaaataggagcagtaggtggaattgactacaatgacacaaatcagaatgcccagtctgaacaaaatggttcaagtgatttattatgtgacttgaatacaagttcttatgacacttctgctctttgtaatggctttcctttggaaaatatatgtacccaggtcatagaccagaatcagaatttacatggtgattcaaaacaaagtaacttaacaaatggagactgtgtggcatcatcagatggcacttcaaaaccttccagctcacttgcggtggcagcacaacttagggaaataataccatccagtgctttgcctaatggcacagttcagcatatcctcatgccagatgatgaaggtgaaggtgaattgtgttggaaaaaagtagacttaggggacgtgaagaatgtggatgtcttatctttcagtcatgctccttcattcaattttctttctaattcatgttggtctaaaccaaaggaagataaagcagtagatacatcagatttggaagttgcagaagatcctatgggcctccaaggaatagatctgatcacagcagcattgcttttttgtctaggagattctccaggagggaggggtatatctgatagccgcatggctgatatttatcacattgacgttgggactcagactttttcacttccatctgcaatattagctacaagtacaatggttggggagatagcttcagcttcagcttgtgatcatgccaatccacagctttcaaatccaagtccgtttcagacacttgggctggatttagtattggaatgtgtcgctaggtaccaacccaagcagcgttcaatgtttacctttgtgtgtggacagttatttagaaggaaagaattttcttcccactttaagaatgtgcatggtgacattcatgctggactcaatggctggatggaacagaggtgccctttagcttactatggttgtacctattctcagcgtagattttgtccatcaatacaaggagcaaagattatacatgaccgccatttgaggtcatttggagttcagccatgtgtatctacagtattagtggagcctgctagaaactgtgtgttgggattacataatgaccatctaagtagtcttccttttgaggtcctgcagcatattgcaggctttctcgatggcttcagcttatgtcagctctcatgtgtatccaagttaatgagggatgtgtgtggcagcctgcttcagtctcgtggcatggtcatactgcagtgggggaaaaggaagtatccagaaggaaattcatcatggcagataaaagaaaaggtatggcgatttagtactgcattttgttctgttaatgaatggaaatttgctgacatcctaagcatggcagaccacttgaagaaatgcagttacaatgttgtcgagaaacgggaggaagcaatccctttgccatgtatgtgtgtgacacgagaactcactaaagaaggacgttcactacgctcagttttaaaacctgtactttaaaagttgtaatattactagcacatatatgcaagcacctagtataatttctttgtaatatgtgaaactttattaatgtattaaatattacaactagctaaatttattgtcactgtgtatataatgttttgaagtgacatctatttttataaagtactgtttagttggaaaaagttgccttaatgtttgaaatgtgtgaaatttttggaacttgctggacagggtgatttaatttttagctacataattttaagaattagtattttcagtggtgtgcatattttggttcttaaatttttgcttcttaaactaaaaaaatcctgaccaatttatttgttgttttctgtgggttgcgacccatgcaatcaaaaagcaaaattttgattgagattttttacagcataggtttttcatataaaaatattctgaatttgttaagcactgccataatatcattataatgtttttgtcttttagtgcttccctatacaattgttaatgcacaaatgatctctaatatatacttacatacgtaaaatcataaagtttggtaatgcagtttatcgttttaaaaataatccacaaagatgtttttatctcacatacttacaactcaacacacagagtgaccatgtgcagctttcttttttgttagatgccacatccgaagactcatcgcagtgtgttatatgacaggacaaagcaaaaacaaacaaaaagcaagcctgtgaatataatttaatttgaaactgctcctggtattatatatttgctagttatctaatgttttaaaagaaaatatacctcatttaggtttgaattgggcgtattgtgtaaatttcaaatattcagaatgcaaagggcttgactattaaatgtttgcctttgatgtttataaacattacaactatgttgttttaagacatttaaaaacgtgaaatttgttatctttgtaaaatgacaatcatgtagaaacctgtcttggttgacaatctctttgaaacatttccgagttaatttcccataggcttcaccaccaagaaagtaagaattgcatctttacataatgatcaaggtataatggaaaaatatacctattcttgaagtagtttattatagttttcaaattgatttataccattattaacctgatgtggtctgcttaaaaaatgaatatatcagtatttagaaataaattgcaaaggtgggaatatatacttaaataatttgtcttaagtaaattagcatttggtagtctgaaatggtgacagattacttgttaaaattgtgaaaactctgttgtgtcctctcttcctacatttgtccctgagagtactccacgattactaggttcttgattcccttatatggcaatcaggcagaggcgttccttaagcattagagagttctgaagcttaagatttgttttggttggatgaagtccttagtacagttgaaaaacagagcattaaagactaatcaattgttttgcctcaccagtcattttaaatagtagaatacttatttctcagtgcttaaaatttctttttcaactgtgagattgaataaacagtctctatttctgtggaaaaaacaacagaaaagagatattaaataccataaaatgtaactctgccttttaaagttttgctgaagaatgtgtctgtggttaggatagcacaagcattaacttttgttttatagttatgctttttaaaattcattgtttttaaatttagacttcttatttccacactggattatgagatacttaacaatttttccaccttatatttcttttacacattttgctgttctcttttttgttattgttatgccaccataccattttgttaaaatgttttctttgtgaaacatttgttcaagttctaataaaattaatgttttcccttaacatggctcaataacttaaaaacgttcatttaaataaaattttaatacttgtttgacaaaaaaaaaaaaaaa

SEQ ID NO: 5552 - DNA, 2395 bp, Homo Sapiens
  NM_032151
cagccctcggcagacggccaatggcggcggtgctcggggcgctcggggcgacgcggcgcttgttggcggcgctgcgaggccagagcctagggctagcggccatgtcatcaggtactcacaggttgactgcagaggagaggaaccaagctatacttgaccttaaagcagcaggatggtcggaattaagtgagagagatgccatctacaaagaattctccttccacaattttaatcaggcatttggctttatgtcccgagttgccctacaagcagagaagatgaatcatcacccagaatggttcaatgtatacaacaaggtccagataactctcacctcacatgactgtggtgaactgaccaaaaaagatgtgaagctggccaagtttattgaaaaagcagctgcttctgtgtgatttcttccaaaatacatgtaaaatcttgtacacatcttagctgcaatgtatgttgaaggaaatttatgtgaacaaatagagttgttctttttctcttttttttaagacagagtgttgctctgtcgcccaggccagagtgcagtggtatgatctcggctcactgtaacctccgcctcccaggttcaggtgattctcctgcctcagcctcctgagtagctgggattacaagcacgtgtcaccacgcctggctaatttttgtatttttagtatagacagggttttaccacgttggtcaggctggtctcgaactcctgacctcgtgatccgcctgcctcagcctcccaaagtgctgggattacaggcatgagccaccatgcctggctgttgaattgttcttaaggcatcatatctagaagcaaagaaaaaagaaaaataacaatttaagttgtgtaaattgtttgcctttatatattacatttggtaaaatcagtgcttaaatacgcaatgatttaaactggaacctgaggtatttttcatgctatctaatcatatacctaagataaaccaacccagttacttatattaataatattcagaaagagaagtggcttttttttttttttgagacggagtcttgctctgtcaccaggctggagtgcagtggcgggatctcggctcactgcaacctctgcctcccaggttcaaatgattctcctgccacagcctcccgagtagctgggactataggcacgtgccactgcgcctagctaatttttgtatttttagtagagatggggtttcattatgttggccaggatggtctcgatctactgacctcgtgatccacctgcctccacctccgaaagtgttgggatcacaggcatgagccaccgcgcttggccagaagtggcattcttaaattcaagaaattgggatggggagtattcacacattttataacccagaaattcaagcaattctggtgactacaaatgcattgttttggagaatagttgtaaggtggaaaaagaattaggaactcgacagatagtgagttttaactttaaataacaattcttcttttgttttgttttgtttgagacggggtctcgctctgctgcccaggctggagtgcagtggcaggatcacggtttattgcagccttaacctcctgggctcaagcagttctccctcctcagcctccagagtagctgggactataggcaagtgccaccacgcctgactaatttttaaattttttgtagagatggggtctcccatcttgcccaggctggccttgaactcttgggctcaagcaagcctcccacctctgcctcccaaagtccaaggattacaggtgtgagccattgcccccagccagtataacagtttgtgtgtgtgtgtgtgtgtgtgtgtgtgtgtgtgtttgacacggggtctcattctgttgcccaggcagtagtgtagtggtgcgaccatggctcactgtagtcttgacttctcaggctcaagtgatcctctcacctcagcctcctgagtagcagcggttacaggcatgcatcaccacacctggcttatttttaaaacttttttgtggagacagggtcttactatgttgccatggctggtctagaacttctgggctcgagtaatcctcctgccttggcctctcaaaatgttgggattacaggtgtgagccactgtgtcataacaattattttaaaatttttatttatttatttttaataattatacaagatggagtctcactatgttgcccaggctggtcttgaatgcctgggctcaaatgatcttcctgccttgaccccccaaagtgctgggattacaggcgtgagccactgcgcctggcctataacaattcttatgaagctaaagttgatttggattttagctgccgttactacttatataattaattagattaaacaagtcacaaaaattggaaaaaaaaaaaaaaaaaa

SEQ ID NO: 5553 - DNA, 2023 bp, Homo Sapiens
  NM_032154
ggcgtccgaggccggccgaactcccgcgctctcccgccgcctcgcctcgcctggtgtctctcccgaccatggagggggtcgcggtggtgacggcgggcagcgtaggcgctgccaaaaccgagggagctgcagccttgccgcctccgcctcctgtctccccgcccgccctcacccctgcacccgcagcgggtgaggagggaccggcgcctctgtctgagacgggggctcccggctgctccggctcccggccccctgagctggagccggagcgcagcctgggccgcttcagaggccgcttcgaggacgaggacgaggagttggaagaagaagaggagctggaggaggaagaagaggaggaggaggaggacatgagtcacttctcgttgaggctggagggaggccggcaggactcggaggacgaggaggagcgcctgattaatctctctgagctgaccccatacatcttgtgttccatttgcaaaggttacttaatagatgcaactaccatcacagaatgtcttcataccttttgtaaaagctgcatcgtaagacatttttactacagcaacagatgtccaaaatgcaatatagtagtacatcagacacaacctctttataacataagtgctaatgaaggcacgggacattttaagccattggaaaagaagtttgttcgagtttcaggagaagcaactattggacatgtagaaaaattcctcagaagaaaaatgggtcttgatccagcttgtcaggtagatataatctgtggtgatcacctgttggagcagtatcaaactctaagggaaatccgacgtgcaataggtgatgcagcaatgcaggatggtctgcttgtccttcattatggtcttgtggtttctcctctgaagataacttgaagattctaggcacattatgaggagggaaacaaaggaggcttctgcaggactgcatctcaccaaagatttccatgaaatgtaattgctaccactttgctgttcaagacataacttacctatttttagcaccaagaattatagcgtttataagtacaacttggaacgatggaatgcatctgttactagagactgtatataaaaagcagccaaagctcaggggaaatttttcaaaaattgaattttaaaatttcttatgattttaaataccttgacattgattttgcttcccatctttgaagtaattggttagttttctttgttcagccatttcaagttggtggttgggatatctgctctctgggatggcatcagttgggcagtcatctttttggaagagaagtgtgcttttgagtggaagattcaaagccagtctttgttaaactgcagggtgtactctcaaagaccaaaactattggccacttttgtatgttgccagcatattttgaacttgtacctttttttatactagcaacactacaaaggagaagttactcatttcaaaatggatgaattgttattatgtgtgaagagactctgagtttatgatctgtgccataaaatttcagtgtaataagacttcttcaatacatcttccaataaggggtgcttctttgtgacagtatttttatttctgacattcattttatttgggtacatagtgtggttgttgataccttgcaatagtattgcttctgaaagtaataaaaaattttaggagaatttgagaagtttacagaattacttattcattgttttcttagtaagtcagtttaatgtttatttttctcattatttcatcactgcaataaagaataagggtgtttgagctcacctccatgcaaagacttcagttttaaaacattatttgcctaaaattagcattgtgatgctttctgaaagaaatattttataaatcctgtttaacagcagaatttctgaatgtgtagagactactacaaaattggaaaaagattggcaattctttgtaaagaatttgtgaattgtgtataaatttattctaacatttaataaaaatgtattttaacctaaaaaaaaaaaaaaaaaaa

SEQ ID NO: 5554 - DNA, 1760 bp, Homo Sapiens
  NM_032158
tgcgacagagccgtaaaggcgcgcgggaacatggggctgtacgctgcggtggcaggcgtgctggccggcgtggagagccgccagggctctatcaaggggctggtgtactccagcaacttccagaacgtgaagcagctgtacgcgctggtgtgcgaaacgcagcgctactccgccgtgctggatgccgtgatctccagcgccggcctcctcagtgcgaagaagctgcagccgcacctggccaagggtgctagtgtatgagttgttgggaaagggctttcgagggggtgggggccaatggaaggctctgttgggacggcaccaggcgaggtgttgagttggctcggctcaaggttcttcggggtgtgagctggcatgaggacctgttggaagtgggatccaggcctggtccagcctcccagctgcctcgatttgtgcgtgtgaacactctcaagacctgctccgtttatgtagttatttcaagagacaaggtttctcctatcagggtcgggcttccaggctggatggagtgccctggcgcgatcttggctcaccgcaacctctgcctcctgggttcaagcgattctcctgcttcagccttctgagcagctgggattatgaaggggtggcctgcccctccacatctgtgggatatctcatcagcctcgatgacttacgagccctcaaggggaagcattttctcctggaccccttgatgccggagctgctggtgtttcccgcccagacagatctgcatgaacacccactgtaccgggccggacacctcattctgcaggacagggccagctgtctcccagccatgctgctggacccccgccaggctcccatgtcatggatgcctgtgccaccccaggcaataaagaccagtcacttggctgctcttctgaagaaccaagggaagatctttgcctttgacctggatgccaggcggctggcatccatggccacgctgctggcctgggctggcgtctcctgctgtgagctggctgaggaggacttcctggcggtctcccccttagatccgcgctatcgtgaggtccactatgtcctgctggatccttcctgcagtggctcgggtatgccgagcagacagctggaggagcccggggcagggacacctagcccggtgcgtctgcatgccctggcagggttccagcagcgagccctgtgccacgcgctcactttcccttccctgcagcggctcgtctactccatgtgctccctctgccaggaggagaatgaagacatggtacaagatgcgctgcagcagaacccgggcgccttcaggctagctcccgccctgcctgcccggccccaccgaggcctgagcacgttcccgggtgccgagcactgcctccgggcttcccccaagaccacgcttagcggtggcttcttcgttgctgtaattgaacgggtcgagatgccgacctcagcctcacaggccaaagcatcagcaccagaacgcacacccagcccagccccaaagagaaagaagagagcaaaaagctgcagccggtgcttgcacaccgccttgcacatagcagaggctccgggctcactccttcctggtgggaaaggaagatgcctgtcctctccgtggaagaccctgggccctcaccgcaggcagcagtttgcgttttgaaaggttattgggtcccttcctcgggctgtgttcttgctggtgagcaaaagtgttgcctgcagaaataaaatgcagaacgtactctacgataaaaaaaaaa

SEQ ID NO: 5555 - DNA, 2428 bp, Homo Sapiens
  NM_032166
gcgctgtcggatacttggggtgagcggaaagcatggcggggacctccgcgccaggcagcaagaggcggagcgagcccccggcgcctcgccccggcccgccgccgggcaccgggcaccccccgagcaagcgggcccggggcttctccgcagccgctgccccggaccctgacgacccgttcggcgcgcatggggacttcactgccgacgacctggaggagcttgacaccctcgcgtcacaggccctgagccaatgtccggccgcggctcgggacgtgtccagtgatcataaggtccacagattattagatggcatgtcaaaaaatccttcagggaaaaacagagaaactgttccaattaaagataatttcgaattagaggtacttcaggcacaatacaaagaacttaaagaaaagatgaaagtaatggaagaagaagttctcattaagaatggagaaattaaaattttgcgagactcactacatcagacggaatccgttctagaggaacagagaagatcacattttcttcttgagcaagagaaaacccaagcactcagtgacaaggaaaaggaattctccaaaaagctccaatcattgcagtctgaactccagtttaaagatgcagagatgaatgaattaaggacaaagctccagaccagtgaacgagcaaataaactggctgctccctctgtttcccatgtcagtcctaggaaaaacccttctgtggttataaagccagaagcatgttctccacaatttggaaaaacatcttttcctacaaaggagtcttttagtgctaacatgtcccttccccacccctgccagacggagtcaggatacaagcctctggtgggcagagaggatagtaagccccacagtctgagaggtgactccataaaacaagaagaggcccagaaaagctttgttgacagctggagacagagatcaaacactcaaggttccattttgataaacctgctcctgaagcagcctttgatcccagggtcatccctaagcctttgccacctcctgagtagtagttctgagtctcctgctggcacccccctgcagccaccagggtttggcagtaccttggctggaatgtcaggcctcaggaccacaggttcttatgatgggtcattttccctctcagccctgagagaagcacagaacctggcattcactggactgaatctggttgcccggaatgagtgctcacgtgatggagacccagcagagggaggcagaagggccttcccactctgccagcttcctggagccgtgcatttcctcccccttgtacagttcttcatcggcttacactgccaggccctgcaggacttggcagctgctaagagaagcggagcacctggggactcaccgacacattcctcctgcgtgagctctggggtagagaccaaccctgaggactcagtgtgcatcctggaaggcttctctgtgactgcacttagcattcttcagcacctggtgtgccacagcggagcagtcgtctccctattactgtcaggagtgggggcagattctgctgctggggaaggaaacaggagcctggttcacaggcttagtgatggagatatgacctcagccctaaggggggttgctgatgaccaaggacagcacccactgttgaagatgcttcttcacctgttggctttctcttctgcagcaacaggtcaccttcaagccagtgtcctgacccagtgccttaaggttttggtgaaattagccgaaaacacttcctgtgatttcttgcccaggttccagtgtgtgttccaagtgctgccaaagtgcctcagcccagagacacccctgcctagcgtgctgctggctgttgagctcctctccctgctggcggaccacgaccagctggcacctcagctctgttcccactcagaaggctgcctcctgctgctgctgtacatgtacatcacatcacggcctgacagagtggccttggagacacaatggctccagctggaacaagaggtggtcagagcgctcacggtgatgttgcacagacagtggctgacagtgcggagggcagggggacccccaaggaccgaccagcagaggcggacagtgcgctgtctgcgggacacggtgctgctgctgcacggcctatcgcagaaggacaagctcttcatgatgcactgcgtggaggtcctgcatcagtttgaccaggtgatgccgggggtcagcatgctcatccgagggcttcctgatgtgacggactgtgaagaggcagccctggatgacctctgtgccgcggaaaccgatgtggaagaccccgaggtggagtgtggctgaggccctgagtgtccagccacatggtggcaccagcaccactcctttccttaccacatcaactgattaaagcagtgaccagcaggaactgcccagagaactgg

SEQ ID NO: 5556 - DNA, 2248 bp, Homo Sapiens
  NM_032167
ggcagccgcagaagcggcagcggcggcggcgcggcgcaggcaccggcccggggagaggcaccatgagcggatcacagaacaatgacaaaagacaatttctgctggagcgactgctggatgcagtgaaacagtgccagatccgctttggagggagaaaggagattgcctcggattccgacagcagggtcacctgtctgtgtgcccagtttgaagccgtcctgcagcatggcttgaagaggagtcgaggattggcactcacagcggcagcgatcaagcaggcagcgggctttgccagcaaaaccgaaacagagcccgtgttctggtactacgtgaaggaggtcctcaacaagcacgagctgcagcgcttctactccctgcgccacatcgcctcagacgtgggccggggtcgcgcctggctgcgctgtgccctcaacgaacactccctggagcgctacctgcacatgctcctggccgaccgctgcaggctgagcactttttatgaagactggtcttttgtgatggatgaagaaaggtccagtatgcttcctaccatggcagcaggtctgaactccatactctttgcgattaacatcgacaacaaggatttgaacgggcagagtaagtttgctcccaccgtttcagacctcttaaaggagtcaacgcagaacgtgacctccttgctgaaggagtccacgcaaggagtgagcagcctgttcagggagatcacagcctcctctgccgtctccatcctcatcaaacctgaacaggagaccgaccccttgcctgtcgtgtccaggaatgtcagtgctgatgccaaatgcaaaaaggagcggaagaagaaaaagaaagtgaccaacataatctcatttgatgatgaggaagatgagcagaactctggggacgtgtttaaaaagacacctggggcaggggagagctcagaggacaactccgaccgctcctctgtcaatatcatgtccgcctttgaaagccccttcgggcctaactccaatggaagtcagagcagcaactcatggaaaattgattccctgtctttgaacggggagtttgggtaccagaagcttgatgtgaaaagcatcgatgatgaagatgtggatgaaaacgaagatgacgtgtatggaaactcatcaggaaggaagcacaggggccactcggagtcgcccgagaagtaagtttgtgtgtaaggtggagtctcaccgtcccccaggctggagtgccgtggcgtgatctcagctcactgcaacctccacctcccgggttcaagctattctcctgcctcagcctcccgagtagctgggattacaggcacctgtcaccacacccagctaatttttgtatttttagtagagatggggtttcaccatattggccaggctggtctcaaactcctgacctcaagtgatctgcctgccttggcctcccaaattgctaggtttacaggcatgagccaccacgcccagccttcccttgcacttttaatgagggggttaagttcactgttttctctttctatggtattgggtaaaataggtctgcaagctttatatttgcccagggtatcattcattcttcaggtgttgatttaggagtgttatttggaaggagtattatttgctcttcccctgagaactgaaagaggggaaaggagtacatttgagggcacttaatacaaagttaatgtcagaatgtgtgccttgaaattcttgctttatacatacatctgtcattttcatttcacagggttcacagggtttcacagtctgatgagactgtgcctgttattgttttttatttttactctggattttccttgcatctgacttgccactagcacaggaagctcaggacgaaggcagcgttaggagaatagttgtggtatggtgacttctgtgtttatctgcaggggtgtgaatagccgtaacttgcctgcacctgctgccttaacagtggagttggccaggcgcagtggctcacacctgtaatcccagcactttgggacaccaaggtgggtggatcacctgaggtcaggagttctagaccagcctgaccaacatggtgaaaccccttctctacgtataaaaaaatacaaaattagccaggcatggtggtgcatgcctgtaactccagatacttgggatgctgaggcaggagaatcgcttgaatatgagaggcggagccaagatgatgccattgcactccagcctgggcaacaagagagaaggtccttctc

SEQ ID NO: 5557 - DNA, 2777 bp, Homo Sapiens
  NM_032168
ggctcaacgaaggaagttcagggcgggaccagagattggccattccgctactgcgcaaagatggtggaggaggagaacatccgcgtggttcgttgtggcggcagcgagttgaactttaggagagctgtgttctctgcagattctaagtatatcttctgtgtctctggagactttgttaaagtttacagcacagttacagaagagtgtgtacacatactgcatggacacagaaatctggtgactggaatccagcttaaccccaacaaccatctacagctgtattcttgttcccttgatggcacaattaaactgtgggactatatagatggcatcttaataaagactttcatagttggatgtaaacttcatgccctctttactcttgcccaagctgaggattctgtctttgttatagtgaataaagaaaaaccagatatatttcagctggtttcagtgaaactgccaaaatcctcaagccaggaagtagaagccaaggagctgtcctttgttttggattacataaaccagtcacccaagtgcattgcctttggaaacgagggagtatatgttgctgcagtacgggaattttacttgtctgtttattttttcaaaaagaaaacaacatcaaggtttactttatcatcatcaagaaataagaagcatgctaaaaacaattttacgtgtgtagcatgtcacccaacggaagactgcatcgcatctggtcacatggatggcaaaattcgtctttggaggaatttttatgatgataagaaatatacgtacacatgtttacattggcaccatgatatggttatggatttggctttttcagtgacaggcaccagtctgctgagtggcggtcgtgaatctgtacttgtagagtggcgcgatgcaacagagaagaataaggagtttctcccgcgtttaggagctactattgaacatatctcagtctcgcctgcaggagatttattctgcacttctcactctgataataagataataattattcaccgaaaccttgaagcatccgcagtaattcaaggcctagtgaaagataggagtatcttcactggtttgatgattgatccaagaactaaagctttggttttgaatggaaaacctggccacctgcagttttattctctccagagtgataaacagttatacaatttagatattatacagcaagaatatattaatgattatggtctgatccaaattgaactaacaaaggctgcatttggctgctttggtaactggcttgcaacagtggaacagcggcaagaaaaggaaactgagcttgaattgcaaatgaaactgtggatgtataataagaaaacacaagggtttattcttaacactaaaattaacatgccacacgaagactgcattacagctctctgtttctgtaatgcagaaaaatctgaacagcccaccttggttacagctagcaaagatggttacttcaaagtatggatattaacagatgactctgacatatacaaaaaagctgttggctggacctgtgactttgttggtagttatcacaagtatcaagcaactaactgttgtttctccgaagatggttctttactagcagttagttttgaggaaatagtcacaatatgggattctgtaacatgggaacttaaatgtacattttgccaacgagctgggaaaataaggcacctttgctttgggagattgacgtgttcaaagtatctacttggtgctactgaaaatggcattctttgctgttggaatctgctgagctgtgcattggagtggaatgcaaaattaaatgttagagttatggaacccgatcctaattcagagaatattgctgcaatctctcagtcttcagtgggttcagacttgtttgtatttaaacctagtgagccaaggccattgtatattcaaaagggtatctccagagagaaagtccagtggggagtgtttgttccacgagatgtccctgaatccttcacctcagaagcttaccagtggctaaatagatcccagttttacttcctaacaaaatcacagagtttattgacattcagtacaaagtctccagaagaaaaactcacaccaacaagcaaacagctgctagcagaagaaagtcttcccacaaccccattttatttcatattgggaaaacacaggcaacagcaggatgaaaaactaaacgaaactttagagaatgagctggtacaactacccttaacagaaaacatacccgcaattagtgagcttcttcacactccagcccatgtcctgccatctgctgctttcctgtgctccatgtttgtaaattcattgctgctgtctaaagagactaagagtgctaaggaaattcctgaagatgtagatatggaagaagaaaaagaaagtgaagattcagatgaagaaaatgattttaccgaaaaagtccaggatacaagtaacacaggtttaggagaagacattatacatcagttgtcaaaatctgaagaaaaagaactgagaaaatttaggaaaatagactacagctggatagctgccctttaagccttggagatggggaggatccttggactttgtgtttttgattgtatgttgatattctaaaaacatctattttaatgttatttctgttctaaaaataagataataaatattaacaaactttaaaaaaaaaaaaaaaaaaaaaaaaaaaaaaaaaaaaaaaaaaaaaaaaaaaaaaaaaaaaaaaaaaaaaaaaaaaaaaaaaaaaaaaaaaaaaaaaaaaaaaa

SEQ ID NO: 5558 - DNA, 3556 bp, Homo Sapiens
  NM_032169
ttctgaacgggaccctgcaggtcttccgcctgctgttgcattaaatttgggggtggaagaggcttctgcgttgttccttacccgcaacgatgaccatggctttgccttctttaaaattgaggcctccaactctgacgctgactggagaattgaaacccgaacacacattgggctcttttggcacttgactagagctaaaacctcgggattcagcgggcaagcgttgctcagcaacggcgcgtaggctgtgtgcggttggctggagccagaccccaccccggcctcggcccatgctctagaggggacgttgccccaatcctgaaggacttcggcactcgagacctgtggatgccgcgttgctgtggcctgcgggggtgatcatgaagccaggtgctactggcgagtccgatttggccgaagtgctgccccagcacaagttcgacagcaagtccctggaggcctacctaaaccagcacttgtctggctttggggccgaacgtgaggctacgctgaccattgcccagtacagagcaggaaagtccaatccaaccttttatctccagaagggctttcaaacatatgtgctcaggaaaaaaccaccaggttcacttcttcctaaagcacatcagattgatagagaatttaaagtccagaaagccttgttttcaattggattccccgttcccaagcctatactgtactgcagtgatacttctgtcattggaacagaattttacgtaatggaacatgtgcagggtcgaatcttccgtgatttaacaattcctggacttagcccagcagaacgttcagccatatatgtggccacggtagaaacattggctcagttacattccttgaatatacagtcactgcagctggaaggatatggtataggtgctgggtactgcaaaagacaggtatcaacctggacaaagcaatatcaagctgcagctcatcaggacatccctgccatgcaacagctatcggagtggctaatgaagaacttgcccgataatgacaatgaagagaatttgattcatggagatttcagactagataacatagttttccaccctaaagagtgtcgagttatagcagtgctggattgggagctgtcaaccattggtcatcctttgtcagacttagctcatttttccctgttctacttttggccaaggacagttccaatgataaatcaaggttcttatagtgaaaactcagggataccatcaatggaagaactgatttcaatatattgccgctgcaggggaattaattctattcttcctaactggaatttctttcttgccctttcatattttaagatggctggaatagcacagggagtatatagcagatatcttctgggaaataattcatctgaggatagctttttatttgccaatattgtgcaacctctggcagaaactggactacaactctccaaacgaactttcagtactgtactaccacagattgatactactggacagttgtttgtacagactcggaaaggtcaggaagttcttattaaggtgaagcatttcatgaaacaacacattcttccagctgaaaaggaggtaactgagttctatgttcaaaatgaaaattcagtggacaagtggggaaaacctttagtgattgataaactcaaggaaatggccaaagtcgagggtctctggaacttgtttttgccagctgtcagcggactcagccacgtggactatgccttgattgctgaagaaacaggaaaatgcttttttgctccagatgtctttaactgccaagcaccagacacagggaatatggaggttctgcacctgtatggaagtgaggaacagaagaaacagtggcttgagcctcttcttcaagggaacattacctcttgcttctgtatgacagaacctgatgtagcttcaagtgatgccacgaatattgaatgcagcatccaacgagatgaagatagctatgtaattaacggcaaaaaatggtggagcagtggagctgggaatcccaagtgcaaaattgcaattgttttgggaagaactcaaaatacttctctctccagacacaaacagcacagcatgattcttgttcccatgaacacacctggagtaaaaataataaggcctttgtcagtttttggctacacagataattttcatggaggacattttgagatccattttaatcaagtgcgagttcctgccacaaatctaatactaggtgaaggtaggggatttgaaatttcccaaggccgccttggacctggcagaatccaccactgtatgagaacagtaggtttggcggaacgcgctttgcagatcatgtgtgagcgggcaacacaaaggatagctttcaagaagaagttgtatgcacatgaggttgtggctcactggattgctgaaagccgcattgccattgagaagatccgcttgttgactctgaaagctgctcacagcatggacactctgggcagtgctggcgctaagaaagagattgcaatgatcaaagtggctgccccacgggctgtcagcaaaatcgttgactgggccatccaggtgtgcggaggtgctggtgtttcccaggattaccctctggctaacatgtatgctataacccgagttttgcgtttagcagatggacctgacgaagttcatctttcagcaatcgcaacaatggagctgcgggaccaagccaaaagactgacagccaagatataaggagggtggcactgccacatcccactggcagaaactctcctttatacaaacttcattggctccaacatttgaatctcatatttttgtagcagtttgagcacagggttaattattcatttgtggtaaagattatagcatctattttgatcagtgggttttattatttcaagggtcacacagggttaagttcagtaagaaatgctgtagctgttgtcattcaatctagtgcctccttgaggccaggagttcaggaccagcctgggcaacatagcgagacccccattgctacaaaaaatttaaaaatgaaacaagtgtggtggcacatgcttgtagtcctagctacttgggaggctgaggcaggaggattgcttgagtctaggagtttgaggttacagtaagctgtgatcgtgacatggcctccagcctgggtgaccgagtgagactgtttctaaaaataaaaacaaaaaataaatttcttcttgaggtggggtggaggtggggagcaagaatttgacctggctctgatccctggtgtgttgtgtgggcctctttaacgtttgccactgagccttaacctcactgtacttcactgtacttcacacgcattggtgttaacattttaatcttagaagaccctgacccactgagggtttgttgtgagaattgctgaagccacgtagaagcaccttgaaatctgtaaaaccacaagaaagtactttataaaaggtatccttatttgaagtggataaatcttgtaactcgaaaagttgtgatttagaagacaggattgtttttgaacattaggaattaaaggctatatctggtccttacaa

SEQ ID NO: 5559 - DNA, 5135 bp, Homo Sapiens
  NM_032172
gcggcggcggtgcccggatggaggcacgtcattgtcccccgccgggcggctgggctgtgtgcggcggcggcggcggcggccgagggggatggagcgagcgccgagccgggtcagagttgaacaatgaccatagttgacaaagcttctgaatcttcagacccatcagcctatcagaatcagcctggcagctccgaggcagtctcacctggagacatggatgcaggttctgccagctggggtgctgtgtcttcattgaatgatgtgtcaaatcacacactttctttaggaccagtacctggtgctgtagtttattcgagttcatctgtacctgataaatcaaaaccatcaccacaaaaggatcaagccctaggtgatggcatcgctcctccacagaaagttcttttcccatctgagaagatttgtcttaagtggcaacaaactcatagagttggagctgggctccagaatttgggcaatacctgttttgccaatgcagcactgcagtgtttaacctacacaccacctcttgccaattacatgctatcacatgaacactccaaaacatgtcatgcagaaggcttttgtatgatgtgtacaatgcaagcacatattacccaggcactcagtaatcctggggacgttattaaaccaatgtttgtcatcaatgagatgcggcgtatagctaggcacttccgttttggaaaccaagaagatgcccatgaattccttcaatacactgttgatgctatgcagaaagcatgcttgaatggcagcaataaattagacagacacacccaggccaccactcttgtttgtcagatatttggaggatacctaagatctagagtcaaatgtttaaattgcaagggcgtttcagatacttttgatccatatcttgatataacattggagataaaggctgctcagagtgtcaacaaggcattggagcagtttgtgaagccggaacagcttgatggagaaaactcgtacaagtgcagcaagtgtaaaaagatggttccagcttcaaagaggttcactatccatagatcctctaatgttcttacactttctctgaaacgttttgcaaattttaccggtggaaaaattgctaaggatgtgaaataccctgagtatcttgatattcggccatatatgtctcaacccaacggagagccaattgtctacgtcttgtatgcagtgctggtccacactggttttaattgccatgctggccattacttctgctacataaaagctagcaatggcctctggtatcaaatgaatgactccattgtatctaccagtgatattagatcggtactcagccaacaagcctatgtgctcttttatatcaggtcccatgatgtgaaaaatggaggtgaacttactcatcccacccatagccccggccagtcctctccccgccccgtcatcagtcagcgggttgtcaccaacaaacaggctgcgccaggctttatcggaccacagcttccctctcacatgataaagaatccacctcacttaaatgggactggaccattgaaagacacgccaagcagttccatgtcgagtcctaacgggaattccagtgtcaacagggctagtcctgttaatgcttcagcttctgtccaaaactggtcagttaataggtcctcagtgatcccagaacatcctaagaaacaaaaaattacaatcagtattcacaacaagttgcctgttcgccagtgtcagtctcaacctaaccttcatagtaattctttggagaaccctaccaagcccgttccctcttctaccattaccaattctgcagtacagtctacctcgaacgcatctacgatgtcagtttctagtaaagtaacaaaaccgatcccccgcagtgaatcctgctcccagcccgtgatgaatggcaaatccaagctgaactccagcgtgctggtgccctatggcgccgagtcctctgaggactctgacgaggagtcaaaggggctgggcaaggagaatgggattggtacgattgtgagctcccactctcccggccaagatgccgaagatgaggaggccactccgcacgagcttcaagaacccatgaccctaaacggtgctaatagtgcagacagcgacagtgacccgaaagaaaacggcctagcgcctgatggtgccagctgccaaggccagcctgccctgcactcagaaaatccctttgctaaggcaaacggtcttcctggaaagttgatgcctgctcctttgctgtctctcccagaagacaaaatcttagagaccttcaggcttagcaacaaactgaaaggctcgacggatgaaatgagtgcacctggagcagagaggggccctcccgaggaccgcgacgccgagcctcagcctggcagccccgccgccgaatccctggaggagccagatgcggccgccggcctcagcagcaccaagaaggctccgccgccccgcgatcccggcacccccgctaccaaagaaggcgcctgggaggccatggccgtcgcccccgaggagcctccgcccagcgccggcgaggacatcgtgggggacacagcaccccctgacctgtgtgatcccgggagcttaacaggcgatgcgagcccgttgtcccaggacgcaaaggggatgatcgcggagggcccgcgggactcggcgttggcggaagccccggaagggttgagtccggctccgcctgcgcggtcggaggagccctgcgagcagccactccttgttcaccccagcggggaccacgcccgggacgctcaggacccatcccagagcttgggcgcacccgaggccgcagagcggccgccagctcctgtgctggacatggccccggccggtcacccggaaggggacgctgagcctagccccggcgagagggtcgaggacgccgcggcgccgaaagccccaggcccttccccagcgaaggagaaaatcggcagcctcagaaaggtggaccgaggccactaccgcagccggagagagcgctcgtccagcggggagcccgccagagagagcaggagcaagactgagggccaccgtcaccggcggcgccgcacctgcccccgggagcgcgaccgccaggaccgccacgccccggagcaccaccccggccacggcgacaggctcagccctggcgagcgccgctctctgggcaggtgcagtcaccaccactcccgacaccggagcggggtggagctggactgggtcagacaccactacaccgagggcgagcgtggctggggccgggagaagttctaccccgacaggccgcgctgggacaggtgccggtactaccatgacaggtacgccctgtacgctgcccgggactggaagcccttccacggcggccgcgagcacgagcgggccgggctgcacgagcggccgcacaaggaccacaaccggggccgtaggggctgcgagccggcccgggagagggagcggcaccgccccagcagcccccgcgcaggcgcgccccacgccctcgccccgcaccccgaccgcttctcccacgacagaactgcacttgtagccggagacaactgtaacctctctgatcggtttcacgaacacgaaaatggaaagtcccggaaacggagacacgacagtgtggagaacagtgacagtcatgttgaaaagaaagcccggaggagcgaacagaaggatcctctagaagagcctaaagcaaagaagcacaaaaaatcaaagaagaaaaagaaatccaaagacaaacaccgagaccgcgactccaggcatcagcaggactcagacctctcagcagcgtgctctgacgctgacctccacagacacaaaaaaaagaagaagaaaaagaagagacattcaagaaaatcagaggactttgttaaagattcagaactgcacttacccagggtcaccagcttggagactgtcgcccagttccggagagcccagggtggctttcctctctctggtggcccgcctctggaaggcgtcggacctttccgtgagaaaacgaaacacttacggatggaaagcagggatgacaggtgtcgtctctttgagtatggccagggtgattgaaaactcagcctcaaaacaaaaaattcactagttatgattcaacgcgttcaacagaagccatccccagcccagcttaaattataaagatagacaataactctgttccaatctgcgtggtgcttctttagtaaatactgtacagattttaccatggagaactttttttttagtttttaccttttcttaattacccttattccgaatggacgaacactttctaccactgctgaccattgtaaaataccgtgtatataaatcccattgaaataatgccctggaatagaacatctcaaatgctgcttaattacagactcaggtcgattacttgtatttcatgtaatgttcctccaagttagacatctggtgcaagaccaaccgggagaccatggaattgtcaaaagtacaaactgacagtgtgtatatttaatttaaagacttatttaaaaactcacaagctctcacctagactttggagagcagtctgttttctgtaatgtctgatactagaaactaatttgcttattttagttgtattcaagatttgaagatgtattttatagacaagttctgtttttgaactttgtggaactgttccaatcaatcaatttcccagttatgatgagtatttacattatgaatgtataacccagacatgatttgtaaagccgacagtatgtttctattacacaacactttttgatacagcgtctcttgtcttcactgatactggagtctccgttgtctgcttggtcccttcgagtttctagttacagacacaatcatactgtgattttatttttaatatggatatgctatcaaactgtgatacacttataattcactggtcctgcatcaggagatggagtggggaaaactgtatttaatacagtttgtatctgaataatctgtatggtttatacagtttgtgttgttcagagatgtttaaagtttgatctttgtttttctaaagattaaaaaagcacttgccccactgtaaatatacagcatgtaaaatttctatagtatataaatggcagcaaatcacaaaaaaaaaaaaaaaa

SEQ ID NO: 5560 - DNA, 2713 bp, Homo Sapiens
  NM_032174
gaagctgcagttctgccatcactcaagatggctgcccccatcaagatgaccggggtgtgccggggggaaaggggcagcatgatggtctgagatggtgtagcgtcggaccatgtggaagtttctgaggctggggagccggataatggggggtggggcccgttggggggtaaaggggcaatagcgtcctttcacaggctaacctcggctcttcccagtcctctggactaaaatggggaacacattgggcctggcaccaatggggactttgccccgccggagcccccgccgagaggaacccctgcccaaccctgggagcttcgatgagctgcaccgtctatgcaaagatgtattcccagcacagatggagggagtgaagctcgttgtcaacaaggttctgagcagccatttccaggtggcgcacactatacacatgagtgccctgggcttgccgggatatcacctccatgcggcctatgcaggggattggcagctcagtcccactgaggtgttccccactgtggtaggggatatggacagcagtggcagcctgaacgcccaggtcttgctcctcttggcagagcggctccgagctaaggctgtcttccagacgcagcaggccaagttcctgacatggcagtttgatggcgagtatcggggagatgactacacagccactctgaccctaggaaatcctgacctgattggggagtcggtgatcatggttgctcacttcctgcagagcctcactcatcggctggtgctgggaggagagctagtttatcaccggcggccaggcgaagagggggccatcttgacactggctgggaagtactcggctgtacactgggtagctacattgaatgtgggatcaggcggggcccatgcaagttactaccacagggcaaatgaacaggttcaggttggagtggagtttgaggcaaacacaaggctacaagacacaacattctcctttggttaccacctgactctgccccaggccaacatggtatttagaggcttggtggatagtaactggtgtgtaggtgctgtgctggagaagaagatgccccctctgcctgtcaccctagcccttggagccttcctcaatcactggcgcaacagattccattgtggcttcagcatcactgtgggctgaggttgtccagagccagcccccacagcagctggaacctctgagtcaggtgccctagggccaaagactaggcccctcttcagagcccaccttgctgggtgatctctaggacccaggagcagagtggtggacaggaccatgccctcctcagaactggagctgccacaggggcagttgatgaggcagaggtttgaggatcccccctctgctaccagccccagtatcaccttccccatgctcttgtggctgtggactaagggagaaggattaaggggtatggctgaattcccccggcaccccttgccctcaggcttccttcttcctttccctttggttaatcctgcatgggattagctgaccatcctgttttccatcccagagcctcccaaggctgggaaagtagggctgaagggctagatgtttggtctcaggaagtggggcccacccattcccagaaggagcttctttacctcttagccctgaggtttcctccttcccatcttctgtgcttccagagaacaactttgttcctatggtcacccccactatccccatgaccgcatgaagaggcagttattgctttagtctttcattgcaaccactgggctccctttgaacccggcccaatctttggtcccagcattttcccactccagtgtatccagggtgttccaggtgagctggggaaggaagtgagcatggcctcagctgcagatctcctggagcagcggcatcatggcagacaggccctggatgtgctggatttggtacccgtaggcctcattaatgctccggagctcagccagcaggcctagcaacttcgcatacagaaacctttggaggaagtagtggggttgccaggaaaacaggagggaaataaggcagttgggagtcttgtctctaggccctgatcccctgaactattcctcagtgaagccaggtctgaacattagagaaaatcatgctctggtatgacagactatcagaggttccaaaggtcctccagggggcctcggtctgacactgtcttctctcaccatgctcagttttttctgaacccagagctctgagagccgagtgtgaagaaagctccagacttggccagaactccaaccatgtggaatctgagggcctggccttctagagcaggttctagaaggtggatgtgttctatggtataaagcatcccctttctggccaaactagctcttggaggaacgagcaaaacagaagcggtgcatacctcagagcctggataaatcacagactattgaacctggaactggctttgaccatgaaactgtgaatggccctaacttcaagggaaatgagaaatcgaaggaattggcccaatggcgaggagaggaaaggccaagggaagagaaaagtctgcgttagtctggagaagttggactagtgaggtaatggatgtcatcaatctcaggaatgctattacccagagcctctgagctactactttgcatctgtactgaataaaaaaaaaatctggaaaaagtgagatgaaaaaaaaaaaaaaaaaaaaaaaaaaaaaaaaaaaaa

SEQ ID NO: 5561 - DNA, 3655 bp, Homo Sapiens
  NM_032175
gtgtgtgtcgccggctccttgagggtccatgtgatttttacgccagtgctgctgaactgtgcagggtagggagctggcacagtccgattaattgtccttgggtcgaggtgtctcgtcggaccctttggggctcagtggagaattaaggcagagtcactgtaattatttctaataccaattccaaaatagtgactcttggacaatagtgcaattatatggaattatggctggttataagcctgtagctattcagacatatcctatacttggtgaaaaaatcacccaagatacactgtactggaacaactataagacccctgttcagattaaggaatttggtgcagtttcaaaagtagacttttctcctcagcctccatataattatgctgtcacagcttcctcaagaattcacatttatggccgatactcccaagaacctataaaaaccttttctcgatttaaagacacagcatactgtgctacttttcgacaagatggtagattgcttgtggctggcagtgaagatggtggagttcaactttttgatataagtgggagggctcccctcaggcagtttgaaggccatacaaaagcagttcatacagtagattttacagctgacaaatatcacgtggtctctggggctgatgattatacagttaaattatgggatattccaaactccaaagaaattttgacatttaaagaacactctgattatgtgaggtgtggatgtgctagcaaacttaatccggatctctttataacaggatcatatgatcatactgtgaagatgtttgatgcacgaacgagtgagagtgttctctccgttgagcatgggcagccagtggagagtgtcctacttttcccctctggaggtcttctggtgtcagcaggaggtcgttatgttaaagtctgggacatgttaaaaggaggacaattgctagtatctttgaaaaatcatcacaaaaccgtgacatgtttatgtctaagcagctctggacagaggttactctctggctcactggataggaaggtgaaagtatacagcacaacttcctacaaagtagtccacagttttgattatgcagcttcaattttgagtcttgcccttgcacatgaagatgagacaatagttgtaggaatgaccaatggaatactgagtgttaaacatcggaaatctgaagcaaagaaggaatcacttcccagaagaagaaggcctgcatatcgaacctttattaaaggaaaaaattacatgaagcaacgggatgacattttgattaacaggccagcaaagaagcacctagaattgtatgacagggatctgaaacattttcggatctctaaggcactcgatagagttcttgatcccacttgtacaataaagacacccgagattacggtgtccatcataaaggagttaaatcgaagaggagtccttgcaaatgcgcttgcaggtcgggatgagaaggaaatcagtcatgttcttaattttttgataaggaatctttctcagccaagatttgcccctgttttaatcaatgctgctgaaataattattgatatatatctgcctgtaattggtcagtcccctgtagttgataaaaagtttttactacttcaaggacttgtagaaaaagagattgattaccaaagagaattgttagaaaccttggggatgatggatatgctttttgccaccatgagaaggaaggaaggcacttctgtgttggaacacacatctgatggatttccagagaataagaagatagaatcatagtgtctgctaaataagacatataagaactctgaagttggaatagatttgactgtattaaatgttggcgagagactctctttgatacattaaaaaaactgtttgcagaagcagttctgtggaagagactggaataattatggccggaaaacaagtacccgttttaagtaagacatggttttccatgtaatattttgaattatagcatcttcacctagaagatctcaattgtcttagtcacagagtaggtttatctgggatggatattaattttaatacaggagtgttctgtatcaacatttgggttggtattcagatgggaattcaaatatgaatcctctctggagagggtccaactgggaatcctgctaaaggagcaaagccttgtattacctctggaagacaacaaaaacaattggcaacaacaaaaagcctctttcttgactttaatcagtgcctttgggatttctaggcccttgcttagcttgcttcctgtctccttgatatctacacttgtcttagatcacatgccctgcttcagctggtaatgggactgcatcggttccaagtgtggcaagtaagttttcggctctgaagaactgacactagctagatttgtattcagagtgtgagagcaagctctacagatagaccttattggactacttttttttttttcttcatgcagcctttctaccaagttttcaccttgtttcaggtcagaggaatgatagaatttgtcatttttcttacaacagcctttcagactattcttcatatgtttcaagctaatcttgtagctaagctacctaatcctctgaaaactgttttctctgatttgtatttagattcctccccccattattcacaatcatattgtatttcggaaccccaatgcagagcagtttgctttgaaaaatagttgtttttaaaagtttaatgtaaataattattttttagaagttttttttttttttttaaagacagggtctcgctttatcgcccaggctggagtacagtgatgcaatctcagtccactgcaacctctgccctcccgggtttaagcagttctcctgcctcagcctcctgagtagctgggattacaggtgtgccccaccacgcctggctaatttttgtagttttagtagagacggggtttcaccttaccgggctggtctaaaactcctgacctcaagtgatctacctgcctctgcctcccgaagtgcttggattacaggtgtgagccactgtgtccagcctgtaactattatttttttataaagagagattcttattttcttggctttttgatgtatctgttcctgatagataatcattggctagtaactcctagtacactggtttcacagttgctacctctcctgcttttctctaattattacgccaactcaagtagttaaaaatcagtaagaaaaatgtcttgagctagaagaacccatagaggaagattttgtaatgcgaatctcctctcataattttagttctgtaaattcagggtttttttttgtttttttgttttttttaagccgaaaaaatgcttaatatgttccagtaagggtattaagtaaaaattaaataaacgtattaagtttaacatattaaattaatttaacatttagactaacattaacatttaaattaatatgttaagtgaatatacttaatatattctagtacaggtatgcttggaaatagggcgtttccttttcatgaattgatttcgtacagcacagtggcttataaggaaccagcagtgtttttccctgagtaattatgaacttagtcaagatcagaagctgggttttggggttgagaagagttcatttatttaaataaagtttctatttaaaaaccttt

SEQ ID NO: 5562 - DNA, 1642 bp, Homo Sapiens
  NM_032178
acaccccgcgagctcccacagtgctcagcggcagccactatggaggccgccaggaccgctgtactccgggtgaagcggaagcgcagtgcggagccggcggaggctcttgtgctcgcttgtaaacgcctccggagcgacgcggtcgagtcagcggcacagaagacgtcggagggtttggagagagcggcggagaataatgtcttccacttggtggccactgtgtgctcccaggaggaaccagtccagcctctcctgcgggaagttctgcgcccgtcacgggacagccagcagcgtgtccgccgtaatctccgcgcctcggctcgggaggtccggcaggagggccgctaccgggtgctttccagccgccgatccttggggaccacctcgagcggccaggagtccgagtacacgccggggaacccagaagccgccgggaactcgggctttcagttgttagaccttgtccacgaggagggagaacctgaagccgcctctgcaggctcctgcaaaacatctgacccagatgtgatcctctgcaattctgtagagttgatccgtgagcgattgactgtgtctgaggatggaccaggagtcaggcgccaggaagaacaaaaacacgatgactatgtgtatgacatttactacttggagacggccactccaggctggattgagaacatcctctccgtgcagccctacagccaagaatgggagctggtgaatgatgatcaagaaccagaggacatttacgacgatgaagatgacgagaacagtgagaataactggcgcaatgagtacccagaggaggagagcagtgatggagatgaggattccagaggctctgctgactacaacagcctgagtgaggaggaaagaggcagcagcagacagcggatgtggagcaagtaccctctggatgtgcagaaggagttcggctatgacagcccccacgacctggattcagactgatggtcttgtgatgtccatgaggttctgccacatgcccttgagggctctgagtccagagttaactgccctgctgacatcctgttaggtttcctagcttaacatgtggaaggaaaagcatatcaagcatatcgggcggcaccatcccaccacagtgaaaacttatgttaggggagtgagtcttttccacttacagtaggacccctttgcctcaatcaaaagtgaccctacagtttgaaagaaaaaaaaacgttgaaaaaaggaaggtttctttagctttagcttcttggcccaggaatttttcctggcattcaggttctgtgctgaaaccacaagggagggggaggttcccatttcattagcagtaagcttctgctgtgccataccaccaggctgcctgcctctaggaaaaccctgttccttttgatagaatctaaaaggggtaccagtgggtcccttgtagcaatacagactggatagtaatggccattagggcagaaagtagtctgagcagtgggagattttagttaacagctatttctgcttccaaactctgataacggttgtgaaattactgactgacttcctttggcagtggggccaagaaacaatatatatgaatgtgatacatgtgtttagtaaaatctagctttgaacatggaaaaaaaaaaaaaaa

SEQ ID NO: 5563 - DNA, 3008 bp, Homo Sapiens
  NM_032182
gtgtgccctccgcggggcatgatggggtagctggagatttccatcatggcggcgtccatttcgggctacaccttcagtgctgtgtgtttccacagcgccaacagcaacgcggaccacgaaggatttttactgggagaggtaagacaagaggaaacgtttagcatcagtgactcacaaatcagcaacacagaatttctgcaagtaattgaaatccataaccatcagccttgttcaaaactttttagtttttatgactacgcaagcaaagtgaatgaggagagtttggacaggattcttaaagatcggagaaagaaagtcattgggtggtacagattccggcgcaatacgcagcagcagatgtcctacagagagcaggttcttcacaagcagctcacccgcatcctcggcgtgcccgacctcgtctttcttctcttcagcttcatctccactgccaacaattccactcacgctttagaatatgtgctcttcagaccaaatagaaggtataatcagaggatatcactcgctattcccaatctaggaaatactagccagcaagagtacaaagtgtcttcagtgccaaatacttctcagagttatgccaaagtgattaaagaacatggtactgacttttttgacaaggatggagtgatgaaagacatcagggcgatttatcaggtttataatgcacttcaggagaaagttcaggcagtgtgtgcagatgttgaaaagagtgagcgagttgttgaatcttgtcaggcagaagtgaacaaattaagaagacaaatcactcagaggaaaaatgaaaaggaacaagaaagaagattgcagcaggcagtgttaagcagacagatgccgtctgaaagcttggacccagcgttcagtcctcggatgccgtcctctgggtttgcagctgaaggcagaagtacacttggagatgcagaggcctcggatcctcctcccccttactctgattttcacccaaacaatcaagaaagtactttgagccactctcgcatggaaaggagtgtctttatgcctcgacctcaagctgtgggctcttccaattatgcttccaccagtgccggactgaagtatcctggaagtggggctgaccttcctcctccccaaagagcagctggagacagtggtgaggattcagacgacagtgattatgaaaatttgattgaccctacagagccttctaatagtgaatactcacattcaaaggattctcgacccatggcacatcccgacgaggaccccaggaacactcagacctcccagatttaactaaacaaaagaaactctccacctagcactgtttttcttcattgcttactgagagggtttttgagaacttaatctggggggagaactgctttctcagataccttaactcccgagaagagagtccttgtgcacagaacttgtgggagcctccatccgctgctctttacctttggatacagtgtgcaagtttcatgacagaatcattaagataatcaaattgtcctaattctggtgcgattcatggatatactggtaaatttaggcaaagtgaaacttatcagcgtagtttctgttctttaaaataaattggaaattagagactaagcacaattagtctataaatgttctataaatcaaaaacttacctcttgcactatcatgccttgaaatttactttttcaaagggaaacaagtttagcagcagccttcaaagaacttctttctatgatgagccaaattcatctttgccagaaaagaaattttgataattccaagaagcctgattagaacaaatcagatataccttctcttgtctgcatgactttgtgagataaaagagagggcttccaacttttttctactagcttgatatgtattatcacttaaaatggttgcctttaaaaaaaaaaagtagagatactaattaccagtaagtaatcatccaaataaatacgtcataaaataaattaattattttttctttgatggattacagtgactactgtgttgcactggcacatttatggtctctgttctggaatcttggaggacacacagcagtggagaacagaaggagtgagttttataatgaacagattccagacacggtaggtttagctgagttcatacagaggagatataactcatttagatcttctgacaaatcctagtgttagttttatctgtggaggaaagacatttaataataaactgtttgggaatcttggtgaataaagattcattttcaagctgaataaccatacttattttattttaagttgccatttggggaataattgcagtatgtgtagagactctcttgggatgcacttatatttttatttaatgactacttgttttctagttttgcccacaacgtctgaaaccactaagacattcaggagcatgttgagcttctggtttggaaacagcaagacccaccatttatgacaaggacagccatgaggttaatacttggagtttaactgccttccctttgaactagttaaaatctgtaagaataaggaagttgttgaaggcttaaaatctgggttctgaaaaagtagtttcagtttataggatacacatttactcactgagctccagttccaatactaaattagacagtatcatatagacggaaaatgaaatgctagaactgccgttctttggatcgccactctatgggggtctgtcttttaactactctcctggttatgttggccttacaccactgccatttgatttaaaacgctgcagacactttatctgcaaatgtgttccagttgttatcagctacctactacgcagcttcagcgccagtgtgaatttatttttttttaagtgccattaccgtctcctctgttcagattttgacattcaggaaaatatttttattttgatgccatactgaaatctacaatgtatatctgacaaagcagttaaatgtgacaataaaaaacttatttaatcatggtaaaaaaaaaaaaaaaaaa

SEQ ID NO: 5564 - DNA, 1078 bp, Homo Sapiens
  NM_032194
gttgcaggtagcggtagcgatggacactctggatcgagtagtaaagcccaaaacgaaaagagccaagagattccttgagaagagagaaccgaaactcaatgaaaatattaaaaatgccatgctgattaaagggggaaatgcaaatgcaacagtgacaaaagtacttaaagatgtgtatgcactgaaaaaaccatacggtgtactatataaaaagaaaaatattacaagaccttttgaggatcagacatcactggaattcttttcaaagaagtcagattgttctttattcatgtttggctcccataataagaagcggccaaataatctagtaataggtcgtatgtatgactaccatgtgctggatatgattgaattaggtattgagaattttgtctctctaaaagacattaagaacagtaaatgtcctgagggaacaaaacccatgctgatatttgctggcgatgatttcgatgtaacagaagattatagaagactaaaaagtcttcttattgatttcttcagaggccccacagtatcaaatatccgcctggctggattagagtatgttctgcacttcactgcactgaatgggaagatttactttcgaagctataagttgctgttgaagaaatctggttgcagaacaccacggattgaattggaagagatgggaccctcattggatctggttctgaggaggacacacctggcatcggatgacctttataaattatctatgaaaatgccaaaagctctcaagccaaagaagaagaaaaatatttcccatgatacttttggtacaacttatggaaggattcatatgcagaagcaagacctaagcaaactacaaaccaggaaaatgaaggggttgaagaagcgacctgcagaaaggataacagaagaccacgagaaaaagtcaaaaagaattaaaaaaaattgatggaacttaaaaaaaaaaaaaaaaaaaaaaaaaaaaaaaaaaaaaaaaaaaaaaaaaaaaaaaaaaaaaaaaaaaaaaaaaaaaaaaaaaaaaaaaaaaaaaaaaaaaaaaaaaaaaaaaaaaaaaaaaaaaaaaaaa

SEQ ID NO: 5565 - DNA, 7497 bp, Homo Sapiens
  NM_032195
ggagcctggaggactagcgaggaggagttgagagaacggagcggacgccatggcgaccaacatcgagcagatttttaggtctttcgtggtcagtaaattccgggaaattcaacaggagctttccagtggaaggaatgaaggccagctgaatggtgaaacaaatacacccattgaaggaaaccaggcgggtgatgcagctgcctctgccaggagtctaccaaatgaagaaatagtgcagaagatagaggaagtactttctggggtcttagatacagaactacgatataagccagacttgaaagagggctccagaaaaagtagatgcgtatctgtacaaacagatcctactgatgaaattcccactaaaaagtcaaagaagcataaaaagcacaaaaacaaaaagaagaaaaagaagaaagaaaaggaaaaaaaatataaaagacagccagaagaatctgagtcaaagacgaaatctcatgatgatgggaacatagatttagaatctgattcctttttaaagtttgattctgaaccttcagctgtggcgctggagcttcctacaagagcatttggcccatctgagaccaatgaatcccctgcagttgtgctagaacctcctgtagtatcaatggaggtatcagagccacacatcttagaaactctgaagccagctacaaaaactgcagaactgtcagttgtatctacatcagtaatctcagagcagtcagagcagtctgtggcagtaatgccagaaccatccatgacaaagattctggattcctttgcagcagcaccagtgcctactacaacactggtgttgaagtcatctgagccagttgtaacaatgtcagtggagtatcagatgaagtctgtgctgaaatctgtggagagcacatctccagagccatcaaagatcatgttggtagagcccccagtagcaaaagtgttagagccttcagaaacccttgtggtatcatcagagacacctactgaggtgtaccctgagccaagcacatcaacaacaatggattttccagagtcatctgcaattgaagcgctaagattgccagagcagcctgtagacgtaccatcggagattgcagattcatccatgacaagaccgcaggagttgccggagctgcctaagaccacagcgttggagctgcaggagtcgtcggtggcctcagcgatggagttgccggggccacctgcgacctccatgccggagttgcaggggccccctgtgactccagtgctggagttacctgggccctctgctaccccggtgccagagttgccagggcccctttctaccccagtgcctgagttgccagggccccctgcgacagcagtgcctgagttgccagggccctctgtgacaccagtgccacagttgtcgcaggaattgccagggcttccagcaccatccatggggttggagccaccacaggaggtaccagagccacctgtgatggcacaggagttgccagggctgcctttggtgacagcagcagtagagttgccagagcagcctgcggtaacagtagcaatggagttgaccgaacaacctgtgacgacgacagagttggagcagcctgtggggatgacaacggtggaacatcctgggcatcctgaggtgacaacggcaacagggttgctggggcagcctgaggcaacgatggtgctggagttgccaggacagccagtggcaacgacagcgctggagttgccggggcagccttcggtgactggggtgccagagttgccagggctgccttcggcaactagggcactggagttgtcggggcagcctgtggcaactggggcactagagttgcctgggccgctcatggcagctggggcactggagttctcggggcagtctggggcagctggagcactggagcttttggggcagcctctggcaacaggggtgctggagttgccagggcagcctggggcgccagagttgcctgggcagcctgtggcaactgtggcgctggagatctctgttcagtctgtggtgacaacatcggagctgtcaacgatgaccgtgtcgcagtccctggaggtgccctcgacgacagcgctggaatcctataatacggtagcacaggagctgcctactacattagtgggggagacttctgtaacagtaggagtggatcccttgatggccccagaatcccatatattagcttctaacaccatggagacccatatattagcatccaacaccatggactcccaaatgctagcgtccaacaccatggactcccagatgctagcatccaacaccatggactcccagatgttagcgtctagcaccatggactcccagatgttagcaactagctccatggactcccagatgttagcaactagctccatggactcccagatgttagcaactagcactatggactcccagatgttagcaaccagttccatggactcccagatgttagcaaccagctccatggactcccagatgttagcaaccagctccatggactcccagatgttagcaaccagctccatggactcccagatgttagcaaccagcaccatggattctcagatgttagcaaccagcaccatggactcccagatgttagcaactagctcaatggattcccagatgttagcatctggcactatggactctcaaatgttagcttctggcaccatggatgctcagatgttagcgtctggtaccatggatgcccagatgttagcgtctagtacccaagattctgctatgttgggttcaaaatctcctgatccctataggttagctcaggatccttacaggttagctcaggatccctataggttgggccatgacccctatagattaggtcatgatgcttacaggttaggacaagacccttatagattaggccatgatccctacagactaactcctgatccctataggatgtcacctagaccctacaggatagcacccaggtcctatagaatagcacccaggccatataggttagcacctagacccctgatgttagcatctagacgttctatgatgatgtcctatgctgcagaacgttccatgatgtcatcttacgaacgctctatgatgtcttatgagcggtctatgatgtcccctatggctgaacgctctatgatgtcagcctacgagcgctctatgatgtcagcctacgagcgctctatgatgtcccctatggctgagcgctctatgatgtcagcttatgaacgctccatgatgtcagcttatgaacgctccatgatgtccccaatggctgatcgatctatgatgtccatgggtgctgaccggtctatgatgtcgtcatactctgctgctgaccggtctatgatgtcatcgtactctgcagctgaccgatctatgatgtcatcttatactgctgatcgttcaatgatgtctatggctgctgattcttacaccgattcttacactgacacatatacagaggcatatatggtgccacctttgcctcctgaagagcccccaacaatgccaccgttgccacctgaggagccaccaatgacaccaccattgcctcctgaggaaccaccagagggtccagcattgcccactgagcagtcagcattaacagctgaaaatacttggcctacagaggtgccatcatcaccatctgaagagtctgtatcgcagcctgagcctcctgtgagtcaaagtgagatttcggagccttcagcagtgcctactgattattcagtgtcagcatcagatccctcagttttagtatcagaggctgctgtgactgttccagaaccaccaccagagccagaatcttcaattacgttaacacctgtagagtctgcagtagtagcagaagaacatgaagttgttccagagagaccagtgacttgtatggtatctgaaactcccgccatgtcagctgaaccaactgtgttagcatcagagcctcctgttatgtcagagacagcagaaacatttgattccatgagagcctcaggacatgttgcctcagaagtatctacatccttgttggttccagcagtaactactccagtgctggcagagagcattctggagccgccagccatggctgccccagagtcttcagctatggctgtcctggagtcttcggctgtgaccgtcctggagtcttcgactgtgactgtcctggagtcttcgactgtaactgtcctggagccttcggttgtgactgtcccggagcctcctgttgtggctgagccagactatgttaccattcctgtgccagttgtttctgcgctggagccttctgtgcctgttctggaaccagcggtgtcagtccttcaaccttctatgattgtttcagaaccatctgtttctgtccaggaatcgactgtgacagtttcagagcctgctgtcacagtctcagagcagactcaagtaataccaactgaggtggctatagagtccacaccaatgatactggaatctagtatcatgtcatcacatgttatgaaaggaattaatctatcctctggtgatcaaaatcttgctccagagattggcatgcaggagattgcattgcattcaggtgaagaaccacatgctgaggaacacctgaaaggtgacttttacgaaagtgaacatggtataaatatagaccttaatataaataatcatttaattgctaaagagatggaacataatacagtgtgtgctgctggtactagtcctgttggggaaattggtgaagagaaaattttgcccaccagtgagactaaacagcgcacagtattggatacctaccctggtgttagtgaagctgatgcaggagaaactctatcttctactggtccttttgctctggaacctgatgcaacaggaactagtaagggtattgaatttaccacagcatctactctcagtttagttaataaatatgatgttgatttatctttaactactcaagatactgaacatgacatggtaatttccaccagtcctagtggtggtagtgaagctgacattgaagggcctttgcctgctaaagatattcatcttgatttaccatctaataataaccttgttagtaaggatacagaagaaccattacctgtaaaagagagtgaccagacattagcagctctgctcagccctaaagaaagtagtggaggagaaaaagaagtacctccccctcctaaagagacactgcctgattcaggattttctgccaatattgaggatattaatgaagcagatttagtgagaccgttacttcctaaggacatggaacgtcttacaagccttagagctggcattgaaggacctttacttgcaagtgatgttggacgtgacagatctgctgccagcccggttgtaagtagtatgccagaaagagcttcagagtcttcttcagaggaaaaagatgattatgaaatttttgtaaaagttaaggacactcacgaaaaaagcaagaaaaataagaaccgtgataagggggagaaagagaagaaaagagactcttcattaagatctcgaagtaagcgttccaaatcttctgaacacaaatcacgcaagcgtaccagtgaatctcgttctagggcaagaaagagatcatctaagtccaagtctcatcgctctcagacacgttcacggtcacgttcaagacgcaggaggagaagcagcagatcaagatcaaagtctagaggaagaagatctgtatcaaaagagaagcgcaaaagatctccaaagcacagatccaagtctagggaaagaaaaagaaaaagatcaagctccagggataaccgaaagacagttagagctcgaagtcgaaccccaagtcgtcggagtcggagtcatactccaagtcgtcgacgaaggtctagatctgtgggtagaagaaggagctttagcatttccccaagccgccgcagccgcacccccagccgccgcagccgcacccccagccgccgcagccgcacccccagccgccgcagccgcacccccagccgccggagccgcacccctagccgtcggagccgcaccccaagccgccggagaagatcaaggtctgtggtaagaagacgaagcttcagtatctcaccagtcagattaaggcgatcaagaacacccttaagaagaaggtttagcagatctcccatccgtcgtaaaagatccaggtcttctgaacgaggcagatcacccaaacgtctgacagatttggataaggctcaattacttgaaatagccaaagctaatgcagctgccatgtgtgctaaggctggtgtccctttaccaccaaacctaaagcctgcacctccacctactatagaagagaaagttgctaaaaagtcaggaggagctactatagaagaactaactgagaaatgtaaacagatcgcacagagtaaagaagatgatgatgtaatagtgaataaacctcatgtttcggatgaagaggaagaagaacctcctttttatcatcatccctttaaactcagtgaacccaaacctatttttttcaatctgaatattgctgcagcaaaaccaactccaccaaaaagccaggtaacattaacaaaagaattccctgtatcatctggatctcaacatcggaaaaaagaagcggatagtgtttatggagaatgggttcctgtggagaaaaatggtgaagaaaacaaagatgatgataatgttttcagcagcaatttgccctcagagggccgggttaaacggcagggccgggttagacgacagatgaaacaacccgcagcttctcatttgacagtaactcgatgcaattcactttgtggaaccaagccacaaagtgaaaagcatcgaattgcagagaacagtgttatcacatccctacccaacattgggccctccctgcacttgtgggaaggtagtccaaggtacaactatttagcttcccgatttgcttcaaggctctatagctctagattttggtggtagcaaatttatcgggtggagggattgatcggagagggcagatcctcaggttcaacacaagaactggattggaaaaggtcattgtaggttgatgtgagcatcttgggtacatagcccattgcccttaatgatggtttcttactgtttctctgggttgtttgtcagatagcctttaattttaattatttttccttccctttgctaccttggcccttttaaattcttgtgtttaacctaatgctcagccttggtactccattcccttctccttcccctctttgctactattaaaagtcggagaagtggaattcaaacgttgaaatttccacggggctatagttgtatcttaataatgccaagtgtcaaaacaaccccattaaaatgccgcctgattaaataatgtgctgctaaatatagtgcacatgaaaacagcaagactgtatatatatgtaaatatatatatatatctgtatctttgtatgtatctctgtatctgtacctttgctgtatcttttaataaacagtttacttttatttaa

SEQ ID NO: 5566 - DNA, 7948 bp, Homo Sapiens
  NM_032199
agatgcacagtggagctcgctacccctcctctcctccaaaaatctcatcagacgatatcccagacaggagcggttagagagagaggaatcacatctccacacagttttagggtgctttttatttttacaaatcttcttgtgtgttttttgccttgatccatcctcttcccgccgagatcgtatggcgcctttctctcgattatgaatttgatcaatccatctttggaagaaaacccacatagttttttcaggagctgaaaattgagtcgttatagaaatattaggacatattttcaatcatttcggtgcccgaagggaggcaagagctcagttttatattgagacattacgccggctgaaggcagagaatgcgtttccctgccaggacctgatgcaatccattcaagccaacaagtttggagagaatgttgagttcaatcaattcagaacgtcgagatggagcccaactcactccagtgggtcggctcaccgtgtggcttgcacggaccttacattttctacaaggcttttcaattccaccttgaaggcaaaccaagaattttgtcccttggcgactttttctttgtaagatgtacgccaaaggatccgatttgcatagcggagctccagctgttgtgggaagagaggaccagccggcaacttttatccagctctaaactttatttcctcccagaagacactccccagggcagaaatagcgaccatggcgaggatgaagtcattgctgtttccgaaaaggtgattgtgaagcttgaagacctggtcaagtgggtacattctgatttctccaagtggagatgtggcttccacgctggaccagtgaaaactgaggccttgggaaggaatggacagaaggaagctctgctgaagtacaggcagtcaaccctaaacagtggactcaacttcaaagacgttctcaaggagaaggcagacctgggggaggacgaggaagaaacgaacgtgatagttctcagctacccccagtactgccggtaccgctcgatgctgaaacgcatccaggataagccatcttccattctaacggaccagtttgcattggccctggggggcattgcagtggtcagcaggaaccctcagatcctgtactgtcgggacacctttgaccacccgactctcatagaaaacgagagtatatgcgatgagtttgcgccaaatcttaaaggcagaccacgcaaaaagaaaccatgcccacaaagaagagattcattcagtggtgttaaggattccaacaacaattccgatggcaaagccgttgccaaggtgaaatgtgaggccaggtcagccttgaccaagccgaagaataaccataactgtaaaaaagtctcaaatgaagaaaaaccaaaggttgccattggtgaagagtgcagggcagatgaacaagccttcttggtggcactttataaatacatgaaagaaaggaaaacgccgatagaacgaataccctatttaggttttaaacagattaacctttggactatgtttcaagctgctcaaaaactgggaggatatgaaacaataacagcccgccgtcagtggaaacatatttatgatgaattaggcggtaatcctgggagcaccagcgctgccacttgtacccgcagacattatgaaagattaatcctaccatatgaaagatttattaaaggagaagaagataagcccctgcctccaatcaaacctcggaaacaggagaacagttcacaggaaaatgagaacaaaacaaaagtatctggaaccaaacgcatcaaacatgaaatacctaaaagcaagaaagaaaaagaaaatgccccaaagccccaggatgcagcagaggtttcatcagagcaagaaaaagaacaagagactttaataagccagaaaagcatccctgagcctctcccagcagcagacatgaagaaaaaaatagaagggtatcaggaattttcagcgaagcccctggcatccagagtagacccagagaaggacaacgaaacagaccaaggttccaacagtgagaaggtggcagaggaggcgggagagaaggggcccacacctccactcccaagtgctcctctggccccagaaaaagattcagccttggtccctggggccagcaaacagccactcacctctcctagtgccctggtggactcaaaacaagaatccaaactgtgctgttttacagagagccctgaaagtgaaccccaagaagcatccttccccagcttccccaccacacagccaccgctggcaaaccagaatgagacggaggatgacaaactgcccgccatggcagattacattgccaactgcaccgtgaaggtggaccagctgggcagtgacgacatccacaatgcgctcaagcagaccccaaaggtccttgtggtccagtcgtttgacatgttcaaagacaaagacctgactgggcccatgaacgagaaccatggacttaattacacgcccctgctctactctaggggcaacccaggcatcatgtccccactggccaagaaaaagcttttgtcccaagtgagtggggccagcctctccagcagctacccttatggctccccaccccctttgatcagcaaaaagaaactgattgctagggatgacttgtgttccagtttgtcccagacccaccatggccaaagcactgaccatatggcggtcagccggccatcagtgattcagcacgtccagagtttcagaagcaagccctcggaagagagaaagaccatcaatgacatctttaagcatgagaaactgagtcgatcagatccccaccgctgcagcttctccaagcatcaccttaacccccttgctgactcctacgtcctgaagcaagaaattcaggagggcaaggataaactcttagagaaaagggccctcccccattcccacatgcctagcttcctggctgacttctactcgtcccctcatctccatagcctctacagacacaccgagcaccatcttcataatgaacagacatccaaatacccttccagggacatgtacagggaatcggaaaacagttcttttccttcccacagacaccaagaaaagctccatgtaaattatctcacgtccctgcacctgcaagacaaaaagtcggcggcagcagaagcccctacggatgatcagcctacagatctgagccttcccaagaacccgcacaaacctaccggcaaggtcctgggcctggctcattccaccacagggccccaggagagcaaaggcatctcccagttccaggtcttaggcagccagagtcgagactgtcaccccaaagcctgtcgggtatcacccatgaccatgtcaggccctaaaaaataccctgaatcgctttcaagatcaggaaaacctcaccatgtgagactggagaatttcaggaagatggaaggcatggtccacccaatcctgcaccggaaaatgagcccgcagaacattggggcggcgcggccgatcaagcgcagcctggaggatttggaccttgtgattgcagggaaaaaggcccgggcagtgtctcccttagacccatccaaggaggtctctgggaaggagaaggcctctgagcaggagagtgaaggcagcaaagcagcgcacggtgggcattccgggggcggatcagaaggccacaagcttcccctctcctcccctatcttcccaggtctgtattccgggagcctgtgtaactcgggcctcaactccaggctcccggctgggtattctcattctctgcagtacttgaaaaaccagactgtgctttctccactcatgcagcccctggctttccactcgcttgtgatgcaaagaggaatttttacatcaccgacaaattctcagcagctgtacagacacttggctgcggctacacctgtaggaagttcatatggggaccttttgcataacagcatttaccctttagctgctataaatcctcaagctgcctttccatcttcccagctgtcatccgtgcaccccagtacaaaactgtaggctcagctctgcccagcagtccaaagcggcatggccaacagagcttcactccttacccaggagtgctggcttatagagttagaagtcagtatttcttctaatctgaggctatgatcagtcccagctgtaggggcccagaggggaggtgaacatgcctgatttttgtgggacaactctagcccacaaactgactggctggtgagtcttgactcccttccaacacagatgcccaggcacctccagatcattcacttcgcacgtgggccttgtgaagggatttgtgaatatccaggaagaacttagaggaccccatctgagttcggatggtcaggaaacaatctgggcaaaaaagaggcaggcatttcaaaggaaggggcaaggaagactggcaaacagatggcaagggatgcccctctttttcataaaactctccaaggttcaatcaatgcaatgtatagtgaaacttcaatagatctttcattttgacactattaaacaatccagagaagtaaacactgttaaattgactgtatatatttgcttcttaaaactacctgtatcactgtttgctcacctaatttatatacaggtagttccattttctcccagttccttctcgtctttttttttttttttttttttttttttattaaatggtattgcttttgtttgcaggtctttttgtttttgttttgtttttgaggctgactgactgtcctagttgttgtgtgtttgtaatttttccacatcttattttgagcagctttgggtggtaaagttattgtttacaaattgaagcaactgattctagtggaacaaatgaaaaagaaacagtcaagcacacaatagtgcaaagaacgttcctttgtagatccgcaacttaaggattttgttcctcataaatggcatagttgaaagagcttatacactgcttacccagccaaatgctttgctttgaagtattgggttctgtgaaaatattgagcattgtacttaccttatctaggctgtgaaactgtcctacataccagagaatcataaaaacaaaaacctcactggcagcaagctgccgaataacaacagagtctagaggacatatttgtgggctgcacagatattttaggaatttcagaaattagaacaggagccaaaatgatttacattggcgttggcactgattcctttaaatggtctgggaaagggggttgggaagaggatggagctcaactggccagaagaggagcagctgcagtcctgatagcttctctagcctcggtcttttgagtgataagtagtcatgttgttttcatccagttggtttcttgtcattcccaagaagaatctcccaggccacatctttggggataactgacatactggattagccttttcaaaagaaaagtcatcctatttggttttatggggtgtgagttttgtgtgtacacacacagaaacatgtaaggtggtttgggtcatgtttttaaccacctggcaatacagtccactttctggtttcttttattgtgggaagtaaatggtcaagctgctcaggcagtgaaaagatgtggagaatgtccgttgtcattcttgccactgtattccatttgctaccgagatataacattaaggtggacacattttctaactgtattaattaaaagtcaatggatacagagagtggattttctccccaagtcccatccctgctgaagaccgcttggatgaactccccaacccactgtgcccctcccgcaacactaccagtagactttagaaccatagttaactaagtcttttacctctgagatacttaattctgggaaaattggtgacaattttcaacttctaaataggtaactcgactgcaaaataatcaaaactgataacaatgaaactgcggctcttaaacaaagccatgcatgccgtgcatttgtattgaaatgtctccatgatatgaagccaaatattcaatgtaacatacttaatatccaaaggtggaaacaaaagaatgtagagatccagtgttaagagttccatttgcttcaattaattatttaccttcctgtggaataatatatatatatatatttaatagaaccatagatagactagtagaatttagattataaatgtgtgagtgcagattatcctgctattgcacaagctagaggggggaaaaatctcaattccagctggcaagatgctagccaggacacatataagaaagttgcactagattgaatggtcacagaatcggaggacatggaagaaaaaggaaacttcggtggttctgcagcagacatgggctaggtcatatgtggtttctatgagttcgtgtctcaaaaaaaaaaggagggggggcatctgtccccggtggagctcacctatttggaatatggggcatttgttttttccactgcaatgatttcagtctggtttcatcatgttggaattcgatcacaccattttcaaacaatgttaacatagtccagcttttgtttttctcatctcttctgagaggagactcactgtttctgtctgaggaagctcataccctcggcaaaacatcaggacaaataaagagaaatgggggtacgcattcccaacagaagcagtgtgttatttgttttaaaactctgaacagagatcttggaaatctttcaaaaagaccattgaattcttcattggctgagaacgacgttttaaaatgtcttaaataaggctttgtttgcattgtttgagttcaaggggccttattattgaatggaattgcacaagcctttctttgtgcaatcaaaccattgttattggtagttctgtaaaggaaactgtggaatcgaattggcagtggagtcataaatctatttactgagtgtggcttccaagaaatgttgcaattcaaaatgcactaagtctgtgatttattggagatttggagattctaaataatatttttaaaaaacttccatgcaacttctggtttaatgtttggcaactccacatgataaaaaaataaaaacagcccaaccgagtttcggaattaagtattcttctagtaagtgattcaaacttgtaatatttgccacaggactgacttatttatttactagctagaagctcttaagttcacttgtttatcagggcatatacagaagggtttgttaaaactcgatgttaactttacaactttctgacctggtgcatgaattctcaagtactgtatttcactgtgttggtgtgtctgatggaaatttcgaggtggtcccacaaaaatattttatgtagtgtgccttcaaagagaaccatttatttctcttcacttatcgtcccacaaagtcacatttggtggtggtcagccaagtcgcatctggtctagttttactcttgtcccaattttaaagagaaatgggaatgagtttgccctggtgagacccataccattgcaatgattatcttgagcacttaaagtccagtgttggctgttagtgtatttgatattctgcctgtctcctcatggttgaaatatgtctgaagaatagcagcataatctcttggctgtttatacttttttaaactttcctgtgttgtaaatattgtatacttttggtgattccagctatgtaacctctatgctctgtaaggtgattatttgtatatagcaacatggcccagtgatattatatagtttcccaatggagaggttattgagtaacctttgcattagtttaaacactaccagaagaatgctgagccaactataaacactcaattttgtatgttttccaaattgtacttattactgcttttgatactgtattacgtgccaatagtttcccaatcacatagcaggcaagagatattttgtactttttgatccactgtaatatttaataaaaaatgttactatctgtttcctttaaaaaaa

SEQ ID NO: 5567 - DNA, 3364 bp, Homo Sapiens
  NM_032207
gttgcccagggcaaccgctccttcaggcgtgaatgtggcggctgcctctgcgaatggacggcgtgggaagagaatggcttctgcaaggaaagccagccgtcccatgcgtgatgtttttggtgacttcagtgatgtttccttggaagattcaacaatggaagaaatcagaaacttccagatcagtagaaatcttaccaaaatagcacctggtcatagcagatttctaaaaagaaaccaaactctagatgagaaacacttactcctgaaagagaaccctgtgctcgggagtggacccaggcttgcctcatgtagaccgcccaccactgcctccaggatccgagccaatgccgcactcatgaagctggcccagctggaaacccggatcatgaatcggaagctgcagaggaatttgtctgacacggaatctgactcaatgaccgccgatgctggtcttccaaagagagctgacagaatcctctctgggggtgcactcgaactcgcgtcccagaacacagacaaaacttcccagaatcaagcccgtgaacttcctgtcaccgaaaataatgcacagaacgcgaaggtcagtaggtttctaaagaagaaacaagcacctgttgaaaacatatcccctgaagcacctgctgggaaagagaggactttgcaaacccccaaacagaaagaacctgctagaacatttgattctccagacagtgacgaagaagaaatgaaagtattgctaggaagcttgatggactcttctagagaaaaaaacacgaatcaaggcttcagcagcgctaacgtcagcgaggaagaagaaagaaaactattttcggtcccatctcaactgagagcatttactgtacccagcgtggaactctccagcgcaaagccttctcagacatcacacctgccaacctccctggcagcagacagaacccttcacagcactcgctcaagagcagactacccacagagtcacgtttccagtgacaccgcctcccacacgccgtcagtttccatcacaggcgccttttcaaactcagtgtctttaaagatggggcatgtcaagcttgtgtcctccccgggaaggagtgaggctgagactgtggacgagccagtctcagaaggtgctgatgacagcctcgacgagtttagaataaatattttatcgcttgacggtctggctccagctgtcagtgagaactccgatttggaacaggaagaggaaagtgctcagagacaaaaaacagctggcaaaatcttcagagccgaggcgtccactgggcaggatgccccgaggcaggcccaggcgaggagctgggcatcacagggaaaggccgcctctgcagagggggatgagagcgaggtctcggagcatctcagtgccagctcggcttctgccatccagcaggacagcacttccagcatgcagccaccatctgaagcccccatggtgaacacagtcagctcagcttattcggaggattttgaaaactctccaagtctgacagcatctgagccaaccgcccattccaaggagtctcttgacagaacactggacgctttgtctgaatcctcttcaagtgtgaagacagaccttccacaaacagccgagtctaggaaaaagtcgggcaggcacgtgacaagagtgcttgtgaaggacacagctgtgcagacgccagatcctgccttcacctacgagtggaccaaggtggccagcatggcagccatggggcctgccctgggaggcgcctacgtggacccgacacccatcgccaatcatgttatcagtgcagatgcaatagaagccctgaccgcttacagcccggccgtgctggcactccatgatgtgctgaagcagcagctgagcctgacgcagcagttcatccaggccagccggcacctgcacgcctccctcctgcgctccctggacgcggactccttccactaccacaccctggaggaagccaaagagtacattaggtgccacagacctgccccactgaccatggaggatgccctggaggaggtgaacaaggagctgtgagcgccagcaggtggagcttgacgtgacgtcttaacaaaagcaaagcaccgcagcttcccagagttaccagcgcagcacttaagacaggatcttacggcggggtggggctcctggaccgtgaccggcgtcttcttcctggggagtacgacttggaccgggaccgcgactgggaccgggagcggcttctggaggagcgcgacctgctccgacttctgcagggaagggtgcccaagggtcagcagcagccaggcgtcgtggggaggccacaggaagaggcctcaggcactgccctgaggcagcctctgcctacctagatctggagcgggagtaggaacgggagcaggagcgcgaccttgaccttgagtacgagcctgaagacttggaggatcttgagttggagcgggaggaagaacgccctcgactcttggatctgctccgagacctcgagggtccgctgtggggagaggcctgatgatcaggtgccccagtggatgggctgcacccagcccaccctggccctcaggttcctagaccaccccagatgcaggggctctggctgtggatgtggcgccatagccacagcaacggtaccaagttcctaaatagtgtggccgagcctgctgctgtgtgaattcaggccttgtggaaaacaccgccccataggcacaggctgtgtgagggtggacgtgatgagtgtatctggggtctgctcccacccatcacaagctgtggaccctggccccccggccactgcagacatctgcgcttttacctgttcctcttctcctggcctttcctccgccgggcccgcatttttgctcggaagaactcatagaggccgttctgctcccagccttcactgtaagacacggcattccgtgtgtgaccacgtgacacccacccacaaggaagtcgtgaaaaagtcatcaggagttaatccacagaaccttggagagtacatggccctgtggctgtgggctccgagcatgggcgcagtagagcttggttcagtgttcccacagggctgtcctcctgcagcccagtggctcctctggtgcccacgcccttgccaccctgctgttccgctgaggtggtggggacccatggtctgtggaactgggaaacaggaacactgactcatgggtggacaggcctgcagcccagcacaggaaggaggggtgaccactgggaagggtgggctgagggccctgtggcagccggctgcttgagacgtgccgccgtgccacaccttccctaacttcttctgatgtgtctccattaaaacgcccttcattgaggaaaaaaaaaaaaaaaaaa

SEQ ID NO: 5568 - DNA, 10389 bp, Homo Sapiens
  NM_032221
atgaccaatgggtctgtgttttggaccggcgaagcccaatggcgcgacagggaaggcgggcccgagatgggttagggtgtccttgcagggtgtctgagctaaacttcaccaaataatagctgtttgtattttggctgctgcaggagccattttagaaataaatatcttccttcaatagatgaaaatgaaaatacagaaaaaagagaagcagttgtcaaatttaaaagttttgaatcactccccaatgtctgatgcctctgtcaattttgactacaaatctccatccccatttgactgcagcactgatcaagaagagaaaattgaagatgttgctagtcactgtctgcctcagaaggacctgtatactgctgaagaggaagctgctaccctttttcctaggaaaatgacatcccataatgggatggaggacagtggaggaggaggtactggagtgaagaagaaacggaagaaaaaggagccaggagaccaagagggtgcagcaaagggaagcaaggacagagagcccaagccaaagaggaaacgagaaccgaaagagccaaaggaacccagaaaggccaaggagccgaagaaggccaaggagcacaaggagccgaagcaaaaagatggggcaaagaaggcacggaagccccgggaggcctcgggcaccaaggaggccaaagagaagaggagctgcactgactctgcagccaggacgaagtccaggaaggccagcaaggagcaaggaccaaccccagtggagaaaaagaagaaaggaaaaaggaaaagtgaaactacagtggagagtttagagctggatcagggcctgacgaacccatctctgcggagtcctgaggagtccactgagtctacagacagccagaaacgacgctcgggaaggcaagtaaagcgcagaaaatacaatgaggacctggacttcaaagtggtggatgatgatggggaaacaattgctgttcttggagctggtcgaacatctgcactctcagcctctacactggcctggcaggcggaggagcctccagaagatgatgcaaacatcattgagaagatcctggcatctaagactgtccaggaggttcacccaggagaacctccgttcgacttggagctgttctacgttaagtatagaaatttttcctacttacattgtaaatgggccacaatggaagagctcgaaaaggatcctcgcatcgcacagaagatcaagcgatttaggaataaacaagcccagatgaagcacatttttacggagcctgatgaagacttgttcaatccagactatgtagaagttgatcgcatcttggaggtggcccacaccaaggatgcagaaacaggggaggaggtaacacattacctggtgaagtggtgctcactaccatatgaagaaagcacgtgggagctagaggaagatgtagatcctgcaaaagttaaagaatttgaatctcttcaagttctccctgaaattaagcatgtggagcggcctgcttcagactcctggcagaaacttgagaagtctcgcgagtataagaacagtaaccagctccgggagtaccagctggaagggatgaactggcttctttttaactggtataacagaaaaaactgtattttggctgatgagatgggcctagggaaaaccatccagtccatcacattcctttcagaaatatttctgagaggaatccacggcccttttctcattatcgcccctctctccaccatcactaactgggagcgggagttccggacatggacagagatgaatgccattgtgtaccacggcagccagatcagcaggcagatgatccagcagtatgaaatggtgtacagagacgcccagggaaaccccctttcaggagtcttcaagttccacgtcgtcatcacaacatttgaaatgatcctagcagactgcccagagttgaagaagattcactggagctgtgtgataattgatgaagcccacagactgaagaataggaactgcaaacttctggagggtctaaagcttatggccctggaacataaagtgcttctcactggaacacccttgcagaactctgtggaggagctcttcagtttgttaaattttctggagccatcacagtttccttcagagaccgctttcttggaggaatttggagatctgaaaacagaggagcaggtaaagaaactgcagtctatcctaaaaccaatgatgcttcggcggctgaaagatgatgtggaaaagaaccttgctcccaaacaagagacgatcattgaggtggaactgaccaatatccagaaaaagtactaccgtgccatcctcgagaagaacttttccttcctgaccaagggggcaaatcagcacaacatgcccaatctcatcaacaccatgatggagctgaggaagtgctgtaaccatccctacctgatcaatggagcagaggagaaaattctagaagatttccgaaaaacccacagccctgatgcccctgactttcagctgcaggccatgattcaggcagcaggaaagcttgtgttgattgataaactactccctaagctgattgcaggtggccacaaagtactcatcttctcccagatggtgcgctgcctcgacatcctagaagattacctcatccagagaagatacacctatgagcgaattgatgggcgagtacggggaaacctgcgccaggcagccatcgaccggttctgtaagccagattcagaccgctttgtctttcttctgtgcaccagagcgggaggcctggggatcaatctcacagctgctgatacctgcatcatatttgattctgactggaacccacaaaatgacttgcaggctcaggcccgatgtcaccgcataggccagagcaaagctgtgaaggtgtatcgcctcatcactcgaaattcctacgagcgcgagatgtttgacaaggccagcctaaagctggggctggacaaggctgttcttcaggacatcaaccgaaagggcggcaccaatggggtacagcagctctcaaaaatggaggtggaggacctactccggaaaggtgcttatggagccttaatggatgaagaagatgaaggctccaagttctgtgaagaagacatagaccagattctgcagaggcgaacgcacaccatcaccatccagtctgaggggaaagggtccacttttgccaaggctagctttgtggcttcaggaaacagaacagatatttccttagatgatcctaacttttggcagaaatgggctaaaatagctgaactagacactgaagcaaagaatgaaaaggaaagcttagtgatcgaccgacctcgcgtgagaaagcagaccaaacactacaactcgtttgaggaagacgagctcatggagttttcagagttagacagcgactcagacgaaaggcccacgagatccaggcgcctcaatgacaaagccaggcgctacctccgagcggagtgcttccgggtagagaagaacctgctcatctttggctggggccggtggaaggacatcctgactcatggccgattcaagtggcatctgaacgagaaggacatggagatgatttgccgtgccctcctggtgtactgtgtcaagcattataagggggacgagaagatcaagagtttcatttgggaactgatcacacctaccaaagatgggcaagcccagaccctccagaaccactcaggcttatctgccccagtccccagagggaggaaggggaagaagacgaagaaccagttgctaatcccagagctaaaggatgcagattggctagccacctgcaaccccgaggtggtcttgcatgatgatggctataagaaacacctcaaacagcactgcaacaaagtacttttgcgagtccggatgctgtactacctaaaagctgaaatactgggagaagcagctgagaaagcatttgaaggatctcctgccagggagctggatgtacctctgcctgacatcgactacatggagatcccagtggactggtgggatgctgaagccgataagtcacttctcattggcgtgttcaagcatggttatgaaaggtacaatgccatgcgagcagacccagcactttgcttcctggagaaagttgggatgcccgatgagaagtccctttctgcagaacagggtgttacagatgggacctcagacattcctgaaagaggcaacacagataaagaagacaatgctgaggacaaagtagatggcctccagaaacaaacggagagttccagtgatggaggtgatggcgtttttagcgaaaagaaggatgacagccgggcagcccaggatggctccgacccagacaaatcgccctggccagtttcctccgccctcacagctcgtctcagacgtctggtcactgtttaccagcgctgcaaccgcaaggaactgtgccggcctgaaattctgggaccaggtaaccaaggatattgggttcaggaagagatgttcaggagaacctcagaaatggacctcatcaacaaggaagcccaaaagaggtggactaggagagaacaagcagacttctatagaacagtgtcttcctttggtgttgtttacgatcaagaaaagaaaacctttgactggacacagttccgcatcatttcccgtttggacaagaagtcggatgagagcctggaacagtatttttatagttttgtggccatgtgccggaatgtctgtcgtctacccacatggaaagatggcggtcccccagataccaccatctacgttgaacccatcactgaggaacgtgctgcaagaactctgtaccgcattgaactgttacggaaagtccgagagcaagtgctcaagtgccctcagctgcatgaacgcctccagctgtgcaggcccagcctctacctcccagtctggtgggagtgtgggaagcatgatcgagacctgctcatcggcactgccaaacatgggctgaaccgcactgactgttacatcatgaacgacccccagctgtccttcctggatgcctatagaaactatgcccagcataaaagatctggcacccaggcaccaggaaatctctgttgcctttaccagaccaactccaagttatatgaatctcttacatattctcaaatgagtaggacttcagagtcccttgaaaatgaacctgaaaatctagtgagagtagaaagcagagatgatcatctcagcctgcctgatgtgacatgtgaaaactttatttctaaagttcaggatgtcatttccatcaaccatgatgaaagtctgctgcctgagtccttagagagcatgatgtatggtaagaaggtgctcagccaagaaccaagctcttttcaggagagcccaagtaccaatactgaatctagaaaagatgttattaccatctcaataagcaaagatgggaactgccagtctggtggccctgaggcagaaatagcttctggccctacttttatgggtagcttagaagcaggaggagtagctcaagcaaacatcaaaaatggaaaacatttgttgatgtctatttcaaaggaaggggagctctgctgcagtgaggcaggacagagacctgaaaacattggccagctggaagccaagtgtttagcttccccttccttgaatccaggaaatgaaagtgggtttgtagatatgtgcagtcttagtgtctgtgactccaaaagaaacctgtcatcagatcagcaattaattgatttattggaaaacaaaagcttagaaagtaaattgattttgagtcagaaccacagtgatgaggaggaagaagaggaggaaaacgaggaggaaaacttagccatggcagtaggcatgggggaaaggccagaggtattgcatctcacggagcccactactaacatctcaagggaaaagaaccaaggcttccaagatgaaaccaagaaaggaagcttagaggtggcaaaccagactcctgggctacagagggctttccccgctccagcagcctgtcagtgccactgcaaacacatggagaggtggatgcatggcctcgagaatgatgaatttgaaatcgagaaacccaaggcttatatcccagatctgttcaaaagtaaaaccaatactatcgccatggagggtgaacccactgctattccatcacagccgtttaaagtgaagcatgagcttttaaaagaaccttggaaagaaagtgcagaggggcaaaacgttttccccacatatcctcttgaaggaagtgagctcaaatcagaagacatggattttgagaataaagatgattatgatagagacggaaactgccatagtcaagattatccagggaagtactctgaagaggagagcaagagctcaacatcgggcatcacaggagacattggggatgagctacaggaggctcgagctcccactattgctcagctgctacaggagaaaactctctattccttctctgagtggccaaaggaccgcgtgataattaaccgcctagataatatctgccacgtggtgttaaaggggaagtggccctctagccagcagtatgagccctcaggcacactgcccaccccggtattaaccagcagtgctggttctcgaaccagcctctcagagccggaagcagcagaacacagcttcagcaacggcgcagcattggcggcccagatccacaaggagagcttcttagctccagtattcacaaaggatgaacaaaagcacaggcgtccctatgagtttgaggtggagagggatgcaaaggctcggggcctggagcagttctctgccacccacgggcacacccctatcatcctcaatggctggcatggggagtcagctatggacctctcctgctcatcagaggggtccccaggagccacatcccctttcccagtgagcgccagcacccctaagattggggctatcagttcacttcagggagcccttggcatggacttgtctgggattctgcaagctggcctgatccatcctgtgactggacagattgtcaatggaagcctcagaagagatgatgcagccacgaggaggcggagagggaggcggaaacatgttgaaggagggatggacctcatctttttgaaggagcagacacttcaggcgggaatcttggaagtccatgaagacccagggcaggccaccttgagcaccacacaccctgaggggccagggcctgccacctcggctcctgagccagctacggcagccagcagccaagccgagaaatccattcccagcaagagtctgcttgactggctaaggcagcaggctgactactccttagaagttcctggctttggggcaaatttttcagacaaaccaaagcagaggaggccacgctgtaaagaacctggaaaattagatgtcagctccctgagcggggaagagagagttcctgccatccccaaggagccaggactgagggggtttcttccagaaaacaagttcaatcacactctggctgagcctattcttcgagatacgggcccccgcaggagggggaggcggcctcggagcgaactcctgaaggctccttccattgtggcagactctccctctggaatggggccactgttcatgaatggactgattgctgggatggacctggtaggacttcagaacatgagaaatatgccaggcatccccctcaccgggctggtggggtttccagctggctttgccacgatgccaacaggtgaagaggtcaaaagtaccctgagcatgctgcccatgatgctgccaggcatggctgctgtgccccagatgtttggtgttgggggactcctcagtccacccatggcaaccacctgcacttccactgctccggcgtctctatcaagcacaacgaaaagtggtacggcagtgactgaaaagactgcggaagacaagccgagtagccatgatgtgaaaacagacactttagctgaggacaagcctggtccaggtccattttctgatcagtctgaacctgcaataactactagtagtcctgtggcttttaacccatttctcatcccaggagtatctcctggactcatttacccatccatgttcctctcccctggtatgggcatggctctgccagccatgcagcaggccagacactcggaaatagtaggtctggagagccagaagaggaagaagaagaagacaaagggggacaaccccaactcccacccagagcctgctcccagctgtgaaagggagcccagcggtgatgagaactgtgccgaacccagtgcccctttgcccgcagagagagaacatggggcacaggctggggagggggcactcaaagactccaacaacgacaccaattagaacttttttcatttaagaaattattgtgacttgtaagtttcttatcccataaaggtttgttacttccctcacttcacctccataagaacctgtgtttccataagtaagattacgtacctgatttcctgtctgagaactatggtaacagatgttaatagttgcagggtctcaccacttcattagataagtgttgtctacctagtctaggaggcacagaattctcattctgttatccagttcattccagcaatcatagttaatacagtacttggtgacacgccctacccccttctcttccaagtttcccactcacttgaggaggaaaaatggcaaaagaaagctgtctagggttttaccattgaagggtggaagaacagagacaaagaggagctctttttctgtgagctgggttgcacaggaagaatgtcacagggaaccaaaaagcacagaaaaaggaagtgctggtgcatatttttgagttaaaatatttccctattttatcatgattactaagtgagtagtatagacagaagtatataactaatggttgaaaatacatatattcatttctttataaaaaacaaaaaccttaccggtagtaatataatttcccccttggtggtttttcagacacctgcagcaagaagaaatactgactgactaggcattattttctatacatccctctcaccagtgaaaagattcctcttgctgcgagaaagctttacccaccatgagttattgctgtcgacgggggtggggcaaggacccgcgctccgtagagctacacgctgcttcacaagcacacggctagcgctctgctctcacctggttcgcttacagatttctctagccattaatttgcctctctgtgtttaaagagcaccaggaccgaatggattttcacttcaggctttccttcaccaagaataaggttctttctggagcctgcaagaagacagttgcccaacactttgacacttgctagtaggtcctttgatcaagagtgtctgaggctgtcaaatgtgtgccaccctttataatacagctatgaaaagttacttctccattaatttctccattctgtttatatcttacagttggacccaaattccaaattatcagttaatcgaaactacattgcaagtcaacattattttctcttcttcctcagcttctccatgtttaggaactgagaaagaacctgcctaagcagcacttccccatgtcctttcaccttcatgttaacgtcccttctgatggtctcactcttcacaggtagttcacactctgagacttgaagtaagctcatggttcagtactctgggggcgcagggctgcgcaggacccttggaaatgttgcaagtgttactagtaccagtttcactttttgttgtcacaatttactgtattttttactttttctgttacagttttgctaatttatcagaaggtccaaaagtctgacataactatttcattttgcattatttatttatgatgcttttttcattgtcttttatacatttgggattataaattatgtaaatgttaaaatgagcatctcaaagaagtctgttaaatcatgactgaaaaaaatcaatcagatgtatcttcaaaaagtggagtcccagttttatgaatcagagatataaaccagaaattctataactgatcatagaagaagaatccagtaattgaacaaatcctatttaatgacatccttgtagcatagatggtctataatgctgaccacagatttcttagaaatgctgctctctctatttaactaacattttgttcagttttgcctccagtggaagcagaaagggttttttcagctgttaaatcctaaaaatcaatataatttatttatgtaagaaaaataactcaatcaatatatttttgaaccttttaagtactaattttctttttatcaagtagaaaaaaaaatgtatttgccctaaatccttaaaatacaaatgctataaaaattcctgtatcttgaaagccttactgcaaatgagtattatagacatccagcagagtctggttttctttgt

SEQ ID NO: 5569 - DNA, 2701 bp, Homo Sapiens
  NM_032226
aaaggcggtgactagagctgtgttgtccccggaagtgccttccctcccgggtctgcgcggacgcggcctccttacctcatttgtcctcgcccctccccgtccctctacgcgttttggttcccggttggtgcttcctgttcgcagctgcggcacttcaaggttactgactttttatgatgtttggtggctatgagactatagaagcatacgaagatgatctttatcgagatgagtcatctagtgaactgagtgttgatagtgaggtggaatttcaactctatagccaaattcattatgcccaagatcttgatgatgtcatcagggaggaagagcatgaagaaaagaactctgggaattcggaatcttcgagtagtaaaccaaatcagaagaagctaatcgtcctttcagatagtgaggtcatccagctgtcagatgggtcagaggtcatcactttgtctgatgaagacagtatttatagatgtaaaggaaagaatgttagagttcaagcacaagaaaatgcccatggtctttcttcttctcttcaatctaatgagctggttgataagaaatgcaagagtgatattgagaagcctaaatctgaagagagatcaggtgtaatccgagaggtcatgattatagaggtcagttcaagtgaagaggaagagagcaccatttcagaaggtgataatgtggaaagctggatgctactgggatgtgaagtagatgataaagatgatgatatccttctcaaccttgtgggatgtgaaaactctgttactgaaggagaagatggtataaactggtccatcagtgacaaagacattgaggcccagatagctaataaccgaacacctggaagatggacccagcggtactattcagccaacaaaaacattatctgtagaaattgtgacaaacgtggtcatttatcaaaaaactgccccttaccacgaaaagttcgtcgctgcttcctgtgctccaggagaggacatctcctgtattcctgtccagcccccctttgcgaatactgtcctgtgcctaagatgttggaccactcatgtcttttcagacattcctgggataaacagtgtgaccgatgtcatatgctaggccactatacagatgcttgcacagaaatctggaggcagtatcacctaacgaccaaacctggaccacccaaaaagccgaagaccccttcaagaccatcagccttagcatattgctatcactgcgcgcaaaaaggccattatggacacgaatgtccagaaagagaagtgtatgacccgtctccagtatctccattcatctgctactatgatgacaaatatgaaattcaggagagagaaaagagactaaaacaaaaaataaaagtactcaagaaaaatggggttatcccagagccatccaagctaccttatataaaagcagcaaatgagaacccccaccatgatataaggaagggccgtgcctcatggaaaagcaacaggtggcctcaagaaaataaagaaacacaaaaagaaatgaagaacaagaatagaaactgggagaagcacaggaaggctgacagacatcgtgaagtggatgaggattttcccaggggccccaaaacctactcttctcctggcagttttaaaacccagaagccttctaagccctttcaccgttcatcacattaccacacgtcaagagaagacaagtctcccaaggaaggcaagaggggcaagcagaagaaaaaggagaggtgctgggaagatgatgacaatgataacttatttcttattaagcagagaaaaaaaaagtcttaagccgtcaggcagcctctgatgtggcttttcattgttcatttggcctttgtgtctataaccttctggcactgtgtttattatctatgattaaataaagtgagtttttggttttgtttttttaatttcagccattcctagagttactgaatatccatggagatctcaattctctgtgtccaacaggatattaggtaagaaagtacaaagataaacctggacttctcctattccaatatgtcatctttactcagaatcctagggataggtagaagaattcatcttttcaagaaagtgttttaaaaatactttgggaaaaaaactgcatcaaaggtaatttatcctcaaattaaatccttgcaggaagagaaattaacactaagaaaaagtcatcaatatttttcaactttttttttttttttttttactttggaaaggacaataactataaacctatatccagattttctttctgctgaagctgttgtcagaatcttcctttggacaaaacatcactagctgactataaaaacaaaagtgtcatcattgaagccctgaagaggcagggaattgagcttcagcaaaatacaggaaaagaactatccagtataaatgtcagaagacagatttcctaaacaagtaaaagagacatcaaaaattttaacataatcacaatgaaatcattttttaccacttttacagcggtgtttcaagcggactgtcactcagatctgcagagatgaatattactcaaaaaatttttttgttctcttgcatttttttcaactaccgcaaagctatacagatttttttgtacttgtggatcttttgtacttctcataacctaatgtcagactaagaaaaataaaatatctgagagtaaaaaaaaaaaaaaaaaa

SEQ ID NO: 5570 - DNA, 5292 bp, Homo Sapiens
  NM_032228
aatgggcgtgccactgcccgtccgctcttcagcagccggtcgcgggcggtggaaaagcgagtgaagagagcgcgacggcggcggcggcggcggcgcagctattgctggacggccagtgggagagcgaggcctgagcctctgcgtctaggatcaaaatggtttcaatcccagaatactatgaaggcaagaacgtcctcctcacaggagctaccggttttctagggaaggtgcttctggaaaagttgctgaggtcttgtcctaaggtgaattcagtatatgttttggtgaggcagaaagctggacagacaccacaagagcgagtggaagaagtccttagtggcaagctttttgacagattgagagatgaaaatccagattttagagagaaaattatagcaatcaacagcgaactcacccaacctaaactggctctcagtgaagaagataaagaggtgatcatagattctaccaatattatattccactgtgcagctacagtaaggtttaatgaaaatttaagagatgctgttcagttaaatgtgattgcaacgcgacagcttattctccttgcacaacaaatgaagaatctggaagtgttcatgcatgtatcaacagcatatgcctactgtaatcgcaagcatattgatgaagtagtctatccaccacctgtggatcccaagaagctgattgattctttagagtggatggatgatggcctagtaaatgatatcacgccaaaattgataggagacagacctaatacatacatatacacaaaagcattggcagaatatgttgtacaacaagaaggagcaaaactaaatgtggcaattgtaaggccatcgattgttggtgccagttggaaagaaccttttccaggatggattgataactttaatggaccaagtggtctctttattgcggcagggaaaggaattcttcgaacaatacgtgcctccaacaatgcccttgcagatcttgttcctgtagatgtagttgtcaacatgagtcttgcggcagcctggtattccggagttaatagaccaagaaacatcatggtgtataattgtacaacaggcagcactaatcctttccactggggtgaagttgagtaccatgtaatttccactttcaagaggaatcctctcgaacaggccttcagacggcccaatgtaaatctaacctccaatcatcttttatatcattactggattgctgtaagccataaggccccagcattcctgtatgatatctacctcaggatgactggaagaagcccaaggatgatgaaaacaataactcgtcttcacaaagctatggtgtttcttgaatatttcacaagtaattcttgggtttggaatactgagaatgtcaatatgttaatgaatcaactaaaccctgaagataaaaagaccttcaatattgatgtacggcagttacattgggcagaatatatagagaactactgcttgggaactaagaagtacgtattgaatgaagaaatgtctggcctccctgcagccagaaaacatctgaacaagttgcggaatatacgttatggttttaatactatccttgtgatcctcatctggcgcatttttattgcaagatcacaaatggcaagaaatatctggtactttgtggttagtctgtgttacaagtttttgtcatacttccgagcatccagcactatgagatactgaagaccaaggattcagcattagaacatctatacatatggtgatctaaatgtacaaaatgtaaaatgtataagtcatctcactttttgtcaagacattaaaccatcttagatcggagtgtgaagtaaattatggtatattttatgtaacattttaatgtttatgctcataaaacttagtgaacacactgtgttatgccagctcaaatctacagtagccaccaaaaccatgacttaatattttgagccctagaagaaaggggtgtgctgaggacaagagtggggaaataggaacactgaccagtataactgtgcaattctggaacatattaattaaaataatatgccttaacatatagtgaatttctaattctaatgttcagtgcaatggaagacatttatttggacagtaatactagcaaagttggtagatatttgattcttcattttttgtttttttcattagttgaagtgggttttagttttgtttaaaattataaccagcgtattttcacatcattctgtaagttaaatgatatcaaacatgaaagagatgttctcatttttctttttctgattaaacgtctgatgcatatcatttttctataagtaatcagttgcttttaaaatcagaaggctatattattctaatgaccctattcgatctaaatgggtttgagaatccatatcagcaacatacgtgttttttgacagaaagtgaaaacaaattccgtaaaactgttagtatcaaaaagaataggaatacagttttcttttccacattatgatcaaataaaaatcttgtgagattgtttatgttttgaagcaggaggatttcttgagatttgatggaagtgggagttgggaaggattcaccatacttgtgttctcctccctttataaattttattcataggacttttaaaaggcttgtgctatctttccagtgaaaactgaaagtgcattattatggaagaatgtatttgcaggtagtaatagcattaaaaaatatactcgtgtgtaaacacatactaattttgaccttgaaagatgaattccttcaagaaaaataaaataatgcttaagataatgtgtacgaaattaaataaaggactttatttacatactacataaggtagcaaactgttgaatgagtttgaaggtatcacttattttttatgcatgtgattttagctttagaaagaaatgcgttatagaaacaagtaatagcaagaaaattgatgtatattttaatgatacattaaaattcccttttaatcataatagttaactctacttactgttttaacatacatttgatttaacaaattgttcagcataacacttctaattaagtttatcaagttgtactgtattagataatcagcagtgtatctggagtatgtttaaagagaacagttcgcaatacaaaaagttacatggagctttacatcttaactttctttgtcaatttaaatgcaatgtataaaaagtttattttgctattgtgaaaaactaaatgtaaaggaaatcacctactttcatgcaggtgtataatcttgaaaaggaaaaatgcttccatgttgaagccagattttctgtagtaaaacttttaaatattattttaaaagaaatatgtatataaatatctctatattctttggaatgatactaaagtctctggtctaggaccataccttatataaaggtataagagaccatgacaatgtctgaaaatggaatagataatgatgccttttatttaaagtggcccacataatatacattgagtactccatctctccaaatgtatttccataatgtgttgaaaacatgctaacatttgtatgatttttatacttctgccgaatagacttagaatcagatgaattgtctgtgtgtcttgcaaaagagttggggacaacttgggcaggcctatgaagtgcatagggagtgtatgtcttctgaatggttttattgttcttgtaatctagcttaaagaaatgttaactgggagggtgctgaggccactcactgcattaattttgtgtgtttagagttctgttgtcaaaagaaaactaatgaataaattagtttgtcattctagaatttaaagttctaagattagtataaagagtatatagattgttaatccccaccagctagactttgaacttaagtcagacttaaagatttgagaaattatttgtgtcatttactagacgtgatttttagttctgtttgattatatttcctacacaaacttcttatttaacaggatagcctactaaattaaatgtttcttatttcacttaactcatttgattaaactgtattctaaaacatttggggtttttccccctattcagttttaatcttggaatatgcatttgtaaattgtgatgtcattgagactatatttatatttgacttggcaacattaacatgtcctaagacttagtgcagagaagcttggcagtacgttctttgacttaaggatggcataaaataatcatttttgaacctgtgtaataaagcttgaaagcagggaaaagaatttccttttcccccttttttgtgttgtctataggaattaacttgggattgttttgtgggtttttgtttgttttaaatgtaaattgagaatcttttataagaaataaaagcattattgggtgcctttgtttgtaaaccaaaaagtaataaatgaatccctatatttccattatagtatttattgtatttttatgttctgaaaattacccatggaacaatatgcttaggattacaggaagcagtccttacttacacttcttgtctgttttaggtgtacttgttaattcttatgtcctaattttatttaattctgagttccttacacagcattttagggaaagaatacaggcaggatgacactttgtgttaaagtgttatttttatgtattacctggaatgaggcaggtttttttctgttttctaaaaagagtaaccaagatacctccagggtgtcattgggttccagctgctctcctccacattgaatgatatcttgttaatttataggcacatttgtggtaatttatatgtctatagagtaagtataagagataattcattagtaataggaattaactgaccccttttggatgggggagagcatcaggctggggtcaggtaagtgtaaatggccttctgagcatgctcttctaggctgactcccagccctgacttgaaaccattagcgctaacttgctctgttttgagaaaaactttccaaacttttgcatgagaaactagaaaaaggaatgtatgccacgtaactggattacagaaatgagttaattgtctctgtgataaaaaaaaaaaatgaaatattttcttattgaattaatatttttgtcttgaagcattttctagtgatagaatgtatttgtcttttttcctggtggtaccctcttagcatatatctttgctatccttaagatcctaaacaaatcatctttgtcagttaagtatagttgcgcaaaaattgttaaatcctttgtctttattaaagaaaaatttgagtaacattaaaaaaaaaaaaaaaaaaa

SEQ ID NO: 5571 - DNA, 2905 bp, Homo Sapiens
  NM_032233
agcgttgggccgcggtcgcggggccgtctcaggctgccgtcccgcccctcccgtccggccgccgccgccgccaccgccgccaccgcctgggggttggttgaggcggacggcggggtccgggccggagtacgtcgttcccgctgcgctaggggaagcgggcagtcagaaaaatgggtaagaagagtcgagtaaaaactcagaaatctggcactggtgctacagcaactgtgtcaccaaaggaaatcttgaacctgaccagtgagctgctgcagaaatgcagcagtccggcgcctggcccaggaaaagagtgggaagagtatgtgcagatccggactctggttgagaaaatacggaaaaagcaaaaaggtctgtccgttacttttgatggaaaaagagaagattactttcctgatctaatgaaatgggcctctgaaaatggggcttctgtcgagggttttgaaatggttaacttcaaagaagagggctttggtttgagagcaacaagagatatcaaggcagaagaattgtttttatgggttccacgaaaattgctaatgactgttgaatctgctaaaaattcagtgttggggcccttatattctcaagaccgaatccttcaagccatgggaaacatcgcactggcctttcatttgctgtgtgagcgagccagccctaactccttctggcagccctatattcaaaccctccccagtgaatatgacactcctctctactttgaagaagatgaagttcggtatcttcagtccacacaagctatacatgatgtcttcagccagtataaaaacacagctcgacagtacgcctacttctataaagtcatccagacccatcctcatgccaacaaactacccttgaaggattctttcacttacgaggactacaggtgggcagtctcttctgttatgacgaggcaaaaccaaattcccacagaggatggttcccgcgtgaccctggctctgattcctttatgggatatgtgtaaccacaccaacggcctgatcactactggttacaacctggaagatgaccgctgtgagtgtgtggctctgcaggattttcgggctggagagcagatttacattttttatggcactcgatccaacgcagagtttgtgatccacagtggttttttctttgacaataactcacacgacagagtgaaaataaagcttggagtgagtaaaagtgacagactctacgccatgaaggccgaggtcttggctcgtgccggcatccccacttccagtgtttttgcattgcattttaccgagccgcccatctctgctcagcttttggcttttctccgagtattctgtatgactgaagaagaactgaaagaacacttgctgggagacagcgctattgatagaatcttcaccttggggaactcggaatttcctgttagctgggacaacgaggtcaaactttggacatttcttgaagatagagcctcacttcttttaaaaacatataaaacaactattgaggaagataaatccgtcttgaaaaaccacgatctttctgttcgtgcaaaaatggccatcaaattgcgcttaggtgagaaagagattttggaaaaagcagtaaagagtgcagctgtcaaccgggaatactatcgccaacagatggaggaaaaggctccgcttcccaaatatgaagagagtaaccttgggctgttggagagcagcgtgggggactcgaggctccccctggtcttgagaaacctcgaggaggaggctggagtgcaggatgccttgaacatcagagaggcaatcagcaaagcaaaggccacagaaaacgggcttgtaaacggtgaaaactctatccctaatgggaccaggtccgaaaatgaaagtctcaatcaagaaagtaaaagagcagttgaagacgccaaaggatcttcttcagacagcactgctggagttaaggagtagctcgaggtgaagctggatgggggatccagtggagcaggagttgacggacagtccgttcacatcgctgtgtttccttgttaacatttttctttctgcagagaggaagatatgtttttgctgctttatataaaaatggtttttttaagttattttaaaaatctagcttccctttttgattaagattgccatcttgcttttaggcaaaacaaaccaattaacaaacaaccacaagaaagggagaagaggtgcctgtgggagattttgcagacctattgtgggtataggtattttcttcctggggaagaattcagttcccgtctcagctgtacttttgtgggcctgtcatcttgatgaccagaatgaaagcttgctctgcctcctgccagccagaattggtggcgggacttggggatacagcgtgaaggtggggaagttgcacagcagaaaacagaattgaagttgggaaactctagagtctgggcaaaatgtttggttttttctcttaaaaaaaataacaccccattaccaaaagaaaaggtaaggtggcaaccttatttttaatagtttgaaatgatgataatcctaattatataaaaatatatatataaacacacatatatatagtgatttctaaagatttgtttacttttgtgttttgttttactgtactaagaacttgtcctttctccttgaatcaaagtaggacatgcatcatcctcctaattttaaatgttggctctgattttaaagtggtgcatttgattccagccttggtaatggagagtttgcaaacacacagcggcccacagcttcacgtggtggtgtgcagtgtgaggcagctccttggctttcctggttttcacaacaagctagagattttcaaagctacacttttgagtaaaaacccttattaaaagaaaaacatgattaataaaaaaaaaaaaaaaaaa

SEQ ID NO: 5572 - DNA, 4465 bp, Homo Sapiens
  NM_032236
aacgtccgcgggcgcggggtgtgtcgggtgtcgacggcggcgctttgcggccggtcgtgcgggtcgggcgcgggcgggcgcggcggcagtggcgcgcacaggtgattgactggccagctgcctgaaggagcgccaggtcctccttgctggcaggtggcgaagcccattggggcggcggtgcagaccgcggcggcggctgcggcggtctggctcgggaggcgttcctggggccaaggccatggccccgcggctgcagctggagaaggcggcctggcgctgggcggagacggtgcggcccgaggaggtgtcgcaggagcacatcgagaccgcttaccgcatctggctggagccctgcattcgcggcgtgtgcagacgaaactgcaaaggaaatccgaattgcttggttggtattggtgagcatatttggttaggagaaatagatgaaaatagttttcataacatcgatgatcccaactgtgagaggagaaaaaagaactcatttgtgggcctgactaaccttggagccacttgttatgtcaacacatttcttcaagtgtggtttctcaacttggagcttcggcaggcactctacttatgtccaagcacttgtagtgactacatgctgggagacggcatccaagaagaaaaagattatgagcctcaaacaatttgtgagcatctccagtacttgtttgccttgttgcaaaacagtaataggcgatacattgatccatcaggatttgttaaagccttgggcctggacactggacaacagcaggatgctcaagaattttcaaagctctttatgtctctattggaagatactttgtctaaacaaaagaatccagatgtgcgcaatattgttcaacagcagttctgtggagaatatgcctatgtaactgtttgcaaccagtgtggcagagagtctaagcttttgtcaaaattttatgagctggagttaaatatccaaggccacaaacagttaacagattgtatctcggaatttttgaaggaagaaaaattagaaggagacaatcgctatttttgcgagaactgtcaaagcaaacagaatgcaacaagaaagattcgacttcttagccttccttgcactctgaacttgcagctaatgcgttttgtctttgacaggcaaactggacataagaaaaagctgaatacctacattggcttctcagaaattttggatatggagccttatgtggaacataaaggtgggtcctacgtgtatgaactcagcgcagtcctcatacacagaggagtgagtgcttattctggccactacatcgcccacgtgaaagatccacagtctggtgaatggtataagtttaatgatgaagacatagaaaagatggaggggaagaaattacaactagggattgaggaagatctagcagaaccttctaagtctcagacacgtaaacccaagtgtggcaaaggaactcattgctctcgaaatgcatatatgttggtttatagactgcaaactcaagaaaagcccaacactactgttcaagttccagcctttcttcaagagctggtagatcgggataattccaaatttgaggagtggtgtattgaaatggctgagatgcgtaagcaaagtgtggataaaggaaaagcaaaacacgaagaggttaaggagctgtaccaaaggttacctgctggagctgagccctatgagtttgtctctctggaatggctgcaaaagtggttggatgaatcaacacctaccaaacctattgataatcacgcttgcctgtgttcccatgacaagcttcacccggataaaatatcaattatgaagaggatatctgaatatgcagctgacattttctatagtagatatggaggaggtccaagactaactgtgaaagccctgtgtaaggaatgtgtagtagaacgttgtcgcatattgcgtctgaagaaccaactaaatgaagattataaaactgttaataatctgctgaaagcagcagtaaagggcagcgatggattttgggtggggaagtcctccttgcggagttggcgccagctagctcttgaacagctggatgagcaagatggtgatgcagaacaaagcaacggaaagatgaacggtagcaccttaaataaagatgaatcaaaggaagaaagaaaagaagaggaggaattaaattttaatgaagatattctgtgtccacatggtgagttatgcatatctgaaaatgaaagaaggcttgtttctaaagaggcttggagcaaactgcagcagtactttccaaaggctcctgagtttccaagttacaaagagtgctgttcacagtgcaagattttagaaagagaaggggaagaaaatgaagccttacataagatgattgcaaacgagcaaaagacttctctcccaaatttgttccaggataaaaacagaccgtgtctcagtaactggccagaggatacggatgtcctctacatcgtgtctcagttctttgtagaagagtggcggaaatttgttagaaagcctacaagatgcagccctgtgtcatcagttgggaacagtgctcttttgtgtccccacgggggcctcatgtttacatttgcttccatgaccaaagaagattctaaacttatagctctcatatggcccagtgagtggcaaatgatacaaaagctctttgttgtggatcatgtaattaaaatcacgagaattgaagtgggagatgtaaacccttcagaaacacagtatatttctgagcccaaactctgtccagaatgcagagaaggcttattgtgtcagcagcagagggacctgcgtgaatacactcaagccaccatctatgtccataaagttgtggataataaaaaggtgatgaaggattcggctccggaactgaatgtgagtagttctgaaacagaggaggacaaggaagaagctaaaccagatggagaaaaagatccagattttaatcaaagcaatggtggaacaaagcggcaaaagatatcccatcaaaattatatagcctatcaaaagcaagttattcgccgaagtatgcgacatagaaaagttcgtggtgagaaagcacttctcgtttctgctaatcagacgttaaaagaattgaaaattcagatcatgcatgcattttcagttgctccttttgaccagaatttgtcaattgatggaaagattttaagtgatgactgtgccaccctaggcacccttggcgtcattcctgaatctgtcattttattgaaggctgatgaaccaattgcagattatgctgcaatggatgatgtcatgcaagtttgtatgccagaagaagggtttaaaggtactggtcttcttggacattaatctttgaatacttgctgactgctaagaaatgaccagaggggaagaggagtttgacatgttagggcattaaagcaaaggtggatttaagaattaaaccattacatgccccttccaaaaggcagaaatccattcaaacgtgactgtcccaaatgccttatgtcaaataaagcagattgcactgatggacatcagacttgaaggaaatgtttccaattttatatttaaggggggtggtgggtgggagggggcaagtaaagacggaacaagtttagtagcagtaatagtaaatcatgtttacatatgagatttatagtcgtgggaggggaataaagttctgttatatttccttgctcgagtttcataccagatgcgttggtccataaaggattgtatcaagtagatgggacaacattctgctctgaacgaaaagtaattttagagacataacctgcttaccaatgcctgtctttgattcatattctactttcaataaagcatgaaagtgaagaacttgtcctaagtgtggaaaagtgtcttcagatttagactcttctccatgtcagctgcagcgccacccgccttacacctgcccggccgtctgtctcttggtattgggtaaaggagggggcacctgcatgtctcctgcaatgagcaaggaattatgtctcatgttttgacttcagaggctttttgctttggtgcatttcagaaaggatggagaacatttattatgtgtgaaagcatcctcttccggttttgctgttattcaaaagtgggaaatgtacctggcacgtttgaaaataaaaaatctgactacctatcagaagagtaaatcagactgaagtacatttggataacacaaggtttctataaaatttgttcttcctgtcctccatgtcactgtttcttggacctcagttctctttttgaaagcattattccaaaatgccctgagagggtctcttagatcattgtttaaaaaaggaaaaaagtatatggatgtgctgtccatccaactcaggattatcattcttagcaacacgtaaccgaagcaatattcttaagaatattgaaggggtttttttaattgaacttaagactggagtttttcctttgaaa

SEQ ID NO: 5573 - DNA, 1615 bp, Homo Sapiens
  NM_032237
cagtgcgtgctggcccggggtggcaggagccgcagaggcttgggctgcagaaaaaggatcctgtttgctgtgtaatcctgagaatggactgcaagagaggaaaaactgggcgtctgcttgggaatctattgtggaaacccagggtgtttcccgaccagtccctgggcgccaactagagtatggactgaccaggtacctggatggagacctgagctggagaaggagatgcgcttgggaggaaattgcagaggccgtcaacatggaaaagcagccccagaacagcaggagaggcctcgccccccgagaggtgccgccagctgttgggctgctgctgatcatggccctgatgaatactctgctctacctctgcctcgaccacttcttcatcgctcctcgacaatccactgtggaccccacacactgtccctatggtcacttcaggataggacagatgaaaaactgctcaccttggctgtcctgcgaggagctgagaacagaagtgagacagctgaagcgtgttggggaaggagctgtaaagagagtctttctgtctgagtggaaggagcacaaagttgcactctcacagctcaccagcctggagatgaaagatgatttcctccatggactgcagatgctgaaatctctccaaggcacacatgttgtcacgctgcttggctattgtgaggatgacaacactatgcttactgaatatcaccctctaggttccttgagtaacctggaagaaacactaaacctttcaaagtaccaaaatgtgaacacgtggcagcacaggctggagctggccatggactatgtcagcatcattaattacctgcaccacagccctgtgggcacacgggtcatgtgcgactccaacgacctgccgaagacactgtcccagtatctgctaacaagcaacttcagcattttggcaaatgacttggacgccttacccctggtgaaccacagctccgggatgctggtgaagtgcggccacagggagctgcatggggatttcgtggctccagagcaactgtggccctatggagaggacgtgcctttccacgatgatctcatgccctcatatgatgagaagattgacatttggaagatcccagacatctccagtttccttctggggcacattgaagggagtgatatggtccgattccatttgtttgatattcacaaagcatgcaagagccagactccctcagaaagacccactgcccaggacgttctggagacctaccagaaggtcttggatacacttagagatgccatgatgtctcaggcaagagagatgctgtgaaaaccagtccagccaatgaaggtgggattgaagggctgaatggaagttacagcattctactctgatggtggagttttttgcctgagtttcgtgttttattgttttttttatggcttagccatgtggttcgttgtccacatccacatgtacgtttgtatgtagtccacattggttgttagatttttttttttttctttgagatgcggtcttgctctgttgctgaggctggagtgcagtgatgtgatcttggctcactgcagcctctgcctcccaggttcaagcaattctcccacctcagcctcc

SEQ ID NO: 5574 - DNA, 2718 bp, Homo Sapiens
  NM_032239
gggtaaagctcctcggcctcggcgtgctgcgcctccgcggctgccctgcgccagaattcggttccctcaaaattataaaggcaggaaagctcaagacaaagaaatccaacaaggctagtgatttcagtgatatggagaattggccaacaccaagtgaattagtgaacactggatttcagagcgtcctcagccaaggaaataaaaagccacaaaatagaaaagaaaaagaagagaaggttgaaaagagaagtaacagtgacagcaaagaaaaccgggaaacaaaattaaatggtcctggtgaaaacgtcagtgaggatgaggctcagtcaagtaatcaacgtaagagagctaataagcacaagtgggtaccactccacttagatgttgtaagatcagagagtcaagaaagacctggatcccggaacagctcaagatgtcaacctgaagcaaataaaccaacacataacaataggagaaatgatacacgaagttggaagcgagatagagaaaaaagggatgatcaagatgacgtttccagtgtgagaagtgagggtggtaatatccgaggttcctttagaggtcgaggaagaggccgaggacggggaagaggacgaggcagaggaaatcctcgattgaactttgattattcatatggttatcaagaacatggtgaaaggactgatcaaccatttcaaacagaacttaataccagtatgatgtattactatgatgatggtacaggtgtacaggtgtatcctgtggaagaagcattgcttaaagagtatattaagcgtcaaattgaatattacttcagtgtagaaaatttggaacgagacttctttcttcggggaaagatggatgaacaaggtttcttgcctatttccctgattgctggttttcagcgtgttcaggctctcactacaaaccttaatctcatcttagaggcactgaaggatagcacagaagtagaaattgtggatgagaaaatgagaaaaaagatagaaccagaaaaatggccaattccaggccctcctccacgcagtgtgccaccaacagacttctctcaactgattgattgtccagagtttgtaccaggccaagccttttgctcacatacaggtaacatcttttcttctagagcaaacgatgtaacagtgggttatttggtccaatttacttacttatttatttattttcagtttatttagatttgataggaaaattaaagctaactgaaagacttttgagtcccattttgtattcatattgcctcactcacagagttacaaattaaataaggatttaagaattatgaggaaagctgtcttatgtttcttgttcttaaattatatgtgtactttgtcatgtatggagtttctatcttttatttttactaaataactatagatatgtatcgttttcccctgtaaaattggaatagtatgattggattattctaaaaaggtcttatactcaagagtggggtagtcttcctttaattttgttaccaatacgctttaatcttgtcttggaaagataaaatgacctgcattctaaattagaattggggttctgtttaatttggttgtgtttagaatttccaaaagatttaatgttaataattttttcctggatcatttttaagacattccctcttgggaaaaaatgtgtgcttaaacttttttcagtcagggtgatgatcttctgaagctcttggatgtcatttgatcggaatatgcagtggaataggtgactcactgaaatgcctttataaatactggaacaaatcctgctgcaaaaatgaaagcgatcagactgtcttctgttcaagaatgtctattcccacctcttggtggaggaagttgggccaacactgcagtggagataaccacctttgcgataatgagagacagaccagaggactgctactctttttataggagctgcctatttctgtgtaattggcctgggctgcatgggctgcttttattcatggtgggaaagttaattattattattctggaaataccgcaagattatgttttctgtttccagggttatgtacttgtgtccagatgaataaagcagaaaaagaggggattgagtagcatttcccagattcttaagtactttgctattcgatttgcctttcagtgtagtgtacattgtaaaactcagatattgtcatgatgtttcacttggacataagacttattaatgtggtcacttaaggggtaaggaatttaagaactggatgaggttatttcttcctttactcttcaaaatgtatttttgatacatcagtatgagaggacgtcccatcaacaaagcatcgatgatggacagtctcacactatttttatcatatgtttctttgtcagccttctgcttctaatcccagtaagcaacttggacaggcattttaaaagctgaagaaaagtgacattattttagctagtggtttttaatttattttttgttaagatataatgggtgattatataagttagatttatttatgatatcaacttgggtccaagatgatagttttagctagcttatgaacattgggttcacaaggcattgggtaagttagataaaatagcatatactttctctgcagggtaggtaagataggtcagtcaagttggtaatgcctgtccattaaccatttatgcatactaataaaattataagaataaaatcaaaaaaaaaaaa

SEQ ID NO: 5575 - DNA, 9071 bp, Homo Sapiens
  NM_032242
atgccgctgccaccgcggagcctgcaggtgctcctgctgctgctgctgttgctgctgctgctgccgggcatgtgggctgaggcaggcttgcccagggcaggcgggggttcacagccccccttccgcaccttctcggccagcgactggggcctcacccacctagtggtgcatgagcagacaggcgaggtgtatgtgggcgcagtgaaccgcatctataagctgtcggggaacctgacactgctgcgggcccacgtcacgggccctgtggaggacaacgagaagtgctacccgccgcccagcgtgcagtcctgcccccacggcctgggcagtactgacaacgtcaacaagctgctgctgctggactatgccgctaaccgcctgctggcctgtggcagcgcctcccagggcatctgccagttcctgcgtctggacgatctcttcaaactgggtgagccacaccaccgtaaggagcactacctgtccagcgtgcaggaggcaggcagcatggcgggcgtgctcattgccgggccaccgggccagggccaggccaagctcttcgtgggcacacccatcgatggcaagtccgagtacttccccacactgtccagccgtcggctcatggccaacgaggaggatgccgacatgttcggcttcgtgtaccaggatgagtttgtgtcatcacagctcaagatcccttcggacacgctgtccaagttcccggcctttgacatctactatgtgtacagcttccgcagcgagcagtttgtctactacctcacgctgcagctagacacacagctgacctcgcctgatgccgccggcgagcacttcttcacgtccaagatcgtgcggctctgtgtggacgaccccaaattctactcgtacgttgagttccccattggctgcgagcaggcgggtgtggagtaccgcctggtgcaggatgcctacctgagccggcccggccgtgccctggcccaccagctgggcctggctgaggacgaggacgtgctgttcactgtgttcgcccagggccagaagaaccgcgtgaagccaccaaaggagtcagcactgtgcctgttcacgctcagggccatcaaggagaagattaaggagcgcatccagtcctgctaccgtggtgagggcaagctctccctgccgtggctgctcaacaaggagctgggctgcatcaactcgcccctgcagatcgatgacgacttctgcgggcaggacttcaaccagcccctggggggcacagtcaccattgaggggacgcccctgttcgtggacaaggatgatggcctgaccgccgtggctgcctatgactatcggggccgcactgtggtattcgccggcacgcgaagtggccgcatccgcaagatcctggtggacctctcaaaccccggtggccggcctgccctggcctacgagagcgtcgtggcccaggagggcagccccatcctgcgagacctcgtcctcagccccaaccaccagtacctctacgccatgaccgagaagcaggtgacgcgggtgcctgtggagagctgtgtgcagtacacgtcctgtgagctgtgtctggggtcacgggacccccactgtggctggtgtgtcctgcacagcatctgctcgcggcgggacgcctgtgagcgagcagacgagccccagcgctttgctgcggacctgctgcagtgtgtgcagctgactgtgcagccccgcaatgtgtctgtcaccatgtcccaggtcccacttgtgctgcaggcctggaacgtgcctgacctctcagctggcgtcaactgctccttcgaggacttcacggaatctgagagcgtcctggaggatggccggatccactgccgctcaccctccgcccgggaggtggcgcccatcacgcggggccagggagaccagcgggtggtgaaactctacctaaagtccaaggagacagggaagaagtttgcgtctgtggacttcgtcttctacaactgcagcgtccaccagtcctgcctgtcctgtgtcaacggctcctttccctgccactggtgcaaataccgccacgtgtgcacacacaacgtggctgactgcgccttcctggagggccgtgtcaacgtgtctgaggactgcccacagatcctgccctccacgcagatctacgtgccagtgggagtggtaaaacccatcaccctggccgcacggaacctgccacagccacagtcaggccagcgtggatatgagtgcctcttccacatcccgggcagcccggcccgtgtcaccgccctgcgcttcaacagctccagcctgcagtgccagaattcctcgtactcctacgaggggaacgatgtcagcgacctgccagtgaacctgtcagtcgtgtggaacggcaactttgtcattgacaacccacagaacatccaggcgcacctctacaagtgcccggccctgcgcgagagctgcggcctctgcctcaaggccgacccgcgcttcgagtgcggatggtgcgtggccgagcgccgctgctccctgcgacaccactgcgctgccgacacacctgcatcgtggatgcacgcgcgtcacggcagcagtcgctgcaccgaccccaagatcctcaagctgtcccccgagacgggcccgaggcagggcggcacgcggctcactatcacaggcgagaacctgggcctgcgattcgaagacgtgcgtctgggcgtgcgcgtgggcaaggtgctgtgcagccctgtggagagcgagtacatcagtgcggagcagatcgtctgtgagatcggggacgccagctccgtgcgtgcccatgacgccctggtggaggtgtgtgtgcgggactgctcaccacactaccgcgccctgtcacccaagcgcttcaccttcgtgacaccaaccttctaccgtgtgagcccctcccgtgggcctctgtcagggggcacctggattggcatcgagggaagccacctgaacgcaggcagtgatgtggctgtgtcggtcggtggccggccctgctccttctcctggaggaactcccgtgagatccggtgcctgacaccccccgggcagagccctggcagcgctcccatcatcatcaacatcaaccgcgcccagctcaccaaccctgaggtgaagtacaactacaccgaggaccccaccatcctgaggatcgaccccgagtggagcatcaacagcggtgggaccctcctgacggtcacaggcaccaacctggccactgtccgtgaaccccgaatccgggccaagtatggaggcattgagagggagaacggctgcctggtgtacaatgacaccaccatggtatgccgcgccccgtctgtggccaaccctgtgcgcagcccaccagagctgggggagcggccggatgagctgggcttcgtcatggacaacgtgcgctccctgcttgtgctcaactccacctccttcctctactaccctgaccccgtactggagccactcagccccactggcctgctggagctgaagcccagctccccactcatcctcaagggccggaacctcttgccacctgcacccggcaactcccgactcaactacacggtgctcatcggctccacaccctgtaccctcaccgtgtcggagacgcaactgctgtgcgaggcgcccaacctcactgggcagcacaaggtcacggtgcgggcaggtggcttcgagttctcgccagggacactgcaggtgtactcggacagcctgctgacgctgcctgccattgtgggcattggcggaggcgggggtctcctgctgctggtcatcgtggctgtgctcatcgcctacaagcgcaagtcacgagatgctgaccgcacactcaagcggctgcagctccagatggacaacctggagtcccgcgtggccctcgaatgcaaggaagcctttgcagagctgcagacagacatccacgagctgaccaatgacctggacggtgccggcatccccttccttgactaccggacatatgccatgcgggtgctctttcctgggatcgaggaccaccctgtgctcaaggagatggaggtgcaggccaatgtggagaagtcgctgacactgttcgggcagctgctgaccaagaagcacttcctgctgaccttcatccgcacgctggaggcacagcgcagcttctccatgcgcgaccgcgggaatgtggcctcgctcatcatgacggccctgcagggcgagatggaatacgccacaggcgtgctcaagcagctgctttccgacctcatcgagaagaacctggagagcaagaaccaccccaagctgctactgcgccggactgagtcggtggcagagaagatgctaactaactggttcaccttcctcttgtataagttcctcaaggagtgcgctggggagccgctgttcatgctgtactgcgccatcaagcagcagatggagaagggccccattgacgccatcacgggtgaggcacgctactccctgagtgaggacaagctcatccggcagcagattgactacaagacactgaccctgaactgtgtgaaccctgagaatgagaatgcacctgaggtgccggtgaaggggctggactgtgacacggtcacccaggccaaggagaagctgctggacgctgcctacaagggcgtgccctactcccagcggcccaaggccgcggacatggacctggagtggcgccagggccgcatggcgcgcatcatcctgcaggacgaggacgtcaccaccaagattgacaacgattggaagaggctgaacacactggctcactaccaggtgacagacgggtcctcggtggcactggtgcccaagcagacgtccgcctacaacatctccaactcctccaccttcaccaagtccctcagcagatacgagagcatgctgcgcacggccagcagccccgacagcctgcgctcgcgcacgcccatgatcacgcccgacctggagagcggcaccaagctgtggcacctggtgaagaaccacgaccacctggaccagcgtgagggtgaccgcggcagcaagatggtctcggagatctacttgacacggctactggccaccaagggcacactgcagaagtttgtggacgacctgtttgagaccatcttcagcacggcacaccggggctcagccctgccgctggccatcaagtacatgttcgacttcctggatgagcaggccgacaagcaccagatccacgatgctgacgtgcgccacacctggaagagcaactgcctgcccctgcgcttctgggtgaacgtgatcaagaacccacagtttgtgttcgacattcacaagaacagcatcacggacgcctgcttgtcggtggtggcccagaccttcatggactcctgctccacctctgagcacaagctgggcaaggactcaccctccaacaagctgctctacgccaaggacatccccaactacaagagctgggtggagaggtactatgcagacatcgccaagatgccagccatcagcgaccaggacatgagtgcgtatctggctgagcagtcccgcctgcacctgagccagttcaacagcatgagcgccttgcacgagatctactcctacatcaccaagtacaaggatgagatcctggcagccctggagaaggatgagcaggcgcggcggcagcggctgcggagcaagctggagcaggtggtggacacgatggccctgagcagctgagccccagctgtgatcatccagcatgatgcagcgtgaggacagctgagcagggaccgggacagccctcaccgcatgcgtgtggagtgtccggtggtgctcgggccgccgcagtgcagcgactgcccggccctccctcccctgcctcacccggtcgggtcccggctcttcctgtgtggaggtgatggtacctgccacaccacagctgcgcacacagctgcttgctcaggggccgggacagcactgggtgctcaggctggccaaggaccttcattgcctggcaagagctgcccagtggccttcatgggagaagggctgacctctgaggggctgaggggtgaggccagggccctccagggggaggggtagccagcttgggctgtccccttgagaccaggacaagaggctgggggtgtcagcattcccagctttccaagctgcccccaggcggcagagtctgagggtcccggggcccggttggcagctggagaaagaggcaaaaagcccgtagccgggcaagaggagctcaagtcggtctgggcccgttgccaccgactcccacctccagcacccatgcccgctgcaccgctgccatcctcagattcaccgcgtgctctgcgcggccgaggccggagcaccacatccacctcgccccagagaggctctgctccctcctatggaggggctgtgggccaggctgctcagactcctgggtggcttccagacggaccgggcagcccctctccgtcctcagggctgtgcctctgggagccactgggccaggggccccgggtcgcagagagcacgttcccgttatttattcccctccgcgtcctacacaggctgccctggcagctgtcttcaagggtaggctgagctccccaccctggagcccctgagggcggcccctgagcactcctctctctccactctctctgtccctgccccagcggcttccagtgtggcatctcagcagtgtcctggcccctccagagcagtgggacatctggggactgtttttgtgtttaggggaaaaaattctgctgcactctgcttgggccttgaggtctgtggcagggctcctctggcccgcagtggcctggatctatctgggccatgagtgacgggcagtgaccagagggactggaggccagcggtgtccacccttgccctcagcaagagagaatgcattcttaaaagaaagctgtacatgtatatatatgcatatatatatatgtggctctagcctcaggctccagccccagtggggtactgtacagttaactgaagaagaattttaaagacgatttgaacaagaaaatgaaggcagtgggaaagcaatgccaaatggttgtggagaaagtggccggagcctccctggagtggagcagccctgaagcctgtgccccccgacctgcgggccgctgttttggtttgacatgacaaggaaaggacttcctgctgaccctgagagcctctggggtgccgcggcaccacggggcatgcatgattgtgctagcgtttagtctgagttgatctttttaaaactgcaagtgttgaatactagaggttgttagacccttttttatgttttttaattaatcagtcacttgtaaaagcaaacaagcggtccatccccttttcaaggtcacttttttgatggtaccgaagatcccatggacattaagggacagctaactgtggccagactcagccccatgtccttggccaggcccaaggagaggactcggccccatggggtgtgccagtcttgcagtccgccccagctgagtagcgtgagccagatgacgccacagagacccgcctcttccctgaacgcgggtcggtgtggagtcagtgactgctgactcagggagctccttggccccgtgggcactgtgccagggctggggccttctgctgctgccacacccagctcaggcctgggccagcccctgcccccagcccactgagggggtgggcttactccctgggcagtcttgggggccagagctgaggccagtccatattacagtggctgggctgtttttttcagtagcccctagcattggctgggattcctgttcctgggtgcgcctccacctcccttctgatgtttcctggctatggtggggtgggaacctcagtttcccccaaagtcttccctggatgctggcttcaggttgaagtccctggttcttccagttcctcacgggttaggtaggggctcctgcatcaccttcagaatccagttccaacccccactctccttaggccttgtgctctgctctgccctgccaggctgcccttgtccatgtgagtagcatgggcgggtggtggggacggcagtggtgatgaagggggtgcaccacaggcctcatgaagcagttcccacatgggcgtgtggctggggcgtggccaccacagagcacatggctgtgtctaggcgcaagcactttagcagtatctgtttacatgcgcaaggatcaagccgactacctgtgctgtctactgggacagcagtctccgagctactccgtacctccctctgccaggtcgtggagttaggccccagtccctacttgtcactggttcccactgtgctcctaactgtgcagcacctgggagctctggcctggggctggaggccctggtaggagctgcagttggaggccgttctgtgcccagcagcggtgagcggctcccatgggccctgtgtctgcagggagccagggctgcggcacatgtgctgtgaaactggcacccacctggcgtgctgctgccgccacttgcttcctgcagcacctcctaccctgctccgtgtcctccctctccccgcgcctggctcaggagtgctggaaaagctcacgcctcggcctgggagcctggcctcttgatatacctcgagcttcccctgtgctccccagccccaggaccactggccccttggcctgaggggctgggggccccacgacctgcagcgtcgagtccgggagagagcccggagcggcgtgccatctcggctcggccttgctgagagcctccgccctggctttctccctgtctggattcagtggctcacgttggtgctacacagctagaatagatatatttagagagagagatatttttaagacaaagcccacaattagctgtcctttaacaccgcagaaccccctcccagaagaagagcgatccctcggacggtccgggcgggcaccctcagccgggctctttgcagaagcagcaccgctgactgtgggcccggccctcagatgtgtacatatacggctatttcctattttactgttcttcagatttagtacttgtaaataaacacacacattaaggagagattaaacatttttgctaaaagctaaaaa

SEQ ID NO: 5576 - DNA, 1978 bp, Homo Sapiens
  NM_032262
ctcatcttcacgttttctgcatctattgaagtgcgccactgagatcgtggagttcttccctgtttgtccatatgatgaacaacactgattttctgatgttgaacaatccctggaataaactctgtttggtttccatggatttctgtttccctttagattttgttagtaatttattttggatttttgcatccaagttcataattgtaactggacaaataaaggcagattttaaaaggacaagttgggaggctaaggcggaaggatcacttgagcctgggagattgaagctgcagctagcttcgattgttccactgtactccagcctggtgacagcaggacctgcctctaaaataataatacttaaaaggacgagtttacctacagtctcaccaagcaatgaaagagcttatcttcttcctgtttcctttacggatcttgctcatgtattttatcttagttactttagcataaatgctaaatcaaattctttttcactagacatcataatagctctaggcataccacataatacccaagcacattttaatcattaaaattgtttcctttttttgtggctactgtaaccacttcagcgaaccatttagtgtgtagtgggtttaaattttttctccttcctgggataaatttcccaggagagggataattgggtcaaaagttacgaacatatttatgggttcttttccacaagagatcgatcagtttgcaagtgccatctgcactgtgggggaaccaatcttcaacttgcctgcatttggtattagtatttcattaacctttcattgatctaattacggctctttgacacaattttcatcagtgatggactaagtgtgatccggcctgacccgcctccggccggcgtgagaaggggcatgtgtcgggctaccctcgggcttcccctgccgcccattgtgatccagcccgctaggcgctccctgccgcccattgtgacgcctgccagccgcaggctgggtccccgaggcgggcggcatttaggctcggtctccacagccatggccgcgacgcaggagctgctgctgcagttgcagaaggataaccgagatggtcgccagcggaagcaggagctagagaagctgatgcgcgggctcgaggccgagagcgagagcctgcctcaaccagcgcctgcaggacctgagcgagcgggagcggaggctgctgcggaggcgaagccaggaagcgctgcttctgcaaggggaggtgcgcgaggcggcgcgggagcgcgcgcagcgggtgcgcagaagactggaggaggcggagcgccacaaggaggacttgaagcccggtaaaccccgtccttacgagccccgcccctagctcttctactacggaggggaactgcagagccagaagagcacggagcagcaactcgcagcccaattggtgacgctgcagaatgaactggagctggcggagaccaaatgcgccttgcaggaggagaagctgcagcaggacgcgctgcagacagcggaggcctgggccatattccaggagcagaccgtagtcctgcaggtgtgacgggcagcttcgcagagtgcagtacagcaccgagtcgctcatggaggagatggccagggcggaccgagagacgcggctgttcggcggtcctcgcgcgctggccatcaggcgctgctgacgctgccgctcctcttcctggggctgtcgctgctctggacggtgctgttggaccccggcgccgtctccgcgtggctctggagcctcacctcggagacgacgctgcgccgcctgcgctacacgctgtccccgctgctggagctgcgcgctaacgggctgctgccaacctaagtgcagcgccccgcgcctggctccaggtggactccagggcaccggctttatttctggtgcactcctctcctgagagtgtagaccaaggtcgcctaataaactcctcaagggataaaaaaaaaaaaaaaaaaaa

SEQ ID NO: 5577 - DNA, 3783 bp, Homo Sapiens
  NM_032264
caggcgaggggttgggtggcggttgagacagcggcggtactgggatgggtaggtgaggatcccgagactgagtgagcttctgcgcgcggtgcttttgggaacgcgggactggcaacctgcggcgccaggagctgggccgaggcgcggcggcgcggctgcgggccgccgtctggatgggaagttacggcgaagtccacccagcgtttctcaggcaatctgaaggcaaatcctgtttagacccaggcgaaggttcctggtgacccaggctctcaccagccaattgtcccttgccgtcctcctgagggtatctggagcttcagtgctgtgtgctcttggcctccacactggggatgccactgactcccactgtccagggcttccagtggactctccgaggccctgatgtagaaacttccccattcggtgcaccaagagcagcctcacatggtgtgggccgacatcaagagctgcgagatccaacagtccctggccccacctcttctgccacaaacgtcagcatggtggtatctgccggcccttggtccggtgagaaggcagagatgaacattctagaaatcaacaagaaatcgcgcccccagctggcagagaacaaacagcagttcagaaacctcaaacagaaatgtcttgtaactcaagtggcctacttcctggccaaccggcaaaataattacgactatgaagactgcaaagacctcataaaatctatgctgagggatgagcggctgctcacagaagagaagcttgcagaggagctcgggcaagctgaggagctcaggcaatataaagtcctggttcactctcaggaacgagagctgacccagttaagggagaagttacaggaagggagagatgcctcccgctcattgaatcagcatctccaggccctcctcactccggatgagccggacaactcccagggacgggacctccgagaacagctggctgagggatgtaggctggcacagcacctcgtccaaaagctcagcccagaaaatgatgacgatgaggatgaagatgttaaagttgaggaggctgagaaagtacaggaattatatgcccccagggaggtgcagaaggctgaagaaaaggaagtccctgaggactcactggaggagtgtgccatcacttgttcaaatagccaccacccttgtgagtccaaccagccttacgggaacaccagaatcacatttgaggaagaccaagtcgactcaactctcattgactcatcctctcatgatgaatggttggatgctgtatgcattatcccagaaaatgaaagtgatcatgagcaagaggaagaaaaagggccagtgtctcccaggaatctgcaggagtctgaagaggaggaagccccccaggagtcctgggatgaaggtgattggactctctcaattcctcctgacatgtctgcctcataccagtctgacaggagcacctttcactcagtagaggaacagcaagtcggcttggctcttgacataggcagacattggtgtgatcaagtgaaaaaggaggaccaagaggccacaagtcccaggctcagcagggagctgctggatgagaaagagcctgaagtcttgcaggactcactggatagattttattcaactccttttgagtacctggaactgcctgacttatgccagccctacagaagtgacttttactcattgcaggaacaacaccttggcttggctcttgacttggacagaatgaaaaaggaccaagaagaggaagaagaccaaggcccaccatgccccaggctcagcagagagctgccggaggtagtagagcctgaggacttgcaggactcactggatagatggtattcgactcctttcagttatccagaactgcctgattcatgccagccctacggaagttgcttttactcattggaggaagaacacgttggcttttctcttgacgtggatgaaattgaaaagtaccaagaaggggaagaagatcaaaagccaccatgccccaggctcaacgaggtgctgatggaagcagaagagcctgaagtcttgcaggactcactggatagatgttattcgactacttcaacttactttcaactacatgcctcattccagcagtatagaagtgccttttactcatttgaggaacaggacgtcagcttggcccttgacgtggacaataggttttttactttgacagtgataaggcaccacctggccttccagatgggagtcatattcccacactaagcagcccttactaagctgagagatgtcattgctgcaggcaggacctataggcacatgtaggtttgaatgaaactgtagttccctttggaagcccagtcataggatgggaaagtgggcatggctctattcctattctcagaccatgccagtggccacctgtgctcagtctgaagacgttggacccaagttaggtgtgacacgttcacacgactatgtagcacatgccgggagtgatctgccagacattctaatttgaaccagatatctctgggtagctacaaagttcctcaggggtttcattttgcaggcatgtctctgagcttctatacctgctcaaggtcagtgtcatctttgtgtttagctcatccaaaggtgttaccctggtttcattgaacctaaccccattctttgtatcttcagtgttggtttgttttagctgatccatctgtaacacaggagggatccttggctgaggattgtatttcagaaccactgactgctcttgacagttgttaacccactaggctcctttgagtagagaagccatagtccttcagcctccaattgatatcaatacttaggaagaccacagctagacggacaaacagcattgggaggccttagtcctgctcctttcaattccatcctgtaaagaacaggagtcaggagccgctggcaagagacagcatgtcacctgggactctgccagtgcagaatatgaacaatgccatgttcttgcagaaaatgcttagcctgagtttcataggaggtaatcaccagacaactgcagaatgtagaacactgagcaggacaactgacctgtctccttcacacagtccacgtcaccacgaatcacacaacaaaaaggaggagagatattttgggttcagaagaagtaaatgataatgtagctacatttctttagttattttgaaccccaaatatttcctcatctttttgttgttgtcattgattttggtgacatggacttgtttgtagaggacaggtcagctgtctggctcaatggtctacattctgaagttgtctgaaaatgtcttcatgattaaattcagcctaaacgtttcatcaagaacactacagagtcgatactgtgagtttccaacctcagcccatctgtgggcagagaaggtctagtttgtccatcagcattatcatgatatcaggactggttacttggttaaggaggggtctaggagatctgtcccttttagagacaccttacttatgatgaagtatttgggagagtggtttttcaaagtagaaatgtcctgtattccagtgatcatcctctaaacgttttatcatttattaatcatccctgcctgtgtctattattatattcatatctctacgctggaaatttgctgcctcaatgtttactgtgcctttgtttttgctagtgtgtgttgttgaaaaaaaaacattctctgcctgagttttaatttttgtccaaagttattttaatctatacaattaaaaacttttgcctatcaaaaaaaaaaaaaaaaaa

SEQ ID NO: 5578 - DNA, 7207 bp, Homo Sapiens
  NM_032270
gaggcggaggggaggagggcttgcggggctggggcgttagctgcgtcccggctggaagcccgcgaagagaagtaggaggaaggcgccgccgtggccgcggccgcagtgctcgggcgcgacaagccatgagcagcgaccccgcgggcgacgccgccgtccctggcagccgctgagcccgacccccaggcagctcgccgctccctagcaccttctccagtcgacactctcgcgcccggagaaacatgattcccgtgacagaattccggcagttctctgagcagcagcctgccttccgagtgctgaagccatggtgggatgtgtttaccgattacctctcagtagccatgctcatgatcggcgtgtttggatgtactttacaggtcatgcaagacaagataatctgccttccgaaaagagtgcagcctgctcagaaccactcttccctttcgaatgtctctcaagcagttgccagtaccactccactgcctccacctaaaccatctcctgctaaccccatcactgtggaaatgaaaggcctgaagacagatttggaccttcagcagtacagctttataaatcagatgtgttatgagcgagccctccactggtatgccaagtatttcccttaccttgtcctcatccataccctggtctttatgctctgcagtaacttttggttcaaattccctggttccagctccaaaatagaacatttcatctccattctggggaagtgttttgactctccttggaccacacgggctttatctgaagtgtctggggaggactcagaagaaaaggacaacaggaagaacaacatgaacaggtccaacaccatccaatctggtccagaaggcagcctggtcaactctcagtctttaaagtccattcctgagaagtttgtagttgataaatccactgcaggggctctggataaaaaggaaggtgagcaggctaaggccttatttgagaaggtgaagaagttcaggctgcatgtggaagaaggtgatattctatatgccatgtatgttcgccagactgtacttaaagttatcaaattcctaatcatcattgcatataatagtgctctggtttccaaggtccagtttacagtggactgtaatgtggacattcaggacatgactggatataaaaacttttcttgcaatcataccatggcacacttgttctcaaaactgtccttttgctatctgtgctttgttagtatctatggattgacgtgcctttataccttatactggctgttctaccgttctctacgggaatattcctttgagtatgtccgtcaggagactggaattgatgatattccagatgtgaaaaatgactttgcttttatgcttcatatgatagatcagtatgaccctctctattccaagagatttgcagtgttcctgtctgaagtcagtgaaaacaaattaaagcagctgaacttaaataacgaatggactcctgataaactgaggcagaagctacagacaaatgcccataatcgactggaattgcctcttatcatgctctctggccttccagacactgtttttgaaatcacagagttgcaatctctaaaacttgaaatcattaagaacgtaatgataccagccaccattgcacagctagacaatcttcaagagctctctctgcaccagtgttctgtcaaaatccacagtgcggcgctctctttcctgaaggaaaacctcaaggtcttgagcgtcaagtttgatgacatgagggaactccccccctggatgtatgggctccgaaatctggaagagctgtacctagttggctctctaagtcatgatatttccagaaatgtcacccttgagtctctgcgggatctcaaaagccttaaaattctctctatcaaaagcaacgtttccaaaatccctcaggcagtggttgatgtttccagccatctccagaagatgtgcatacataatgatggcaccaagctggtgatgctcaacaacttaaagaagatgaccaatctgacagagctggagctggtccactgtgacctggagcgtattcctcatgctgtgttcagcctactcagcctccaggaattggacctgaaggaaaacaatctgaaatctatagaagaaatcgttagctttcagcacttaagaaagttgacagtgctaaaactgtggcataacagcatcacctacatcccagagcatataaagaaactcaccagcctggaacgcctgtcctttagtcacaataaaatagaggtgctgccttcccacctcttcctatgcaacaagatccgatacttggacttatcgtacaatgacattcgatttatcccccctgaaattggagttctacaaagtttacagtatttttccatcacatgtaacaaagtggaaagccttccagatgaactctacttctgcaagaaacttaaaactctgaagattggaaaaaacagcctatctgtactttcaccgaaaattggaaatttgctatttctttcctacttagatgtaaaaggtaatcactttgaaatcctccctcctgaactgggtgactgtcgggctctgaagcgagctggtttagttgtagaagatgctctgtttgaaactctgccttctgacgtccgggagcaaatgaaaacagaataacttatttttcgttaaagtttgactgaaacacgcttctaccaaatacagtataaataattaggtagtcttaatgcctttcctatttttttttccttttcacacaaaatgtacacaaagatcgcgtaaggagtatgtatttttaataaaaatttaattgtattttttcaatattaatattttgaagttttatttgtcttgaaacacaatgtatctattatctactgacagaaagagatagttccatttggttttttgtttttgttttttagttcattcttgtggaaaggagggaattataagttgcatgctttttggcattttttaaatagaggaagatattttgccaaggccatttttaacttgtttacacctgtacagggttcttatttttgttttcattgtgtgtgtatcaaggaatctgtgctagttattttaataccagctgtcttctccattggccaagaccttcattcagtggaacttcacataagtgcattgtcatagagtattttaaatgttcccctgcctccaacaaaaccctaaactgtgttatttcatatacctgacagttattgttatccttaggcaaggtttttgtgagtgaagaaaataatctttagtggctggtatgtttgaattaggcctttatcatttaacttatttgcattttaccaacattttaaaaatatttaaaacctaaatacagaggctcctcccaccttaatctcaatactgctatgtagtactggtgaacaactttggagaacctagatttattttaatattctaatagataattaaattttaaaatgatagaagcctggtttttgagtaatttaatcatctttcatatcttgatatgcagctgcatcagatggaaaaaaatttactaaagcaccctgttaaagagctggtgtgctccagtgaggccctctccttttctcagcacagtgtggcagtggtaatctattcaaattttgcctgttacacaaaataatccacttatatatacagtcagccttccgtacttgtgggttctgcatctgtggattccaccaactgtagatggaaaatactcaaaaagaaagttgtgtctgtactgaatatgtacagactttttccttgtcattattccctaaacaatacagcgtaacaactatttaaataggatttacattgttttaggtattataaattacctagagatgatttaaagtatatgggaggatgtgcataggttatatgcaatttctgcaccattttatgtcaaggattttgaacatcctcagattttggtgttcgagggcatcctggaatcaattccccatgataccgagggatgactggatattaatcgatttccctcaagcctgcccttgctgtgaactagtgctacaagcacgggaaatccatctgctctctggcttaaaatatgtatctcatctaaaattgttcgttaaagtgtgaataaattgctaagtggttgttgcttagcaataatttttgcctgaccatcagcagagcttttatttacctttgtaattaaaatccaacatagcatgggctcttgggcaaaatatttcactgactattaagcatgtagaacaggaaaatgaaatacactatttgtgcccttgacctagaaccagaaccactaattatgagaactttgttttatgtaccaaattcacattgaccattttctgagctctagactgatcgtagtaagttttgtgacttaacaatgaaagaaagtagaaagatgctttgggttttcaaaatgttgttttttaaaattgttctttgggtgaatttactcagtgctgctttgagttgtatacagaaacaaatgttgggaattgctcctcagaaatgtgttcctaagttgtgttttcaactttacatcatgaggtgaagcattagggaaagagattctttcgatttgtttaataatctaattatacagaccaaagtgctttacgtttctgctctatgttaatgttttagaatggtgattttgctgattaatttagacctggaattgaaataatgtgctcagaataataacatggttatagttcttgtatgataaagtattcaatttcagaatagtgttggaatcctgagtttgaataatgtgttgtatttagaaacatagccctatctgttttaaacaaataatttgttggccgattgtccatggttgagcatgacaaaaatacctcgtcgaaaggcaagcttaggtaactgctggcaaaacactgggtgcactatttttctggataaaatttatagttattttctatattacccttcaaaagggatctcttcaggttaaaaatcacgcttatgctgaagtctttatctggtgttaactaaaaatctcatatgggttcataaccgaggtcactaataattcatttttatcacttgtaaaaatttgctcaaaattccaaaaaaatattgatttgttttttagtgattttgcaggctgacccccaacctaagttttgataacatctggtaagtcagtatagttctgtgacttcatgttttaactaagaaggaaaattcatagatattcctattagattttataaaccttcaaaagtctgaaacttaattttgagtctaaattttctgacactggccccttttaatattgtaagtttttgttcactttcttaagtaaaaaaaacatttaattactagttagcccttaactgggaaactcaggtaatgaactgctgacttttctaaagttctttaactgatcaattctgtatagagggatatttatctaaccactttccgtattttacaagtgctctttctaaaaaggaataactattatagctctatttccccaatctctataggactcatgagagattgcttgtgtaaatataaaagcaccatatgtgttcttaactcctatggctgcttgaagctcatgatgaaaaagtctttttgtcagttttaattgttaagtacagaacaaacaattgtttggtgatggcctggttgaaagagagcatataaatatatcccagtggaactcaccaaagaagaccacacctcagaaattattgcattttctcattatgtgttgggtttgatttgcttttgtttttaatgcagctcttttaatataaagattcttgatacagtgaaatctcttatttcaagtgtaagttattcttcacccaccccttcccctgccattgtatttcccatctgtttcaaggagtttcaacaatttacattgcatcgtatgcagtaggtactgctttttcagaaagacctggaaaacatacctgctatgaatattttgttcagatgtagccatttacctggctctcaagttgtctttgtggagagggtcttagacaaaaatcttccttgtatttacttgggttaagtgaagtccaaattcttacagtatgctatttcaggatttctgatattaaaaaagaaaaaacaaaatctttatatctcttattaacacttcccccaagaagggttgtgctgttatttattttctattataagaaaagttcattctttaagtagtttcttttacctctaatctaatttcataccaaatacctgatcaatagaaatgatatatttaagcagcaaagattcctaatccatcattatgaaaagtgtcagcatacttagtagtgaacagataaagtcaatttgaatataattccactttgtttttagagactaaattaagattcaattaacattatcctatgaattctgaatgtgataatgtgattcaaacagtcaaattttattaagctcttagtaactcaggatagcattccatactaacctcaagttagcaaaacaaattagttaaacagcttggttcttagcagactgcttaaaagatcaagaaaattttctcatcttttctttctacttagaaacattgcaagaaaccttggacagtcttcaccagacctgccatgattttataagatttaggcctcagtgacatgctcctgaaagtttcctgccagccatccaaactaagcatccactcattccatcttcccaaagtcactcaccgataaaggtagcatccttaagttcatttttgaaaggtggaggaggatctccccctgcccaaaggaatttttttatcagaataccttgaaaggggggtatataaatttggaaaacttaatttcttggctgtgtttgataacagttcctatgcatggtttttaatgtgaggtaaatttgtttctttcttcagaatacctctctccaccccccaccttattcttcctctttaatgaatatttttattggagctcaaactccatgacttacgtgctcactaagttttcttttttccccttgtttactctgtctgtatgtatgtcaaaagctggcaaaacctctaaaactgtcaagaaaatgcttgaaagttgatttgtcatagtgcaaattcatgataaaatgtcttaatgttatttggatatgtagtacatagaaacagaaaaataaagtcatttttataacttaaaata

SEQ ID NO: 5579 - DNA, 3036 bp, Homo Sapiens
  NM_032285
ccccgctcccaagtgcgcgcggacccctagctccctctgagttgcgctgggcttggctgctgcaccatgaccctggaggcgatccgctactcgcggggctccctgcagatcctagaccagctgctgctgcccaagcagagccgctacgaggcggtgggctcggtgcaccaggcctgggaggccatccgcgccatgaaggtgcggggcgccccggccatagccctggtgggctgtctcagcctcgccgtggagctgcaggcgggcgccgggggaccgggactcgccgcgctcgtggccttcgtgcgcgacaagctgagcttcctcgtcaccgcccggcccaccgctgtcaacatggcccgcgccgcccgcgacctggctgatgttgcagcccgggaggccgaacgggagggcgctacggaagaggcggtccgggagagacgtgaaacggagctatgcgagcattgggaagagcataccaggcagagggaactgccactgcgagggcccctgggcgggactgtgctcgagacccggccctacaaccagggagcccggctgacggcctttgagctggtctatgagcagatccccgccacccttatcaccgacagcatggtggctgctgccatggcccataggggcgtgtcagctgtggtcgtgggagctgaccgcgtggttgccaacggcgacacagccaacaaggtgggcacctaccagctggccattgtcgccaagcaccatggcattcccttctacgtggctgcccccagctcttcatgtgacctccgtctggagaccggcaaggagatcattattgaagagcgaccgggccaggagctgaccgatgttaatggggtccggattgcagcacctgggattggagtttggaatcctgccttcgatgtcaccccccacgacctcatcactggtggcatcatcacagaactgggggtctttgcccctgaggagctccggacagccctaaccaccaccatctcttccagggatggaaccctagatggaccccagatgtaaccaactcagctctccctagcctgcctctctaggtttttcaatacatttcttgaatggctacccaaaagctgaccgtccagcccctgaccacacttgttcctagtgcagggagctcagacagggccttccatctagagcccagcacctagagccaggctgcccagattcaaatcctgactccgccacttttcccactgtatgatcttgggcaagtcacttcacctctctgtgccttggtttcctcatttataaaatgtggataacaggccgggcgcagtggctcacacctgtaatcccagcactttgggaggccgaggcaggtggatcacaagatcaggagattgagaccatcctggctaacatggtgaaaccccatctctactaaaaatacaaaaaattagccgggtgtggtggtgggcacctgcagtcccagctacttgggaggctgaggcaggagaatggcgtgaaactgggaggcagagcttgcagtgagccgagatagcgccactgcactccagcctgggcaacagagcgagactccgtctcaaaaataaatataattaattaattatttaattaaaaaaataaaaaataaatgtggataatactagtacctccctcttaaggtcagggctggagctagggtgacatctccagggcagaattttaagaggacaccaaaaaagctcagcaaccaagataaaaaatattttaaagcaatattttgttttgggttttttttttttgagatcaagtatcactcgttacccaggctggaatgtagaggcgagatctcagctcactgaaacctgtgcctccccggttcaagcgattctcctgccacagcctcctgagtagctgggattacaggcatgcgccaccatgcccagctaatttttctatttttagtagagacatgatttcaccatgttggccaggctggtctcgaactcctgactcaaatgatccccctgcctcagcctcccaaagtgctgggactacaggcatgagccactgtgcctgaccttacagcagtattttttaaaaatcaaaattaatgcaaaaatccatgatgaggccaggcttggtggctcatgcctgtaattccagcactttgggaggatcccttgagcccaggtgtttgagaccagtttgggtaacataggaagagcttgtctctacaaacaaaaatttaaaaacaatgagctgggcatggaactcacacctctagccccagctactcaggctgaagtgggaggatggcttgagcccaggagttcaaggatgcagtgtgctttgattgcactactgcacttcaccctaagcaacagagtgagaccccatctctttaaaaaaaaaaaaaaatccatgatgaacaaaacaagtatttgtttgagacggggtctcgctctgtcgcccaggctggagtacagtggtgccatctcagctcactgcaacctccgccttctgggttcaagcgactctcctgcctcagcctcccgagtagctgggattacaggagcctggcactatgcctggctaatttttgtatttttattggagacaccatgttagtcgtggctggtctccaactcctgacctcgggtgatccgcgccccgcggcctccgaaagtgctgggattacaagcgtgagccaccgtgcccggcctaaataaaattttgaagaggctagaaccccgcacttgtgccttgagcttactgacctcaacaccctggttccactaaaactttatttacaaaattatgctgccggtctgcaggatgtagtttaacaatttgattattttggatattaaaatattttttaagtcttgaaaatattgtttactattaccaaagtttttgaaccttcttaaattctgtaccagaggtgagtgccacaccctaacctagtctgagtttttatgtgtaaagatcataaaacgttgtaagttttctaaaacacataagctctcaataaacgttagcttatcattgtca

SEQ ID NO: 5580 - DNA, 1059 bp, Homo Sapiens
  NM_032286
cgctgctggttgaggctgtgtgggtcggggacgggccgaggcgatggcggagaagtttgaccacctagaggagcacctggagaagttcgtggagaacattcggcagctcggcatcatcgtcagtgacttccagcccagcagccaggccgggctcaaccaaaagctgaattttattgttactggcttacaggatattgacaagtgcagacagcagcttcatgatattactgtaccgttagaagtttttgaatatatagatcaaggtcgaaatccccagctctacaccaaagagtgcctggagagggctctagctaaaaatgagcaagttaaaggcaagatcgacaccatgaagaaatttaaaagcctgttgattcaagaactttctaaagtatttccggaagacatggctaagtatcgaagcatccggggggaggatcacccgccttcttaaccagctcaccctccctgtgtgaagatcccctgggactgcgatgcggcgtgaggctgggactgcgagtgctgacgccaccttcctgctgaggtgggactgggccctggacacacccctcagcccctctgtcctcattgtttggcctcatgggaccgaggggctggaggagaggcggagctgtgccccagctgttccagcagcttgtctggcgtcaactggctttcagagtgctgacccctcatcactgtggggatcattctctctgagggcagatgaggcgcaggaaaatagtcttggaaatgttaaatatgatgggtaaattaaaagttttacaacattctacctaatatttttcttttaacatactctttctgttctattgtattatggtgtccgaaagctaaataacgactaggaaaaatttttttaaaaaaagaaaaatcagtttaatgtgggaagtacttaagtggtattatattttacattttcaagtatagtgcataaagaatgttttaaatgtaactgttttcatggatttcaattagacatgcctataataaactaagtatgtggcttaaaaaaaaaaaaaaaaaaaaaaaaaaaaaaaa

SEQ ID NO: 5581 - DNA, 5355 bp, Homo Sapiens
  NM_032287
cggcctggccgcgtcccccgcgcgggccatcttggtcacggccggcggcggacagagccgcggaggaaccgcgagaccccagggcccagagcaggtccagccacccgtctggctccgtagtccgcgaagtctgcagtaaaggagccgcgtgggaccggggccgaagtccctagggcctggcaccgcgtgcccctctctcgggccctcggcttgggggtctcgcagcgccctgccgtcgtgcaccccacactgcccccatttctacaggggcccacctggtcaccacaccctcttggtccacccgcggatctcagcgtgtggctgacctctggccagcatggtgcagccgcagacgtccaaagctgaaagcccagccttggcagcgtctccgaatgcccagatggatgacgttattgacaccctgacctccctgcgcctcaccaactcggcgctgaggcgggaggcttccaccctgcgggcggagaaggccaatctcaccaacatgctggagagcgtgatggcagagctgaccttgttacgcaccagggcgcggatcccgggggctctgcagatcaccccgcccatctcctcaattacttcaaacgggactcgacccatgaccacacctccaacctctctgcccgagcccttttccggggacccaggccggttggcggggttcctgatgcagatggacagattcatgatcttccaggcctcccgcttcccgggtgaggccgagcgtgtggccttccttgtgtctcgactgactggggaggcggagaagtgggctatcccccacatgcaacctgacagccccttgcgcaacaactatcaggggttcctggcagagttgcggagaacctacaagtctccgctccggcatgcgcggcgcgcccaaatcaggaagacttctgcctctaatagggctgtgcgagagaggcagatgctctgccgccagctggcctctgcgggcacggggccttgcccagtgcatccagcttccaacgggactagtccagcgccagccctgcctgcccgagcacggaatctttaagaatccgccagcacttggtagcgtctgcagccacccaggtagcatacgctctttgctgtgtagaagaaatgcccatacgacagctttgcccctgtttgaagacctcccttcttgcctctccagacgtgttccccgaggagatcttccttccgtccttcctggcgccctggttgcccaccttgccgtgcttcctcttacgtgctagctttgtacctatcgctcactgcatgctcgcctccctcttgctggcatcccggcctgtttcaatgactaccgctctgctacttaggcacagggactccgccgcacgctgacggaccacgagggctgaccccttccagcctgacttggttcatggaggctcctactctgccctctccaagctcccctggcggctccccacctggttgcccagttcctattgatgagctctggacagaaagatgcccgtttggccaggctggtggcttgatgggtgtacctggagagggggtctggcttcctgcccaagatgcctcccagccctgccagggcccggtgcagcgggcagggcctcatctgtgctgtagtggtcgagtggttgctgcaaggagcgtagttctgccatgtctgggggccaggttccactctgcacatgaatatgcagtctgggaggccccactgctctcactgggaaggaccaatgttgcacctctgttaatgcctgacttcagctgctggtgttctgatggagccagaggcttggggaatctggaacttgcctgctaaataaggtcgtggtggactctcagccattgggcaggtctatcaggctgcaggttcctacacacccacgcctgagggtcatagcaggctaagggtggataccagcgactccctttgctgcccaggatctccatgggcagtgccacagcggctgatgctcagtcactcctgcttctaccccctgtcactgatggcgagccttgcccagcttgagacctgttcccatctctattcaggtgccatgtggccttcactgcagccctgcagccacccacgcaccatctgtgggtctccaaaggcaccttgtagcatgtactccccgtgcctgggcaatcagatgggctgcctttgtccaagggaaaacagactcccttcgggaaacatccttaagcacttaaggccggggggggtgtctgcctctggcaacccagccagggtcttggtggcatttgtaaaagcaaagagctgtggactgccgtggtcctagtgtggtgacaatgcagcactggcatgcatgtcctccttctgaaggacctcatccttcctcacagggggatgaccaagaaatcattttgtggctgagtttggccacgccctttggactgtgctgttccgccatatttcaatgccaaatgaaccacattgacatgacctggaccatagggcttcctatcctgggctcagctgcccctgtctgaagggtcttggcttgattgcagaaggacaacctccgcacccacctaaagacatgtatatgtcttgggatcccagagattgggtccttgggcctggcttcttaagagttttgatgatgctgggaaaagtgactgcgattctgaagaaccgctgccttgcaaggtcaaggacattcagtggttgctggggtccgcagactactgccacccactcaccatcaactctgttagcccaattgccctgctgaacaactgcctgaatacaggctttaggttcccctggactccagccaaggctgttcaggtgggaccatggtgctctttaagcgtgatcggagggaagacacacagcagggccaccattccatgaatgggaggtgtacagatcactttctctttgtgctcagttctgttctgtctccagcagctatattggtaagactagtacctgccagggagaggtgcccccaagtgaaggggtacagtggcacctgggaaaaggcacctggaaggtttccatgtggcccagcccagcatggaagcagggtgggaactctgctgtgtcgccagcgctcactctactcgagtggctttttgaaagccctaccatgtctgtgtcaggcctgtgctgcttcacatcctacagctgcctaggaaaggccggccacgctccctgtccacacactccctgtccacacactccctgtccacacactccctgtccacaactgcagccgggccctctgcctatgggcacccaatccaagcagctgctccacctttgtttggcatggtgatttgtgttttttctcttggtgcttatgtgtgtgggcttgggacgagtgctggtatgcacttaggaccttcttgatagctccctgcactttggaacacggagcagatgagagagggtcggggcttgccctccaccttggacttggaagaagcccacattggagaggtgaggaccccatggtggctctagtggaagatacgttagtctccagctaaggaggatgaggcgcagccccagagggagacctcagtgataggggatcaggctaagaaagtgggggaagggagatgctttgtacatattttggggttataatttctctaaattttaggagaacgggtattgattgataaaagggacaggcagtagtgttcaacagtgcatgtgaaggaaagttctgttttccatggttttgacattctttggactgtattgtgactgctgtctggtccacatggtacccctttggtaagtaggcttcagtgcataccagggtatcactggagatgggagttagtgaaggggtgactccctggcctagtatagtgtgaccctgggactaacttaatgtcctaaagcattttggtgacttctagggaatagcaaagacctatttcattgtccccaggtaagtatgtgatgagcaatgaggaggagtggaaaacaaaacccagaaagtgcggcaggaccagcctgacgcacacgctcctgttgtcatggcagacagccgccttgggtgggcaccaccctggcagttccagcctgtaggggagtgaagggacatggctgagctgggcatgtgctgaggttgacttagggaacaagccctgggattggacaaaagggcccatgctgcagccactgactgggggcagagctctgggtggaagagggaagagatcctaatggaggcgcctccatctgcaaccacagttgtaaggctcatggcacctctgcttggaaagcactggtttagggacttagagaggtaggcacaaggtgggtctcctgggtaagggaagcaagagcagactgttgggccaacaggagaagctccccagagtaggggagaaggttggggtgtagggccttccacgtggaacagacagcccctgtgtctctgtctcttggggacctgagtttgggtggggtggcagttggcacagcgcagatgcggtagagatgggaggaaacccagctcctcacttccgtgtgcctcatgcctttgcatacacaagcaccaaacctactaggtcttctcattacccatgtaaaccacatgttagataaatttttgcaagtagaggaaagaaggaaataaaacatcacattttggtgtctctcaggctttcccccccaactatggtttctttgctttttgttttaacatagttttgttgctgtcttctgtaatgatacagttttgtgcagctgttttcacttagcatatcgtgggcatctccccttatgattactaaatattttattttggagtggctgtgtactctcccattgactagatggaccattgtgccagttgccaatcactaatgctgttactaacttttcagttataaattgatgaatatctttgtgcacaggctgtttcccaatgtcaagttattagggtagactccaggaggtgggattcttcaactaaagaatatgaaaacctttgaggcttttactacatattgacaaaatggtttccggaaatatttgtatccccttacactgccaccagcaaggataaacatgtccatcttgcccgtattgggaattatcatctggctaaatatttgctaatttgataatgaaaaaatagcatcgtgtttcagttggcatttcactgacttctagcacggttgaacatctttcatgtggagcgattgtatttcctcctttgtggattgtcagtgtcctttgctctatcttctggggtcagataaatttgtatgagctcggtatatattaaagatattaacctggtgtgtgtcatatttgctacagcaaaaaaaaaaaaaaaaaaaaaaaaaaaaaaa

SEQ ID NO: 5582 - DNA, 3033 bp, Homo Sapiens
  NM_032295
aggggtgagctggcggcgggggaggcgggcagcggagccaagctgacccggcgagcggagccggggctggagagcggcgaccactgcggatctcggaaggaagaaatgatgtaaatcactcatccaaaccttaaggtcaaaggtgagaaggaaggtcaggaagaacatggcctggccaaatgtttttcaaagagggtctctgctgtcccagttcagccatcatcatgttgtagtgttcctgctcactttcttcagttattcgttgctccatgcttcacgaaaaacatttagcaatgtcaaagtcagtatctctgagcagtggaccccaagtgcttttaacacgtcagttgagctgcctgtggagatctggagcagcaaccatttgttccccagtgcagagaaagcgactcttttcctcggcacactggataccattttcctcttctcctatgctgtgggcctattcatcagtggcatcgttggggatcggttgaatttgcgatgggttctgtcttttggcatgtgctcttctgcattagtggtgtttgtctttggtgcgctcacagaatggctgcgtttctacaacaaatggctgtactgctgcctgtggattgtgaacggcctgctgcagtccactggttggccctgtgtggttgctgttatgggcaactggtttgggaaagccggacgaggagttgtttttggtctctggagtgcctgtgcttcggtgggcaacattttgggagcgtgcctagcttcttctgttcttcagtatggttatgagtatgcctttctggtgacggcgtctgtgcagtttgctggtgggatcgttatcttctttggactcctggtgtcaccagaagaaattggtctctcgggtattgaggcagaagaaaactttgaagaagactcacacaggccattaattaatggtggtgaaaatgaagacgaatatgagccgaattattcaatccaagatgatagttctgttgcccaagtcaaggcgataagcttctaccaggcatgttgccttcctggagtcataccgtactcactggcctacgcctgcttgaagttagtgaattactccttcttcttctggctccccttttatctgagtaacaacttcggctggaaggaggcggaagccgacaagctgtccatttggtacgacgttggagggatcatagtatttagtgtctctgatccgggacaagctaggatggatgtgggttttctactttttcattctcatgacaagttgtacaattgtgtttatctcgccattaatagtgagggaaatattctctctcgtgctaaggagacaggctcacatattgagggagtgaccggtgcccgcgagacagaaagaacaatgtcagccacatcaggaccgctggggcttcgagtctgccctaatttgggtttgtctaggagctccagcctgatcttggattgtcaggcgtctctcaacactgccagccacctgagatgctgaccagcagtgaaggctgcactagttttctacactacaggaattactgttgatgatttttgctgttgtttcatgaatgtgccgagtgacttctgactctgccagcatctttgacctctgactctgcccgcgtctttgtttggcctattgaggtttagcgttttaaccttaactgttgttttggacttgaactttctctagccttgaaaatggagtgaacaggaggcaaagccacgcgtggtttgtgttggtggtatgttccacaaatggaagagatcattgcattttgctttggtaatgagtttacagagagtgggtcatctttgaagcatcaaatcctgatcaaatgctcaagctggaccgagctgcaagcctgccttggacaaagaatccctctgttcactgtggtgggaaagatcacactacatgcctgttgattggctcagtcactctgtgtctgatctaaacgtcattcagccctagaagcatgaattgcttcaaattattgtcaacttgttctcttccattttcattcaaattaactttgactcctggaagtattgagtcttcctttcaaggaccataaggtacatcagttatcttgaacattctgacgtgtaaaggaccataaggtacatcatttatcttgaacattccgacgtgtaactcacagccgaagcactccatcccagatttgttgtctgggaacttaggatcctctaggaagctaatctgcttagtctatttttagaggattgatctctggcacaagcagcttcctggagttacctcagcagaagactagaattagagaaaagggaaagaccttttcttctagtaagtgtcaagtacagatgctctttgacttatgatggggttatgtcccagtaaacccattggaagtcaaatgcatttaatacccctgactggacaccacagcttagcctcgtccaccctaaatgtactcagaacacttagaattgcccacagttgggcagaatcatctaacacaaactctattttataatcgagtgttgaatatatcatgtaatttattgaatattgtacattatgttgaaattgcaaccatttcacaccattgtaaagtccaaaaatcagaagctgaggactgtctgtacatgacattgaatcacatgaatggattactagggcctgaggggtgtccgttctttagaaaaatgtagagtatatatatcttcagggctgtgaattccatactagttatcaatattttaagatcattctgtatatacatattttaaattatgcaagcaaactaggaggagaatgtgcaattttgagggatacctaatttgcattcggttaggggatatttttcaacctcttgctttatactctgatatggggtgtgtttatgaacttgttaatgttatttaatcatgcagatttccaatcagtgtattgctcatttactgacaaaaagggaaaatacgaaacacagaaagggaaaataaactgacttttataatgaaaaaaaaaaaaaaaaaaaaaaaaaa

SEQ ID NO: 5583 - DNA, 5009 bp, Homo Sapiens
  NM_032296
gcgcgcgcggtcacggggctcgctcccgaggggcaggtcggggctgggagctggtgcccgggtcggggtggcggcggcggcctgggtcgcggggtcgacgctcgctgctgcagcggcagaggctgaaggatccgccgcggcgctgtcgccggagagggagggccccgctgccgtcggtgaaaccagcccagagaagttacgggatttgcccccggggctcctgcccagcaagccagcgccgtgacccaggtgtgggggatgatggtgacgcttctcactcacgtgtgaaggacggaaccactgcactccaggttccttgctgggtgctgagcgtggcctgagggacaggccctgggtcccgggatgcccctgcccgagcccagcgagcaggagggcgagagtgtgaaggccggccaggagccatcccccaagccaggcacggacgtcatcccggcagcccccaggaagcccagggagttctccaaactggtgctgctcacagcctccgaccaagatgaggatggggtgggatccaagccccaggaagtgcactgcgtcctgtccctggagatggctggccccgccaccctcgccagcaccttgcagatcctgccagttgaggagcagggaggggtggtccagccagccctagagatgcctgaacagaagtgcagcaagctggatgcagcccctcagtccctggagttcctgaggacaccattcgggggccgcctcctggtgctggagtccttcctgtacaagcaggagaaggcagtgggggacaaggtgtactggaagtgccgccaacatgctgagctgggctgccggggccgggccatcacccgaggcctgcgggccacagtgatgcggggccactgccacgcgcccgatgagcaaggcctggaggcccggcgccagagggagaaactgcccagcctggccctgccagagggcttgggagagccccagggtcctgagggccctggaggccgagtggaggagcccctggagggggtgggcccgtggcagtgccctgaggagcccgagcccactcctgggctggtgctgagcaagccggccctggaggaggaggaggcaccccgagccctgtcactgctgagcctgccgcccaagaagcgctcgatcctggggctgggacaggcccggcccctcgagttcctgaggacgtgctacgggggcagcttcctggtacacgagtcgttcctctacaagcgggagaaggctgtcggggacaaggtgtattggacctgccgggaccacgcgctgcacggctgccggagccgggccatcacccagggacagcgggtgactgtgatgcgtgggcactgccaccagcccgatatggagggcctggaagcccggcggcagcaggagaaggccgtggagacgctgcaggctgggcaggacggccctgggagccaagtggacacgctgctccgaggcgtggatagtttgctctaccgcaggggtccgggtcccctgactctcaccaggcctcggcccagaaagcgagcaaaggtcgaagaccaggagctgccaacccagcccgaggccccagacgagcaccaggacatggacgcagacccgggaggccctgagttcctgaagacgcccctggggggcagcttcctggtgtacgagtccttcctctaccggcgggagaaggcggctggggagaaggtgtattggacctgccgggaccaggcccgcatgggctgccgcagccgcgccatcacccagggccgacgggtgactgtcatgcgtggtcactgccacccgcccgacctgggaggcctggaggccctgaggcagcgggagaaacgccccaacacggcgcagcgggggagcccaggaggccccgagttcctgaagacgcccctggggggcagcttcctggtgtacgagtccttcctctaccggcgggagaaggcggccggggagaaggtgtattggacctgccgggaccaggcccgcatgggctgccgcagccgcgccatcacccagggccggcgggtcatggtcatgcgcaggcactgccacccaccggacctgggcggcctggaggccctgcggcagcgggagcacttccccaacctggcgcagtgggacagcccagatcctctccggcccctggagttcctgaggacttccctggggggcaggttcctggtgcacgagtccttcctctacaggaaggagaaggcggctggggagaaggtgtactggatgtgccgggaccaggctcggctgggctgccgcagccgcgccataacccagggccaccgcatcatggtcatgcgcagccactgccatcagcctgacctggcaggcctggaggccttgaggcaacgggagcggctccccaccacggcccagcaggaggacccagaaaagattcaagttcagctgtgcttcaagacgtgttctcctgaaagccagcagatttatggggacatcaaagacgtcagactggatggcgagtcccagtgaggcgatgtgggcagaggagctccgagccgcccacccaaggtggcttcacatccacacaggcacttcccatccacctaggtttggcttagcagaaacttcttttcattcttccaaagcatcgatggtcttcgcgtctcctcaggaggtctcccaggaggaattcttggatggtgtcctcatgtcggcggagaacagtgctcagagctggcgcttgcagacgcagctgtcgtggggcagggcggtggcgccttcctgacctttggaagacatgacaaagctgcctggacacggacgcccctgctgtacggccacagcacccctgggtttgcagagcacgcagccttcctagggctttccacctggcgaggccccgctctgctcagcacggtgcaaagtgaatgctgctgtcttggagcctgggcacgtttggggaagttcctgcttcaaactgagctgccccgcataggccaggtcaacccacaccaatctcttctggacaggtgctgggtaggccttcctggtctctggccgcctgctgccagggtgtggccatccccagcaaccggagctggccaaaccagaggcctcgctccgcactccacactttcctttctgtgctccttccaagttaaattaaaccccctctccacgattcccacggcaggcgtcattcccgagatgggagccagtccaggggtcagcaggagccagcgctgggcacacgtgccctggctgaggccagcggcatcctgggtggcccaggtccatcctgggcagcaaaggcgtgtccccttctgtcagacagcttcacagagtgtggcttcaccagtcagagggagcagtccggagaggcaagatgaccccaccgggactgcagagcctcctccttactaacaaggacctgtccgcagccgcgaggtccttcactcccaccctgtaattgtggggggagtgccagcaacaggcctgtcccctggcaagttggccacggaacccaccatgcactgcaaggctgtgacagcctgggcacccctgcttctcctctgcttgtacggttcccccaataaatcctattttccatctcaccgtgtggagctggtacttgttcacatccctcttgcagcaacagttggccgccgtgaaaccacactccgtcacatctccatgccagtgcccagggggagacccctccccatgcctgggctgttacagtcacctggcccagacgtaacctggaccaagagtggacggagacacctggggttggggcctctggaagggctgctggggggccagctgcagcctgtggcctctcccaggcccggatatggcaggacatttgcgtcgtgttgctggaagaggcaggatgctctgttctcgccattagcctgcgttacgcctagactcatctgcataagcctgggcaagtggcacccctgggccaagggcagacttgcccacccgtccatcctttgcctatggcagaggacacacaacacagtggctgcgctttgggcactgttctcggccctgaagcatcctgccccgaggctgacctaactgcccccagctggactcatggccaaggctacagacccagtactccaatcccgactcccactgtgtggtccaaatgtgtacgcccacaggaggcagccatgcccgaggaaggtacttgctgaaagatggtccagttcatgccgccaccagctggacctctgatcaggccccctgcagaaggggaagctctccacatgcccaagatacgagagaaacgcccgggtcacagcagcctgagtcactgcagcctctgctacctgccaagcctgcgccctccacctgtgggctccttgcctctgtgatggggcctccacggccagcatcttcccgccatggtcacatgatgccatgccctgctctgggcacccctaagcgggtatgaggcgaatcagaggaagaatatcggcttctcttcccttttggatatttgcgtcattgaccgggactggcccactcttcctctgcctcacgcctgctttgaccttagaagacagacggcagctcgcgttgctgggctgagattctccaatggacgtgaatttagatgatgctgttgccttgggtggcttcatggccaccaacccgcaccctggtggccactcagccatgacaagggcctgacagccactaagtgagcttcagagccttccccttgcaaagttccagggccaccagatgtcgcctgcccagtcactgtcacagagttaaagcgtgcgggtgaacgctggccgcggagcgtgcagcccggcagcagctcagcggggcagctcctgcttccagccctgcctctgctggtgcttcgcccacaaaccctgctgtatgacatttgcaccacatggtgtgtgtccgtgccctttgacatgacagtgccaacaacatctcatgaaatttaaaataaatccccaaggcatcagaaacgtaaaaaaaaaaaaaaaaaa

SEQ ID NO: 5584 - DNA, 1750 bp, Homo Sapiens
  NM_032301
aagtgccctcgtgctgcctaggagacaagacgcgaggccggcagcgcccacccggtcgcaatggagcttcccctagggcggtgcgatgattcccgcacctgggacgatgactcggacccagagtcagagacagacccagacgcgcaggccaaggcctacgtggcccgcgttctcagtccgccaaaatccgggctggcgttctcgcgcccctcgcagctatccacacccgccgcgtccccgagcgcttcggagcctcgggccgcgtccagggtttcggccgtaagtgagccgggccttctgagccttcccccggagctgctgctcgagatctgctcctacctggacgcccgcctcgtgctccacgtcctgtcgcgggtgtgccacgcgctccgcgacctcgtgtctgaccatgtcacctggaggctacgcgcgctacgccgcgtacgcgcgccctacccagtggtggaagagaagaactttgactggccggcagcctgcattgcgctggagcagcacctgtcccgctgggcagaggatgggcgctgggtcgaatacttctgcctggccgaaggccacgtggcttccgttgactcagtgctgctgctccagggtgggtcactctgtctgtcgggctcccgagatcgcaacgtcaacttgtgggacctgcggcagctggggacggagtccaaccaggttctgatcaagaccttaggcactaagcgaaatagtacccatgagggctgggtgtggtcactggcagcgcaggaccaccgcgtgtgctccggctcctgggacagcacagtgaagctctgggacatggcagcggatgggcagcagttcggcgagataaaggccagctcagccgtgctgtgcctctcctacctgcctgacatcctggtgactggcacctatgacaagaaggtgaccatctacgaccccagagccggcccagccctgttgaagcaccagcaactacactccagacccgtgctgaccctgctggcggatgaccggcacatcatctcaggcagcgaggaccacaccctggtggtggtggaccgccgagccaacagcgtcctgcagcgtctgcagctggactcctacctgctctgcatgtcctaccaggaaccccagctctgggctggtgacaaccagggcctgctgcacgtcttcgccaaccgcaacggctgcttccagcttatccggtcctttgatgtgggccacagctttcccatcactgggatccagtactccgtgggagccttgtacaccacatccactgacaagaccatccgggtgcacgtgcccacagacccaccaaggaccatttgcacccgaaggcatgacaatgggctcaatagggtctgtgctgagggcaacctggtggtggccggctctggagacctgtcgctagaggtctggaggctgcaggcctgagcaggtgggcgtggatgtggatactgcctgccggaggctgggcttcctcctctgttcttgggggaccatccccaatgttggtgctgcctccgccccgtgggcctagggcacaaggagtcccagccacattcgggtgagcgtcctggcctgggccctatgcccgggggaagggtgaaattggggttcaggcccacccagggggccgcttcccactcttgggccctggttttgttatgatttggatgccccgctctcagttgagagcgaaggagaaataaacctgacatgttggtgcttgggaaaaaaaaaaaaa

SEQ ID NO: 5585 - DNA, 1395 bp, Homo Sapiens
  NM_032302
cgcgggcttccccgggcggctgcgtccccagtagcccggccggcctcggcaccgcgtgtcgtgggggtcccgggccgcggctgcagggccggggcggcggcgaggccgaggggcgggaagccactgcccggcctggcagtgtgaacgtgcaagtcgatcccctaacccagaaagccccaggcgcggtctctatgggcggccccgctcctgcttctgttttatttttttacggacagggtctcgctctaccgcccgggttgtaatgcaatggtgtgatcacggctcaccgcagcctcgacctcccgggctgaagcgatcttcccgcctcagcctcctgagtaactgggaccacaggcgcgccctgctggttttttttttttttttttttggtagagatgggggtctcgctatgttggccaggctggtctcgaattcctggcctcaacgatcgtcctgtctcggcctcccaaagtgccgggatgacaggcatgagccaccgcgcctggccccttcttttgaatgggcctccttgcgtttccgtttcaatgccccgtgctacttttttgggagccccaaggctgtactgtttgattgactcctttttttcccctttctttttaacctaaattaaagctgccactgcagagccccgccatggaagacacgccgttggtgatatcgaagcagaagacggaggtggtgtgcggggtccccacccaggtggtgtgtacggccttcagcagtcacatcctggtggtggtgacccagtttgggaagatgggcaccctggtctccctggagcccagcagcgtggccagtgacgtcagcaagcctgtgctcaccacaaaagtccttctggggcaggatgagcctctcatccatgtctttgcaaagaacctggtagcgtttgtgtctcaagaagctggaaacagagcagtcctcctcgccgtggccgtgaaggacaaaagcatggaggggctgaaggcgctgagggaggtgatccgggtgtgccaggtgtggtgacctggaggcagccgccccgcgctgctcagcaggacacgtgaacacccagacacccactcagggactcaagtctcacctccctccccggtggagggaggaactttggcactagcccttggagccaggaaaaaagactcgtgtctcaggcagactcttactctggttactaagatcatctgtgcatgacggggagggtggaacaggtcccggaggagtcgtgaatggttctcaccaggacctgaatcgttgcttgtgtttgagaattggaggaatgagtcagcaggcgtggctcatggcccccccgtgtgcaggatcaattgtaggaggaaatttcttttttattaaaagcgaatgtgtatcccaaaaaaaaaa

SEQ ID NO: 5586 - DNA, 3393 bp, Homo Sapiens
  NM_032303
aaagcgcctgcgcggagagcctgcaatcagggaccaggcttgggaggcgacgaagaggaacgctgggcgcaggaggcccactgcatacgcaggcgcactcggcgatcccggcttttccgcgcgcagttcccgcacaggcatcggggggggcaggggcggggcaggggcggggataaatgcggagggacggtccagctttagctctctgctcgccgccgccgctgtcgccgccacctcctctgatctacgaaagtcatgttacccaacaccgggaggctggcaggatgtacagtttttatcacaggtgcaagccgtggcattggcaaagctattgcattgaaagcagcaaaggatggagcaaatattgttattgctgcaaagaccgcccagccacatccaaaacttctaggcacaatctatactgctgctgaagaaattgaagcagttggaggaaaggccttgccatgtattgttgatgtgagagatgaacagcagatcagtgctgcagtggagaaagccatcaagaaatttggaggaattgatattctggtaaataatgccagtgccattagtttgaccaatacattggacacacctaccaagagattggatctgatgatgaacgtgaacaccagaggcacctaccttgcatctaaagcatgtattccttatttgaaaaagagcaaagttgctcatatcctcaatatcagtccaccactgaacctaaatccagtttggttcaaacagcactgtgcttataccattgctaagtatggtatgtctatgtatgtgcttggaatggcagaagaatttaaaggtgaaattgcagtcaatgcattatggcctaaaacagccatacacactgctgctatggatatgctgggaggacctggtatcgaaagccagtgtagaaaagttgatatcattgcagatgcagcatattccattttccaaaagccaaaaagttttactggcaactttgtcattgatgaaaatatcttaaaagaagaaggaatagaaaattttgacgtttatgcaattaaaccaggtcatcctttgcaaccagatttcttcttagatgaatacccagaagcagttagcaagaaagtggaatcaactggtgctgttccagaattcaaagaagagaaactgcagctgcaaccaaaaccacgttctggagctgtggaagaaacatttagaattgttaaggactctctcagtgatgatgttgttaaagccactcaagcaatctatctgtttgaactctccggtgaagatggtggcacgtggtttcttgatctgaaaagcaagggtgggaatgtcggatatggagagccttctgatcaggcagatgtggtgatgagtatgactactgatgactttgtaaaaatgttttcagggaaactaaaaccaacaatggcattcatgtcagggaaattgaagattaaaggtaacatggccctagcaatcaaattggagaagctaatgaatcagatgaatgccagactgtgaaggaaaatataaaaaaaaagtcgactgctatgctcaaaaagtaaaaaaagctcaacagttaaaatctaatgtttgttttctttcctgttatattataaggatatgcacgtttgttctggaaaagatagaatttgtctctaaaagacttgaaattgtaattaaaatggcaagctaatcaaacataagcttcattaagtgggattctaagacagtctgtgtttttatatttcaagggtttaaccctttgagccttacatctcattcactgtctttctccaagaaaagtattttgggcggacagtcagatcaagcagtaaaattagctctttcaaatcttcttgtcatgtaaaatgaagctagtctgttttaaaatttttagttttggattgtatactaatgaaaatcttaatgatgtttttgatttttatatacttattttaaagaaaatcttatatagtacattttacaaaaattataaaaaatgaattagtactggcgaggactaaatgaaacaataatttttcattttgataactagctttccaggtggacttagccataggaaaatattactaatgtaatttaacaaattgctgcatgtattccatttaaaaatatgtttaaattgtcctaaaacaaaataattttctccctaggagtatgcatttggctacagtgttttgaaacagaaaccttagaataggtcattggtatgggctgaactgtgtatcccccaattcatttgttgaggtcctaactcccatttcttttgaatgtgactgttcggagatgaggcctttaaagaggtgacttaagttcaaaggaggctgttagtctaatccaacatggtgtcctttggacataagagataccagcaatgtgtgcacagaacaaagaccaggagaggacacagtgagaaggcagttatctgcaagcaaagagagaggcttcagaagaaacaaaatcaccagcaccttgatctttgacttctaatctccagaatagtgagaaataaatttctgttgttaagccgtccactgtgggaggccgacgcaggaggattgcttgaggccaggagttcaaggccagcctggacaacatagtaagaccctatctctacccccctaataaattaatttaaaaagccccccaatctgtggtattttattatggcagccctagcaagctaatacagtggtttgagaggctgggagggttgaggggaagataaacttttaaaaagctcttatctttcatttcaatcagttaaaaatacttgctcagtgtaacaattttgcttctcagcttccactctaatattgttgtgccattaagcaatttagctaatcctgacatttcttagattcataatgttaggagcatttaatctgtattttacaagttaggaagcagaggatcagagatgggaaaggactagcccaaggccaacattaacaagccctctaacaaaaactttacaatacatttatgttgaatggaactccaagatctcacctctccatccaggaatggagtccatgtaatcaaagtgaacttaaaaataggacagtttcaacaagtcaggagattcacagcaactgatcaaagggagtccagtcaacgtgagcaagcgtgattatgatgaggaagccccctctgctttaatccacacaaggaacgtaacctgaagtaacctgatgttaaccaatctgctgtgtctactatgctgtttccttgttcctgctagtgctgctttacaaatgcagaccattctatcatacctggcggggcttctgttttattttgtaggctggatgctacccagttcatgaatcgctaataaaagccaattagatctttaaaaaaaaaaaaaaaaaaaaa

SEQ ID NO: 5587 - DNA, 1379 bp, Homo Sapiens
  NM_032304
gcggagccggggctggttggggaccggccgggttccgctcctgctggagcccggtgcgtggaattccacgcgagtgccggggagttcctggggagccgggcttctcttttggcccccagcgtgttgaccgagcccgcttcgcacagcccttcctagggtgtggagagcgggccccgccctgaaggggcaccgtgggctggggggcctgttttggagcaggcaccggtggccgagctccgtgaccatgaaggtcaaggtcatccccgtgctcgaggacaactacatgtacctggtcatcgaggagctcacgcgcgaggcggtggccgtggacgtggctgtgcccaagaggctgctggagatcgtgggccgggagggggtgtctctgaccgctgtgctgaccacccaccatcactgggaccacgcgcggggaaacccggagctggcgcggcttcgtcccgggctggcggtgctgggcgcggacgagcgcatcttctcgctgacgcgcaggctggcgcacggcgaggagctgcggttcggggccatccacgtgcgttgcctcctgacgcccggccacaccgccggccacatgagctacttcctgtgggaggacgattgcccggacccacccgccctgttctcgggcgacgcgctgtcggtggccggctgcggctcgtgcctggagggcagcgcccagcagatgtaccagagcctggccgagctgggtaccctgccccccgagacgaaggtgttctgcggccacgagcacacgcttagcaacctggagtttgcccagaaagtggagccctgcaacgaccacgtgagagccaagctgtcctgggctaagaagagggatgaggatgacgtgcccactgtgccgtcgactctgggcgaggagcgcctctacaaccccttcctgcgggtggcagaggagccggtgcgcaagttcacgggcaaggcggtccccgccgacgtcctggaggcgctatgcaaggagcgggcgcgcttcgaacaggcgggcgagccgcggcagccacaggcgcgggccctccttgcgctgcagtgggggctcctgagtgcagccccacacgactgagccacccagaccctcacagggctggggcctgcgtccctcctcgtgacctcggccagctggacccacatgagggccacctctggaaccttcttcgaggccctggccagccatctgcccagcctcggagggtgggcaacctggtgcttcccgggtggacacacaggaccactcagtggggcctgtgtgggcgccgagacctgggtgtctgggaagtggggcacacggggcctccgaactatgaataaagctttgaaaggccaaaaaaaaaaaaaaaaaaaaaaaaaaa

SEQ ID NO: 5588 - DNA, 1331 bp, Homo Sapiens
  NM_032306
gactccataaccgtggccttggccccagtccccctgacttccggacttcagaccagatactgcccatatccccttatgaagtcttggccaggcaacccctagggtgtacgttttctaatgattaaagaggcggtgctaagctgcagacggacttgcgactcagccactggtgtaagtcaggcgggaggtggcgcccaataagctcaagagaggaggcgggttctggaaaaaggccaatagcctgtgaaggcgagtctagcagcaaccaatagctatgagcgagaggcgggactctgagggaagtcaatcgctgccgcaggtaccgccaatggcttttggcgggggcgttccccaaccctgccctctctcatgaccccgctccgggattatggccgggactgggctgctggcgctgcggacgctgccagggcccagctgggtgcgaggctcgggcccttccgtgctgagccgcctgcaggacgcggccgtggtgcggcctggcttcctgagcacggcagaggaggagacgctgagccgagaactggagcccgagctgcgccgccgccgctacgaatacgatcactgggacgcggccatccacggcttccgagagacagagaagtcgcgctggtcagaagccagccgggccatcctgcagcgcgtgcaggcggccgcctttggccccggccagaccctgctctcctccgtgcacgtgctggacctggaagcccgcggctacatcaagccccacgtggacagcatcaagttctgcggggccaccatcgccggcctgtctctcctgtctcccagcgttatgcggctggtgcacacccaggagccgggggagtggctggaactcttgctggagccgggctccctctacatccttaggggctcagcccgttatgacttctcccatgagatccttcgggatgaagagtccttctttggggaacgccggattccccggggccggcgcatctccgtgatctgccgctccctccctgagggcatggggccaggggagtctggacagccgcccccagcctgctgacccccagctttctacagacaccagatttgtgaataaagttggggaatggacagcctaactgggacattgcagtggctgcttgctggggccgggatttgcaggggaacccaggatggcactggcccatagggagctccaggtgtggctggctggacacatggtcaaagtcacaaggccgggagagtggtgtcctttattgcactcactgctggtcgccccagcccactcccctcctcgttgtctctgcatccaggtctccaataaataagtcagccga

SEQ ID NO: 5589 - DNA, 936 bp, Homo Sapiens
  NM_032308
ccgcgaagaggagatggcggagtcgttgaggtctccgcgccgctccctgtacaaactggtgggctcgccgccttggaaagaggctttccggcagagatgcctggagagaatgagaaacagccgggacaggctcctaaacaggtaccgccaggctggaagcagtgggccagggaattctcagaacagctttctagttcaagaggtgatggaagaagagtggaatgctttgcagtcagtggagaattgtccagaagacttggctcagctggaggagctgatagacatggctgtgctggaggaaattcaacaggagctgatcaaccaagagcagtccatcatcagcgagtatgagaagagcttgcagtttgatgaaaagtgtctcagcatcatgctggctgagtgggaggcaaacccactcatctgtcctgtatgtacaaatcttctgagttgacagagcagaagcttcgtgcctgtttagagggtagtataaatgagcacagtgcacattgtccccacacacctgaattttcagtcactggaggaacagaagaaaagtccagtcttctcatgagctgtctggcctgtgatacttgggctgtgatcctctagagccagcttggactcacatcattctatggggttgaagacaactcattccctctgaggagccttgtacatacaagccttttatttataacttattttgtattgaaacttttaaacaatactgaagaaaaaaaaacttttccgacatctgttcttggtcttttgtgacgcaggttgaagggggaggaatagaaaaagacaaactgccttggaggagataaaccaattttatgtctatcatgttatacaaaaatctagaaataatagatttgtacagaaaaaaatgataataaatgagaacacaaaccaaaaaaaaaaaaaaaaaaaaaa

SEQ ID NO: 5590 - DNA, 922 bp, Homo Sapiens
  NM_032310
gtttagagtccccgaggctacacagccaaagccggggggctggcctagccaaaaggggcgggcgagcacggcccgcgggcggcgttcgctggagctggtggaccgggcggctgaccgaggggcggacgcgcggcggggcagaccgctggggactgcgggcggcgctgtgtccgtcgccatgacagatcagacctattgtgaccgcctggtgcaggacacgcctttcctgacaggccatgggcgcttgagtgagcagcaggtggacaggatcatcctccagctgaaccgttactacccacagatccttaccaacaaggaggcggaaaagttccggaaccccaaggcatccttgcgtgtgcggctctgtgacctcctgagccacctgcagcggagcggtgagcgggactgccaggagttctaccgagccctgtatatccatgcccagcccctgcacagccgcctgcccagccgccacgctctgcagaactcagattgcacagagctagactcgggcagccagagcggcgagctgagtaacaggggacccatgagcttcctggctggcctgggccttgctgtgggactggccctgctcctgtactgctatccgccagaccccaagggcctgccagggacccggcgcgtcctcggtttctcgcctgtcatcatcgacagacatgtcagccgctacctgctggccttcctggcagatgacctaggggggctctgacagaccctggacccagggcctcacctgccactcaaccaaagagtcctcgagccggcccgccaaggggactgctgcttctttttctaaatgcatatttttcattatttataatttgtgtaaaaaacacaccttcaccttacaaggtgctgaccatattaaatgttcaggttctctcaaaaaaaaaaaaaaaaa

SEQ ID NO: 5591 - DNA, 1982 bp, Homo Sapiens
  NM_032312
aatcccagcgccgctgtcactgttatggtcctgtcagggtgccggcgtcgtggtgcttgggtggtcgccaccaagaagactttggtggggtagtctcggggcagctcagcggcccgctgtgcccgtttctggcctcgctcgcagcttgcacgtcgagactcgtaggccgcaccgtagggcgagcgtgcgggtcgccgccgcggccgcctcggggtctgggcccagccgcagcctcttctaccgcggccggttgggagtcgccgcgagatgcagcctccgggcccgcccccggcctatgcccccactaacggggacttcacctttgtctcctcagcagacgcggaagatctcagtggttcaatagcatccccagatgtcaaattaaatcttggtggagattttatcaaagaatctacagctactacatttctgagacaaagaggttatggctggcttctggaagttgaagatgatgatcctgaagataacaagccactcttggaagaattggacattgatctaaaggatatttactacaaaatccgatgtgttttgatgccaatgccatcacttggttttaatagacaagtggtgagagacaatcctgacttttggggtcctctggctgttgttcttttcttttccatgatatcattatatggacagtttagggtggtctcatggattataaccatttggatatttggttcactaacaattttcttactggccagagttcttggtggagaagttgcatatggccaagtccttggagttataggatattcattacttcctctcattgtaatagcccctgtacttttggtggttggatcatttgaagtggtgtctacacttataaaactgtttggtgtgttttgggctgcctacagtgctgcttcattgttagtgggtgaagaattcaagaccaaaaagcctcttctgatttatccaatctttttattatacatttattttttgtcgttatatactggtgtgtgatccaagttatacatgaatagaaaaagatggtgttaaatttgtgtgtaggctgggaattcttgctgaaggaattggagaaaacctgttgctgcaaaattttacatgttccagatggaaagggaagtctaagcgctttttaaaacaatttttttttgtatttaattaagcaattgcagttatctgggatttttgggtcagaattttaaattctgtttgattctccatattccagtgaataaaatacaaaagcattgtgtttttaagattgtgtcgatattcacctaaaaacttgtgccaaaagcacctggattggtaattatatttcacttaaagggtaaatttgacaatatcttgataatcaaaagtgcaatttttttcttcaaaatgttttctccagcatcacagatcctgcagatatatatttatatttatacatatatatttatgaaataattcttactcacaaaatatatttctgataaacattaagatattaaatctgatgcacaaactttttaatttggccattaatcttttttatttaaaaatttaaatttgtttttaaaattgtatatagtttttaaaatctcacacatgcttcgatacttccttgttaagaattcttaataactactaaaactgatttttaatagttgctgatatatatttggtttgtttgggtatacttttcaaaaccatttttgaatgtccaaacatctgatttaaagtttctgtttatctttctgaccaaaggagcaagaggtataatggatatggcattcattaaaatctttactatgtacaaaaacagtaatatttacagcatcagtaaatatttttaagtggtacttctaaatcataaaagttggggaaagagacctttaaaatcttgtggtgttgaacaatgttatatgaagtagaaaaaataaaatacttcccagttgtgtgttttgttttacagcaaaaaaaaaaaaaaaaaa

SEQ ID NO: 5592 - DNA, 2307 bp, Homo Sapiens
  NM_032313
ctcgggtcaaatgcgcgcctcggaccctagtgcgcgtgcgcgctggtggctccgcccctttggagctacttcctcatgctgcccgctcgcctaccgttcaggctgctgagccttttccttcgtggatccgctcccacggcagcgcgccatggcctccgggagccgctcctggagaggaggtgcgctgccgcctcctccttccagcactcatcgagtctgggacgcgagcttccttatgaccccgtggacacggagggctttggagaaggtggtgacatgcaggagcgttttctgttcccggagtacatcctggatccggagccgcaacccacccgcgaaaagcagctgcaggagctccagcaacagcaggaggaggaggagcgacagaggcagcagcggcgggaggagcggcgacagcaaaacctacgggccaggtcccgggagcacccggtcgtggggcacccggacccggcattgccgcccagcggcgtgaactgctcgggctgcggggcagagctgcactgccaggacgccggagtgcccggctacctgccccgagagaagttcctccgcacggcggaggcagacggcgggctggcacggaccgtgtgccagcgctgctggctgctgtcgcaccaccggcgcgctctacgcctgcaggtgagccgcgagcagtacctggagctggtgagcgccgcgttgcggcggcccggcccctccctggtgctctacatggtggacctgctggacctgcccgacgccctgctgcccgacttgcccgcgctggtgggccccaagcagctgatcgtgctgggaaacaaagtggacctcctgccccaggatgctcctggctaccggcagaggctgcgggagcgactgtgggaggactgtgcccgcgccgggctcctgctggcccctggccaccaagggccacagcgccccgtcaaggacgagccacaggacggggagaatccgaatccgccgaactggtcccgcacagtggtcagggacgtgcggctgatcagcgccaagaccggctatggagtggaagagttgatctctgcccttcagcgctcctggcgctaccgtggggacgtctacttagtgggcgccaccaacgccggcaaatccactctctttaacacgctcctggagtccgattactgcactgccaagggctccgaggccatcgacagagccaccatctccccttggccaggtactacattaaaccttctgaagtttcctatttgcaacccaactccttacagaatgtttaaaaggcatcaaagacttaaaaaagattcaactcaagctgaagaagatcttagtgagcaagaacaaaatcagcttaatgtcctcaaaaagcatggttatgtcgtaggaagagttggaaggacattcttgtattcagaagaacagaaggataacattccctttgagtttgatgctgattcacttgcctttgacatggaaaatgaccctgttatgggtacacacaaatccaccaaacaagtagaattgactgcacaagatgtgaaagatgcccactggttttatgacacccctggaattacaaaagaaaattgtattttaaatcttctaacagaaaaagaagtaaatattgttttgccaacacagtccattgttccaagaacttttgtgcttaaaccaggaatggttctgtttttgggtgctataggccgcatagatttcctgcagggaaatcagtcagcttggtttacagtcgtggcttccaacatcctccctgtgcatatcacctccttggacagggcagacgctctgtatcagaagcatgcaggtcatacgttactccagattccaatgggtggaaaagaacgaatggcaggatttcctcctcttgttgctgaagacattatgttaaaagaaggactgggggcatctgaagcagtggccgacatcaagttttcctctgcaggttgggtttcagtaacacctaattttaaggacagactgcatctccgaggctatacacctgaaggaacagttttgaccgtccggccccctctcttgccatatattgttaacatcaaaggacagcgcatcaagaaaagtgtggcctataaaaccaagaagcctccttcccttatgtacaacgtgaggaagaagaaaggaaagataaatgtatgagaccgaccttgttcactccagatattaactgtattgaacacaacaaaatacattgaatttgtattaaacatataacgcataaataaagctcccattcttaaaaaaaaaaaaaaaaaaaaaaaaaaaaaaaaaaaa

SEQ ID NO: 5593 - DNA, 3227 bp, Homo Sapiens
  NM_032316
cttgaggctcggctgaggatgccgggaagggctggtggtcgggggcctagagcggcggttgcacttagttgcggctgctgtcaccatgtcccgcgttttggtgccttgccatgtgaaaggctccgtagccctccaggtgggcgacgtgcggacctcccaaggccggcctggcgtgctggtcatcgatgtcaccttccccagcgtcgctcccttcgagttgcaggaaatcacgtttaagaattactacacagcttttttgagcatccgtgtccgtcagtacacctcagcacacacacctgccaagtgggtgacctgcctgcgggactactgcctaatgcctgacccacacagtgaggagggagcccaggagtatgtatcgctgttcaagcatcagatgctgtgtgacatggctagaatatcggagctacgcctgattctgcggcagccatcaccactgtggctgtctttcacagtggaggagctgcagatctatcagcagggaccaaagagcccctccgtgacctttcccaagtggctctcccacccagtgccctgtgagcaacctgcactcctccgtgagggtctcccagaccccagcagggtatcctccgaggtgcagcagatgtgggcactgacagagatgatccgggccagtcacacctccgcaaggatcggccgctttgatgtggatggctgttatgacctgaacttgctctcctacacttgaatggttgctcctagccaagatgttggcctttctgtgcccacccagacttggtttgggccaccagaggctgaagtgtatttcctgtgcattccaagtgttgcctgcatgcctgttctgtctgggccacattcacagattcaggattctcaggggcttaccgtgttacttcagcatgagctcctggcatgggggtgctctgtcttcgcctggctgcaactcaattcttccttctacccaaaaacactccagtcagttgtacttactgagaatccctgagtgccctctgccccttctggcaacatgcacattcctgtcttctgcctgctccctcatgtcagtgcagttgggctgggctgacctactaaaacctgctccatgtatggacctggaaggccattgctgccatggcacttgggacacttgaggaagaaacagaaaccttatttcttcctgtgtgtcccctagtggttttctttccatttgtgttatgccacagagagaaatttcctgtctgaactcttctgctgcctgcctaggaaggaaacctgaagatttgggcagcctgagtctcttggtttctgagctggctcctgaatatatgttcaagtgggtgtgcccatagggcctgggcacgtgtctctagcaaaaccagggcctgagcataagaactgggacccttctaggcagggtgcagtggctcacgcctgtaatcccagcactttgggaggcccaggcaggcggatcacctgaggtcaggagttcaagaccagcctgaccaacctggagaaaccccgtctctactaaaaatacaaaaaattagctgggcgtggtggtaggcacctgtaatcccagctacttgggaggctgaggcaggagaatctcttgaacccgggaagtggaggttgcggacctgagatcatgccattgcactccagcctgggcaagaagagcgaaactccatcttaaacaaacaaacaaaaaaaaaagaactgggacccttctgccatctgacatagcccaaagcacatctctatcctttctcccagttgcccctctccttttttgttgttttttttgaggttgagttttgctcttgttgcccaggctggagtgcaatagtgcaatcttggctaactgcaacctccgcctcccaggttcaagcaattctcctgcctcagtctcccgagtagctgggattacagtcatgcatcaccatgcctggctaattttgtatttgtagtagagatggggtttctccatgttggtcaggctggtctcaaacacctgacctcaggtgatctgcctgccttggccttccaaagtgctgggattacaggcatgagccaccgcgcccgccctgcccctttccaagagatatgctcagcataatgagagatcaaccgtggtggggagtgggtccaagtaagggttctcattgttgccttttaagaggcctaagtcctgcattaactcagtccaaccattaagtgatgcaggctgctcttccctcatgtgagaaaaacctgtttccctctggttcttcctggctttgcacctggtggctattacaaagcagtactgcagtatgtcttggacctggaaagttggacatgtgtgtggctcaacagttttctcgggggagttcagtgaccttttggtggccaccctctgttctcacctgtgagttcttgcaggtggcgacttcatctgcaaggtcacttacatagccccactcagctgcttcggaaagcgtgacgaagcagtagtcctcagtgtgtgtgtaagtgaagaggaccttgtggtagcagggaccatgcttcattcgtggctgtgtccccatctgagggcctggtatgcagtaagatcaataaatacttgtggaatgcatgactgctggctgcctgtgtctgcctggtgggagagctgtggaactaggggtccacatgaggacagactactgtggtgctgcctacctgccaggctggcccaccttccccacccccacttgaccttactctcttgaggtcctaaaggtatgattcagacctttcagccctttccagaactttgaccctctggagacagggcggttctgcagggggcggtctagcccctagctttgttctgggcagcccaatcagctctggattgcccgagctgccctgaagagtcagccgaaagagctggaggcttcttccctgtggttgcgggttcctgcattctctgctctaaatcccagcctgcccttggggctgcccacgcccccttcagatcctttgctccggagagagacctgtccgagcagaggcctggactacatctcccggcgtgcctggcagtgtggtggcctctgtgcgccgtctgcactcgttgcaggcgacgatgcagagggctgtaagtgtggtggcccgtctgggctttcgcctgcaggcattccccccggccttgtgtcgtccacttagttgcgcacaggtgggatagagggtgctgatcttggagg

SEQ ID NO: 5594 - DNA, 2534 bp, Homo Sapiens
  NM_032317
cttgcaccgcctgccgaatcaattcaacatggcagccatgcgctggcgatggtggcagcggctgttaccttggaggttgctgcaggcccgtggctttccacaaaattctgcacccagcctgggcctaggagcgaggacttattcccagggcgactgctcgtattcgcgcacggcgctgtatgatctgctcggcgtcccctccacagccacgcaggcccaaatcaaggcggcttactaccgtcagtgctttctctaccacccggaccgcaactccgggagcgcggaggccgccgagcgcttcacgcgcatctcccaggcctacgtggtgctgggcagtgccaccctccgtcgcaagtatgatcgcggcctactcagcgacgaggacctgcgcggacctggcgtccggccctccaggacgcccgcacccgaccccggctcgccgcgtaccccgccgcccacctctcggacccacgacggttctcgggcctcccccggcgccaaccgcacgatgttcaactttgacgccttctaccaggcccactacggggaacaactggagcgggaacggcgcctgagggcccggcgggaggcccttcgcaaacggcaggagtatcggtccatgaaaggcctccgctgggaggatacccgagacacggctgccattttcctcatcttttcaatcttcatcatcatcggcttttatatttaatcggagagagaagggaaggggagtgtccccagccaaccccccagaaacggccttttttcctgcctctgaacccttggccattgatagtctacctttgctgggatccgaaggaactgtactccccctgccctccccgacccgcccagcttagccgatgacctgcacatcgctccactgtggtccagaaaaggaggcctttcgatgtctgagaaagaggccccacgctgtagagtcccgaaagcccaggagtgaagggggttcctggagtctctagggtgcttcttccagagtctgtcttcttgcttccagatgtggtcaacttctggaacactcgctgtagctttattgtttagccccaagcaagatttatctcctcctgccccgcatgtgtatggtgggcctctgtaaccttgaaatgtgcaatgtgaccaattgttgactaccaaaagaaaaggtctggggttgtacgaaacttgtctttctgtgacttccccaagccgcaggtgagacctggtccagggtaagaatgggatcggtggagagcctgtcgttcctcccgctaaggtcagccccctggggcactcctccttatgttgatagcatgtaggagtgagaaaaagtcattgagcataaggaatgagtgttcctgtgcccatatttaatgtgtgaccttggagaagttactctgtaggcatgacagcagaggagaaaatcatttggcatcttgaggtctgtcatgctttattatccatagtttttggggggttttttgttttgttttgtttttgagatggagtcttgcgctctgttgcccaggctggagtgcagtggtgcgatcttagctcactgcaacctccacctcccgggttcaagcgattctcctgcctcagcctcctgtgtaactgggattacaggctcccaccacacctggctagtgttttgtatttttagtagatacggggtttcaccatgctggccagactgaggtctcgaactgccgacctcaggctgtctgcccgtccagcctcccaaagtgctgggattgcaggcatgagccactgctcccggccctattatccatagttctaatccacagggattacagcataatgctagcagggccaggttcatccttgagacagtgtggctggctgtcacctggtcctccctttaccagccagccccattgcacactgtgcagcccatcccctcccagaaatagagtgacaaactctgcacttaagtcccctgtttctgtttaacttgcagtgcttatcacaggcccttccttaattttttaaacaaggctgcttgaggctggggtaaattttggggctttgggagtacacaggactactgagggacggggagttggtggcttggtgttcatggtggagacttggttctttacgcagagcaggctaaaggcgtgttttttctgctctgtttctaattcatgttaagtagttggtcatcactttggtcagagctgctgctgaagctctcttaactgtgagtcactggacgttggcagggagttggctgtgagattgtaggtgctcaagtgtttctgttcgggactgagtgtgaatctgtaaaaggggaaaatcctcgcaagaggtctacgagaaggatgagggcccaagtctagggtctaaacaaagccaggagtggtttggtatattactgagtgcaatcattgcgtgccattcctgcactcaatgtattgtgtaaaatccttaggtaaaatgggataaacccacagctggtcctacttggcctcttgaaaaccattccatcattgtgccaatctagcctgaaaagg

SEQ ID NO: 5595 - DNA, 1105 bp, Homo Sapiens
  NM_032319
gtcctgcgagcgacgcgcggcggggcggcgagaggaaacgcggcgccgggccgggcccggccctggagatggtccccggcgccgcgggctggtgttgtctcgtgctctggctccccgcgtgcgtcgcggcccacggcttccgtatccatgattatttgtactttcaagtgctgagtcctggggacattcgatacatcttcacagccacacctgccaaggactttggtggtatctttcacacaaggtatgagcagattcaccttgtccccgctgaacctccagaggcctgcggggaactcagcaacggtttcttcatccaggaccagattgctctggtggagagggggggctgctccttcctctccaagactcgggtggtccaggagcacggcgggcgggcggtgatcatctctgacaacgcagttgacaatgacagcttctacgtggagatgatccaggacagtacccagcgcacagctgacatccccgccctcttcctgctcggccgagacggctacatgatccgccgctctctggaacagcatgggctgccatgggccatcatttccatcccagtcaatgtcaccagcatccccacctttgagctgctgcaaccgccctggaccttctggtagaagagtttgtcccacattccagccataagtgactctgagctgggaaggggaaacccaggaattttgctacttggaatttggagatagcatctggggacaagtggagccaggtagaggaaaagggtttgggcgttgctaggctgaaagggaagccacaccactggccttcccttccccagggcccccaagggtgtctcatgctacaagaagaggcaagagacaggccccagggcttctggctagaacccgaaacaaaaggagctgaaggcaggtggcctgagagccatctgtgacctgtcacactcacctggctccagcctcccctacccagggtctctgcacagtgaccttcacagcagttgttggagtggtttaaagagctggtgtttggggactcaataaaccctcactgactttttagcaataaagcttctcatcagggttgcaaaaaaaaaaaaaaaaaaaaaaaa

SEQ ID NO: 5596 - DNA, 2520 bp, Homo Sapiens
  NM_032320
gcattgtgagctctcgcggtaagaggctgaggagccggcctgcaacctgccggggcggctccgctacgcgcagccgcctcagtggcttcctccacagccacctccggagggatctggctgaggaggaagtggaggtgtcactggccccggcctttgccccaatcttgtgtgggcactgaagggggactacaggttcgagagttatgggtgctacatgtgtgctttcagagcagtagtgtgaggaagcttggagtgggatggcaggacggcctcatccctatgatggtaactccagtgatccagagaattgggatcggaaattgcatagtagacctcgtaaactttataaacattcaagtacttcctcgcgtattgctaaaggaggagttgaccacaccaaaatgagtctacatggtgctagtgggggacatgagagatcaagagatagacgaaggtcaagtgacagatcacgagattcatctcatgaaagaacggagtctcagctcactccttgtattagaaatgtgacttctccaacacgacagcaccatgttgaacgagaaaaagatcacagttcctctcgtccaagcagtccgcgtcctcaaaaagcatccccaaatggttccattagcagtgctgggaacagcagcagaaacagtagtcagtcaagttcagatggtagctgtaagacagctggggagatggtgtttgtatatgaaaatgcaaaagaaggagctcggaatataagaacgtcagaacgagtgacactaatagtggataacactagatttgttgtagacccatccatttttactgcacagccaaatacaatgttgggcaggatgtttggatctggccgagaacataactttacacgacccaatgagaaaggagagtatgaggtggcagagggaattggttccactgtgtttcgagcgattctggattactataaaacaggaataatccgttgtcctgatggcatatctattcctgaactgagagaagcatgtgactatctttgtatctcttttgaatatagcactattaaatgtagagatctcagtgccctaatgcatgagttatcaaatgatggtgctcgtagacaatttgaattttatctggaagaaatgatcctccctctcatggtagctagtgcccagagtggggaacgggaatgtcatatagtggtgcttacagatgatgatgtggttgattgggatgaagaatatccaccacagatgggagaagaatattcacaaattatttatagcacaaaattatatagatttttcaagtatattgaaaacagagatgtggccaagtcagttttgaaggagaggggtcttaagaagattagattgggaatagaaggttatcctacctacaaagaaaaagtaaagaaaaggcctggaggccgcccagaagtgatctacaactatgtccaaagaccctttattcgaatgtcctgggagaaggaagaaggaaagagtcggcatgtagactttcagtgtgtaaagagtaaatctatcaccaatcttgcagcagctgcagcagacattccccaggaccagctggtagtcatgcatccaactccacaagtggatgagctggatattctccctatccatcccccttctggcaacagtgacctcgatcctgatgcacagaatccaatgctgtgatgctgatcttccttgaaaccatagcatgctactcttcacagtgacgttgtactctcctcattctgcactgcaaggccactcttcttcattgtgagatgcacataacaatgtttaggatattgcagtgtaggcttttttaaagaccaaaggtagctgaatggtttttttttaaatgagtacaactctagcattttgaagttccagttgtaaatgtatttgtttaccagtaggtttgtgaaattggttctttgtatgggggatggtcctttttcacacagctaggtcttttcagaagtggtggaaattggcagctggggtactttcagtttggactgatattcatcacacctcagataaaatgcagagtaatatatagttgcactttataaatggtggttaaatggaaatgttcaagccattttatagttgtgatgcacaatataatttaagtgcttctgtcaaagtattcctccagtacaatttgtatagtttgctgcccttgatgagcaaaaagtatttatcttgggcttatctgaatgatcaggatgagatttaatgcccatatcttaccagttcagttatctccagagccatttcaccctttagagtgagtcacatgcagggagtgtgaatgtcagaggtggtttattatccagtctgccttacccttaatctgttcacagatatttatttactaatgctttttttttcttaagagttatgggataggaaaatgaagtgtttgctcttcatttactaaatgattgtaaacttgagtttttcatcaaaataaaattccattgttttaatgtttctgaccaaaaaaaaaaaaaaa

SEQ ID NO: 5597 - DNA, 3978 bp, Homo Sapiens
  NM_032321
ctgccgcccgcccagacgccagcaagcccccctcccacgacagggctgctccgggagcttcggagacccgccccgggcctgagcgcaggctgcctccgggaccccacggctgtccggacgtgccatgggcgcgcagctgccgggcaacgtgttgtgtaagtgaacatctgggaggtaaacactacacgtgaagagtggtgaaagggaacattgattactgaagtgccctggagagggaaagcactggtcaacatcacatggacaaatttcattgttttctaaagatggcctggaagtagtctttgccactgcttcctccacaaacagctcttcataacatgggctgcatgaaatcaaagcaaactttcccatttcctaccatatatgaaggtgagaagcagcatgagagtgaagaaccctttatgccagaagagagatgtctacctaggatggcttctccagttaatgtcaaagaggaagtgaaggaacctccagggaccaatactgtgatcttggaatatgcacaccgcctgtctcaggatatcttgtgtgatgccttgcagcaatgggcatgcaataacatcaagtaccatgacattccatacattgagagtgaggggccttgaggctgtaggatgacaacactttgactgtggaggtgctagtttgaataaatgtgacaaaagcaaaaactggtgtgaaaaagtacaaataactatctggatttaaaaatgtgtctacgataatgtcactattataagaacaactaggatgaaatgcattttaagtacttctatgttaacagcaatttctgtttagtcttagattttagtcatctgaagggctgaacagaggtcctgtgacacccaataatcagctgaatgtcacagcacttcttcctaagtaatggcatcaccaaagaaaatgctaaggaataaaaactgccccaaattccaatggttgaagtttatcctttaaaataacaatttttgtttgtttatacccaaaaaaagtccagatatgaaaagggcttttctaaaatttcttggcgagggaatggcactcaaatcatagtgattaacagtaagtcttgtttgtttgtcaaggatctctacttcttgacacaaatgaaccctgtctttaataagataagatatttatttttgtagatgagaagtgtaactaccaccttggacctcagggccctaactaattacagctgttactggacgactcagactttgtgcctaaagccatcttagagataacagtttatagaagccatgacattagtgtttattgcattgaattaagcccagtgatataactatacaagaaaacaagtaggggtaccttttacaaagagcaatccaataaatcttaaaaataacagaaacttagtctgcaaggtagaaagtttcagttttaattctgtattaagctttactatctcagaggtacagagggctggaatatgggcatttatttccagttttttcttgactagtaaggcggtcaccattaaaatagaccagataatgcatgaagatttacagttgtattgcaaaacggaaaagataaaactgtcctttgaggagagtactcgttttctgggtttttgttattttttagtggtaacacaagcctatagggcatttatagccacctattatactgtttccataagcctggctaccttttagggaagctattttttctctttcatttttactgtcacagcacatacacacacacctttttgttttaaaggattaagtactgtttgaagatcagtggtaacagaaaatttgggagggagaagaagaaattaagacatgacttgttagaaaattaagacttcagtttctagaattatcttttcatcaagatttggtagacattgagtttaaatggaaaggaaattatttaagcctgtgtatgttagatccacaatacaccattggtattgaaatataaaggttaaaaaaaaggcttatgacctctttaatgagataaatatgtatttgtcttgtaagcaggcagaaaatctacctctaattttaacactaatactttgaaacccacaatcaaatagagtgaattctccaagttacataagcaaggaaaacattatttgaaatatgccatgttttcgttgcctttggacacctcatcattcaactctaattttaccgagtcccgggatttgtactgtcccattgtacttgcaatctacaatttatataatagaaaaacaaccaaacccattcatacaaggatctgaagttataaggttaagggcagaaagtttcccataagtataaaacatttccaggtcatgaagagtagtttaggttgagtgacaaaagcctaggtgtggttgtttttcattcattttgcatctcacaccaagacatttttgctgcaaggtcatctgctgcttaaaatgtacaattaggtatataaaataagtacaatggtgaaaacacaaagccaggtaaagcagcatgccccactaaacttttcagtatacatagggacagacaagtgagttttggttgtatctaaatattttaatttcaggttccttctgtgccctgggccactatttcccaggggtgtgacagagatgcctgccagatccatatcaactagaagtctgatttctgttgctgcccttcctcagcaactatggcagtatacttttatcaccaagcaccactcccttgtccctgaatcacattttaatagagtacaatatcttctgtacaatatttctgaaacacttatgtctgaaatatatgctgtattgtatgttaacccatgacatatatgaactacaaggcttgcataatcagtgagctagtggataaatcaagacaggagcaaatgggagaaagatgaataaacaaatgaaaaaagatgaataaatgaataagagagatgaataaacaaatttacattacatgtgatagttatcatggtatggccttcatgacaagatggatgagaatatcactgataggatattagccttctttcatatctttatattgaaatatgggctttacttcaatttgaaggtctttcatgaacaataaaagagagtagaaggactgtctgagaaggcaggagacatataaaacagatgactgaaagactgactagctcctggaaagggaaacatttggaacatccagagtaagggcaaatgggcttctaccagcacaacaaagagcctccaggtggcaacatggaagcaggttatcagagaaaataaatgtgcaaattccttatttacaatgactcacttaaccccacaaacatgtttcactgctgccttccccagttgtcgcttatgtactgttgttacctttcagttacatgcctttgatcctaaaattctctacttttgttgccttatcagttctttgcaatctgcctgtggttatcagcacttaaagcacaattttgaaggggaaaaaaatgataatcaccttagtcccaaagaaataatttgtcaaactgccttattagtattaaaaacagacacactgaatgaagtagcatgatacgcatatatcctactcagtatcattggccttttatcaaatggggaaactatacttttgtattacatagttttagaaatcgaaagttagagactctttataagtaatgtcaaggaacagtaatttaaaaacaaagttctaacaaatatattgtttgcttaatcacaatgccctcaacttgtatttgaataactaaataggacatgtcttccttggagctgtgggcattagttcagaagcactacctgcatcttaattttcaaaacttaagttttattagcaaatcctcttctctgtaagacttagctatgaagtggtatattttttccaaatatttttctgaaaacatttgttgttgtaactgcacaataaaagtccagttgcaattaaaaaaaaaaaaaaaaaa

SEQ ID NO: 5598 - DNA, 1809 bp, Homo Sapiens
  NM_032326
caagctcccggccgggctgactcaagcggaggcgcgcggaacagtcgccgaggcgattcccgcccaggctcctgtaaccgccaggcagcggccccgccatgtcccagccccggaccccagagcaggcactggatacaccgggggactgccccccaggcaggagagacgaggacgctggggaggggatccagtgctcccaacgcatgctcagcttcagtgacgccctgctgtccatcatcgccaccgtcatgatcctgcctgtgacccacacggagatctccccagaacagcagttcgacagaagtgtacagaggcttctggcaacacggattgccgtctacctgatgacctttctcatcgtgacagtggcctgggcagcacacacaaggttgttccaagttgttgggaaaacagacgacacacttgccctgctcaacctggcctgcatgatgaccatcaccttcctgccttacacgttttcgttaatggtgaccttccctgatgtgcctctgggcatcttcttgttctgtgtgtgtgtgatcgccatcggggtcgtgcaggcactgattgtggggtacgcattccacttcccgcacctgctgagcccgcagatccagcgctctgcccacagggctctgtaccgacgacacgtcctgggcatcgtcctccaaggcccggccctgtgctttgcagcggccatcttctctctcttctttgtccccttgtcttacctgctgatggtgactgtcatcctcctcccctatgtcagcaaggtcaccggctggtgcagagacaggctcctgggccacagggagccctcggctcacccagtggaagtcttctcgtttgacctccacgagccactcagcaaggagcgcgtggaagccttcagcgacggagtctacgccatcgtggccacgcttctcatcctggacatctgcgaagacaacgtcccggaccccaaggatgtgaaggagaggttcagcggcagcctcgtggccgccctgagtgcgaccgggccgcgcttcctggcgtacttcggctccttcgccacagtgggactgctgtggttcgcccaccactcactcttcctgcatgtgcgcaaggccacgcgggccatggggctgctgaacacgctctcgctggccttcgtgggtggcctcccactagcctaccagcagacctcggccttcgcccggcagccccgcgatgagctggagcgcgtgcgtgtcagctgcaccatcatcttcctggccagcatcttccagctggccatgtggaccacggcgctgctgcaccaggcggagacgctgcagccctcggtgtggtttggcggccgggagcatgtgctcatgttcgccaagctggcgctgtacccctgtgccagcctgctggccttcgcctccacctgcctgctgagcaggttcagtgtgggcatcttccacctcatgcagatcgccgtgccctgcgccttcctgttgctgcgcctgctcgtgggcctggccctggccaccctgcgggtcctgcggggcctcgcccggcccgaacaccccccgccagcccccacgggccaggacgacccacagtcccagctcctccctgccccctgctagcagccacagagcccactcccagccgtcctcaccagagatggaccagggaggacaggatgctgggcaggggaagccaagtcacgggcaggccgcagtggttcttgcgtggcctggttttattttcattgtgaaatatcatgctcttatttcagtcctcaaaaaaaaaaaaaaaaaaaaaaaaaaaaaaaaaaaaaaa

SEQ ID NO: 5599 - DNA, 5233 bp, Homo Sapiens
  NM_032329
accccgagcgcggccgcggacgaagatggcgaccgccatgtacttggagcactatctggacagtatcgagaaccttccctgcgaacttcagaggaacttccagctgatgcgagagctggaccagaggacggaagataagaaagcagagattgacatcctggctgcagagtacatctccacggtgaagacgctgtctccagaccagcgcgtggagcgcctgcagaagatccagaacgcctacagcaagtgcaaggaatacagtgacgacaaagtgcagctggccatgcagacctacgagatggtggataaacacattcgaaggcttgatgcagacctggcgcgctttgaagcagatctgaaggacaagatggagggcagtgattttgaaagctccggagggcgagggttaaaaaaaggccggggtcagaaagaaaaaagagggtcccggggccgaggcaggaggacatcagaggaagacacaccaaagaaaaagaagcacaaaggagggtctgagttcactgacaccatcctgtccgtgcacccctctgatgtgctggacatgcccgtggacccaaacgaacccacgtactgcctgtgccaccaggtctcctatggggagatgattggctgtgacaatccagactgtccaattgagtggtttcactttgcctgcgtggaccttaccacgaaacccaaaggaaaatggttctgtccacggtgtgtccaggaaaagaggaagaagaagtaggaggagctgtgtgcccggatccgaggagcaagttaatctgtcccttcattcgtgtcgcaatatttcccttccttttaaaactaccttgttcggttgatacttagtaactccgtggccagttgaagcgctggatgtttcctagaacaagaaccaccaaagcctgttcgcacagaagggcgaccttgcagggactcgccgccgcgacctcagtgtggcttttacaggactccccccgagcatcagcagggaccccggcggacgtgggcgggcgcgcgtgagctcgggctgcccggccgggcgtgcgggcggggacatggtaacctggtccacggagggcggccgccaccctcgcgtagctttcctgtggttttccaggactgtccggtacagcccgggctccgcgtgccccgcccgctggagcacctgccaccgaggcgcgcgtggggccactgccgtggcggcggctgccctcctcacactcggctccgcgccgcctccggccaccgtgcgctcccgcgtggggcgcctcggatgggcccgggagggctgggggctcttccctggaggaagcggcctccgcttcgctggcgccgcctttttagcttggacttcagtcctccctcggggactcacctccggagtaaacggctcttcattagcttggagtggccgcaggtcccgtgaccagcacccgcgagaccctgtgcgacagctgggctgatgctccgtttctctgggaattggtgattttttactgtgaagatgaaattaccctaatagcatgaagatcgtgggtctgtgtgtccgtgaagtgagtcccgtctgccaggagctgacgaaccacgaatgcttctgcctgtgctgtgcattcccaggcccgcagctcccggtcgaggggactccgatgtgaatttgttgtgaatttgttgtgccacaatagcagttctggaatgaagctaggaaactcgagtgtgctttttgtttaatgagcgttcaccaagctgagccggagccatcctttcggtggtagttggggaaggctatgcagatttgctctgttgtgacgcgttggtgacggtgcccagcctgcggttccccacagcatcgcaggcgctcggaaatcctctcccgtgcctttagaggaaggagaggattgctgaggaatgcagggacgcctgtttctgtcctcacaccacagaaagaaacctgagggaaaactgagacgtgaggttcctgatttaagaagcctgggtttcttcatggtggggggccatttggaatgacagcctcacttccttctgatggctacatctgtatcttttcctcctgtgtttaatgtttcactagggagaggaaataaagcagaaggaacgtgtgaagctctgtgtctcagacggggccctcccgtcgagaagctggtagtcagtgagtgagaacaagagaacaagaacaccctgaacagtcctggttgggatggtgtccacattcatgttctgcggttcttgaacacacggatgcctctgggccacctgtccttttccgagggtgtgggtgggagtggatcctccgggcgcaggtgccaggcaggtgcaggcgggcggtcggccactgctgctgctcgtccctgccagtgtctgggcctgaaggggctccctccaagcggtgccttcctgcggcttagaagggaaagcgccagagagggcaggctacagtgcttcacacccttcgccacggctgtgaaactggagatgggtgggttttgtatgttaatttttttttttgagacggagtcttgctctgtcacccaggctggagagcagtggcgtgatctcggctcactgcaagctccgcctcccgggttcacgccattctcctgcctcagcccccccgagtagctgggactacaggcgcccgccaccacgcctggctaattttttatatttttagtagagacagggtttcaccatgttaaccaggatggtctcgatctcctgacctcacgatttgcccgcctcggcttcccagagtgctgggattacaggcgtgagccaccgcgcctggccacccagctaagtttgtatttttgttggagacggggtttcaccatattggccagactggtctcaaactcctggggtcaaatgatccgcctgcgtcggcttcccagagtgctgggattacaggtgtcagccactgcgctcagctgggagatgaattttcatttaatgacttaactttttgttagcacaggttttgtgtgtgtgtgtgtgtgtgtgttttgttttttgttttgtgtttttgaaacggagttttgctctgtcacccaggctggaatgcaatggcaccatcttggctcactgcaacctctgcttcctgggttcaagtgattctcttgccttagcctcccgagcagctgggattataggcgtccaccaccacgcccagctaatttttgtatttttagtagaaatggggtttcaccatgtgtggccaggctggtctcgaactcctgacctgaagtgatccacccgcctcgacctcccaaagtgctgggatgacaggcatgagccaccgcacccggccaacacagatgtttattgatcgtggaggatacattgtggaaaatgtttttctctcttttaccatttttgggaagagggataggtaagtgcagggagtttgtgctgaaacagcgcctggcaatttttcagaaatgaatttgatattgcgctccacctttgagctgttcacacctgtggctacccctggaaagcgctggggttgttgatgcttttggctgcccggcttcctgaggtctcgctgctttttggggaaagatgactggcttccctgtgggacgcttttgtctgacacgtgatgatgtggtcctgcctgccactgtgcaccatcccaggtattgaattttgaccttttcttttcaagtttctgtgcttagtgtttttaatgtttacttttgccacttacaataatatcaccaaaataatatgcatagagttttggaagaaacatagaaaacatgagcagaatgagacaattccttgggctgtagtttggacccaactgaatcctgagtgctctgtggctgacgctgtctacccgtgggagagacacactcaggagtggccgtttggccagaaaagaaggtcatggcccctggcctggcccccgccctgcagggacacagaagccacaccatttgcaccatccacgccttgctccagaaggcctggccgccttctccctgggggtgattcaaggatttggtctcggaccagacccccctccacagctgcccggccccagacccatctcttggattgagggtgtgtgggctggaaccagtgggtcactgtggcagcttcatctgagccgaaggtgtgggtcctctgtggctgtgcgattgacctcgatgggaaggagcgttctacccattttccttgttttcagtgctgcggtatcagtcagtgatctgaggaaatcctgtaggggaaggcaggctgcagtgaaaacaggagctggtgaaaccgagccctctgcatctgcgaatgtgccctaggtgctgctgctggggacatggatgccaagcggaggcctgcgtggcctcctgagcagcagctgaccgcccgtctcatgctggacgggacccctgggcgggtggacatgagaccactgttggccagggacgccgtgcggaggcctacgtggctgcctgagcagcagctgaccgcccgtctcactgttggccagggctttgtggcgtgggtgttttccagtctgcctggagcagcgagaagcagctgtgcagactggtggcggtgggagggtttgctgggactgatggggacaccggccagcttgtctggtgtccagcagccctgccggacttggcctcctgtcctgtcgttgggagccctggctggggctgctttgagcaatgacgctggcccagagcagcttcccacatgaccccagagccgagggtctgccctgtcctaggttaggtcttcatggtttagagtaaaaccgtgagggatgttaattatgggcattgaagacttaaggttttcttaaatttttagtgagcagtgattggccttcaatacttgtgctgagaggaattttaagccaggggaagtgtaagaaaatgttcccattcaggagagattgtgttggagtttctttcttcctctgtatgtattttgtggtgtccacctttaaccacgtttcatccaaaacgatgatgcagctttaacatgaatgttacatttttattttcaaggaattattatctatgttccctttgtaaaggaaagataatgttgtaaatctttttattagataatgtaaagatgtatatcagtatttttggatcatgttatagattatggatatattgtttaataaataaagtattttttggaacaaacaaaaaaaaaaaaaaaaaaaaaaaaaaaaaaaaaaaaa

SEQ ID NO: 5600 - DNA, 1773 bp, Homo Sapiens
  NM_032333
gggtcacatggcggtggcgcggtagcgcgcgatgcagcacaggctagaggctgcgcaagcgcggggcccgcccctgggaccctccgggccgggcggtttggccccttagcgcccgggcgtcggggcggtaaaaggccggcagaagggaggcacttgagaaatgtctttcctccaggacccaagtttcttcaccatggggatgtggtccattggtgcaggagccctgggggctgctgccttggcattgctgcttgccaacacagacgtgtttctgtccaagccccagaaagcggccctggagtacctggaggatatagacctgaaaacactggagaaggaaccaaggactttcaaagcaaaggagctatgggaaaaaaatggagctgtgattatggccgtgcggaggccaggctgtttcctctgtcgagaggaagctgcggatctgtcctccctgaaaagcatgttggaccagctgggcgtccccctctatgcagtggtaaaggagcacatcaggactgaagtgaaggatttccagccttatttcaaaggagaaatcttcctggatgaaaagaaaaagttctatggtccacaaaggcggaagatgatgtttatgggatttatccgtctgggagtgtggtacaacttcttccgagcctggaacggaggcttctctggaaacctggaaggagaaggcttcatccttgggggagttttcgtggtgggatcaggaaagcagggcattcttcttgagcaccgagaaaaagaatttggagacaaagtaaacctactttctgttctggaagctgctaagatgatcaaaccacagactttggcctcagagaaaaaatgattgtgtgaaactgcccagctcagggataaccagggacattcacctgtgttcatgggatgtattgtttccactcgtgtccctaaggagtgagaaacccatttatactctactctcagtatggattattaatgtattttaatattctgtttaggcccactaaggcaaaatagccccaaaacaagactgacaaaaatctgaaaaactaatgaggattattaagctaaaacctgggaaataggaggcttaaaattgactgccaggctgggtgcagtggctcacacctgtaatcccagcactttgggaggccaaggtgagcaagtcacttgaggtcgggagttcgagaccagcctgagcaacatggcgaaaccccgtctctactaaaaatacaaaaatcacccgggtgtggtggcaggcacctgtagtcccagctacccgggaggctgaggcaggagaatcacttgaacctgggaggtggaggttgcggtgagctgagatcacaccactgtattccagcctgggtgactgagactctaactaaaaaaaaaaaaaaaaaaaaattgattgctgtgcctcattacaaatgcatatgatgtttgagtgctgttgtttgaaattatttttcttttcgggtcttcaaaaattcaagaaaagttgatgattgacttgaagattacaaaatttaaggttttttggcatgtgtgttttctattaataattggttatatgatgtcaaagtaatactttcataatagaattgacatgctctgggatagtttgacaaaggtaaattataaagtgaaatctcttgtttcattatcttccattctaacctcagagatctgtttctctagaaaaaatgtccatctctggctttaataaaattatgcatcagaaatcaaaaaaaaaaaaaaaaaaaaaaaaaa

SEQ ID NO: 5601 - DNA, 3693 bp, Homo Sapiens
  NM_032334
gcttcatttccgggtgaaactggcattgagggtactggggcgtgcgtgaggcgtttactgatgcttcctggtccggtggcctcggtcccggtaagccaggcatgaagatcacaaggcagaaacatgccaagaagcatcttggcttcttccgcaacaacttcggagtccgcgagccgtaccagatcctgctggacggcaccttctgtcaggcggcgctgcggggccgcatccagctgcgggagcagctgccccgctacctcatgggggagacgcagctgtgcaccacaagatgtgtgttaaaagagctagaaacattgggaaaggacttatatggggcaaaactgattgcacaaaaatgccaagttcgaaattgtcctcatttcaagaatgcagtgagtggatcagaatgtctgctttccatggttgaagagggaaatcctcatcattattttgtggcaacacaggatcagaatttgtctgtgaaagtaaaaaagaagcctggagttcctctcatgtttattattcagaacactatggttttggacaaaccttctcccaaaacaattgcctttgtaaaagcagtggagtcaggtcagcttgtctcagtgcatgagaaagaaagtatcaaacatctcaaagaggaacagggtttagtgaaaaacactgaacagagtagaagaaaaaagcgcaagaaaataagtggtcccaatcctcttagttgtttgaagaaaaagaaaaaggcaccggacacacaatcatctgcttctgaaaagaaaagaaaaagaaaaagaattcggaacagatctaacccaaaagtactttctgagaagcagaatgcagaaggagaatgaatcctttggatactttcaaggacattcaaatgtgaaaatgaattttttacaactagaagtatttataataaaagaccaaacttatttttgtaaatgaacccatatgctttagctaaaattaattataaaataaaaacagtgaccagtctagccagcatggcaaaaccccatctctactaaaatacaaaaattagctgggcatgatggtgcacagttgtaattccagctactcaggaggctgaggcatgagaatcgcttgaacctgggaggcagagattgcagtgagcccagttcgtgtcacttcactccagcctgggcaacagagtgagaacatgtctcaaaaaaaaaataaaaacagtgaatgggtgtaggtgtgatggaattcactttacttactaaatggtttcgggaggttgtttctccaggtaaaattgtcgcctctctggtcccattcccaccttcaaacattatatgcaaacagttttaaaaaatcttacagttctaaaaggcttgtgacaaaaaaagaggcagtccctctttcacattgacagaagaaacttcctctttcaattctagtagttgaagaatttatatttccaaattgtatgattataccgctactttttgatacatcaattatttattgacttcctactagaaagagtgaaattttgcccatttatactgcaccatttttccagtatatgaatattttactctttgtacatcagaaactcagtattttcattattatgactagagtttttttgtttgtttgtttgagttctacttgtccaataaggatgatgattttcttttagatgtaaatgttaacttcaatagcaagaattcaaaaataatattctctttgagattgactgtgaatgttattgaaaagtgtctaaattagtctgaggatcaatgagggtcaattcagttaggaattgaataatgaaacgtgtctctctgaattcccccggcaattgttttagtcatttatcaggccaaaattaaaatgtttttgtactacaagatggaagtataaaattattggacaagtgaaatcgtatcagtagttcctgactgacagcttctggagccacactagagcagtgattctcagtctaacattaggttatcatgatgacgtatgagtaaattcttaatggttaaatgtgagacagttcacatttattcccatagaaatgtcattctcatttgaattcagagatacttctttgctggaagttggaattatagctttacaccaaggagtgacacgtagactaatctggcaagccaaggtagtgtttggattgcaatgtcatgattctattttaaattcttgatggtagaaacatttttaataaggaaggtaaaaatactggaaaaaagtgaatagtgtaggttttgtgaggaaagttaacatttgtcaatgacaagcattaaggccacctaataaagtgtagacaaagtgataaatgaaatatacactgatgatactcatttcaatatgctaaaatacattaaatttaggtattactcttaatctatttctacttagtcagtgctatctgattacctgttaatagcatctgaactggagagctggaaaaatccacttttttatgaagcagtaattatagaagtactaaaaattacaatgtattagtaagtttaatattttgacagggcatggtggctcacacctgtaatcccagcactttgggaggccgaggctggcagatcacaaaattaagagatcaagaccatcctggccaacatggtgaaaccctgtctgtactaaaaatacaaaaattagctgggtgtggtggtgtgcgcctgtagtcccagctactcgggaggctgaggcaggagaatcgcttgaacccaggaggcggaggttgcagtgagccaagatcatgccactgcactccagcctggtgagagagtgaaaccccgtctcaaaaataaataaataaataagtttactattttaaaactggttaatcatttatgtattttgccagtaaaattactttaaaagatattttaacaaaagtctcatatccttgtacttcagtttttttgtgtgtgaatactatccctataccactacccctaaaacctcagaattatttgctttattttttcatacaacttggggaagggaaccatgggagtatgcacatgggatcataatccattctgtggtttggaaaaagaaaatgttaacctctgctttagagggtagctactagctttgttggggataaaagtgtaatacatgcacttttgaactctgaaagtttgccaatctgaaaaggggtgtttctgaagaccactatcttttacgaacacttaaaaataagtgtttgcagttgtgtatgggcacgatactgtattctttacatttttatggccctacagctacttcttatccctgcaagtatataaattaaaaccaagtcactttagaacagctttgaaactagagtttcaaaggtaaaaggatctcatgtttctgaatctgcgtaaagcaagatggctgtgatttgacaggtttaattgctagttttttataggtggatagaaatgaatagtttggagtctttaaaatgttttaaaaaatgtttgcttactatctatatatatgacattattcccaattagttttatatctccaagatatatatatgtatataggtatatacacatatgtatatatacatagtctatatattctatataagaatatattccaataagaatatattccatacgggaatatattagtcattgatgtattttgccggtaaaattaaaagatattttaacaaaa

SEQ ID NO: 5602 - DNA, 984 bp, Homo Sapiens
  NM_032343
ctcgggtctggtggctgccggccctgcggcatctcgccatggggagcacggagagcagcgagggccgcagggtgtccttcggagtggacgaggaggagcgggtccgggtgctgcagggtgtccggctgtctgaaaacgtggtgaaccgcatgaaggagcccagctctccaccccctgctcccacatcttctacctttggccttcaagatggcaacttgagagcccctcacaaagaatccacactgcccaggtcggggagcagtggtggccagcagccctcagggatgaaggagggtgtcaagaggtatgaacaggagcatgctgctatccaggataagctcttccaggtggcaaagagggaaagagaggctgccaccaagcactccaaggcatccctgcccacgggcgaaggcagcatcagccatgaggagcagaagtcagtccggctggccagggagctggagagcagagaggcagagctaagacgccgtgacaccttctacaaggagcagctggagcgtattgagaggaagaatgctgagatgtataaactgtcttcagagcaattccatgaggcagcctcaaagatggagagcacaataaagccccgcagggtggagcccgtctgctcagggttgcaggcccagattctccactgctaccgagatcgcccgcatgaggtgctgctgtgctcggacctggtcaaggcataccagcgctgcgtgagcgccgcccacaagggctgaggagcagacatcattccctgccctggcagtgacttggagccctgaagaagggaccaatcatgggaccacagccactgtgccctgccgtttcctgctgggcccctgcatatgcccctgagcctggggctgccacgtgtttaggaaacaaagtatgcgctactgtctgaaaacaaataaagcagatgcctttgttttcagtcaaaaaaaaaaaaaaaaaaaaaaaaaaaaaaaaaaaaaa

SEQ ID NO: 5603 - DNA, 1174 bp, Homo Sapiens
  NM_032346
tagtttgcgttttcacctggtcgcccggcggccatggcggccgttctgaagccggtgctgctgggccttcgagatgcgccggtgcacggcagccccacagggccgggtgcctggactgctagcaagctgggcggcattccggatgctctgcccaccgtggctgcgcccaggcccgtgtgtcagcgctgcgggcagccgctcgctctggtcgtgcaggtgtattgcccgctggaaggctccccgtttcaccgtctgctgcacgtgttcgcgtgcgcctgccccggctgtagcaccggcggtgcgcgcagctggaaggtgttccgctcccagtgcctgcaggtgccagagagagaggcgcaggacgctcagaaacagggaaacagccttgcagctgaggactggtgtgaaggtgctgatgactggggaagtgatactgaggaggggccttcaccacagtttaccttggattttgggaatgatgccagcagtgccaaagacgtagactggactgctcggctccaagacctccgcctgcaggatgctgtcctgggtgctgcccatcctgtgcctcctgggctgccgctcttcctgccctactacatctgtgttgcagatgaggatgattacagggactttgtcaacctggatcatgcccacagccttctgagggactatcagcagagagaaggcattgccatggatcagttgctttcccaaagccttcctaatgatggtgatgaaaaatatgagaagaccataattaaaagtggagatcagacgttttacaaattcatgaagcgaattgctgcttgtcaggagcagattttgaggtattcctggagtggagagccactctttttgacctgccctacatcagaagtcaccgagctcccagcctgcagccagtgtggaggccaaaggatatttgagtttcagcttatgccagcactggtcagcatgctcaagagtgctaatttaggtctttctgtggaatttggaacaattctagtttacacatgtgagaagagttgctggcccccaaatcatcagactcccatggaagaattttgtattatacaagaagacccagatgaattattgtttaagtagagcatttccttttattaatataaattaaaacaaatgtttacatccaaaaaaaaaaaaaaaaaaa

SEQ ID NO: 5604 - DNA, 1367 bp, Homo Sapiens
  NM_032349
aagtggcagcggcggggacggggtcagtgccaagatgtcgacggcggcggttccggagctgaagcagatcagccgggtggaggcgatgcgcctagggccgggctggagccactcgtgccacgccatgctgtacgccgccaaccctgggcagctcttcggccgcatccccatgcgcttctcggtgctgatgcagatgcgtttcgacgggctgctgggcttccccgggggcttcgtggaccggcgcttctggtcgctggaggacggcctgaaccgggtgctgggcctgggcctgggctgcctgcgcctcaccgaggccgactacctgagctcgcacctgaccgagggcccacaccgcgtcgtggcgcacctgtacgcgcggcagctgacgctggagcagctgcacgccgtggagatcagcgcggtgcactcgcgcgaccacggcctggaggtgctgggcctcgtgcgggtcccgctgtacacccagaaggaccgagtcggaggcttccccaacttcctgagcaacgccttcgtgagcacggctaagtgccagctcctctttgccctcaaggtgctcaacatgatgcccgaggagaagctggttgaggccctggctgcagccaccgagaagcagaagaaggccctggagaagttgctcccggcctcctcttgagggctgcctgagctggtggcaccctcccctgggccggaagactgggaattcctgctaagtgtggcttctagagtgtttgtgtgtaccccgcttctgactgcctagggcgagtgggcatcctgtcatcatctccactgtcccaagcagtcactaggtggcggccgggccagctggaacccagcccatcctctcaggcagagcagggtggtccgggcacactgggcctgcctctccagcctcaggatgctcttgtttattctgggctcagaccctcctcttgtacgtctcatcacagctggtagagacccaggagtgcctgattgtcccacaggggtggcgcacagctctgggaccactcagaagatgggatgtgtgggtggaggatgccttgtctcggtcagctcattcctgcctccttcctgagccagttcagggcctgggggagagccagcttggggtaggaagttaataatactgttaatttgggttgttgttggatttactttgctagattttctctttcaccacgtgtgaactgtgggtgaggtttcaaagtagcttcaccccacgtggcttggttcccagggacagtcagggcctcgggggcccagctatgtacaacgaagctgtcgaaggagaagacaataaagtcgctccgcagctgctctgtgtgtttctcaaaaaaaaaaaaaaaaaa

SEQ ID NO: 5605 - DNA, 1311 bp, Homo Sapiens
  NM_032350
gccggaaggcggcgtccgcgacgcagctgttcacgcttaggtgggcgacgtgggcgcaggtgggcgcaggatggcaaaacagaagagaaaagttcctgaagtgacagagaaaaagaacaaaaagctgaagaaggcgtcagcagaggggccactgctgggccctgaggctgcaccaagtggcgaaggagccggctccaagggcgaagctgtgctcaggcccgggctggacgcagagccagagctgtccccagaggagcagagggtcctggaaaggaagctgaaaaaggaacggaagaaagaggagaggcagcgtctgcgggaggcaggccttgtggcccagcacccgcctgccaggcgctcgggggccgaactggccctggactacctctgcagatgggcccaaaagcacaagaactggaggtttcagaagacgaggcagacgtggctcctgctgcacatgtatgacagtgacaaggttcccgatgagcacttctccaccctgctggcctacctggaggggctgcagggccgggcccgagagctgacggtgcagaaggcggaagccctgatgcgggagctggatgaggagggctctgatccccccctgccggggagggcccagcgcatccgacaggtgctgcagctgctctcctagtgggttcagcgcggggcggggccgctgcccagtgcagggctgcctcagaccacacagggtgcagctcctccggcggtgggggccgggttcaccagcagggcagcggctgagcaagggctttcagctcctccggtggtgggggccgggatcaccagcaccagagcctcgcaagggccccttccctcctccagaccctccttggccggtgacggctgtgacagtgatggcaggttcagtgccttcagcgcagagcgtggatgctctggaatcacccggacccctggccttggagggaccctccagccccaggaatctgctttggagggaaatgtctatttttctaccgggaatattttagagattggggcatgctggctcctcccgccagctgcaaacctgcaccttccgcctgattcccgatccccctgcgtgggccgcattcctggtcccctgcctgcgtccatcgaggggcctggctgtggcctgttttcctttgaccccacacagcgtcattgcgggtcatggggagcccctggtgggagcttgtggagtcggatcacgtacctgtgcagaaaccgcctctgtggctgcatttgaaataaaacccgacccagcagcagccgtgggtcctgctctgtaaaaaaaaaaaaaaaaaa

SEQ ID NO: 5606 - DNA, 1713 bp, Homo Sapiens
  NM_032351
gagcacgtgcgcgtcctcgctgctcacatttcggcggagggcgcgctccctggaaaattccactcctgtgctagctccaccctatgcggcttttctcctacccgacgctcttcactctcagctcccttcccggcggcctttgcgggaacaagatggcagcccccatacctcaagggttctcttgtttatcgagggttttgggctggtggtctcggcagccagttctggtgactcagtccgcagctatagttccagtaagaactaaaaaacgtttcacacctcctatttatcaacctaaatttaaaacagaaaaggagtttatgcaacatgcccggaaagcaggattggttattcctccagaaaaatcggaccgttccatacatctggcctgtacagctggtatatttgatgcctatgttcctcctgagggtgatgcacgcatatcatctctttcaaaggagggactgatagagagaactgaacgaatgaagaagactatggcatcacaagtgtcaatccggaggataaaagactatgatgccaactttaaaataaaggacttccctgaaaaagctaaggatatctttattgaagctcacctttgtctaaataactcagaccatgaccgacttcataccttggtaactgaacactgttttccagacatgacttgggacatcaaatataagaccgtccgctggagctttgtggaatctttagagccctctcatgttgttcaagttcgctgttcaagtatgatgaaccagggcaacgtgtacggccagatcaccgtacgcatgcacacccggcagactctggccatctatgaccggtttggccggttgatgtatggacaggaagatgtacccaaggatgtcctggagtatgttgtattcgaaaagcagttgacaaacccctatggaagctggagaatgcataccaagatcgttcccccatgggcaccccctaagcagcccatccttaagacggtgatgatccctggccctcagctgaaaccagaagaagaatatgaagaggcacaaggagaggcccagaagcctcagctagcctgatgacaaaaatgacttctagggtgaagcctgggtgatgaggctgctggaagctttgaagtctcccattcccctcatgctataaaaagaactacctttgttctctcccatcctgctcaggtcttttcagcagtctcatcatcagcaaccatgactgatgactgggccctagcaggtggcaggtataacatggccatggacactcttcttttttaaattttatgtctagcttctgagtctagatgaaagacagtatgtttcagagaacattggatatcagtttttcccacagcagggactgtgagagacaaccagcagcatcctctttgtaatcacagggcagggatcagagtttgaaatgaaatgttgtcagggtgttggaaaaattttggtgagttctgcacatttcccctggttcaggctgggcatggaccagccttcagatggcagaagtggaagatgagcctacttgtgagcgatgtgactttaaggaaatgaagactggggaagaataattagtgtttataagacatttaagaggccctttttcatatactgactcactgatgaatcagcatttgcattttatggaaaaatataaatccaaagaaataatttatcccttaaaaaaaaaaaaaaaaaa

SEQ ID NO: 5607 - DNA, 2604 bp, Homo Sapiens
  NM_032352
ggggaggagccaagggggcgagcaagctcggtggctgggtgggttggggcgttccgcgcgcccttcattgaagcggcggtggccgggctgggcgccggtagtggaaagcgacggcgcggctggaaaatgccagtccattcccgaggggataagaaggagaccaaccatcacgatgagatggaggtggactacgccgaaaatgaggggagcagctccgaggacgaggacactgagagctcgtcggtctccgaggatggagatagctcagaaatggatgatgaagactgtgaaagaagaagaatggaatgtttggatgaaatgtccaatcttgaaaaacagtttaccgatctcaaagatcaactttataaagaacgattaagtcaggtggatgcaaaactacaagaagtcatagctggaaaagcaccagaatacttggaaccgctggcaactttacaggaaaatatgcaaattcgtacaaaggtagcaggaatctatagagagctctgcttagaatctgtaaagaacaaatatgaatgtgaaattcaagcttctcgccagcattgtgagagcgaaaagctgttgctatatgatacagtccagagtgaactagaggagaagataagaaggcttgaagaggataggcacagcattgatattacctcagagctgtggaatgatgagcttcagtcaagaaaaaagaggaaggatcctttcagtcctgacaaaaagaagccagttgttgtttcaggtccatatatagtttatatgctacaagatcttgatattcttgaagactggacaacaattaggaaggcaatggctacattggggccacacagagtgaaaacggaaccacctgtgaaactggaaaaacatctgcacagtgctagatctgaagagggaagactatattatgatggtgaatggtatatacgtggacaaacaatatgtattgataaaaaagatgaatgtcctacaagtgctgtaattacaacaattaaccatgatgaagtttggtttaagaggcctgatggaagcaaatctaagctttacatttcacagctacagaaaggaaaatattcaattaaacattcataatcatgatttaagtgttatctaaatttaccttattagtgttaccaaatgtaagtgccatgagagtaaaaaaatgtattcaataacttaatattctcactgaatcatgagagaatgtgtatttgtaggtagtactctaaatagatctcattgatatgttattaaaagaaacagtaataaaaattttatcacgatccttacgttgatttgcctcttaggtccgatgaccaataggtattctgtatatggtaggggtttctttctaaacatttttctttggttttaaaaaaagttatgcaaatttgtcttatctttagtaaactatgactacatttatctgcaatttttaaaattttccatatctttgtcattcattgtgtgtttgtaaataaggccgatagaatgtttcctataaatggtttgtactagtacattagtgttaaaccagaactgaaatttaaacatatatatatatgaggatgtatatatggcatcatcagcttatttagaactgatggccataccttacaatcttgttttacccaaaattaagctattggggttgaaagctaaaaggagcacttttgtagaatagcaacttttcttttcctctttcttgattgtatggtggggtggtgacctatttttacaaattatacctaatgagtaaaattagtgtaaagtgataacatgcttctacctgtatttctagtgaccctttagcggcaggtatttatacctggtatttatgatgcagtatataagtggtgaacaataactgacagtattgtgcttgctgtacatgtctggtcttttgaaacagattttagtaagcattttccagaggtaaaactgtgtccttattctaattttattcctagggcaaagtagacagggattatttccttgaatctatttccaaattaatatttttttctttggtatttctacactttaaggccatttggtgcaatttagaaagtgttggcctcccttccgctagccacattcaaaattaacttccaaaacctcaggaacagtacaaagaattgaaaccctcaatatggcagcacagccggctgtagtgtatatttagggtacaccaaatcaggtattcctggtggtcttgtgcactttaatttctgttacaatgagttaagaggatgaggaagaaatctacttattaacacttactgcagaaatgtctgcattattccgtttgttttcttattattttacctctccaaacatcttcctgtgcagatcactacttcatagttgccaaattttaaaacacttaactgctgaaattcagtgtcagcaaagtgatattacgttgttctgtttctaattaaccttagcaaatgtacataatgtcaaaacccaatagtatttgacagtacttatgtatacaatgtttgataagcatttttaataagatttgtatttttaaatttagtatataataaaaagatgtgtttcagtgtgaaaaaaaaaaaaaaaaaaaaa

SEQ ID NO: 5608 - DNA, 1122 bp, Homo Sapiens
  NM_032353
gtccttagccggtagcttccgggtttcctgggctactacgatggcgatgagtttcgagtggccgtggcagtatcgcttcccacccttctttacgttacaaccgaatgtggacactcggcagaagcagctggccgcctggtgctcgctggtcctgtccttctgccgcctgcacaaacagtccagcatgacggtgatggaagctcaggagagcccgctcttcaacaacgtcaagctacagcgaaagcttcctgtggagtcgatccagattgtattagaggaactgaggaagaaagggaacctcgagtggttggataagagcaagtccagcttcctgatcatgtggcggaggccagaagaatgggggaaactcatctatcagtgggtttccaggagtggccagaacaactccgtctttaccctgtatgaactgactaatggggaagacacagaggatgaggagttccacgggctggatgaagccactctactgcgggctctgcaggccctacagcaggagcacaaggccgagatcatcactgtcagcgatggccgaggcgtcaagttcttctagcagggacctgtctccctttacttcttacctcccacctttccagggctttcaaaaggagacagacccagtgtcccccaaagactggatctgtgactccaccagactcaaaaggactccagtcctgaaggctgggacctggggatgggtttctcacaccccatatgtctgtcccttggatagggtgaggctgaagcaccagggagaaaatatgtgcttcttctcgccctacctcctttcccatcctagactgtccttgagccagggtctgtaaacctgacactttatatgtgttcacacatgtaagtacatacacacatgcgcctgcagcacatgcttctgtctcctcctcctcccacccctttagctgctgttgcctcccttctcaggctggtgctggatccttcctaggggatgggggaagccctggctgcaggcagccttccaggcaatatgaagataggaggcccacgggcctggcagtgagaggtgtggccccacaccgatttatgatattaaaatctcaactcccaaaaaaaaaaaaaaaaaaaaaa

SEQ ID NO: 5609 - DNA, 2244 bp, Homo Sapiens
  NM_032355
gcggcgccggatgaggcaatcgcggacccgggtcaggacctgcccacggctctgctgggactaggagcccagaaccagtccctcggcgccgcaggcggccaaacgctaaggactacatttcccacaatgcaccccgggggcgggccgagtcgggctgagcggctggagctgggccttggccgcgagaggccggcgaaagctatcttcctgcaccggcggccgggtgagggcggtgggagggagcggtgcctgcgctgtggccatgtctgtgtacgcagggggccggggccccgcgaagctgtgccctcaggccggccccggccggacacccttacccctccatgggtccggcagagggcagtgaccggcaccttctgtgcgtcctggactcctctgagaaacaggagagctcaaaggatggctactgacatgcagaggaagagaagcagcgaatgccttgatggcacattgactccttctgatggacagagtatggagagagctgagagccccacaccaggaatggcccagggaatggagccaggtgcgggccaggagggtgccatgttcgtccatgcccgttcctacgaggacctgactgagtcagaggatggggcagcttctggggacagccacaaggagggtaccaggggtcccccgccgctgcctacagacatgcgccagatcagccaggactttagcgagctaagcacccagctgacgggtgtggcccgggacctgcaggaggagatgctgccaggaagctctgaggattggctggaacccccaggggcagttgggcgaccagccacagagccccccagggagggcacaaccgagggggatgaggaggatgccacggaggcatggcgcctgcaccagaagcatgtctttgtgctgagtgaggcagggaagcctgtgtactcccgctatgggtctgaggaggcactttccagcactatgggtgttatggtggccctggtgtccttcctggaggcagacaagaacgccatccgctccatccatgcagatggctacaaggtagtattcgtgcgccggagcccgctggtgctagtggcggtggctcgtacgcggcagtcggcacaagagctggcgcaggagctgctctacatctactaccagatcctaagccttcttaccggtgcgcagctgagccacatcttccagcagaagcagaactatgatttgcggcgcctactctcgggctcagagcgcatcaccgacaacctgctgcagctcatggcacgagaccccagcttcctgatgggggcggcacggtgcctgcccctggcggcggccgtgcgcgacactgtgagcgccagcctgcagcaggcgcgtgcgcgcagcctggtcttctccatcctgctggcccgcaaccagctcgtggcactcgtgcgccgaaaggaccaatttctgcaccccatcgacctgcacctgctcttcaacctcattagttcctcctcgtcctttcgcgagggcgaggcctggacgcccgtgtgcctgcccaaattcaacgcagccggcttcttccacgcacacatctcttacctagagcctgacactgacctctgcctgctgcttgtctccactgaccgtgaggacttctttgcagtctctgactgccgccgccgcttccaggagcgccttcgcaagcgcggagcccacctggccctgcgagaggcactgcgcacaccctactacagcgttgcccaagtgggcatccctgacctgcgtcacttcctctataagtcaaagagctcgggactcttcaccagccctgagattgaggccccatacaccagtgaagaggagcaggagcggctgctgggcctctaccagtacttgcacagtcgtgcccacaatgcctctcgcccactcaagaccatttactacacgggccccaacgagaacctcctggcctgggtgacaggcgcctttgagctctacatgtgttacagccccctggggaccaaggcgtcagccgtcagtgccatccataagctgatgcgctggatccgcaaagaggaagaccgcctcttcattctcacgcccctcacctattgatgggaatgtgtgcgggctcagccttcctggacacactaggtgtgggaagccataggagcctccagatgggggctggcctctcttgcccagccagcgggcagggactgtgggttggtgaatgcattaaagtgctttggggaagacaaaaaaaaaaaaaaa

SEQ ID NO: 5610 - DNA, 1023 bp, Homo Sapiens
  NM_032356
gcagagaacgaatacgctccgttttaattcagtggcctgggctacatgggatatttaggacagactatctctctgagacagaaaaacaagggaggaggcagtatgaaagaatgtattctcgctaaattccagtttctaaaggatgtgtaagaaaccagaggtaaaggtctcgcgatatcttaagacatccggcgtagtacgcttcagtgagccacagcgctagagaagtaggagaagctcgcgagatctgtgccgttgccgaggagactaggagggggaggagaggggatctcgcgaaaggaaagaggtcgggagcgctcgcgagatctcggaccacccaacctgaaaggtgcttaggaagttgaaaggcccagaggaggcctccgggcaaatggccggagctggaccgaccatgctgctacgagaagagaatggctgttgcagtcggcgtcagagcagctccagtgctggggttagcacgggctctggttctgggactgaggggcagtcaagcagcaagatggagggggtggggaactgcagctcccggcagcctctgggctttgtgtgagtgccccgcgggctgccgggagctgtggttccgcgggcgggcagcctgggctgcgcggtctgagcgcttgttacaccccgcgcaggattcggacggagagcgcgaggactcggcggctgagcgcgcccgacagcagctagaggcgctgctcaacaagactatgcgcattcgcatgacagatggacggacactggtcggctgcttcctctgcactgaccgtgactgcaatgtcatcctgggctcggcgcaggagttcctcaagccgtcggattccttctctgccggggagccccgtgtgctgggcctggccatggtacccggacaccacatcgtttccattgaggtgcagagggagagtctgaccgggcctccgtatctctgaccacgatggcgcttacctttcagacttcattaaacttatgaccgaaaaaaaaaaaaaaaaaaaaaaaaaa

SEQ ID NO: 5611 - DNA, 1644 bp, Homo Sapiens
  NM_032357
acttgggggctaattggagaaaccagttgattggttgcttccgtgctgcttctctaagggcgcttgcccttaaagaagctgacccagaggccttggtgctgccggcgtggggatccccagatgggaacgccccttgatggaggatctcgtgtgcctattggctgtcctgccaaactgcggagggtgacaaggaagaaggtggctccagatctggaggtgtgtccatggcggcgcttgacctgcgagcggagctggattcgctggtcctgcagctgcttggggacctggaggagctggaggggaaacgaacggtgttgaacgcccgggtggaggagggctggctctcgctcgccaaggctcgctacgcgatgggcgccaagtcggtagggcccctgcagtatgcttcccacatggagccccaggtctgcctccacgccagcgaggcccaggagggactccagaagttcaaggtggtgagagctggtgtccacgccccagaggaggtggggcctcgcgaagcaggtctgcggaggcgcaagggccccactaagaccccagaaccggagtcctctgaggcccctcaggaccccctgaactggtttggaatcctagttcctcacagtctacgtcaggctcaagcaagcttccgggatggcctgcagctggccgcagacatagccagcctccagaaccgcattgactggggtcgaagccagctccggggactccaagagaaactcaagcagctggagcctggggctgcctgacatgcgcgcaaagaggcagggcagcgagcacagctgttctccgacatggctacgtgatctcaggccttcttccttcacaattagctcttgcccctaccccacgccagctaatgccccttctgtgtccctgctctgcatgtttccattttccttaggtgtgaagtttgaagaggcaaacagtaattttgaaagccactactttgaaaccattctaaggcctgagttcccataggacacactcacataggcaggtgcacgttagtcaacaattggaactgcctcttggatcactcagctgtgctttcatggctggatgatggaacactgtgcgaagagagatgggggccaggaagtagcgcttcatgcttagtacatcctccaaattgtctttgctggaggagaaaaccgtactcagccaaaagatcaggacaatatgacttgagtccacaaggacacaaacacctgagtagctgggcagcccttggcagggtctaagccaggaagtaaaaatgatctggcctagatatttaagggaactctaggaagaggcctaggtttttaaaatcctgtctctttgtcttaccataagaggctgggcctctcttcatttttttgaagggccacttgtgttttctgttctgggaacttcattcatttttctactgggttgttgatctttgcagtaatttctaggagctgtttatgtttggaggtaattggtcctttgtccatatatatgagatgtaagtcttattttccagtttatctttttgcttattttttttgactttttattgtaaaataaaacatcaaactgcacagaacagttgaatagcttaatgaataactacagtaaaagctatggtaaccactaccc

SEQ ID NO: 5612 - DNA, 2386 bp, Homo Sapiens
  NM_032358
aaacttcttcgcgattgcacggattcagggacgctcagtggcgccgcgccgctccttggtttgacttttgtttttcagttgcgttccctgactcggagtcttagtgtgtcgttatttggacaagaggcacattgacccaatttggagacgtattttggaaggaggtgtgaaaaagacagcatgaactttaccccaacacacacccctgtctgcagaaagcgaacagttgtctccaaacgtggtgttgccgtcagtggtcccaccaagaggaggggaatggcagattcactggagtcaacccccttgccttcccccgaagatcgtctggccaaactccatccttctaaggagctcctggaatattatcaaaagaagatggctgagtgtgaggcagaaaatgaggacttgctgaagaaactggaactctacaaagaagcttgtgaaggacagcataaacttgaatgtgatttgcagcagagggaggaagagattgctgaattgcagaaagctctaagtgatatgcaggtctgcctcttccaggaacgggaacatgttttacgcctctactcagaaaatgaccgactgagaatcagggagctagaagacaagaaaaagattcagaatctcttggctcttgtgggaacagatgctggagaagtgacctatttttgtaaggagcctcctcacaaagtcaccattctccaaaagactatccaggctgtaggtgaatgtgagcagagtgaatcttcagctttcaaagcagatcctaaaataagcaaaagaagaccatcgagagagagaaaagaaagttctgagcattaccaaagagacatacagacactcatcctacaggtggaagcactgcaggctcagctgggagagcagaccaaactttctcgagaacaaattgaagggctcatcgaggacagacggattcaccttgaggaaatacaagttcagcaccagagaaatcagaacaaaatcaaagagctaaccaaaaatcttcaccacacccaagaactgctctatgagagcaccaaagattttctgcaactcagatctgaaaaccaaaataaagagaagtcatggatgcttgaaaaagataatttgatgtcaaagattaagcaatatagggtgcagtgtaagaagaaagaagataaaattggaaaagtgttgcccgttatgcatgagagtcaccatgctcaaagtgaatatattaagtccctaaaagataagttagtacaagagaaaaagctgtccaatatgtaccaagagcagtgcatttccttagaagaagaacttgcccgaattcgtgaggaagagggaatgaggagagagatcttcaaggatcgcactaacaagatggggaagcgtttacagataatgacaaaacgctatgaggcattggagcgtcgacgtatcctggaagtagaaggctttaagacagatattaaagttctccgacagaaactgaaagacttggagcaaatgttgtataaggcaacagttaatgcccgggcaaaccaggatcttgcccttctgtgtgaggtccgtgacagcaatagacgggcacataagatacaaggagaactgaagaatcttaagtcgaaagtgtttggtctggagaatgaacttagactctgttaatgtctacttttggaaatggcccccatttagaagaggtgtgcttcttgaaacctgaggacaaggtcatctgctgccagaaaatgtaaacctgagttgactagagtggtggtattcattattgtaaagacagcttgaagaatcggggaccactaggaaagcttttcttgcatactcagcttgctttatcatttttgctgtccttttaacacttgcgaggagtaggggcctggtcctgaatgacttggaggctttcattatttatcctgtctgtattgaccggtttttgttttttcagaaggcagtgatgatgaaaacttaggaagaaggtattttgcaataagcttggctgagtgtccatgggaagaatactttccctaaagagagagaagcactcacagaggctgcctttctcctgagctcggggagaaggcagcacatcacaacctgtcacattgaaataggcgctcattctgctatttcaccttccgtcctgagcagagcctgaattacgtttttgggcaatttcatggtgtttcaccagagggcgctagagactcaaacgaaatgtccatctggaaagattcgggagacactttgccgaggggatgaagctgagatgatgcttgtatggaaagtttgatatttttatcagtcacatggcttttgaaaaatgatgtatatattttaaattaactattttcaataaaatatttcactcaaaaaaaaaaaaaaaaaaaaa

SEQ ID NO: 5613 - DNA, 1230 bp, Homo Sapiens
  NM_032359
gacgtcatcgccgcggggcggaggcgacagtgtctagcgggagctccgcgtgtagctacgccggccgcctggctttgagacaacgtgattctccgcagctggtcgcctacccgtgatgttctgcccacgtcgagacctgagctgaaatggcagacgatctcggagacgagtggtgggagaaccagccgactggagcaggcagcagcccagaagcatcagatggtgaaggagaaggagacacagaagtgatgcagcaggagacagttccagttcctgtaccttcagagaaaaccaaacagcctaaagaatgttttttgatacaaccaaaggaaagaaaagagaataccaccaagaccaggaaaagaagaaagaagaaaattactgatgttcttgcaaaatcagaaccaaaaccagggttacctgaagacctacagaagctgatgaaggactattatagcagcagacgcttggtgattgaattagaagaactgaacctgccagactcctgtttcctcaaggccaatgatttgactcacagtctttcctcatacctaaaagaaatttgtcctaagtgggtaaaacttaggaagaaccacagtgagaagaaatcggtcctgatgctgatcatctgcagctcggccgtccgagccctggagctcattaggtcgatgacagcattcagaggagacggcaaagttataaaattatttgcaaagcacataaaggtccaggcgcaggtaaagttgctggagaagcgtgtggtgcacctgggtgtaggaactccggggagaattaaagaacttgttaaacaaggtggccttaatttgagccccttaaaatttctggtttttgactggaactggagagatcagaagttgaggagaatgatggacattcccgagataagaaaggaggtattcgaacttctggaaatgggagtgctcagtctgtgcaagtcagaatccttgaaactgggccttttctaagtctgtgtcctaatgaagattccagttttcacagtagaagttgcatcttatttaatgactctgatacattgcaagcactcagtaaatatcagcaaatagtttatgttaattgtgtcaacagatggatcactggaatgtggggattctgaaacagaaatgaaactgtccttttgacaactctcttatataataaagtatcaccggcttgtgtatgatccttgttgagcggaccgtgtttttctgt

SEQ ID NO: 5614 - DNA, 1617 bp, Homo Sapiens
  NM_032360
ttcccgcgactccgctctcaccgctacactaccacacaaacggcctccttcccccacccccgggggcccatcccggtggcgggctccggagctcgggactgctaatttcagcgaaacgattaaaagacgcccctacagctgacggcactttctctcctccggcagggaaggacgtccagcgtagcgtcgcccgcgcttccccgccggcgcagagcaggcctcacagaatcgcacgccgctggcacgcacgccgccccgcccccacggcccagcgccagccgcgccccgcgctcgcacgcatcccggcctcactgcccctcgactcctgttccgttggaggggcctgaggcgagcctgagcgcgctgttggccggagggaagccggaggagaccgggtcgactgggcagagcggcagagggtcgaggagcctgctctgcacgcccagggagtagaagtgggcagggagcagggtcacgtgagggagcgcgccgcgactgagcttgggtccgactggagctcaggctcgcgacccagactggtgggccaggcctccaagccggccttacacccaatccaaggaggacagaccggacacagagggacggagcgagcaaggagacatggcttcatcattcctgcccgcgggggccatcaccggcgacagcggtggagagctgagctcaggggacgactccggggaggtggagttcccccatagccctgagatcgaggagaccagttgcctggccgagctgtttgagaaggctgccgcgcacctgcaaggcctgattcaggtggccagcagggagcagctcttgtacctgtatgccaggtacaaacaggtcaaagttggaaattgtaatactcctaaaccaagcttctttgattttgaaggaaagcaaaaatgggaagcttggaaagcacttggtgattcaagccccagccaagcaatgcaggaatatatcgcagtagttaaaaaactagatccaggttggaatcctcagataccagagaagaaaggaaaagaagcaaatacaggttttggtgggccagttattagttctctatatcatgaagaaaccatcagggaagaagacaaaaatatatttgattactgcagggaaaacaacattgaccatataaccaaagccatcaaatcgaaaaatgtggatgtgaatgtgaaagatgaagagggtagggctctacttcactgggcctgtgatcgaggacataaggaactagtcacagtgttgctgcaacatagagctgacattaactgtcaggacaatgaaggccaaacagctctacattatgcctctgcctgtgagtttctggatattgtagagctgctgctccagtctggtgctgaccccactctccgagaccaggatggctgcctgccagaggaggtgacaggctgcaaaacagtttctttggtgctgcagcggcacacaactggcaaggcttaatcaaaagactggaaaactgcagtctgtaatagcataaggcttccattatgaaagaaaactacaaaaataatacttcttttccacccgtctttggtatgtattggctaataaaatcagttctgtggaactgggattttgaagtctcaa

SEQ ID NO: 5615 - DNA, 1842 bp, Homo Sapiens
  NM_032361
tttagaaggttagtgttggttcttttattcgattaaacaggaatacacatatatctaccaaagaataggtaagggagaaataagaacactaaaaaaactcggaatcgttaagtgtgaagcatatttggagttaaaagaaccaaatattactaagtaagcagacgcgggcacgcgctgcataccgggatttgtagtcccttccggggcggggtacagcgcgcctgcgcagaggggccgtcgctcttccgggcgcatgcgtgcggcagcggcgccaggactgactgcgccgtggaggctgctgcagtgttgtgagttggaagctggggagctcggcatggcggtccccgctgcagccatggggccctcggcgttgggccagagcggccccggctcgatggccccgtggtgctcagtgagcagcggcccgtcgcgctacgtgcttgggatgcaggagctgttccggggccacagcaagacgcgcgagttcctggcgcacagcgccaaggtgcactcggtggcctggagttgcgacgggcgtcgcctagcctcggggtccttcgacaagacggccagcgtcttcttgctggagaaggaccggttggtcaaagaaaacaattatcggggacatggggatagtgtggaccagctttgttggcatccaagtaatcctgacctatttgttacggcgtccggagataaaaccattcgcatctgggatgtgaggactacaaaatgcattgccactgtgaacactaaaggggagaacattaatatctgctggagtcctgatgggcagaccattgctgtaggcaacaaggatgatgtggtgacctttattgatgccaagacacaccgttccaaagcagaagagcagttcaagttcgaggtcaacgaaatctcctggaacaatgacaataatatgttcttcctgacaaatggcaatggttgtatcaacatcctcagctacccagaactgaagcctgtgcagtccatcaacgcccatccttccaactgcatctgtatcaagtttgaccccatggggaagtactttgccacaggaagtgcagatgctttggtcagcctctgggatgtggatgagttagtgtgtgttcggtgcttttccaggctggattggcctgtaagaaccctcagtttcagccatgatgggaaaatgctggcgtcagcatcggaagatcattttattgacattgctgaagtggagacaggggacaaactatgggaggtacagtgtgagtctccgaccttcacagtggcgtggcaccccaaaaggcctctgctggcatttgcctgtgatgacaaagacggcaaatatgacagcagccgggaagccggaactgtgaagctgtttgggcttcctaatgattcttgagaggaggttgtagggagaggaggccccggcagaggtcttccttcatgtggttagtttggtctgttctctcggagttggtgggcaccctaaatatttgtaagttggtataaattgtaaacgtctctggtcaggctgcgcatttcattcttttgctttgtctgtgtattagctctttccattctttgcccccagcatgagttaactcgcgtggactctgcagtgcgagtagtgaccccaccataccttgtcctctggacctcctgtcttctctgcttctgggtgcatggtagactttgtggcatttgatacaacttggacaatacctagtttggagggaggggaatggaagggcatggaagtttttttaaataattaaaaatatatatatataattttgagaattgagcatttaataaactgacttttgttattatggaaaaaaaaaaaaaaaa

SEQ ID NO: 5616 - DNA, 3330 bp, Homo Sapiens
  NM_032364
tggaagtaggcccaggtcgccggcggccgcggggacggaaggcggaagcagagcgtgagcgggaggcggagccgggagagcggctctcgtagctcaccctggccccaggccgggcggctcgagggggaggagttaccgccgttcttcggcatcagaacacaccatgatggctgtgacctaagaccctcaggaagccccggggtcatggcccagaagcaccccggagaaagagggttgtatggagcccaccacagtggtggtgcctccctcaggactttaggaccctccgtggaccctgaaataccttcattctcaggactcagggactcagcagggactgctcctaatggtacccgctgcctcacagagcactctggtcctaagcacacacagcacccaaacccagcccattggttggacccaagccatggccccccagggggtccaggaccacctagagatgcagaggaccctgatcagagtgagacgtcttcagaagaagaatcaggagtggaccaggaactctcaaaagaaaacgagactgggaaccagaaggatgggaactcttttctttccattccatctgcttgcaactgccagggaacacctggaattccagaagggccttactctgagggaggaaatggttcttctagcaacttttgccaccactgtacctctccagctttgggggaagatgagttggaagaggaatatgatgatgaagaatctctcaagttccccagtgatttttcacgtgtgtccagcggaaagaaacccccatcccggagacagcggcaccgctttccaacgaaggaggatactcgggagggtggacgtagggatcccaggtcccctggtcgacatcggctgggtcggaaacgaagtcaggcagataagcgcaaaggcctgggattgtggggagccgaggaactatgtcaacttggacaggcaggcttttggtggctgattgaactgctggtattggtgggagagtacgtagaaacttgtggccatctcatctatgcctgcaggcaactgaaaagcagtgatttggacctttttcgagtttggatgggagtgtggacagggcggttagggggctgggcccaggtcatgtttcagtttctaagccaggggttttactgtggagtaggactgtttactcgttttcttaagctgctgggtgctttgctgctcctggctctggccctctttttgggctttctacagttgggatggcggtttctggtgggactaggtgaccggttaggctggagggataaggctacctggctcttctcttggctggattctccagccttgcagcgttgcttgactctgctgagagatagcaggccatggcagcggctggtaagaatagttcagtggggctggctggagttgccttgggtcaagcagaatattaataggcaggggaatgcacctgtagctagtgggcgctactgccagcctgaagaggaagtggctcgactcttgaccatggctggggttcctgaggatgagctaaaccctttccatgtactgggggttgaggccacagcatcagatgttgaactgaagaaggcctatagacagctggcagtgatggttcatcctgacaaaaatcatcatccccgggctgaggaggccttcaaggttttgcgagcagcttgggacattgtcagcaatgctgaaaagcgaaaggagtatgagatgaaacgaatggcagagaatgagctgagccggtcagtaaatgagtttctgtccaagctgcaagatgacctcaaggaggcaatgaatactatgatgtgtagccgatgccaaggaaagcataggaggtttgaaatggaccgggaacctaagagtgccagatactgtgctgagtgtaataggctgcatcctgctgaggaaggagacttttgggcagagtcaagcatgttgggcctcaagatcacctactttgcactgatggatggaaaggtgtatgacatcacagagtgggctggatgccagcgtgtaggtatctccccagatacccacagagtcccctatcacatctcatttggttctcggattccaggcaccagagggcggcagagagccaccccagatgcccctcctgctgatcttcaggatttcttgagtcggatctttcaagtacccccagggcagatgcccaatgggaacttctttgcagctcctcagcctgcccctggagccgctgcagcctctaagcccaacagcacagtacccaagggagaagccaaacctaagcggcggaagaaagtgaggaggcccttccaacgttgatgccccttctctttcctcaaatcaatgtcagggagtcaaaagggctgtagcacaggatggagtttgatttatccctcctcccccaacacctaggaactgaatctttttctttttattttttgagatggagtcttgctctgttgcccagctggagtgcagtggtgtgatctcagcttactgcaacctctgtctcccgggttcaagcaattctcccatctcagcctcctgagtagctgggattacaggcacacaccaccacacctggcccagctaattcttttttgtatttttagtagagacggggtttcaccatgttgcccaggctggtctcgaactcctgagctcaggtgatccacccgtcttggcctcccaaagtgctggattacaggcataagccactgtgcccggcctgaatcttgtcttttgacaataccaaagaaatagggggtagctagagtaaagaacctagggcctggacctgggctggacagtgtatccctttaggtgtgggaactgggtatttccctggggtctgtatgcctttgtcttgtcatttgcttttagggcagatgacactttttcccacccttttaaagctacaagtctatcttctttcttgacccatttcaggagggagccctctcctttatcctgatataatatttaaaagagaacaagaaagcatgtagccctaatgataggagattatcgcatagagttcagagactggaaactgaattttccctcgactttcactttgtgggtaaatcacccaattttaggctcttttctgcaaggatggccaaaattaatcatttttaaaaagtagattcatgcccactgcccttgggtgagggggaagaatacgggggttcccagaagcccccatgtgatccaagggtttgtattttttttttaagtttgttcatatttgtatgtacatgactatttaaagccaggggattatctttctataaatgtataactggcaacctgtatcttccctctttgttgccc

SEQ ID NO: 5617 - DNA, 1711 bp, Homo Sapiens
  NM_032369
tgggccggacctgctctgaggctcccagtcgcagcggtgaccgcgggcgggtggggcgccgggtgaagaaaccaagacgcagagaggccaagccccttgccttgggtcacacagccaaaggaggcagagccagaactcacaaccagatccagaggcaacagggacatggccacctgggacgaaaaggcagtcacccgcagggccaaggtggctcccgctgagaggatgagcaagttcttaaggcacttcacggtcgtgggagacgactaccatgcctggaacatcaactacaagaaatgggagaatgaagaggaggaggaggaggaggagcagccaccacccacaccagtctcaggcgaggaaggcagagctgcagcccctgacgttgcccctgcccctggccccgcacccagggccccccttgacttcaggggcatgttgaggaaactgttcagctcccacaggtttcaggtcatcatcatctgcttggtggttctggatgccctcctggtgcttgctgagctcatcctggacctgaagatcatccagcccgacaagaataactatgctgccatggtattccactacatgagcatcaccatcttggtcttttttatgatggagatcatctttaaattatttgtcttccgcctggagttctttcaccacaagtttgagatcctggatgccgtcgtggtggtggtctcattcatcctcgacattgtcctcctgttccaggagcaccagtttgaggctctgggcctgctgattctgctccggctgtggcgggtggcccggatcatcaatgggattatcatctcagttaagacacgttcagaacggcaactcttaaggttaaaacagatgaatgtacaattggccgccaagattcaacaccttgagttcagctgctctgagaaggaacaagaaattgaaagacttaacaaactattgcgacagcatggacttcttggtgaagtgaactagacccggaccagctcccctcaaaaagaagacactgtctcatgggcctgtgctgtcacgagaggaacagctgcccctcctgggccgcttggtgagaggtttggtttgatacctctgcctccctcctgccagcatggattctgggtggacacagccttgtggaaggtccagtaccaccaagagctgcccatccactcccaccccacactgtatcaaatgtatcacattttctcatgttgaacactttagccttaattgaaaatgagcaacaaagctggacaattgctagttgtatataaaatttaatctcaccgaatgtacagttttcaaatttcacgtgtatattaaggaactgatgcatctgagcattctgaaagaaagaaaaagaagctactttagctgccaccccattctagaaaagtctcttattttcaagctgttctaaatagcttcgtctcagtttccccaaaaggggtacccaggcccctcctctgtgtgccccagctgcatcagccagcttctaggtggctccattgttttctgccacctgacaacatttttcctcaattactgtacaactactgtataaaataaaacaactactgtataaaataaactctctcttttccctggaccctcctactgtattctttcctctgtggcacccataccagcctgccagtcggagagcaagctagctacagtgcctggtgcagaaatggcaatt

SEQ ID NO: 5618 - DNA, 2389 bp, Homo Sapiens
  NM_032375
agctaaggccatgttaatacggggctgtcccatctctctgcggggcgcgacagctggaagagccgaacggataagagaagaggaggtgagaggagctgtacaccacaagaggcactgagggactcaggataacgggatgaagccgtcagtgcccccagaaacgaagcggccccggacgaatttctgagtcaccgtcgcgagaaagcgggctgagccgccattttgaagcctggcaaaccgaagcaagaaatgctgccgtgttggatctttgccagccttcgtgccgaatgggagcaggttggagggagggagagccaatatacactatgggctgattaagcccggttggctgccatgttgttaacgagcaccgatttcctctacttttgtcgaagaagtttattgtgggtcagggacgtcaggtcgcttgccttcgtttactgtggtcatgattgagcatatgaggacggccattattgttgggggcaaatggaaatgctctaggcggggccatttttcttaggggcaagctgtcgtcacccttgtcaactggttcggatgaagcccctgtggccgccatcttgatctcgggcggccccgataagggaggcggagtgtgcggagaggaggcggggcaactgcgcggacgtgacgcaaggcgccgccatgtcttttgagggcggtgacggcgccgggccggccatgctggctacgggcacggcgcggatggcgtcggggcgccccgaggagctgtgggaggccgtggtgggggccgctgagcgcttccgggcccggactggcacggagctggtgctgctgaccgcggccccgccgccaccaccccgcccgggcccctgtgcctatgctgcccatggtcgaggagccctggcggaggcagcgcgccgttgcctccacgacatcgcactggcccacagggctgccactgctgctcggcctcctgcgcccccaccagcaccacagccacccagtcccacacccagcccaccccggcctaccctggccagagaggacaacgaggaggacgaggatgagcccacagagacagagacctccggggagcagctgggcattagtgataatggagggctctttgtgatggatgaggacgccaccctccaggaccttccccccttctgtgagtcagaccccgagagtacagatgatggcagcctgagcgaggagacccccgccggcccccccacctgctcagtgcccccagcctcagccctacccacacagcagtacgccaagtccctgcctgtgtctgtgcccgtctggggcttcaaggagaagaggacagaggcgcggtcatcagatgaggagaatgggccgccctcttcgcccgacctggaccgcatcgcggcgagcatgcgcgcgctggtgctgcgagaggccgaggacacccaggtcttcggggacctgccacggccgcggcttaacaccagcgacttccagaagctgaagcggaaatattgaagtccagggagggagcgccccgggccgcgtccgccccgtcccacactacgcccccgccccactcccggggcctgctaatctgaggccgatccgggaccggcctccttgcgtctcccattcccaagattgtcccgcctctgccaatccccgccgtccttccagcccacgacctgccgcgccgaggagcggcatctgtcccgtttcccgattgggtctgtcgtctctctccgcctagcgacagattccttctattaagggattggctcgctgagttctaagctctaaatgggtcaactcctttgttttccgcctagcgacaagggatttgctcgcacggcattggctccatcccctagtcgctggacagctctttttttgattggctcaaatcctgtaaagggcttgaccagtctctacatagtcaccgtccgcttttcctgagttctccctcccaattggctccagcttcctgggggcgtggccaagccctcctcttcccagaattggcccggggccttcaatttacgttctttacactacggggactggggtcgtctttgcccacgtcccgacaacttgttccctgaccccctcagggatggccccaaactgtccctgcctctggcaccccctttcattggttccatccatccccacaacagcctgccaatcgaagcccgtccctgcatccaggatggtaccagctcccgcccctcgccccccacctccacaggtgccttaaagggccctcgtccacccaaggtggggggcaggggccctcactctccggccctggtgtgggggagagagtgaggggttgggggatcggcagttgggaggggcgctctgagattaaagagttttacctctgagataaaaaaaaaaaaaaaaa

SEQ ID NO: 5619 - DNA, 1563 bp, Homo Sapiens
  NM_032376
ccgcagcggactgccctttcccaagatggcgtcgaagataggttcgagacggtggatgttgcagctgatcatgcagttgggttcggtgctgctcacacgctgccccttttggggctgcttcagccagctcatgctgtacgctgagagggctgaggcacgccggaagcccgacatcccagtgccttacctgtatttcgacatgggggcagccgtgctgtgcgctagtttcatgtcctttggcgtgaagcggcgctggttcgcgctgggggccgcactccaattggccattagcacctacgccgcctacatcgggggctacgtccactacggggactggctgaaggtccgtatgtactcgcgcacagttgccatcatcggcggctttcttgtgttggccagcggtgctggggagctgtaccgccggaaacctcgcagccgctccctgcagtccaccggccaggtgttcctgggtatctacctcatctgtgtggcctactcactgcagcacagcaaggaggaccggctggcgtatctgaaccatctcccaggaggggagctgatgatccagctgttcttcgtgctgtatggcatcctggccctggcctttctgtcaggctactacgtgaccctcgctgcccagatcctggctgtactgctgccccctgtcatgctgctcattgatggcaatgttgcttactggcacaacacgcggcgtgttgagttctggaaccagatgaagctccttggagagagtgtgggcatcttcggaactgctgtcatcctggccactgatggctgagttttatggcaagaggctgagatgggcacagggagccactgagggtcaccctgccttcctccttgctggcccagctgctgtttatttatgctttttggtctgtttgtttgatcttttgcttttttaaaattgttttttgcagttaagaggcagctcatttgtccaaatttctgggctcagcgcttgggagggcaggagccctggcactaatgctgtacaggtttttttcctgttaggagagctgaggccagctgcccactgagtctcctgtccctgagaagggagtatggcagggctgggatgcggctactgagagtgggagagtgggagacagaggaaggaagatggagattggaagtgagcaaatgtgaaaaattcctctttgaacctggcagatgcagctaggctctgcagtgctgtttggagactgtgagagggagtgtgtgtgttgacacatgtggatcaggcccaggaagggcacaggggctgagcactacagaagtcacatgggttctcagggtatgccaggggcagaaacagtaccggctctctgtcactcaccttgagagtagagcagaccctgttctgctctgggctgtgaaggggtggagcaggcagtggccagctttgcccttcctgctgtctctgtttctagctccatggttggcctggtgggggtggagttccctcccaaacaccagaccacacagtcctccaaaaataaacattttatatagacaaaaaaaaaaaaaaaaaaaaaaaaa

SEQ ID NO: 5620 - DNA, 4451 bp, Homo Sapiens
  NM_032383
ccgcgggcggggccggctggcgttcacgtgacccggcgtcattggctcgctcgcggaagtagtcctacattcgcggtcagcgcggggtctccgggcgccctgcagggcgggcaggctgtgccatcccgccggacgtcgggatggtgcagctgtacaacctgcacccgttcgggtcgcagcaggtggtgccctgcaagctggagccggaccggttctgtggcggggggcgtgacgcgcttttcgtggcggcgggctgcaaggtggaggcgttcgcggtggccggccaggagctgtgccagccgcggtgcgccttctccacgctgggccgggtgttgcgcctggcctacagcgaggctggagattatttggtagcaattgaagagaaaaacaaagctacatttctacgtgcttatgtgaactggagaaataaaaggactgaaaactctcgtgtgtgtatccgaatgattgggcataatgtggagggaccattcagcaaagccttcagagaccagatgtacattattgaaatgccgctttcggaggcccccttgtgcatttcctgttgccctgtgaaaggagaccttctcgttggctgcacaaataaattagtcttatttagtttgaagtaccagatcattaatgaggaattctcactattggactttgaacgttctttaattatacacatagataatatcactcctgttgaggtttctttttgtgttggatatgttgctgtcatgtcagacttagaagtcttaatcgtaaaactggagtcaggccctaaaaatggagagagagttcaccaccatccacataagaccaacaatcgaataagacggacagaagaaggcatcagtaatgaaatttcacagcttgagtcagatgattttgtcatctgccagaagcccctggaacttcttggtgaaaaaagtgaacagtctggattatctgttacactggagtctacgggattagctgatgaaaaaagaaaatattcccactttcagcacctgctctatagacgttttgctcctgatatttcgtcctatgtcttgtctgatgacatcaagctacattccctccagctgctacccatttaccagaccggttctcttacatctgatggaaaaaatttgtctcaggaaaaagaattgctgagtctcttttgctttttctccttacctcatgtgggctatctctacatggttgtcaaatctgttgaattgatgtcagtctaccagtatcctgaaaagtctcagcaggcagtactcacgccacaatttttgcacgtcattacaagtaacaacctgcagtgtttcactgtgcggtgcagtgcggcggcagctcgtgaggaggacccgtacatggacaccaccctgaaggcttgcccacctgtcagtatggatgtctgtgctttaagaatacagcttttcataggcttgaaagccatctgtcactttaaaaaccacatcatacttttgactaaagcagaacctgaagccattccagagagaagacagtcacccaagaggcttctttcgagaaaagataccagtgttaaaatcaaaatacctcctgtagctgaggctgggtggaatttgtatattgtgaatacgatctcaccagtgcagctgtacaaagagatggtagactatagcaatacctataagactgtcaaaacccagagctgcattcaccttctcagtgaggctcatctgttagtgcgagctgccctgatggatgccagtcagctggaacctggagagaaggcagagcttttggaagcatttaaggaaagctgtgggcaccttggggactgttacagcaggcttgactcccagcattctcatctcaccttgccatactataagatgtctggtttgtctatggctgaagttctggcccgcacggactggacagtagaggatggattacagaaatacgagagaggattaatcttttacattaatcattcactttatgaaaacctggatgaagaattaaatgaagaattagcagcaaaagtggttcagatgttttatgtggctgagccaaagcaagtgccccatattctctgtagtccttctatgaagaatattaatcctttaactgccatgagctatctaaggaagctggatacttctgggttttcatcgatcttagtgacattgaccaaggcagcagtggctctgaaaatgggagatcttgacatgcacagaaatgaaatgaaaagccattcagagatgaagttggtatgtggcttcattctggaacctcggctgttgattcaacagagaaagggacagattgttccaaccgagcttgcacttcacttgaaggaaactcagcctggattgcttgtggcttcagttctgggcttgcagaagaacaacaaaattggaattgaagaagcagattccttttttaaggtgctttgtgctaaggatgaagatacaattcctcagctcttggtagacttttgggaagctcagctagtggcatgtctcccagatgtggtacttcaggaactctttttcaaactcacatcacagtacatctggagattgtctaagaggcagcctcctgacaccacaccattgcgaacatcggaggatctgataaatgcctgtagtcattatggcttaatttatccatgggttcacgtcgtaatatcatctgattctttagctgataaaaattatacagaagatctttcaaaattacagtctcttatatgtggtccttcatttgacatagcttccattattccgttcttggagccactttcagaagacactattgccggcctcagtgtccatgttctgtgtcgtacacgcttgaaagagtatgaacagtgcatagacatactgttagagagatgcccggaggcagtcattccatatgctaatcatgaactgaaagaagagaaccggactctgtggtggaaaaaactgttgcctgaactttgtcagagaataaaatgtggtggagagaagtatcaactctacctgtcatcattaaaagaaacattgtcaattgttgctgtggaactagaactgaaggatttcatgaatgttctcccagaagatggtactgcaacatttttcttgccatatcttctctattgcagtcgaaagaaaccattgacttaaaggtatcatttgaaaaataccataatggcatttgagactgaatttctaaaaattgaatgccaaagtacaagtagaggagttttttattttatatatcacacacacacacacacacacacacacacacacacacatatatgatacaaatgctttcaggctgcttaccttaccgtgtagtggtaactattcacttcttaatttatgacctcaatcaatttaattgtctagaatgtaaaaagtctttaagacataagaattcctcaaagaagccatacattttttaaggtggggattgacttttattccaaggaacaacatcagttcactgttgttggagacatgacaatcattttcatcccaagaacactttaaggaaacattttacaagtatgcttgaaagaatgtcactaactggtccagaattttatcttcttgatttttccagatttctctatgtttttgagaaagatgttaatgttttgccatggtaaaagatttcaaacctcattttttttgttccttttcttgttacttttaagaaaactcatgctctgtttctctgaatcaaatgaagtagaagtttacaaagctaactttcttcttgtctagctattaacatgatttgtcaaatgcatgtttttttcagccaaagccttgtttccatttttgttgatgtgtactcttgctcttttagctagagtgtatgtgaaaataaagaaatacatcattgtattcacaaccatgtgtcttcatttataactttttgtttaaaaaatttttagttcaagtttagttcattgatattatcctctgaatgcagttaaggctgggcagaaattctactcatgtgacatctgccacaggtctattttgaagcttttcttctaatggcaatgtttgtccttaccaggatttaatctatagaattgtctctcaactctgcttttctccagttccagataacgtccttaagaccatctgttcaggggttcacaaaactcaaatttgtgtcattctattttatttattttattttttatttccttccctcataccttgcccattccctctgaatattaggtgtgatgtcaacagcatgttagaaggatcaatgggaaggcaatgattgaaaacatttcaatgaaccttaatagtgttcctttgaggagcacccaggagaatatctggtcatagatctttttttaaatgcagttttataaaaccctaacagcggtgatatcattagactgtatgaatcagttttattacctagtgtacaagtgtcagtcatgtatc

SEQ ID NO: 5621 - DNA, 2997 bp, Homo Sapiens
  NM_032385
gcagctctgtaatgagatcaccatggccagcctcccacccgagcaaaaacaaggttagcctgcagcagagccgcagcagcaacagccaccaaagcgggggctgaaagggaagagaacttagatttgacctgtgcaaggacctcagcagcttggacacagcccactgcagagatgaaaggagaagctggacatatgctacacaatgaaaagtcaaagcaggagggacacatctggggctctatgaggaggacagctttcatcctgggctctggacttctctcatttgtggccttctggaactcagtgacatggcatcttcagagattttggggtgcttctggctacttttggcaagcccagtgggagaggctgctgactacatttgaagggaaggagtggatcctcttctttataggtgccatccaagtgccttgtctcttcttctggagcttcaatgggcttctattggtggttgacacaacaggaaaacctaacttcatctctcgctaccgaattcaggtcggcaagaatgaacctgtggatcctgtgaaactgcgccagtctatccgcacagttcttttcaaccagtgcatgatatctttccccatggtggtcttcctctatcccttcctcaaatggtggagagacccctgccgccgtgagctacccaccttccactggttcctcctggagctggccatcttcacgctgatcgaggaagtcttgttctactattcacaccggctccttcaccacccaacattctacaagaaaatccacaagaaacaccatgagtggacagctcccattggcgtgatctctctctatgcccaccctatagagcatgcagtctccaacatgctaccggtgatagtgggcccattagtaatgggctcccacttgtcctccatcaccatgtggttttccttggccctcatcatcaccaccatctcccactgtggctaccaccttcccttcctgccttcgcctgaattccacgactaccaccatctcaagttcaaccagtgctatggggtgctgggtgtgctggaccacctccatgggactgacaccatgttcaagcagaccaaggcctacgagagacatgtcctcctgctgggcttcaccccgctctctgagagcatcccagactccccaaagaggatggagtgagagacagcctaagtgtcatcctggctgtccctcagccatgggatgcagacacggcttcctgattgcacctaacaatttgcctccttcggccacacgccctaatgatggcaccaccagggtagagggaaggtcggcttcccggaaaagcagggccaaggatgaggctttcttcaaactactgcccttgatgtccctcaatgggatcaggagttagcttaagaaaaaggaaaacacagctccccagactggaggctggtcagagggaggagacccctggtcctctgctgtggaaggagaggggttcagccccagataactcctttgtggcctgggcaggatgcagagaatgacaaggctgaaaggagggggactggaggctgcctggctccagcgagagctccttctgggaccagagggtgggacggccaggtatcactttgccccttcctgccccaaaaggctttcacatacccgactcaggccagagccaagacaccctggcaaatcattataggtctcaattcatgacataccagatgccagtcgccacttcacccaacacacacacaaacatacacacaccaaacactctgagtgagtggtaaaggccccgttttaactctggcccaccgcaaacaaaaggtttccctctgtgggggagaaaaagaaatccaggagctcctccctggattaaaaccaacgaggtgcagaccaaactttaacacctttagccttatgtggaaaccaaaaaccaactgctgggaaactgtgaaaagcccttttacccacaaggggaggggtcaaagttgctgccctttggggacacccgagacccctaattagcctatctgaatgaggaccaaaggttagagccctctttctccccgaagaaagagcccggaaaaacatggcagagcaaagagcaaaatcctttctcccccgaatgctttaccagtttctcagcaacatttattcaagatgatttttaccaggaaccttatcaaaggcaaaaccacagctgcttgggttgaagtccccatcctggcctcctctcagccgccagacatggccaggaaccctgtggttcccaagaacaatttaaagatcactctttgatttgaaagaccaccattatcattttactaaattcttatatatacttgtgccttttccaactttcagttctcttaagaaaaacatccactgtagctttataaaataccttagtatcagctaggtccaagtctccaggcaggactatcaaaatggactccttcttcctatcagctctagaaccccagaggacttgcccagtaggccagctgagcacttaccaggcagcatctccctggccttccacagtctcgcctgtctgtctctggccttggtggacctggctccctccctaggaggcttttgccctcagcttgaatacagttcctggtgcatcaaagctgtaagttctcagctgctggcctgcactcatcacctcttcctacaaataaacatttggaaaaaagtccatcttcaatatgcttaaagagaagggtaggagataaggagaaagaacagatacggtttttttcccctttaaggcctttagattttgaggtactgtaaggggcctagaaggacaaaaggctttcattccctcttccttttggcaggcaggttatcagtccttggcagaagggcccagccctatccttttctgtatcaaacaaaatccttgaggttggtatacaagttaaggctgaaaaaaggccttaaattcccagtaaagaatgtgaaagcaagcatgtaaaataaactggtcttcatgaa

SEQ ID NO: 5622 - DNA, 2803 bp, Homo Sapiens
  NM_032389
tgggaaggagagaaaatggcggcggagccgaacaagaccgaaatccagactctttttaagaggcttcgcgcagttccaaccaacaaggcctgtttcgactgcggcgccaagaatccgagttgggccagcatcacgtacggtgttttcttgtgcattgactgttccggggtgcaccgctccctgggcgtccatctgagcttcatcaggtccacagagttggattccaactggaactggttccagctgaggtgtatgcaggtcggcgggaatgccaatgcgacggctttttttcgccaacatggatgcacagccaatgatgccaacaccaaatataatagccgagctgcccagatgtaccgggagaagatccggcagctggggagtgcggccctggctaggcatggcactgatctttggatagacaacatgagtagtgccgttcctaatcactccccagagaagaaggactctgatttcttcacagaacacactcaaccccctgcctgggatgcgccagccactgagccttcagggacccagcagccagccccgtctacagagagcagtggcctggcacagccggagcatggccccaacacagacctgcttggcacctcacccaaagcctcactggaactgaaaagctccatcattggcaagaagaagccagcagcagctaagaaagggctgggtgccaagaaaggcctaggggcccagaaggtgagcagccagagcttcagtgagattgagcggcaggctcaggtggcagagaagctccgtgagcagcaggcagccgatgccaagaagcaggcggaggagtccatggtcgcctccatgcgtctggcctaccaggagctccagattgatcgtaagaaagaggaaaagaagctacagaatctggaagggaagaagcgagagcaggcagaaaggttgggcatgggcttggtatcccgaagctctgtctcccactccgtgctgtctgagatgcaggtgattgagcaggaaaccccagtgagtgcaaaatcctctcgctcgcagctggacttgtttgacgatgttggtactttcgcctctggacccccaaagtacaaggacaatcccttttccttaggggaaagctttggctcccgctgggatacagatgctgcctggggtatggacagggtagaggagaaggagccagaagtgaccatctcaagcatccggcctatttcagaaagagccacaaaccggagggaagtggagagccggagctcaggcctcgagtctagtgaggcgcgtcagaaattcgcaggagccaaagccatctcatctgacatgttctttgggcgggaggtggatgcggagtatgaggccaggtctcggctgcagcagctctcaggcagcagtgccatcagctcttcagacctctttggggacatggatggagctcacggagcaggaagtgtatctctggggaacgtgctgcctacagcggacattgcccagtttaagcagggtgtcaagtctgtggctgggaaaatggctgtgctggccaatggtgtgatgaattccttgcaggatcgctacggttcctactgatccgagctctgtgactcaggcttacgatggtgacggcaacaagaactccacagttcccaggctggggatgctttgccttgtggaagctggggaggatttgttacttcgtatgtgtggtgtgtgtgtggggtggcctttgaggcgctcactcctgtgaggggaatggtcagtaccagcccttgtcctctgcctgtggactgagccctttattccctctcacaccaccctccgtgtgttagactcttgtccttctgtcctgcccccacagctgctgctcacttatcctgccatactgggaaagggggttcccccacgatggcttattctgggtccagactttccccaggtagggaaagcggaaggtagaaggctttttttgctggctctagggttcttctagttcgaggccttgggtccccatcctctggaaccagggggaggcctggaaggagttcactgtagacccgtcccatggggaaagaggctgcggacttgctgctgctgctgctgccagtggcctcttctgggtgccaggagaggggaaggacctttgtctgggcgttaccaagggctggaaactttacctggtacctaaaggtttcatttgggatcagaccggagacccttgggttctcccgtctcaccacccctttctacagtaagcacttggaagattgtttcagggtgtctcagggtccctctgtaccatctgctgtggaatgcaggaccctctgtgacattctttatcccttcttccccgggttggtggccatggagggtcttgtctgctgtgattcgactctggatgctgtgagcttgatgctggccagggaagcagaggatgtgagaggcagaggcaggctcctggggctgagctccttcctctgcatcattctgggcttggcctggacagcacccgccagtgagagctgtgggcctcaccctctggcagctgagccaagcactgtcattcttggtgccatcttcccctgccgcaccggcagtctcagcccagcccccacctttgggttgtaggttgggctcccaagcaacacagaccactcttccccttgcccctcccccagagggacttgactttctttctggactgtttgtattgaaacaaagtggtgtcaaaataaagcccctgcagggcctggctccctgttggtctgagtgaaaaaaaaaaaaaaaaaaaaaaaaaaaaaaaaaaaaaaaaaaa

SEQ ID NO: 5623 - DNA, 1754 bp, Homo Sapiens
  NM_032390
ctctacttccgcctcgggggagctgggagcccgacgtttccgggagcgccgcgtggttagcgtcggcggcttttggcatggcgactttttctggcccggctgggccaatcctgtcgcttaatccgcaggaagatgtcgagtttcaaaaggaggtggcgcaggttcgcaagcgcataacccagcgaaaaaaacaagaacaacttactcctggagtagtctatgtgcgccacctacctaacctacttgacgaaacccagatcttttcatatttctcccagtttggcactgtgacacggttcaggctgtccagaagtaaaaggactggaaatagcaaaggctatgcatttgtggagtttgagtctgaggatgttgccaaaatagttgctgaaacaatgaacaactacctgtttggtgaaagactcttggagtgtcattttatgccacctgaaaaagtacataaagaactctttaaagactggaatattccatttaagcagccatcatatccatcagtgaaacggtataatcggaatcggacactaacacaaaagctacggatggaggagcgatttaaaaagaaagaaagattactcaggaagaaattagctaaaaaaggaattgactatgattttccttctttgattttacagaaaacggaaagtatttcaaaaactaatcgtcagacgtctacaaaaggccaggttttacgtaagaagaagaaaaaagtttcaggtactcttgacactcctgagaagactgtggatagccagggccccacaccagtttgtacaccaacatttttggagaggcgaaaatctcaagtggctgaactgaatgatgatgataaagatgatgaaatagttttcaaacagcccatatcctgtgtaaaagaagaaatacaagagactcaaacacctacacattcacggaaaaaaagacgaagaagcagcaatcagtgattttcaatgtattatatttcttttgaaaaatataatatttttatgagagtggactttgtatttcactaggtacaatggaatacaacctttgacaagattttcagaggaaaaatacactgtttggtcaagttaaggaaagcagtgtgtaattttggattgcctgcccttggctgaaatacaggggtgcataccatcttgcagtggcttggctgacattgcctctttgtcctggcctctagttttcttttgatatttcatagctctccttagtttactctgcctggatagaaagttgaccactaactgcaggtttaagtactaaactgcagccttttctgtcgccagcaattaaagaccaccaatcttgtttgtccatctacatggtttgtcggggacatttaactcatggaggtgctttagatttcaacatcagatggttgaagctggaagtttaattatatgtagagtgagaaggcagttccagttttagcacagatttgtttatgtgttcagattttaatagagattcaaaaatgactcatttttaccaataatgttaaattagttttggttgtgctagcatgaattaataaccaccattttataccagtatcatcagtgaagaattgtatttcaagattcaaacaataaccagcaattaaacttttttctacaatgtatttgtttgcgagtaggacttgggagtcattgggaaaaaaaaataataaattttccccttcattaacgaattcagactcattaaaaacattgccatcagaaaaaaaaaaaaaaaaa

SEQ ID NO: 5624 - DNA, 2680 bp, Homo Sapiens
  NM_032409
cgcagaggcaccgccccaagtttgttgtgaccggcgggggacgccggtggtggcggcagcggcggctgcgggggcaccgggccgcggcgccaccatggcggtgcgacaggcgctgggccgcggcctgcagctgggtcgagcgctgctgctgcgcttcacgggcaagcccggccgggcctacggcttggggcggccgggcccggcggcgggctgtgtccgcggggagcgtccaggctgggccgcaggaccgggcgcggagcctcgcagggtcgggctcgggctccctaaccgtctccgcttcttccgccagtcggtggccgggctggcggcgcggttgcagcggcagttcgtggtgcgggcctggggctgcgcgggcccttgcggccgggcagtctttctggccttcgggctagggctgggcctcatcgaggaaaaacaggcggagagccggcgggcggtctcggcctgtcaggagatccaggcaatttttacccagaaaagcaagccggggcctgacccgttggacacgagacgcttgcagggctttcggctggaggagtatctgatagggcagtccattggtaagggctgcagtgctgctgtgtatgaagccaccatgcctacattgccccagaacctggaggtgacaaagagcaccgggttgcttccagggagaggcccaggtaccagtgcaccaggagaagggcaggagcgagctccgggggcccctgccttccccttggccatcaagatgatgtggaacatctcggcaggttcctccagcgaagccatcttgaacacaatgagccaggagctggtcccagcgagccgagtggccttggctggggagtatggagcagtcacttacagaaaatccaagagaggtcccaagcaactagcccctcaccccaacatcatccgggttctccgcgccttcacctcttccgtgccgctgctgccaggggccctggtcgactaccctgatgtgctgccctcacgcctccaccctgaaggcctgggccatggccggacgctgttcctcgttatgaagaactatccctgtaccctgcgccagtacctttgtgtgaacacacccagcccccgcctcgccgccatgatgctgctgcagctgctggaaggcgtggaccatctggttcaacagggcatcgcgcacagagacctgaaatccgacaacatccttgtggagctggacccagacggctgcccctggctggtgatcgcagattttggctgctgcctggctgatgagagcatcggcctgcagttgcccttcagcagctggtacgtggatcggggcggaaacggctgtctgatggccccagaggtgtccacggcccgtcctggccccagggcagtgattgactacagcaaggctgatgcctgggcagtgggagccatcgcctatgaaatcttcgggcttgtcaatcccttctacggccagggcaaggcccaccttgaaagccgcagctaccaagaggctcagctacctgcactgcccgagtcagtgcctccagacgtgagacagttggtgagggcactgctccagcgagaggccagcaagagaccatctgcccgagtagccgcaaatgtgcttcatctaagcctctggggtgaacatattctagccctgaagaatctgaagttagacaagatggttggctggctcctccaacaatcggccgccactttgttggccaacaggctcacagagaagtgttgtgtggaaacaaaaatgaagatgctctttctggctaacctggagtgtgaaacgctctgccaggcagccctcctcctctgctcatggagggcagccctgtgatgtccctgcatggagctggtgaattactaaaagaacatggcatcctctgtgtcgtgatggtctgtgaatggtgagggtgggagtcaggagacaagacagcgcagagagggctggttagccggaaaaggcctcgggcttggcaaatggaagaacttgagtgagagttcagtctgcagtcctctgctcacagacatctgaaaagtgaatggccaagctggtctagtagatgaggctggactgaggaggggtaggcctgcatccacagagaggatccaggccaaggcactggctgtcagtggcagagtttggctgtgacctttgcccctaacacgaggaactcgtttgaagggggcagcgtagcatgtctgatttgccacctggatgaaggcagacatcaacatgggtcagcacgttcagttacgggagtgggaaattacatgaggcctgggcctctgcgttcccaagctgtgcgttctggaccagctactgaattattaatctcacttagcgaaagtgacggatgagcagtaagtaagtaagtgtggggatttaaacttgagggtttccctcctgactagcctctcttacaggaattgtgaaatattaaatgcaaatttacaactgcagatgacgtatgtgccttgaactgaatatttggctttaagaatgattcttatactctgaaggtgagaatattttgtgggcaggtatcaacattggggaagagatttcatgtctaactaactaactttatacatgatttttaggaagctattgcctaaatcagcgtcaacatgcagtaaaggttgtcttcaactgaaaaaaaaaaaaaaaaaaaaa

SEQ ID NO: 5625 - DNA, 14460 bp, Homo Sapiens
  NM_032410
gcggggcggcgggcgtgtccgaagtcgcgcgcggctggcgcgcggtcccgagtgaaaggagaaggaggggcgctgggggtgacggtgcggagccgctgccagcgctgggcgagagtcggcggccggatccgaggagcaggcgggcctgaggccgagtcagctgcgcgggcccccggatcccccgacagagcggcggcggtgtctggccaggcggtaggcgctgcctggccgcggcggggaagatgttcagcgtagagtcgctggagcgggcggagctgtgcgagagcctcctcacttggatccagacatttaatgtggatgcaccatgccagaccgtggaagatttaacgaatggggttgtgatggcccaggttcttcaaaagatagatcctgcatattttgatgaaaattggctaaacagaatcaaaactgaagtaggagataattggaggctaaagataagcaatttaaagaaaattttaaaaggaatcttggattataatcatgagattttaggacagcaaattaatgactttacccttcctgatgtgaaccttattggggagcattctgatgcagcagagcttggaaggatgcttcagctcatcttaggctgtgctgtgaactgtgaacagaagcaagagtacatccaagccattatgatgatggaggaatctgttcaacatgttgtcatgacagccattcaagagctgatgagtaaagaatctcctgtctctgctggaaatgatgcctatgttgaccttgatcgtcagctgaagaaaactacagaggaactaaatgaagctttgtcagcaaaggaagaaattgctcaaagatgccatgaactggatatgcaggttgcagcattgcaggaagagaaaagtagtttgttggcagagaatcaggtattaatggaaagactcaatcaatctgattctatagaagaccctaacagtccagcaggaagaaggcatttgcagctccagactcaattagaacagctccaagaagaaacattcagactagaagcagccaaagatgattatcgaatacgttgtgaagagttagaaaaggagatctctgaacttcggcaacagaatgatgaactgaccactttggcagatgaagctcagtctctgaaagatgagatcgacgtgctgagacattcttctgataaagtatctaaactagaaggtcaagtagaatcttataaaaagaagctagaagaccttggtgatttaaggcggcaggttaaactcttagaagagaagaataccatgtatatgcagaatactgtcagtctagaggaagagttaagaaaggccaacgcagcgcgaagtcaacttgaaacctacaagagacaggtagtagaactacaaaacagattatccgaagaatcaaagaaagcagataaactagattttgaatataagcggctaaaagaaaaagttgacagtcttcaaaaagaaaaggacaggctgagaacagaaagggattctctgaaggaaaccattgaagagcttcgttgtgtacaagctcaagaagggcagctcacaacacaagggttaatgcctcttggaagtcaggagtcttcagacagtctagctgcagagattgttacacctgaaatcagggagaaacttattcgtcttcagcatgagaataagatgttaaagcttaaccaagaaggttcggacaatgaaaaaatagccttattgcagagccttctagatgatgcaaatctacgcaagaatgaactggagacagagaataggctggtgaatcaaagacttctggaagtacagtcacaagttgaagaattacaaaaatctttacaggatcaaggctcaaaagcagaagattcagtccttctaaaaaagaagcttgaagaacatctagagaagctgcatgaggccaataatgaactacagaagaagagagccattattgaagatctcgagccaagatttaacaacagctccttaaaaattgaagaattacaagaagctttacgaaagaaagaggaagaaatgaagcaaatggaagaacgatacaaaaaatacttagagaaagccaaaagtgtcatccgtactttagatcctaaacagaatcaaggagcagcaccagaaatacaagctcttaaaaatcagctccaggaacgagaccgactgttccactcattagagaaagaatatgagaaaacaaagagtcagagagagatggaagagaaatatattgttagtgcctggtacaatatgggaatgaccctgcataaaaaggcagctgaagatagactggcaagcacaggctcagggcagtcatttctggcgaggcagaggcaagcgaccagcagcagaagatcatacccaggccacgtgcagccggccacagcaaggtagagaagttgtgccgctcaatcacagacacctgcacccacaacatacttctgttacacacaagaacatttcaggaaactcagccagcttattttttgtttctcttctatgtcaatacttagtgtttctcattttgaggactttttctctctcctgtatctttgttttagtttctttggtttttattttgtagtcctttcagttatttttaatgtgccaaaaatttgtacatgttcaattaaaaatgttgtataatagtgtaatacttttctttgtatgaaaatgtcctcttcttcaaaggtataggctttgtaatgaattagattttctgccaataattgatatacaatttatattctttattgtgcctgtgtgttaccatgctaagaatgtctttgtttaaagggaattaatctttttatgatgtattaatctgtgttttcaattgttttccaagtacagttcaaataacttgcatatttactatacaaaatggttgacaagtgttctttttgcaaagacttgaatacattggcagaggtgctaatcacatcttccctaaggcacctggaagaattatttgaggaaaaaatgagttttcacattgttttataggaaattaaatttgtccaaagatttggagactatttttaaaacataaatacataaaatttcattatttcctgctatcttgtttgctggcagaagtgaatgtttggtgaggttattttgggataaattacaaaagaaaaaaaattagacactgcattaatttcttgttcttttggaatatcttagtaactgaggatcattttctaacaatgtggttgacataccttcagttgctttccacatctaaaagagttatctttcatatatgtacaagttattggtagtcttatttttgggctgtttgttgacttatgccccatttgttttacttgttctttaatataaacccttccattttttaacaattcctaacacttgatatcttaatatcagtcactaacattagtaacttcttgtatgttatattatggcagatctctttacgttttttctcacatctatctgctagtccaggaatttgttactaaatagattttcttggatatttggttgcctcaaagtgcttacatttgttaacagattgtaaaccacatttatttacattgatgaatgggctgttgaataatcattgtaaagcactttgtatatataaggtgctatataagtgtgaaatatcattcatttataaatgaaatgccttctaactttccatattgacttatgtatttggtcccaaattatatttaagtcttttttcttgcaacgtagcccattttttgaaagcaaaacatttctgaaattaggtcatggtttttttgtttatttttaggttaggtcacttaatataggaggatgttttctcatgtacttgctatttgcaagttcaggtttcatttggttctttatgttaaatacgaataagtaacctcaaatcaagctaaatgtaattaagaattttcagcaactatattcaagtgtttgatttttaaattctttctttctttttaataagaaagatgacctaaaaatcagtggtatttgtttgtcctcagaagccgtagttgaagaaagatattagagtatacacagaactggagccatacattgtgctaattttttacattaagtacagaagtctgagcacagcatgaatgcttctgcctgacaggaccacaaagcagcagaagttagggataaatggagatagccatgagtagaactgctgtagggcttcaggaggctacgcagacctgatcaactgcaaagtttccaaagtaaaagattaaaaactttcagacggttcttacctctacccgtgtttcacaaatagcctgaggatccaactatttttaaagcaaattggggccagacgtggtgcctcacgcctgcaatctcaccatttgggagacctaggtgggggtggatcacttgaggtcaggagtttgagaccagcctggccaacatggtgaaaccccatctctactaaattacaaaaattagctgggcatggtggcatgtggctgtaatcccagctacttgggaggctgaggcaggagagtcacttgaactcaggagccagagactgcagtgagctgagatcgcaccactgcattccagcctgggcgacagagtgagactctgtctcaatcagtcaatcaatcaatcaatcaaattggaatatgagcactaaccttggtaagttaaaattttgggaaaattgtacctgcagaatatgatggatgaaaacaacagccaggtgcagtggctcacgcgtataatcccagcactttgggaggccgagacaggcacatcatctgaggtcaggacttccagaccagcctgtccaacatggtgaaactccgtctctactaaaaatacaaacaattagccaggcatggtggtgtgtgcctgtagtcccagctacttgggagggtgaggcaggagaattgcttgaacctgggagacagagattgcagtgagccgagatggcgccattgcaccccagcctggcgacaagagcgaaactctgtcgcaagaaaaaaaaaaaaaaaaaaaaaaaaaaaaacagtctgtgaactactcactgaatgaattttgttctgtgagatgagaggttttcattttcattttctatttacagccccagtcctaatctcctacccatccacctacccagatattttttctctatctgggttggaaaggccccaggcttttagaggggagttttacttctgacttttttttccccccgagacggagcctcgttccgtcacccaggctgtagtgccgtggcatgatctcggctcactgcagcctctgcctcccgggttcaagcaattctcctgcctcagcctccagagtagctgggattacaggtgcccaccaccatggctggctaatttttgtaatttagtagagatggtgtttcaccatgttggccaggctggtctcaaactcctgacctcgtgatctacccacctcggcctcccaaagtgctgagattacaggcacgagccaccgcgcccagtcgtacttctgacttttcttcagcatctgttgtatgctattattttgatgtttacatttataattttctttcttttttttttttttgtgagatgatgtctcgctctgtcacccaggctggagtgcagtggcgcgatctcggctcactgcaagctccgcctcccgggttcacgccattctcctgcctcagcctcctgagtagcggggactacaggcgcccgccactacgcccgactaattttttgtattttttagtagagacggggtttcaccatgttagccaggatggtctcgatctcctgacctcgtgatccacccgcctcagcctcccagagtgctgggattacaggcgtgagccaccgcgcccagcctacatttataattttcattctcttttacctataaaattcagtgtattagtttcattacataggagaaattatatttctaaacattttatgatgtttaaaaacaaaacaggctgttgtaaaaaaaaaaaaaaaaaaaacttctgaatatactttaggtatcagaaagccaagaataaaatttagctctaacggtggcaactccatgtccggtgtccagctttggacagggtttatgacgtttctgtttctctagtaatgattaatgattcctcaggagattcgtgatgttgtctggtctatctggaaatttaaagtcactaggagctttgcctcatcgtgagtgatgctgtgctgtatttttacaaactctcgcatacagcaccttcctggggccacgttggcttgtgcagtggagcttgtccaggcaccagcatggagcaagtacagggttgctgtgttgggttggagcacactgtcaccacagtgtctgaagtcttataaacaggaagatcattttctgttttccttctaaccagggtgagaaaatacaaagtaaagaactaaagaatattaaaacctagcatttatgttccacagtgtgtatttcagaagtttgtaatccagaaaatatagtagtgtataatatctgaaaagagaatcaagtatacaattgtacatatttttaaagaactttgaaaaactccgtcatatcttttaccatttgtctatttgatagtaatgcagaaaaaagtccctaaagaccctgtgttccaaaatttaccaagattgacatttctattagacatccttaacctaagtgttttaattagattattagactataataaggatgaaattgctgtctgtaattttgttgaggttttattgttaatataataaaagctcaactgtacaaaattaagctaaatgttatccagtcagaaacatcagcctgtggccaggtgcggtggctcacgcctgtaatcccagcactttgggaggccaaggcaggcggatcacctgaggtcaggagttcaagaccagcctggctaatatggtgaaaccccatctctactaaaaatacagtattagccaggcatggtggcaggcgcctgtgatcccagctacttgggaggctgaggcaggagaatcatgtgaacccaggaggtggaggttgcagtaagccgagattgtgccactgcactccagcctgggccacagagtgagactccatctcaaaaaaaaaaaaaaaaaaaaaaagaaacatcagcctgtatattccagtagttctcacagaagaatgaaaatccgtgctgtgcaaatagatcagtagtgagtgagtgttaagtgaaagatgagctaggttgaagaaaatatacattttattgatgagccactttgctatctctccttccttcctccttccttccttccttccttccttccttccttcccttcttttcttttttcttttcttttcttttctccctcctttcttccttcccttcccttcccctcccctcccccaggctggagtgcagaggcacgatcctggctgactgcaaactctgcctaccaggttcaagcgattctcctgcctcatcctccctagtagctaggattacaggcatctgccaccacgcccagctaatttttgtatttttacaaaatacaaagagacggggtttcaccatgttggccaggctggtctctaactcctgacctcaggtgatccgtccaccttggcctcccaaagtgctgggattacaggcgtgtgttactgccccagcctcctatttccttttcgaaagtagcagtttggtttattctcgtttgctaagtaattgtttgaaatatttttcagcctctcctgctccctcacaaaaattcacctgtcattttaatgataacagcatgttaaaaacttggaagtctttatcccaatataagaattatcttgaaacaaaaatctaaattacttttaaaaattctcttaactctgcatttagtctcctattatctagatctctgagtccaggataactccagttatccccagttggatcatgtgtgatttatctgagaaagcatccacaacccacagctagtggaaaccgagctagtttacagccacgtggataagaacatctttgtttctaaagtgagaggaaagtgcttggtatcttgctttttgctgagggcaaaataacaacatgaagacaaagtgctttttgttgtctattcatgaaactgtagaagaatattttgagtttttattcttatattatgaagggattctttgcctagcagtggccgtcaaactgatgtagcattgtacttctcaacagtgaagcctgtgtaataccatacagtaggatgaaagactattctgagcaaaatcaaatgggatgtcagaatctttgaaaattattttatcattttttctattttttcatttttataaattagaaggattttccattcaataaggataatctctcttcctatcattctgtcaaaatggcagtttcttttggtaattatccaacctagtttcattacatttagaaggaggtttcagagcttattcttgataactataataatgatttgaatgttttatatcatgaagttttttctatgaggaaggctattctcaatgtatctgtcgtctaattttttattttctatctataaagaatatttaaataataattggtgtatgttccttttgttgaaaatgttttattgtccagttttaacacagaagtggtctaaagttttgcagcaaatgctgttcagttcccagaagcctaaaaaacataacataatatgctaacagagctaatttccacccaatccctcaaattaccgaagtattaatatttagcttcctttctagaaaacaaggggcagcacaaatggggtggcatccatctcttttaaatcactgatgattttctggggaagtatatatagatgattttattttttaaatagccttttatcaaaccatttcacatgtattatctatatgactatagaaacttataaaacatttaattcatgttgacttaaaacatgggcatccttggattctccacattgactgaaatgatagagaaagggacatttgtttgagaaacaagagacctgtacctaattatggcaagtatatgagttttggtgattgtggggggttataaatgttttcctatgatagataaatatatagatatagatcaggaattacttgatgtctcttcagaagttttctgttttcttataatttccagtaatactctgtaagactcggtttgcatgctgtgtgtgtttgcatgagtatagaaacctaagaacataatggaaggctattaaggcaaattcattcctagaaagtggagtggatcattgggataagaaatagcctaattataaacaaatatgcaggcagagggaagtcctaatacaatgaaaacttgcattatctaaacagatgttcccaaagcaatagtttgcctaaaatcctctgtattacatgattattcagtaaaagagtaaacaaatatctaatttattttctaattgtccttcccttcattgagtattaactaggtgcataatgtagttgtatatgtttactagtaaagggaaaaacacttattttcattttgagactgtttggctattactaaagctgagaaagtgattttaggtcgccaaggatactatgatttgatgagatgagaagaaatctgcggtggctgaaaatcgtgaccaacttggtgttatctagatctgctttatctagtttgcaagccataggctcaattttatgtccttcttacttacacacagtagccccacacagttttgttttaaatgaaggcaaaagtagacatttttaaagtatattcaacattgtgccattatttacctgataaaggtgaaatcagaggtgtccacggcctcaaagtttgggcccatgggactatcaaatccgaattatatctacttagagcttagaggaagaattaggtatcatgagaaaagcaactcctacttgagagaaagaagactaccaaagcatgttgaggctttaacatgggagacttccaggtaggcgttaacacttgagtggtaactagcttgatgaaggaaaataattactttagcagttatgttgtaaaattaataaaaaggactcatgtttattctggtgtatttgtcaacccatgggtagtgattactccgtgtacattctatagtgtgtgtattttatttagtgtcttaatatatagtctttatatagtatcttaatattatttactgttacttctagtcatttatgtagtatattttactgcaaaatttgtagcactttactaatattagatcattattttccctcttcccctctacctttctggcattttctgttatcttagagtcaggaatctaaaggtctaagtctagaaatctgttggaagctgggttggagctactggatatgagttactttttacatgtctccttaagaagactcttttataatgtaatacttagaagccaaatcctttcaaacgcaaacacccttgaaacttgatgctttctgaagttgtattcataaaaattatcccatcttacagttaatcagaagatgttcttacctttggtttgcctgcctcctgaaacacaaacctgcagattgcccctaacttcagcagtgcctccgtcactgcatgtacctaaaagacaggaaagccaagttctgggagctgtcaagtcggaggatcaggaaaatggtggggaagaggtgactggaaaggcaggcactaaagatggcaggctgcaaaagcattctgagttcccctgtaacagataggttttatgaactcagctgttttcttttttctttttttttcttttgagatggagtctcactctgagtctcactctgttgcccaggctggagtgcagtggcacaatctcagctcactgcagcctccacctcccggtttcaagtgattctcccacctcagcctcccgagtagttaggattacaggtgcccaccaccacgcccaactaatttttgtatttttagtaaagacagggtgtcgccatattggctaggctggttttgaactcctgacctcaggtaatccacccgcctcagcctcccaaagtgctgggattattataggcgtgagccaccatgcccagtgaacttggccattttcttacattcatatatagcaaagttttcaacttgtctaccgagagactttctttaggagccaggacttctacatttgtaacttgagtatattaatattcaaatcatagttcaaaaatactgaaatacttgtttattatgttacataaatatggacacaattactgccaaagaatagagagatttgcttatgagaacattctgtcatttgttctgtttgtagatgagagacatgcttttaaagtacaaaacgtttctcttctaccttaccccctgttctactgacgtgctttgcatgagaagctcatctagaagagagcaacgctggaatagagaagtctagaccctggcctttgagggaaaggactgctttttttctctcccaaattagaaaattaaaagtgaaacataacacataaggacgaaatacaatgttctgaatatcttccactaattaattgttgaatgattaagtctctaagtatcttaacttccattgtcttcttgttaacctagacaagagtagattattcagtagccacatgtgacagttaaaattaagtaaaattaaaactatagtttctcagtggcctagccacatttcaagtgttccacagtcacatgtggatagtagttacctatcagacagtacaggtatagaacatttccagtattgccaaaaatgctattcaacagcacttttattgcccagagagaaaataaggacaaaataaaggcagtgaagtaacttaagacaactctgagattttaccaccatacttagagaaagtttttctgttataaaaattaatactaatcctttttaaagaccttggaaaaaatcaaaaccccattcctttaagctagtcttcagtatatatttttctaagaacagattctcaatactttatttttcaagtgataaaatcattttataaatcatttcttaatatcttcagtgttttttccctttttatgtaaactcttttaaaattgatattagctgggcatggtagctcatgcctgtagtcccagctactccagaggtcgaggcaggagcatcgcttaagcccaggaggttcaggctgcagtaaggtctgatcacacctgactgcactccagcctgggtggcaaagcaagacccctgtctctaaaaaaaaataatataaattgatgttatatagttaacatttatcaggcaaattcatatgaatgcttatttcaaataaagattgatagatttaatgatatccttccttttaaatttatatagatctaatgaacattgccaacagttttttttgtttctgtcccttaaacatttcccctgaaagtccacctcaaaggtacatcaagatgcaaacaatttttttatcttcataacttcctgctcttattaacttgtattatgaatcaaattaagttttatgtataaggcatttactattccagtgacttagctaatgaaaacatttaaaaatatgtattaatttacttggcctgctactaaagtgcttaacataactaaatggatctatagtaacatgtctaaattttttaatggaaataagggactaaccataatccttttgagtcagcttggtgcttacaattattttgttaggaaatcttgatgctttcttctttctctttaaatttttgtaatcaagcaacagacttgatccagcagtgtcgaattccaagcaagttatgatgattcttattgtagttcaagtacagatgagtaagtggtgtgacttcagtttattatcttcttggtgacctactttagtatgtgttctgtagcgattcatattagttaagggacgttttcaatatgcttgaaataagaaatagcattttactctaaatacaagaaatgactgtacacaaatgctaatcagtgatttggggccttttaatgtctttaacagcaatcttttatttatttatttatttatttttgagacggagtcttgctgtgtcaccaggctggagcagtggcacgatctcgcctcactgcaacctccgcctcccaggttcaagctattctcctgcctcagcctcccaagtaactgggactgcaggcacatgccaccacatccagctaatttttgtatttttagtagagacggggtttcaccttgttggccaggatgatctcgatctcttgatctcgtgatctgcccgcattggcctcctgaagtgctgggattacaggcatgagccactgcgcccggcccaaatcttttattttttaacagccttagttatttataattcaaatgcactaaaatatcatcgctgtcatgaactttgctgtttacaggttctgtgtaattcagaatgctttgtacttagaaaataatttctaggcttatcttgttttgcagttttcatgttttgacaattgcccaccatttacaatactcaatttttgattatgaaatgaatagtaaaattcaaacatatctaataataatttgccttagtttgattaataaattatatcaaaaaacttggggatagaaagaggcttttttttccccctgtagtatttttaaaactttttagatgagctggatgaaaccttagtacattggagctggagttgtattgagtacagccccaactctgaagccttatattcatgtcttaagtaccattgattgttctgtgaattgttgttagtttcatatttgacattgtagtaatccaccttgcattttagtctttgcaaaaaggatattgctaggtatattcttatttctgattgagtattgaatttacatttttcagaatttcattctttgtcattataatccaaaaacaatgtccacatcagacttggaacttctcacttcaaaaatgaaatacagatttagcagtgttgtacataatgatgtccaagcatttttccacctgtttactgagttttccaaccatttactatgtgttgagattggtgggttttctggctgtttttctgaggtgaatgacttgttacagagcctcagtaagaaatttcaactaaaatcacaaaaacataaagtccaggaaaccaccagaagatggatttttagtgtttttgaaatcttgtatttccttttgatatcatttactcattttaattttacgactgccaacttgttacggtattaattatatgtatgtgtttatatgtatgcatataatatatgtatatgtatatgaagaataaagttaagatttggtcaaactatattttcccattcaagtacaaaaatgttttcaaggctgcaaaaagtgtacagttgttaaacaagttgtaaataaagacttgtataaaaattcaaaaaaaaaaaaaaaaaaaaa

SEQ ID NO: 5626 - DNA, 793 bp, Homo Sapiens
  NM_032411
ggataacccgcggccgcgcctgcccgctcgcacccctctcccgcgcccggttctccctcgcagcacctcgaagtgcgcccctcgccctcctgctcgcgccccgccgccatggctgcctcccccgcgcggcctgctgtcctggccctgaccgggctggcgctgctcctgctcctgtgctggggcccaggtggcataagtggaaataaactcaagctgatgcttcaaaaacgagaagcacctgttccaactaagactaaagtggccgttgatgagaataaagccaaagaattccttggcagcctgaagcgccagaagcggcagctgtgggaccggactcggcccgaggtgcagcagtggtaccagcagtttctctacatgggctttgacgaagcgaaatttgaagatgacatcacctattggcttaacagagatcgaaatggacatgaatactatggcgattactaccaacgtcactatgatgaagactctgcaattggtccccggagcccctacggctttaggcatggagccagcgtcaactacgatgactactaaccatgacttgccacacgctgtacaagaagcaaatagcgattctcttcatgtatctcctaatgccttacactacttggtttctgatttgctctatttcagcagatcttttctacctactttgtgtgatcaaaaaagaagagttaaaacaacacatgtaaatgccttttgatatttcatgggaatgcctctcatttaaaaatagaaataaagcattttgttaaaaagaaaaaaaaaaaaa

SEQ ID NO: 5627 - DNA, 926 bp, Homo Sapiens
  NM_032412
gctcgtgctgtgacgcaagcctcgcctcgccccgcgccgcgcgcgttgccagggtgatcaggtgactcccggttcgcggcgctgggagcggccgtgacgtcaggcgcccggctgctcctcacttgctctgagacaggtgcggcaagtctactgcgggctggtccgggctcctcaggttcagacccgaccgttatccagtcggttcgtggagaggagaggtgcactttacaggtccccgatgaaccaagagaaccctccaccatatccaggccctggtccaacggccccatacccaccttatccaccacaaccaatgggtccaggacctatggggggaccctacccacctcctcaagggtacccctaccaaggatacccacagtacggctggcagggtggacctcaggagcctcctaaaaccacagtgtatgtggtagaagaccaaagaagagatgagctaggaccatccacctgcctcacagcctgctggacggctctctgttgctgctgtctctgggacatgctcacctgaccagaccagcccagccgtcctgtcctgccagctctgctgccacctctgacaggtgtgcctgcccccatctcttctgattgctgttaacaaatgactagctttgcacagacacctctaccttcagcactatgggattctagattaatgggggttgctactgtttaattcagtgacttgatctttttaatgtccaaaatccatttcttattgatctttaaagatgtgctaaatgacttttttggccaaaggcttagttgtgaaaaatataatttttaaattatacattcaaggtagtggccaaatgtaacacatcaatcatggaatgatttctctgctaacagccgcctgtatgtttcaataaatttgtccaaagctcaaaaaaaaaaaaaaaaaa

SEQ ID NO: 5628 - DNA, 4362 bp, Homo Sapiens
  NM_032415
ttttttctctcctgcctcctctggccttcggactcctgcccgcgccgcccgcagccccctcccggccctgcagcccctgggcgggcggcgcccctcggaggacggctccgggcccggggggacggagggcctggtcgcctggaggaagccggaggcctgcgtggaggaggcgccccgcgcagctggctggcggagcatgagcgccccagatcccaagcactgcaagtccagatgcaacgggagcctggctcaagggacgacaagatccagccggaaagtgtagaagtcacaccccaatggcgggatagcagcccctgtgtgtgagcacccctccatgccaggaggagggccagagatggatgactacatggagacgctgaaggatgaagaggacgccttgtgggagaatgtggagtgtaaccggcacatgctcagccgctatatcaaccctgccaagctcacgccctacctgcgtcagtgtaaggtcattgatgagcaggatgaagatgaagtgcttaatgcccctatgctgccatccaagatcaaccgagcaggccggctgttggacattctacataccaaggggcaaaggggctatgtggtcttcttggagagcctagaattttattacccagaactgtacaaactggtgactgggaaagagcccactcggagattctccaccattgtggtggaggaaggccacgagggcctcacgcacttcctgatgaacgaggtcatcaagctgcagcagcagatgaaggccaaggacctgcaacgctgcgagctgctggccaggttgcggcagctggaggatgagaagaagcagatgacgctgacgcgcgtggagctgctaaccttccaggagcggtactacaagatgaaggaagagcgggacagctacaatgacgagctggtcaaggtgaaggacgacaactacaacttagccatgcgctacgcacagctcagtgaggagaagaacatggcggtcatgaggagccgagacctccaactcgagatcgatcagctaaagcaccggttgaataagatggaggaggaatgtaagctggagagaaatcagtctctaaaactgaagaatgacattgaaaatcggcccaagaaggagcaggttctggaactggagcgggagaatgaaatgctgaagaccaaaaaccaggagctgcagtccatcatccaggccgggaagcgcagcctgccagactcagacaaggccatcctggacatcttggaacacgaccgcaaggaggccctggaggacaggcaggagctggtcaacaggatctacaacctgcaggaggaggcccgccaggcagaggagctgcgagacaagtacctggaggagaaggaggacctggagctcaagtgctcgaccctgggaaaggactgtgaaatgtacaagcaccgcatgaacacggtcatgctgcagctggaggaggtggagcgggagcgggaccaggccttccactcccgagatgaagctcagacacagtactcgcagtgcttaatcgaaaaggacaagtacaggaagcagatccgcgagctggaggagaagaacgacgagatgaggatcgagatggtgcggcgggaggcctgcatcgtcaacctggagagcaagctgcggcgcctctccaaggacagcaacaacctggaccagagtctgcccaggaacctgccagtaaccatcatctctcaggactttggggatgccagccccaggaccaatggtcaagaagctgacgattcttccacctcggaggagtcacctgaagacagcaagtacttcctgccctaccatccgccccagcgcaggatgaacctgaagggcatccagctgcagagagccaaatcccccatcagcctgaagcgaacatcagattttcaagccaaggggcacgaggaagaaggcacggacgccagccctagctcctgcggatctctgcccatcaccaactccttcaccaagatgcagcccccccggagccgcagcagcatcatgtcaatcaccgccgagcccccgggaaacgactccatcgtcagacgctacaaggaggacgcgccccatcgcagcacagtcgaagaagacaatgacagcggcgggtttgacgccttagatctggatgatgacagtcacgaacgctactccttcggaccctcctccatccactcctcctcctcctcccaccaatccgagggcctggatgcctacgacctggagcaggtcaacctcatgttcaggaagttctctctggaaagacccttccggccttcggtcacctctgtggggcacgtgcggggcccagggccctcggtgcagcacacgacgctgaatggcgacagcctcacctcccagctcaccctgctggggggcaacgcgcgagggagcttcgtgcactcggtcaagcctggctctctggccgagaaagccggcctccgtgagggccaccagctgctgctgctagaaggctgcatccgaggcgagaggcagagtgtcccgttggacacatgcaccaaagaggaagcccactggaccatccagaggtgcagcggccccgtcacgctgcactacaaggtcaaccacgaagggtaccggaagctggtgaaggacatggaggacggcctgatcacatcgggggactcgttctacatccggctgaacctgaacatctccagccagctggacgcctgcaccatgtccctgaagtgtgacgatgttgtgcacgtccgtgacaccatgtaccaggacaggcacgagtggctgtgcgcgcgggtcgaccctttcacagaccatgacctggatatgggcaccatacccagctacagccgagcccagcagctcctcctggtgaaactgcagcgcctgatgcaccgaggcagccgggaggaggtagacggcacccaccacaccctgcgggcactccggaacaccctgcagccagaagaagcgctttcaacaagcgacccccgggtcagcccccgtctctcgcgagcaagcttcctttttggccagctccttcagttcgtcagcaggtccgagaacaagtataagcggatgaacagcaacgagcgggtccgcatcatctcggggagtccgctagggagcctggcccggtcctcgctggacgccaccaagctcttgactgagaagcaggaagagctggaccctgagagcgagctgggcaagaacctcagcctcatcccctacagcctggtacgcgccttctactgcgagcgccgccggcccgtgctcttcacacccaccgtgctggccaagacgctggtgcagaggctgctcaactcgggaggtgccatggagttcaccatctgcaagtcagatatcgtcacaagagatgagttcctcagaaggcagaagacggagaccatcatctactcccgagagaagaaccccaacgcgttcgaatgcatcgcccctgccaacattgaagctgtggccgccaagaacaagcactgcctgctggaggctgggatcggctgcacaagagacttgatcaagtccaacatctaccccatcgtgctcttcatccgggtgtgtgagaagaacatcaagaggttcagaaagctgctgccccgacctgagacggaggaggagttcctgcgcgtgtgccggctgaaggagaaggagctggaggccctgccgtgcctgtacgccacggtggaacctgacatgtggggcagcgtagaggagctgctccgcgttgtcaaggacaagatcggcgaggagcagcgcaagaccatctgggtggacgaggaccagctgtgaggcgggcgccctgggcagagagactctgtggcgcggggcatcctatgaggcaggcaccctgggcagagagatgcagtgggtgcggggggatcctgtggcccacagagctgccccagcagacgctccgccccacccggtgatggagccccggggggacagtcgtgcctggggaggagcagggtacagcccattcccccagccctggctgacctggcctagcagtttggccctgctggccttagcagggagacaggggagcaaagaacgccaagccggaggcccgaggccagccggcctctcgagagccagagcagcagttgaatgtaatgctggggacaggcatgctgccgccagtagggcggggacccggacagccaggtgactaccagtcctggggacacactcaccataaacacatccccaggcaggacagatcggggaaggggtgtgtaccaggctatgatttctcttgcattaaaatgtattattatttctttgtttcgaccctttgtttgtgaacagcttgccaggccttgagcccttgccgccttcctaacctgaaa

SEQ ID NO: 5629 - DNA, 4095 bp, Homo Sapiens
  NM_032424
ggcgaccgtggggaggtgccgccggggtcgcaggtgagcggttctatgctggaggaggcggccagggaagcggcggctccgtgaccagtgggtgccctcgcagtgggtagggtcccggaggggtcagcggcaattggcgcaacgcttgctgccgggtttggtccaagggctgcgacgtagcgggactgcacgctcgggagaagtgccacgcgcgtctgtcgcctgaccggggaggctggggagggcccaggccacggaaacaagactgcagaagtttctgggcactcagtcgggactctcatttaatacccagagagaggagatcttccaggttgccccgactcccaccgggactcctaccagcagcaacctcatcattgtggccgaggcaggtgcgcgcccctgctcccctgggtggccttccgggagcccagtctaactcgattcttcccaggggctctttttggacggtcccaaaggaggcagcgggagggaggtgaaagatactttgataaccgtcgacccataagtatacttgttatgcacctaccacgagttttagagaagaacatactttttggcagggaagtgaatcccctataagaatataggggaggggaaagccacactttaaagagaatttgggtagggtttgatattgtagatttgtgatgcttttcttcttgaactgcttaactaatttaccctcaaatttttttgatccggaacttgccgtctggtttttctcagacttcttaattctgacttatcatgaagtatctaggaacttcattctcaagttttagtgcttgtaaaaagttgcctggttatattatgccattggcagtacatcatcttcacaaggattacgtaagtgaactacatctcattcctgtttccaactagtgaagaacgattgtgaaatgggattttagaaaatggctgttctctgtgattgggcatagaaggtttgtaagttttagagactgcagctgttgaatcctttctgctaagagagcgatgacaggcaatagaaaagggatagtgtttgacatctaaaatgacatattttcacattttatgaggtgttatatccccagcaccaaaaatagtgcctttcacacagtaggagctcagtaagtattttttgaggaaattattggggaatgaatggatggtagaaaacccaagcttctgttacttggataccggcatataaaggagaggacaggaagacaaacatttctggaaatggcttttatccaggaattatccagactgccttgccactagatgaatggaagacaatgatttgaactaagggccagcaaagaattatccctggtttttgtgctttgcagcattcctcaaattgttttcacatctcttaccataaaaactgcattgaaattgaaaatgaagcagttgaaaagaaaaaggaaaagcaattttagtgttcaagaaactcagacccttttgaaagaaattacgaaaaggaaagaagtcattttttccaagcagctcaatacaacaattaatgtgatgaagcgaatggcttgggaagagattgcacagtgtgtgaatgctgtaggagaaggagaacagaggacagggacagaggtgaaaagaaggtaccttgactggcgagcacttatgaagagaaagaggatgaaggccaacattaagctggttggttcaggatttccccttccctcctctgatttggatgactctctcactgaagagatagatgaaaagattggattccgaaatgatgcaaattttgactggcaaaatgtggcagatttcagggatgcaggtggatccttaactgaggtcaaggtggaagaggaagaaagggatccgcagagtcctgaatttgaaattgaggaggaggaagaaatgttgtcatccgtcataccagattccaggagagaaaatgaacttcccgatttcccccacattgatgagttttttacccttaactcaacaccatctagatctgcatatgatgagcctcatttgctcgtaaatattgagaaacagaaactagagttggaaaaacgacgactggatatcgaggccgaaaggctgcaggtagaaaaggaacgcctacaaatcgagaaagagaggctgcggcatttagacatggaacatgagcggcttcagctagagaaggagcggctgcagattgaaagagaaaagttgaggttacagatagtcaattcagagaaaccgtccttggaaaatgaacttggtcaaggagaaaaatccatgcttcaaccacaggacatagaaacagagaagttaaaacttgagcgagaacgcttgcaactggaaaaggataggctgcagtttttgaagtttgaatctgagaagctgcagattgaaaaggaacgcttacaggtagagaaagacagacttcgaattcagaaagaaggacacttgcagtgatttttccaggcttccatttagcaaatgtttgaaaactctagatttttctcatatcaggtgatataatgatggttgctggattagctgtggtttcttgtctaatgtcagtgttcagtaggaaaaagttatatgtggataactgtatgcctaagtagtatataaaagctgtgccctagcgtaaacagtatagcagaaacttactgtgctggactctttaccttataatattacatagagtcttgtattgtctgtgtacccagagtttacaattatgtccatataaaattctagcccagaagttctcatctggggtagattttggccttcagaagaccaatttggtgatgtctggagacatgttgggttgtcaaaactggggtggggaaaaggttgctactgtgcaatgcatacctcctcaacacccccccacactcagtaaagaattttccaacccaaaatatcattagtcctgaggttgagaaaccctgtcctagcctaactgtgtacctctatagctatgttttatagttttagaatattaaaacctcagatatttatgtgggtaggtacttaaatggccaaaaactttaactatgaaatgttactgtgtagtatattgaatataggaagtgatgaagattataggtattttattcccatgtttccatctataaatagccttctcagattcagaaaacaatacagagaacatcagaaattttctaaaatgggtcactttgaaaagaattctttttctcactattaatgctttagaagcaagacgcaattttaaagctttagttccttttctttcagtcattgtcttagtttgggtacaaaaatgtcatttcagtaatgtactgaaatcttataagtgaatagttgaagctagtaaaaatgataccagtataaaaatggtacttgtagtccatgagcttgaacccaatgactgattgtttgacttttaaaataagtaatagcagccatttgggagtagggggtaggtggggaagatgtactccgtatcaaataataatgatgttgaaataatgatagtaggtatgtattatggattggagaagcacttattacactatctaacctaatatgtagaacaattcttgagagttgtatctgtcgttatttctgaatgtgaagctcagagaagtgacacagagtaaatggctgatcttctatattgtagtatattttgtccttccctcttccctgaggaacaaagcacgtatctttagtctctttgatatttattctgagaccaagggcttgcttgacctgatgattttccttcagctctctgaaggtgctttttccacaatccaagtgattctgatacacactaaagttgagaatcactgcactagatcactttgtgttttctgattttcaaggttgatacgtagctttaatacagctcttctgttgacagttattactttaattttgcatttgttccttgtaagaatggctggaaactgtgtgttgacatttgaggatgggtatgcaaggaaaaaatatacttctgtttacttactctgactttgaaatagtgttatttttctatatctgaaataaatgcttctaccatagaaataaatttgcctatactatctgaaaaaaaaa

SEQ ID NO: 5630 - DNA, 3071 bp, Homo Sapiens
  NM_032431
gggggtggggagtgttgttaaccggaggggcagccgcagtcgcgcggattgagcgggctcgcggcgctgggttcctggtctccgggccagggcaatgttccgcacggcagtgatgatggcggccagcctggcgctgaccggggctgtggtggctcacgcctactacctcaaacaccagttctaccccactgtggtgtacctgaccaagtccagccccagcatggcagtcctgtacatccaggcctttgtccttgtcttccttctgggcaaggtgatgggcaaggtgttctttgggcaactgagggcagcagagatggagcaccttctggaacgttcctggtacgccgtcacagagacttgtctggccttcaccgtttttcgggatgacttcagcccccgctttgttgcactcttcactcttcttctcttcctcaaatgtttccactggctggctgaggaccgtgtggactttatggaacgcagccccaacatctcctggctctttcactgccgcattgtctctcttatgttcctcctgggcatcctggacttcctcttcgtcagccacgcctatcacagcatcctgacccgtggggcctctgtgcagctggtgtttggctttgagtatgccatcctgatgacgatggtgctcaccatcttcatcaagtatgtgctgcactccgtggacctccagagtgagaacccctgggacaacaaggctgtgtacatgctctacacagagctgtttacaggcttcatcaaggttctgctgtacatggccttcatgaccatcatgatcaaggtgcacaccttcccactctttgccatccggcccatgtacctggccatgagacagttcaagaaagctgtgacagatgccatcatgtctcgccgagccatccgcaacatgaacaccctgtatccagatgccaccccagaggagctccaggcaatggacaatgtctgcatcatctgccgagaagagatggtgactggtgccaagagactgccctgcaaccacattttccataccagctgcctgcgctcctggttccagcggcagcagacctgccccacctgccgtatggatgtccttcgtgcatcgctgccagcgcagtcaccaccacccccggagcctgcggatcaggggccaccccctgccccccaccccccaccactcttgcctcagccccccaacttcccccagggcctcctgcctccttttcctccaggcatgttcccactgtggccccccatgggcccctttccacctgtcccgcctccccccagctcaggagaggctgtggctcctccatccaccagtgcagccctttctcggcccagtggagcagctacaaccacagctgctggcaccagtgctactgctgcttctgccacagcatctggcccaggctctggctctgccccagaggctggccctgcccctggtttccccttccctcctccctggatgggtatgcccctgcctccaccctttgccttccccccaatgcctgtgccccctgcgggctttgctgggctgaccccagaggagctacgagctctggagggccatgagcggcagcacctggaggcccggctgcagagcctgcgtaacatccacacactgctggacgccgccatgctgcagatcaaccagtacctcaccgtgctggcctccttggggcccccccggcctgccacttcagtcaactccactgaggagactgccactacagttgttgctgctgcctcctccaccagcatccctagctcagaggccacgaccccaaccccaggagcctccccaccagcccctgaaatggaaaggcctccagctcctgagtcagtgggcacagaggagatgcctgaggatggagagcccgatgcagcagagctccgccggcgccgcctgcagaagctggagtctcctgttgcccactgacactgccccagcccagccccagcctctgctcttttgagcagccctcgctggaacatgtcctgccaccaagtgccagctccctctctgtctgcaccagggagtagtacccccagctctgagaaagaggcggcatcccctaggccaagtggaaagaggctggggttcccatttgactccagtcccaggcagccatggggatctcgggtcagttccagccttcctctccaactcttcagccctgtgttctgctggggccatgaaggcagaaggtttagcctctgagaagccctcttcttcccccacccctttccaggagaaggggctgcccctccaagccctacttgtatgtgcggagtcacactgcagtgccgaacagtattagctcccgttcccaagtgtggactccagaggggctggaggcaagctatgaacttgctcgctggcccacccctaagactggtacccatttccttttcttaccctgatctccccagaagcctcttgtggtggtggctgtgccccctatgccctgtggcatttctgcgtcttactggcaaccacacaactcagggaaaggaatgcctgggagtgggggtgcaggcgggcagcactgagggaccctgccccgcccctccccccaggcccctttcctctgcagcttctcaagtgagactgacctgtctcacccagcagccactgcccagccgcactccaggcaagggccagtgcgcctgctcctgaccactgcaatcccagcgcccaaggaaggccacttctcaactggcagaacttctgaagtttagaattggaattacttccttactagtgtcttttggcttaaattttgtcttttgaagttgaatgcttaatcccgggaaagaggaacaggagtgccagactcctggtctttccagtttagaaaaggctctgtgccaaggagggaccacaggagctgggacctgcctgcccctgtcttttccccttggttttgtgttacaagagttgttggagacagtttcagatgattatttaatttgtaaatattgtacaaattttaatagcttaaattgtatatacagccaaataaaaacttgcattaacaaaaaaaaaaaaaaaaaaaaaaaaa

SEQ ID NO: 5631 - DNA, 3402 bp, Homo Sapiens
  NM_032432
tgcggcggcgctgcctggcgtgtgcgcaaggagcgggcgcggagccggcgggcgggcggaggatagcgcgggcgcggcacctgcgggcccgagggtctggctgtcgcagcgccgggccgccccgactccgagcggctgctgagatgagtgcagtgtcgcagccccaggctgctcccagcccgctggagaagtcgcccagcacggcgatcctgtgcaacacgtgtgggaatgtgtgcaagggcgaggtgctgcgggtgcaggacaagtacttccacatcaagtgcttcgtctgtaaagcatgtggctgcgacctggccgagggcggcttcttcgtgcggcagggcgagtacatctgcacgctggactaccagaggctctacggcacccgctgcttcagctgcgaccagttcattgagggtgaggtggtgtcggcgctgggcaagacctaccaccccgactgcttcgtgtgtgccgtctgccggctgcccttcccccccggggaccgagtgaccttcaacgggaaggaatgcatgtgccagaagtgttccctgcccgtatcggtgggcagcagcgcgcacctgtcccagggcctccgaagttgtgggggctgcggcacagaaatcaagaatggccaggccctggtagccttggacaagcactggcacttgggctgttttaagtgcaagagctgtgggaagctcctgaatgccgagtacatcagcaaggatgggctgccctactgcgaagctgactatcacgccaagttcggcatccgctgtgacagctgtgagaaatacatcacggggcgcgtgctggaggccggagagaagcactaccacccttcctgcgcgctatgtgtcaggtgcggccagatgtttgcagaaggcgaagagatgtatcttcaaggttcctccatctggcatccggcgtgtcgacaagcagccagaactgaagacagaaacaaggaaaccagaacttcctcagagagcatcatttctgtccctgcttccagcacctcagggtctccgagccgtgtgatttatgccaagcttggtggtgagatcctggactacagggacttggcagcccttcctaaaagtaaggccatctatgacatcgaccgccccgacatgatctcctactcaccctacatcagccactctgcaggggacaggcagagctacggcgagggggatcaggatgaccggtcctacaagcagtgtcggacctccagcccaagctccactgggtcggttagcctcgggcgctacactccgacctcacggtcaccacagcactacagccgtccagctgccaggcgatcggatggggaggatggaagcttggaccaggataacaggaagcagaagagcagctggctgatgctcaagggggatgcagacacaaggaccaattctccagacctggacacccagtccttgtcccacagcagcgggaccgacagagaccctctccaaaggatggcaggggacagctttcactcacaatacaagatctatccgtatgactccctcatcgtcacaaaccgaattcgcgtgaaactgcccaaagacgtggaccggacgagactggagagacacttgtcgcccgaggagttccaggaagtgtttgggatgagcatcgaggagtttgaccgcctggccctctggaagaggaatgaccttaagaagaaagcccttttgttctgacggctgccagcctgccccactggtgtgtgccgggcgccgaggccaggggcccctggcgagaaccgcacacacccctcccacacaccttgctctggcttctctgtgtccatggggtgggcgggagggggtcccccagcaggtgcggcccctgcacctgccggcgacactcctgccggtagtttagggccgagacggctagcttcacgccacccttccccgctgtggcttggtgtcagggagaggctgtagagtggctgtgtcgggcatcagatggagcacacaggtggctgcagcccagcccaccttcccagcgttctcgaggtgccctggccccggtgctgggcacgtgggggacagaggtggccgggacgtgagctgtgaggcttgttgatgatggttgctgacaccatcatcgggggtgggcacacggcccttcggagcctgggcagcctggcctcacaggcagactcgcagacggggcagtgagcgtctgggacagtgccaagagtggggtgtgtgatttttgcaggcgtctgtgatgggtctctttagggacaaatgtcaacaagggacaagacagggcaccttccgccagcgcccctccatgcgctgcgttcctcctccagatcgacccctagatgcctacacaatatctttaaagtaacacagaagtttttattttattaaaaagtatagcctacttaaacgcgagatgacatatatagagtttaattttacggtccctccgcaggggagcggcctccagccttattctccaccgctcggatctgtgtggtttcagtctgttcttggtgtggtcctcatacacagagctccctgtctagtttcttttctttttcttttttctttttctcgtcacacaggtaaccttaaagacagacccctctaaagaacgctttgtaaatacatgtgaggtatagccaccactgttttccttgctgttatttttccaagtcttggggagaaaacatcctcctctgatggccaaagccctggaatcaagggtttccacgtaccctgcctaatacccgacgtagctcttgatgcaccgtccttgtgctgtggctggcggtgtctcagcctgaaacataaaccccacatgccccaggagcgatgtgctccctgaaacagacaaccacacgctgttggggagagaaggatggagataggatggagataggatggagatgtggctcttctcatctttgaagccagcagggcatcccggagcaggaggctggccgggctccccaagcgaaggcgttggtgtctgtcattaggtgtgtgttagggtgcagcaccggccgtcacaggatgctgataagcgcgctgagaggtggatgaaacaccaaagtctgtttccccgtccgcagtgggtgttgcctctttgtgtgtgtcccgatgttcctgcctgtgagtcggccttactccgtttccttagcgcccatgacacgccaagtcccgtttcgcactcggcttctcacccgcccagctcggctagggagggggagtttttagcacctaatatgcttcctgccattgcgcaatctgagcctgagcaactggaaacccccatttctcattagtgcaatgtcatatctgatcccaggaagcctggaaaataaaagacgatgcattataacttgcggaagtacaagaaaaaaaaaaaaaa

SEQ ID NO: 5632 - DNA, 3767 bp, Homo Sapiens
  NM_032433
gcgcgcggcggcggccgacggcggctgagctgtgctgcgcggcgcggcgcggtgcggcacggcacggtgggagtgtctccggctggcttgcagggagaacaccgactgagacctcaaaccctggctccagtgtcatggaatccgtcacctttgaggatgtggccgtggagttcatccaggagtgggcattgctggacagcgcacggaggagcctgtgcaaatacaggatgcttgaccagtgcaggaccctggcctccaggggaactccaccatgcaaacccagttgtgtctcccagctggggcaaagagcagagccaaaggcaacagaacgagggattctccgtgccacaggtgttgcctgggaatctcaacttaaacccgaagagttgccttctatgcaggatcttttggaagaagcatcctccagggacatgcaaatggggccggggctgttcctgaggatgcagctggtgccctccatagaagagagggagacaccattgactcgagaggaccggccagctctccaggagccgccttggtctctgggatgcacgggactgaaggccgctatgcagattcagagggtggtgataccagtgcctactctgggccaccgcaacccatgggtggccagggattctgctgtgcctgcacgtgaccctgcctggcttcaggaggacaaagtggaggaagaagctatggctcctgggctgccaaccgcctgttcacaggaaccagtcacctttgcagatgtggctgtggtgttcaccccagaagaatgggtgtttctggactctactcagaggagcctgtatagagatgtgatgctggagaactacaggaacctggcctctgtggctgatcaactgtgcaaacccaatgcgttgtcttatttggaagaaagaggagagcagtggaccactgacaggggcgtcctctcagacacctgtgcagaacctcagtgtcaaccccaagaggcaattcctagccaagatacttttacagagatcctgtccattgatgtgaaaggggagcaacctcagcctggagaaaaactctataaatataatgaacttgagaaaccttttaacagcattgaaccacttttccagtaccagagaattcatgctggagaggcatcctgtgaatgtcaagagattagaaattccttcttccagagtgcccacctaattgtgcccgagaaaatccgtagtggggataaatcctatgcatgtaacaaatgtgaaaaatccttcagatacagctctgaccttatcaggcatgagaagactcatactgcagagaagtgctttgactgtcaagaatgtgggcaagccttcaaatattcctcgaatctccggcgacacatgagaacccataccggagagaagccatttgaatgtagtcagtgtgggaaaaccttcacgaggaactttaacctgattttgcaccagagaaaccacacaggagagaagccctacgagtgtaaagattgtgggaaagccttcaatcagccatcatccctcaggagccacgtgagaactcacactggagagaagccctttgaatgcagccagtgtgggaaagccttcagggaacactcttcactgaagacacatctgcgaacccataccagagagaaaccatatgaatgcaaccagtgtggcaagcccttccggacgagcactcatctgaacgtgcacaagaggatacacacaggggagaaactgtatgagtgcgcgacttgcggtcaggtcttgagtcgtctttcaaccctgaagagtcacatgcgaactcacactggagagaagccctatgtgtgccaggaatgtgggcgagccttcagtgagccctcatccctcaggaaacatgcaaggactcacagtggcaagaagccctatgcatgccaggaatgcgggcgagcctttggtcagtcttcacatcttattgtacatgtgagaacacacagtgccgggagaccctatcaatgtaatcagtgtgagaaagccttcaggcacagctcctcactcactgtacacaaaagaacccatgtgggaagagagaccattaggaatggcagcctgcctttatccatgtctcatccatactgtgggccccttgctaattaacttccattttgtaaaaatataaacacatggggctatgactttccctcgtaatactcctttagctgcatcctgtgtttcaatgtataatattttcattttggtttaattgtaagtattgtcttaacctccattatcgtttattctttgacccatctattatttggaattagatttttcaaaactaatatgtggatatattttcatagaggtataatgacttatagtgaaatgcatacatctgaagtgtacagttggatgagtttgacagatgcatacatgcatgtaaccaccaccccattccagatatagaatgtttctatctctctggaaggttcctgcatgttatatggctatttcttagttgcctttttgttgttggtttctaatttaattacatggtgagaagagtatgtggcctctttgttactgagtcataggtatttgctgagatttgctattaggtctggtgtggcttattcttctagctgccaacccaaattaccccttcctccttagaaaagaacctgggttttctgttcagattggcagtgtgcactattaaaaagcttccatctcccggctgggcacggtggctcatgcctctaatcccagcactttgggaggctgaggctgggggatcacctgaggtcaggagttcgagatcagcctggccaacatggtgaaatcccctctctactaaaaatataaaaattagccaagtttggtggcatgcacctgtaatcccagctacttgggaggctgaggcaggagaattctttgaacccaggaggcagaggttgcagtgagccgagattgcgccactgcactccagcctgggcaacagagtgaaactctgtctcaaaaataataataataaaaaaaagcttccatctcccagcccttcttgcaagcaagggcaggccatttcctccggtcctggctagtatgaatatgagaagtcactggatgtgactctggggaagatattgtgttcagggatggtttcatgtagccacatctctccacttcttgccttttggacaagtagacatgatttctagacctagaggagccctcctgtgaccataagggtaaaagccgcaagctaagaagagggtggccggaagtcataaccatcttgcttctgtaatctaaaaaatatttaggatagatttaatagaattggcatatttatgtgattgcagcagccctggactatttatttctggatgtcccatacatgaaaaatatgcacttcttactggtacagttttcttttgtttgtttttgtttttggtgggaggtttatttcacctgaatataattcctaactgatgcacttagtatatgtcagtttttataaatgcttcatggatggttgaaatcaatgtattgtattctacaaatgtctgctagatcaagcaaatgtgtttaaaaaccatctacacatttataaatgttgatctgtgatctagcatttattgagagaggtatgttaaactctcccaccatgattatgtattgctgaaaaatctttgtcattctgtcagtttttaaatttatgtatatacatacatatatatgttttgaagcaatgaaattaaatatagatactgacattttttacatttccaa

SEQ ID NO: 5633 - DNA, 3460 bp, Homo Sapiens
  NM_032434
cgagcccacatccgggagaggagagcggaagtggcgttggtctggccggagcccttgggtgaaattgttaggcgtggagagggagtgatgtcttccagactcggtgctgtacccgccacttcgggacccacaacctttaagcagcagaggagcacgaggatcgtgggagctaagaatagcaggacccagtgctccataaaggataatagtttccagtacactatccctcatgatgactccttaagtggttcatcgtctgcatcttcgtgtgaaccagtgagtgattttccagcatctttccgaaaatctacctactggatgaagatgagaagaatcaagccagctgctacttctcatgtcgaagggtcaggtggagtatcagccaaggggaaaaggaaacccaggcaggaagaagatgaagactatcgagaatttcctcagaagaagcataagctttatgggaggaagcaacggcctaaaactcagcccaatcccaaatcccaggcccgtcgtattcggaaggaaccaccagtttatgcagcaggcagtttggaggagcaatggtacttagaaatcgttgataaaggcagtgtctcctgccctacctgccaggcagtggggaggaagaccatagagggtttaaagaaacacatggaaaactgcaagcaggaaatgtttacttgtcatcattgtgggaaacaacttcgttcactggcagggatgaagtatcatgtcatggcaaatcataatagtttgcccattttgaaagccggagatgaaatagatgagccaagtgagagggaaaggctccgaacagttctaaagagactgggaaagctcaggtgcatgcgtgagagttgctccagtagcttcaccagcatcatgggatatctctaccatgtcagaaaatgtggcaaaggggctgcagagctggaaaagatgaccctgaaatgtcaccactgtggaaaaccatataggtcgaaggctggacttgcatatcacctgaggtcagagcatgggcctatatccttctttccagagtcaggacagccagagtgcttaaaggagatgaacctagagtcaaagagtgggggccgagttcagagacgttctgccaagatagctgtataccacctacaggagctggcctctgctgaactggccaaggaatggcccaagaggaaggtgcttcaggacctggtacctgatgatcgaaagttaaaatatactcgtccagggctccctaccttcagccaggaagtactacataaatggaagacagatatcaagaaatatcatcgtattcagtgtcctaaccagggctgtgaggctgtctacagcagtgtatctggccttaaagctcacctgggctcttgtacattgggaaactttgtggctggaaaatacaaatgtcttctatgtcagaaagaatttgtgtcagagagtggtgtcaagtatcacatcaactccgtccatgctgaggactggttcgttgtaaacccaacaacaaccaaaagctttgaaaagctgatgaagataaagcagcggcagcaagaagaagaaaagcggaggcagcagcacaggagcagaaggtctctaagaaggcggcagcagcctggcattgagcttcccgagacagagctgagtcttagagtagggaaggatcagaggaggaataatgaggaactggtagtgtcagcctcctgtaaggaaccagagcaggagccagtgccagcacagttccagaaagtaaagcccccaaagactaatcataaacgaggaaggaaataggcagtcagtgtaaaagtgctcctaggaaagcagatgtgatgctgttgtcacggggacctgtgctgggaggactgagtgaagattctttcagctgtttgtgtaaggctgtgactttctcagctccttcctcctgtgtaaatttcactgtcttcccttcttacattttgattcccccctccccttttagtaggttttcctgctattcctcgtcaagtcctcttgtttttttatcttgcccaaagagctccctctcaaggccaactataggctcctcttgccctgtacaaaactaagaaacctctttggttgtcctttccttcctggggtatagaatgttcttggaagctccattgatttagtagctgctccatcatctagcttgtgaaaccattccaaactaattttttaaaaccataactgatttgtcattttgtatttgtgatataacaagtctagaagttagaactgttgtcattcacataataagattactctgtctccttgggaaaaaaactttatggaggctgtttgtcctctcaatatggttttaagattgaaagtaagaaaacggatttaggatgaaaactctagaactaccctatgctgtttatactgggaaatgctttgtaccaagtagcagtgactagacccacagacatgaaaagcaaccttaggagtaaagtgacccaaacattaaaatgacaggaaagagaaagtagaagcagcaataaatactgccccaactttcctggagcccgaggcctcatccatagctatgatcacttgccctctgaagcttatttttgcttctttggttttaagaattgagaaatatcacattgcccctgatgttttgacagtctcctagtgctcctggtagtgccactaagggaaaaccaaggtgcgcattccttctccctggactttaccttacttgttagtctacgccccactgtttccacccatccccttagccaacctctgtctttttgaattttctgagaatattgtcctatcctcttttatatatggagttctctcctctttatatcctgagactttgacaccagatgtagatatttatctggagctggaaagaaaaattctttttctgtacctcatgcctatctggtaatgtttaatgggttatttctctttgagggtggctttctctggaacattggttagagcagctttgttgtcgtgtttctggattctcttccccattttgcgtaaatattggtcttatatattcttgcctattttgtggcatatgccacataaaaaatgaacctgatatagacaagtactaccttttcaaattctgaaaggctattaccactttaactctttgtgctcctccaaatagctttaaaatgtgggcttttgtgaagaccactttcaaacaagggagcactgaaacctgaattggatactgccagaataggtagttttgaaacaagttaaggacatggtatatgcactctgcattttcattggcagtgtgcccttaaagccctttcagtagatgagggttgtcagggaggagaaatgaagaagctatgttaatttctggtgagtaagacctggggaatgtttggcaatgacaaaagaaataaatgactctcagaaagaaaaaaaaaaaaaaaaaaaaaaaaaaaaaaaaaaa

SEQ ID NO: 5634 - DNA, 5809 bp, Homo Sapiens
  NM_032435
cagggcctgggcacgaccatggtgggacgtcgcccgcggcttcggggaccgctgcggcagcagaggcggctggccaggaacgcgggccgaggctggaccctttgggcagctagcccgtgatctctgccgtcaccgatcgcgattcctaccccctcgccttcccccggcgccgacggccacaccgccggacgatgcgcgcccgcggccgcccgggaggctgagcccagcttcccgctccgccttccccgcgcagctgcccccatggctttgcggggcgccgcgggagcgaccgacaccccggtgtcctcggccgggggagcccccggcggctcagcgtcctcgtcgtccacctcctcgggcggctcggcctcggcgggcgcggggctgtgggccgcgctctatgactacgaggctcgcggcgaggacgagctgagcctgcggcgcggccagctggtggaggtgctgtcgcaggacgccgccgtgtcgggcgacgagggctggtgggcaggccaggtgcagcggcgcctcggcatcttccccgccaactacgtggctccctgccgcccggccgccagccccgcgccgccgccctcgcggcccagctccccggtacacgtcgccttcgagcggctggagctgaaggagctcatcggcgctgggggcttcgggcaggtgtaccgcgccacctggcagggccaggaggtggccgtgaaggcggcgcgccaggacccggagcaggacgcggcggcggctgccgagagcgtgcggcgcgaggctcggctcttcgccatgctgcggcaccccaacatcatcgagctgcgcggcgtgtgcctgcagcagccgcacctctgcctggtgctggagttcgcccgcggcggagcgctcaaccgagcgctggccgctgccaacgccgccccggacccgcgcgcgcccggcccccgccgcgcgcgccgcatccctccgcacgtgctggtcaactgggccgtgcagatagcgcggggcatgctctacctgcatgaggaggccttcgtgcccatcctgcaccgggacctcaagtccagcaacattttgctacttgagaagatagaacatgatgacatctgcaataaaactttgaagattacagattttgggttggcgagggaatggcacaggaccaccaaaatgagcacagcaggcacctatgcctggatggcccccgaagtgatcaagtcttccttgttttctaagggaagcgacatctggagctatggagtgctgctgtgggaactgctcaccggagaagtcccctatcggggcattgatggcctcgccgtggcttatggggtagcagtcaataaactcactttgcccattccatccacctgccctgagccgtttgccaagctcatgaaagaatgctggcaacaagaccctcatattcgtccatcgtttgccttaattctcgaacagttgactgctattgaaggggcagtgatgactgagatgcctcaagaatcttttcattccatgcaagatgactggaaactagaaattcaacaaatgtttgatgagttgagaacaaaggaaaaggagctgcgatcccgggaagaggagctgactcgggcggctctgcagcagaagtctcaggaggagctgctaaagcggcgtgagcagcagctggcagagcgcgagatcgacgtgctggagcgggaacttaacattctgatattccagctaaaccaggagaagcccaaggtaaagaagaggaagggcaagtttaagagaagtcgtttaaagctcaaagatggacatcgaatcagtttaccttcagatttccagcacaagataaccgtgcaggcctctcccaacttggacaaacggcggagcctgaacagcagcagttccagtcccccgagcagccccacaatgatgccccgactccgagccatacagttgacttcagatgaaagcaataaaacttggggaaggaacacagtctttcgacaagaagaatttgaggatgtaaaaaggaattttaagaaaaaaggttgtacctggggaccaaattccattcaaatgaaagatagaacagattgcaaagaaaggataagacctctctccgatggcaacagtccttggtcaactatcttaataaaaaatcagaaaaccatgcccttggcttcattgtttgtggaccagccagggtcctgtgaagagccaaaactttcccctgatggattagaacacagaaaaccaaaacaaataaaattgcctagtcaggcctacattgatctacctcttgggaaagatgctcagagagagaatcctgcagaagctgaaagctgggaggaggcagcctctgcgaatgctgccacagtctccattgagatgactcctacgaatagtctgagtagatccccccagagaaagaaaacggagtcagctctgtatgggtgcaccgtccttctggcatcggtggctctgggactggacctcagagagcttcataaagcacaggctgctgaagaaccgttgcccaaggaagagaagaagaaacgagagggaatcttccagcgggcttccaagtcccgcagaagcgccagtcctcccacaagcctgccatccacctgtggggaggccagcagcccaccctccctgccactgtcaagtgccctgggcatcctctccacaccttctttctccacaaagtgcctgctgcagatggacagtgaagatccactggtggacagtgcacctgtcacttgtgactctgagatgctcactccggatttttgtcccactgccccaggaagtggtcgtgagccagccctcatgccaagacttgacactgattgtagtgtatcaagaaacttgccgtcttccttcctacagcagacatgtgggaatgtaccttactgtgcttcttcaaaacatagaccgtcacatcacagacggaccatgtctgatggaaatccgaccccaactggtgcaactattatctcagccactggagcctctgcactgccactctgcccctcacctgctcctcacagtcatctgccaagggaggtctcacccaagaagcacagcactgtccacatcgtgcctcagcgtcgccctgcctccctgagaagccgctcagatctgcctcaggcttacccacagacagcagtgtctcagctggcacagactgcctgtgtagtgggtcgcccaggaccacatcccacccaattcctcgctgccaaggagagaactaaatcccatgtgccttcattactggatgctgacgtggaaggtcagagcagggactacactgtgccactgtgcagaatgaggagcaaaaccagccggccatctatatatgaactggagaaagaattcctgtcttaaactaagtgccttactgttgtttaagcatttttttaaggtgaacaaatgaacacaatgtatctacctttgaactgtttcatgctgctgtgttttcaaaagctgtggccatgttcctaaattagtaagatatatccagcttctcaaaaaatgtatatgattgctgttagccatgtctattgtttttcctctggattcttttcttataacttggaatacacaaaagtgtaaaacaagagatgtgcaccaatgaaaactatgctgggtcgaattaccttcagcacaatgttaatgtttttgttctcatttatgcctttgtccatttgcacacaacagaaattgtaatgagcttcactatttttgtttctttccttccttttttttcttttttcctttctttcctttttcttgtcttgtttcttgtttttttttcttgtagtttcttttcttaattgtcatttttgcaacaaaaagccaagaaagagctttagtttcttggcaagaataatgtgatattagtaagtaaaggtcttaaaagtctgacgactggaatagatataaagtcctgtttaaactacctaaccttggctgtgggccgataatgcatatgtccagttctcacttaaattatgcaatgatatttctctctgaggaaattatacggaatgtaacttataaaagctttactgaatataagttataagcattttattcattagaactccaaaatagatgttcaaagttcagtccttgccatttgactgagaccacatggtgtgccccttgagtgaggctaatctttaggtttttcctatagaaaacattcttcctccatcagtagccctttatttgatattcagaagtggaaagctttttcattctccagtagaacttttaaaaattgttacagatacctagctcttcacagatatcatgtactgtaaacagtcatgtgtcttaattttattttctctatttgagtgcataattatcctaataatcccaaagacactgacaactcaaggaacagcagtacagtactattagaagttaagtatgttgttgttatttcacatttcatttaattgtggataaatgttagacatctgttgaaataagctcatatggtggaaacgacaactatattatgaattattttcagaaatggatctttgaatagcagatcaggatttaaataataaaattatctatgaatcacttttatggtcatacatatatgatacaaatccagagttattggtgcagaaatggctacccgagagcttggtaaatttgccttggtttcttatgttaaatgtattgtgcttcccttctgtctctagaatgtggctcttcagaagacagacaatcgacatttaaatttttccaaacaatgaaaaactaaattaaaaacattgcttgatatttcatttaaaattgcaccttgcttaaggtttactgaataactgaaatgtcagcaatttaaaataaattcaattgtgtgataaaatatctcacctataatagaagaaaaggaaaatcatattatttggcaattttgcagcattgtggttgcctaacaggtatatccagcagatgagaaacagtatgaaaggattgtattaacatggtaagttttgccctaaggaaaacgatcttgcattctggattcttgcagcaaagtctcagatacttaatacgttttcttgttttatcatctgttctatgattcggcttcactttgtgtggttattgaattatgtaacagagatttggttttcccaaaatgttatcacatttgaaactatgattgctttgtgttcagtccttttggaacacgtagcttccagcttaagggtagagaaatatatacctaaaatcatcaatacatgaaagaaaaaggatggaaactatgtcctcagttttacttctaccaaaacatccctgtatgtgtgtgcatgtatgttggcgtgtgtgtgtgtgcatgcatattagtaaatgtgtgtttgcatgtgtgtgttggggagtgtatgtgatctgggtgtttgtttatctctgttattattcccctttagctttattttagtcaactctacattatgatgaatttcaaaatgaagctgtattaaaataattgtaatataacaattcaatctcacatgttactgcagatagttaacttttgctgcaatctattgtacatttgcaattttctgtgttagtaaacttagcagaatctggttatttatttttgtgtaggcttaatgttcactgaaagataagtcaattactgttagtaaaaaattaaggtactctcactgcagagatttaaggcctgggcctaatgtgctgtattatgaagccttgtgactgaaaaatatgtttacatatgttgtctatttttttaataaacttttatagctggtctatttgctcagta

SEQ ID NO: 5635 - DNA, 3831 bp, Homo Sapiens
  NM_032436
agcgcgcacgctcgcgcacccggatcccggctcctgcatccagtcgccattcgggaggccgctgcgctgcagggcctcgcggagccgcccgcgaccgcgagccgggccctccgcgcggtccatcgcccactggacgccgcccgcggccggaccggttcaacttctcatctttgttcttcttcatatactataggctgtttgctgtggtttagtcaaaaagccatgtagaatgcctgccttttgaagaccacttttaaggtgtctagtaagacagcagcagtattgaaagtttttaaagaatataaccgtgtgtgttggtaacagacagaagaatggaagcattccaggaacttcgtaaaccatcagcacgtttggagtgtgaccattgcagtttcagaggcacagactatgaaaatgtacaaatccatatgggtaccatccatccagaattttgtgatgaaatggatgctggtgggctaggcaaaatgatattttaccagaaaagtgcaaagttatttcactgccataaatgcttcttcaccagcaagatgtactctaatgtatactatcacatcacatccaaacatgcatccccagacaaatggaatgataaaccaaaaaatcagttgaacaaagaaacagatcctgtgaaaagccctcctcttcctgaacaccagaaaataccctgcaattcagcagaaccaaaatccatacctgccctttcaatggaaacacagaaacttggttcagttttgtctccagaatcgccaaaacctactcctcttactcccctggagcctcagaaacctggctctgttgtttctcctgagctacagacacctcttccttctcctgagccttcaaaacctgcctctgtttcttctcctgaacctccaaaatcagtccctgtttgtgagtctcagaaacttgcccctgttccttctccagaaccacagaaacctgcccctgtatctcctgagtcagtaaaggctactcttagtaatcccaaaccccagaagcagtctcatttcccggaaacattggggccaccttcagcctcatctccagagtcaccagttctagctgcttccccagaaccttggggaccatccccagctgcatctccagaatctcggaagtcagcccggactacctcccctgagccaaggaagccatccccttcagagtctcctgaaccttggaagccgttccctgctgtctccccagagcctaggagaccagcccccgctgtgtcaccaggctcttggaaaccagggccacctgggtcccctaggccttggaaatccaatccttcagcatcatcaggaccttggaagccagctaaacctgctccatctgtgtctcctggaccttggaaaccaattccttctgtatctcctggaccttggaaaccaactccatctgtgtcttctgcatcctggaaatcttcatcagtctcacccagctcctggaagtctccccctgcatctcctgagtcatggaagtctggcccaccagaactccgaaagacagctcccacgttgtctcctgaacattggaaggcagttcccccagtgtctccagagcttcgcaaacccggcccaccactatccccagagatccgtagtccagcaggatctccagagctcagaaaaccctcagggtcaccagatctttggaagctttctcctgatcagcggaaaacttctcctgcttcacttgatttccctgagtcccagaaaagttcccgtggtggttctcctgatctctggaagtcttccttttttattgagcctcagaaacctgtcttccctgagacccgaaaaccaggtccttctgggccatctgagtcccccaaagcagcctcagatatctggaagcctgttctctctatcgatactgagcctagaaaacctgccctgtttcccgagcctgccaaaacagcccctcctgcttctccagaagcacgcaaacgtgccctttttccagagccccggaagcatgcccttttccctgaactccccaaatctgctctattctcagaatcacagaaggctgttgagcttggtgatgaactacaaatagatgccatagatgatcaaaaatgtgatattttggttcaggaagaacttctagcttcacctaagaaactcttagaagatactttatttccttcctcaaagaagctcaagaaagacaaccaagagagctcagacgctgagcttagtagtagtgagtacataaaaacagatttggatgcgatggatattaagggccaggaatcaagcagtgatcaagagcaggttgatgtggaatccattgattttagcaaagagaacaaaatggacatgactagtccagagcagtctagaaatgtgctacagtttactgaagaaaaagaagcttttatctctgaagaggagattgcaaaatacatgaagcgtggaaaaggaaagtattattgcaaaatttgttgctgtcgtgctatgaaaaaaggtgctgttttgcatcatttggttaataagcataatgttcatagcccttacaaatgcacaatctgtggaaaggcttttcttttggaatctctccttaaaaatcatgtagcagcccatgggcaaagtttacttaaatgtccacgttgtaattttgaatcaaatttcccaagaggttttaagaaacatttaactcattgtcaaagccggcataatgaagaggcaaataaaaagctaatggaagctcttgaaccgccactggaggagcagcaaatttgataacacagtgtgaatatttgttctacaaaggtgtttgttggaaccattctttgtaagtatagcttatcagatagcatagttggatcagtagatgacatgtatggtgtaccgtgtttcactgtctcagttgtgttactaagaatgagcatttgatcatttttttctggtctctgtctatgtgactatcttgtaagtcaataaatttctgtatagtccagatggattaaacttctcatttcttttaaatatgtatgaataataatacaaggaagtaggcattccatttaataatcaagagcaagttgtactcaaagcattcagttaaagtgtatctgtgtgtggaactaatttcagacaatagaaaatattagttgaaatgtttaagaattaggcatgaaaaataaatttgagaaattttgtttccttacatgtatttttaaatcataagagttattttctatctgatgtaaaattagtttataaatcttaatcagcttctagatgtttattagcttttatgtcatgaaatgttggagtctcagggttgctgattttctgctaatgggaaaaattgactaagtctttaaaatagtttgcagccttctcccacaggagacaagtgaaagataagtgtgattttagatctttcttgtccatagttgttttcagtggagtcttccattctgtatcttaccctaagatctggttcttccctccccatccccaccccccacccaccgcctgccagctcacactaatagatgattcttaattgccaaatgtgttagagtttgtatatcctactcctgggccttacatgtcgcctgttggggcttaagaccaggttgataagtaggaactgaaagtcttccagattcacagtagaaaattttatagacatttctgttaaagaaatatatcgattttatgtttttcaattatgttactgtaaataccttgtacctgttcatggattattttattctaaaatattttgtcaaatgtgtatcaaccaaattaaaaagaaaggttttcatgtcagcaacaaaaaaaaaaaaaa

SEQ ID NO: 5636 - DNA, 4217 bp, Homo Sapiens
  NM_032438
acatgcgcattgcgcccgcagccctggaccatttgtcaggactactcgtgagacggagaaaaaaaaaagagaaaatttggggaacccttaggagaaatcttgagagtggacagcaattgtgaagatcgccagagagttctgtgtttcatcaccgccgaaaggttaaaaaataaatcatgactgaatctgcctctagcacaagtggtcaagagtttgatgtgttcagtgttatggactggaaagatggagtgggcacgttaccaggaagtgacttaaagtttcgggtaaatgagtttggagccctggaagttattacagatgagaatgagatggaaaatgttaaaaaagcaactgctaccaccacttggatggtaccaactgctcaagaagccccgacctctcccccgagctccaggcccgtatttccacctgcctactggacatctccacctggatgtcccacagtcttttcagagaagactgggatgcctttcaggttgaaggatccagtgaaagtagaagggcttcagttctgtgagaactgttgtcagtatggcaacgtagatgagtgtctttctggaggaaactattgcagccagaattgtgctcggcacatcaaagataaagatcagaaggaagaaagggacgtagaagaagacaatgaggaagaagatcctaagtgtagtcggaagaaaaaaccaaaattatctctgaaagctgacaccaaggaggatggagaagagagagatgatgaaatggagaacaaacaagatgtaagaatcctgaggggttcgcagagagcacggaggaaaagacgaggggattcggctgtactaaagcagggtttgcctcctaaaggaaagaaagcgtggtgctgggcatcctacctggaagaggagaaagcggtggcagtgccggcgaagctgttcaaggagcatcaatcctttccatataacaaaaatggattcaaagttggcatgaaattagaaggcgtggatcctgagcatcagtctgtgtactgtgtcctcaccgtcgcggaggtttgtggataccggataaagcttcactttgatgggtattctgattgctatgacttctgggtgaatgcagacgctctggatatccacccagttgggtggtgtgagaaaaccggccacaaactccatcctccaaaagggtataaagaagaagaattcaattggcagacctatcttaagacatgtaaagctcaagctgctcctaagtcattatttgaaaatcagaatataacagtgatcccatcgggctttcgagttggtatgaagcttgaggcagtagacaaaaagaatccctcattcatctgtgttgctacggtaacagatatggtggacaatcgtttcctggtacattttgacaactgggatgagagctatgactattggtgtgaagcatcaagtccacatattcatccagttggttggtgtaaggaacatagaagaacccttattactccaccaggttatccaaatgtgaaacatttttcttgggataaatacttagaagaaaccaattctttacctgctcctgcaagagctttcaaagtgaaacctcctcatggattccagaaaaaaatgaagcttgaggttgtagacaaaaggaaccctatgtttattagagtagcaactgtggcagacacagatgatcaccgggtaaaagttcactttgatggctggaacaattgctatgattactggatagatgcagattctcctgatattcaccctgtaggctggtgttcaaaaacaggacatccccttcagcctcctttgagccccttagaattaatggaagcttcagaacatggtggatgctcaaccccgggatgtaaagggattggccatttcaagagagcgagacatctgggccctcacagtgctgccaactgtccctattcagaaatcaatttgaataaagaccgtatttttccagaccgcttaagtggtgagatgcctccggctagtccgtcatttccaagaaataaaaggacagatgcaaatgaaagctcttcttcccctgaaatcagagaccagcatgctgatgatgtcaaagaagactttgaagagagaacagaaagtgaaatgagaacatcacatgaagccagaggtgcccgggaagaacccaccgtccagcaggcacagcgtcggtcagctgtctttctgtcctttaagtccccaattccatgtctgcccttgcgctgggagcagcaaagcaaacttcttccaactgtcgcaggaatccctgccagtaaagtttccaaatggagcacagacgaggtgtcagaatttatacagagcttacctgggtgtgaagaacatggaaaggtatttaaagatgaacaaattgatggagaagcatttctacttatgactcaaacagacattgttaaaattatgagcattaaactgggccctgctctcaaaattttcaattccatcctgatgttcaaagctgcagagaagaattctcacaatgaactttgaagatggtgaattctgaataccatcagcattctgctttaaagctcatgttttattcaaagcacaaggacggttataactcctaagtgagaagtctccaaaactcaaaagagcaacactatcggattatttatattactcaagagacaatatatatgaattcttatgaaagtgcttgagcttttaaccaggtactgtctaacaacagtcatcttttggttctgttcactgagctaaatttatctttgtaaatctttttgagtctggggggtggggggaaggggggcttcattaattatttatggtaatggggggcagagtaagaacttttggcattttgtaaacattgttgaattctctttcatgtacactgtttctttttcaatactttcagaaacctttttatataatcaaatttcaatttaaaccaaattagtcgaaacctggctaagtttagccagtaggactgttatctgtattgttaattttgtgccatattttgaattgcaacattatgctaagtataactttgcaagtcatgatattgcctaactgcttgtcataattgtcagggctgaatagttgtaagaatgacttttctttgaatcagtatttttccttttgcacgcattatgaaatgttaaacaaattacttttcaccagcatctttactataattaccaaaaacatgtatataaaagaatgaaattgaaaaataaaatatataaacataaataaattaggtagtgtattttgagtggcatcagtctcactcatcttggtgccccggtgtttacaagagccagatggtgtcagaggagtacgcagttgtatgcagttatggttggggggaatgtttgtgagggtcttgaactatttatgagatgatcttgagcttctaattttcattgatgaaattgtggtggtttacagagactaagagctcattctgtcaacagaaacactaatctgtacagagcgctgtctcaggtcatgcattgtcctccaaacccaaaggtttttttcagggttggctagagagcgagtattgtgattttgctgaaaagacaaggtgtgaaggagcaacttcagttgacacaaaatttgaaatgctcacagatcagggaggtgatttcccaaagtaattgcccaagaacctccgttttggaaggattcctttttctgtagaatactttgcctcgatatataagcatacagatgcactttaaatgaaaacccttgattataaattgatagctggtagtgtttcttttgcaagaatgcatttctaaggcaaaaggtaaattattttgtccgtcttttgatgtactttctgattccaggattggatatttattcaaggactattttaaaaatagaaagtaagtttgtagcatgctgtctgaattctggggtaagttccacctcttctttagttgctttcgttttttatgatgtaggacttcctttgatatccctgttggaagtccattagcagtcctttgcatttgccaattcaaggtaaaacagggtcagtgacatctgcagtgtcccagtcatttatttgcatgaatctgcttaaataagttttttgttgctgttttttcttttttatgttttgttcagaatttgtacattcaagttgtacttgttatatctgacatgaatgaaataaaatcttaattacagatgctttttaaa

SEQ ID NO: 5637 - DNA, 5217 bp, Homo Sapiens
  NM_032442
agcggagatggcggcagggtcgggtgggagtgggggctctgggggaggccctggaccggggccgggcgggggtgggggccccagcgggagcggctcaggaccggggtccaacgggggtctgggcagcggcggggaactgcacccgcgcactgggcgcttggtgagcctgtcggcctgtgggcgtacggcgcggcggcagcagccgggccaggagtttaaccacgggctggtgttgagccgagaacccttgcgcgatggacgcgtcttcaccgtccgcatcgaccgcaaggtcaactcctggagcggctccattgagattggggtgacagcgctggaccccagtgtgctggactttccaagcagtgccacgggcctgaaggggggctcgtgggtagtgtcgggctgctctgtgctgagagatggacgctctgtgttggaggagtatggtcaggacctggaccagcttggtgaaggggaccgcgtgggcgtggagcgcacagttgctggggagcttcggctctgggtgaatgggcgggattgcggtgtggctgccacaggcctgccccctcgtgtctgggccgtcgtggacctttatggcaagtgcacccagatcaccgtgctaccccctgagccaggcttcagcccccctactcccatccccacacctcccctcgagcccttggcccccactgaagactctgccttggctgaacaggggacctctgcagatgaagccttcatggtgtccccagcgcaggcccggccggagacgtttcctaacagccttgagtcgcataatgactttgccaacatggagctgtctgaggtggtgagcaacaccatcctgtctgcctacaatggagggctcctgaatgtgaacctgagctccccaccggcaggggaaggcctgggatctagcggtgctgccacctcgcccattctcacttccaacgatgccctgctctttcatgaaaagtgcgggaccctcatcaaactcagcaacaataataagacggctgagcgccggcggcccctggatgaattcaacaatggggttgtcatgaccaatcgcccccttcgggacaatgagatgtttgagatccgtatcgacaagcttgttgataagtggtcaggctccattgagattggggtcaccacccacaaccccaacagtttggagtacccagccaccatgaccaacctccagtcaggcaccatcatgatgagcggctgtggaatcctgaccaatggcaagggcacccgccgggagtactgcgaattcagtctggatgagttgcaggagggtgaccacattggcctcacaaggaagtccaactctgccctacacttcttcattaatggtatcgatcagggagtggcaacccccttgacgcccccagtggtgtatggtgtggtggacttgtacgggatggcagtgaaggtgaccatcgtccacaataacaaccacagtgaccgtctccgccgaaacaacgccatcctgcgggcgctgtcccccgagggtgctctccgccgtgctgcccctgccgcccaggcagaacctgagcgcctgctcttccaccccaactgtgggcagaaggcagccatcacccacgagggacgcactgccctgaggccccatgccaccgatgacttcaatcacggcgtggtgctgagcagcagagccctgcgggatggagaggtgttccaggtgcgcatcgacaagatggtggacaaatgggctggctccattgaaattggtgtcaccacccacaaccctgcctacctccagttgccctccaccatgaccaacttgcgctctgggacctggatgatgactgggaatggggtgatgcacaatgggacgaccatcctggatgaatacgggcacaatctggaccgcctcaaggcaggggacacggtgggcgtggtacggcgggaggacgggactctccacttctttgtcaatgggatgactcagggccctgctgcctggaacgtgcccccgggcgtctatgctgtcgtcgatctctatggccaggcggcccaggccaccattgtggacgacgtggaggtggctccagttcctgaaccactccctgaggggaacaaccaggtgtctccaagctctccgtcctcaggggccgggggctctgacctgcgcttccatcagctgcacggcagtaacgcagtcatcactaacgggggccgcaccgccctccgccacaactgtcgcagcgagtttaatgacgccatcgtcatctccaaccgggccctgcgggatggagagctgtttgaaattgtcattcagaagatggtggaccgctggtcaggctccattgaggctggagtgactgctattcggcctgaagacctggaattccccaacaccatgacagacattgactatgacacatggatgctgagtggtacagccatcatgcaagacggtaacacgatgcgcaacaattatgggtgtgacctggatgcgctgggcacaggtgcacgcattggcatgatgcgaactgccaagggcgacctgcactacttcatcaacggccaggaccaaggcgctgcctgctcgggcctgcctccgggtaaagaggtgtatgcggtagtcgatctctatggccagtgtgtccaagtgtccatcaccaatgccaccggccccatggacaacagcctggcgaccagcaacactgccaccgagaagtccttcccactgcactccccagtggctggcgtggctcaccgattccacagtacttgcggcaagaacgtcactctagaggaggatggcacgagggcagtgcgtgccgctggctatgctcatggccttgtcttcagtaccaaggagctgagggctgaggaagtctttgaggtgaaagtggaagagctagatgagaagtgggcaggttccctgcggctggggctgaccacactagcaccgggggagatgggacccggggcaggcggtggtggcccagggctgcctccttccctgccagagctccggacgaagaccacttggatggtatccagctgtgaagtgaggcgtgatgggcagctccagaggatgaactatggccggaacctagagaggctgggggtggggagccgtgtgggtgttcgtcggggggcagatgacacgatgcacatcctggtggatggagaggatatggggcctgcagccactggcattgccaagaacgtgtgggctgtgttggatctctacgggccagtccgcggtgtgtcaattgtcagttccacgagactggaggagtcagaaggcacccagcctccttcccccagttcagacaccggcagtgagggcgaggaggatgacgagggcgaggagcatggcctgggaggccagaatgaagtgggtattatacccaccaccctcgagttcctggagaaccatgggaagaatatccttttgtctaatgggaaccgtacggccacacgggtggccagctacaatcagggcatcgttgtcatcaaccaacctctggtgccccagctgctggtgcaggtgcggatagatttcctaaaccgacagtggacatcttcccttgtcctgggagtcatcacctgcgcgcctgagaggctcaacttccctgcttctgcctgtgccctcaaacgggcagcctggctgctgcggggccgtggggtcttccacaacggtctcaagatctgcgagaagtttgggcccaatctggacacgtgccctgaaggcaccatcctgggactgcggctggacagctctggggggctgcatcttcatgttaatggggtggaccagggggtagctgtgccagatgtgccccagccctgccatgcgcttgtggacctctatgggcagtgtgagcaggtgacaatcgtgaaccctgagccaggggctgccagtgggaaaagtgctggaacccaaggggacatggagaaagcagacatggtggacggtatcaaagagagtgtgtgctggggtccaccacctgccgctagtcctctaaagagctgcgagtaccatgccctttgctctcgcttccaagaactcctgctgcttcccgaagattatttcatgcctccgccaaagcgaagcctgtgctactgtgagtcttgccggaagctgcgaggagacgaggcccacaggcgcagaggggagcctccccgggaatatgcactgccctttggctggtgcaggttcaacctcagagtgaatccccgcctggaggctgggacactaaccaagaagtggcacatggcatatcacgggagcaatgttgccgctgtacggagagtgctggaccgaggggagctgggagcaggtactgcctccatcctgagctgccgtcctttgaagggagaacctggggtagggttcgaggagcctggcgagaactgtgcacctcctcgggaggagcagccccctcctgtgctgctttccccctcccttcaatatgctggggcggagaccctggcctccaaagtgcaattccgggaccccaaatcccagcggacgcaccaggctcaggtggcgttccaggtgtgtgtgcgccctggctcctacaccccgggacccccttccgctgcccttggagaacctcctgaccctcacttcagtccagccgaacttgagtgggtcactaaggagaagggggccacactcctctgtgccctgctggtacgggtggaatgaggggtgagacaccactactacaagcacagtcgggccgcgggcccatggactctgagtggcgactgcctccacctcattcccgtgactcgtggcatgcgcaggtgctggagcttggcagccgcgcaggagcatgtaggcaggctctcagatgtaggtggcaagtggcacagctccatgtccggaggcccagcactccgtctgatgggaggagtcgtgggagcccagctccaggccctggtacccctcttcatgcactgatttggggaacatgactcccttttactcccctaccccacatcacttaatttatttccgtttttgtttctggttactgtgaatcccagaggagtctctccctgtgcccacatgaagctgctttttccggggccaccgggcgggagtggggaagggtgggcgcacggaagatgggggcctctgtacagttgttactgactctgatttctaaggagccaataaacaccgtctcagagaaaaaaaaaaaaaaaaaaaaaaaaaaaaaa

SEQ ID NO: 5638 - DNA, 5670 bp, Homo Sapiens
  NM_032449
agtggggtcacgtgttgcgcgcgagccacctcccctgctggcgcttcctgtcgctaccgctgcggcccagggcccgcgggagcccagggcggtgccgggtgagacaaggccggggtttggctcggattcaccgcgaggtatctaggctgccatgatgccagggccaagacctcggaagggccctcaggccagaggccaaggggtggccgctgccaagcagatggggctctttatggagtttggccctgaggacatgctgctgggcatggatgaggctgaagatgatgaggacctggaggctgagctgctggctctcacaggggaagcacaaaccacaggcaagaagccagcacccaaggggcaggcccccctgcccatggcccacatcgagaagttggcggcagactgtatgcgggatgtggaggaggaggaggaggaggaagggctggaggaagatgcagagctgctgacggagctgcaggaggtcttaggtgtggacgaggagactgagcccctggatggtgatgaggtagctgacccaggcggctctgaggaggagaacggcctagaagacactgaacctccagtgcagacagccgtcctgacagcttcagccccagcagctcaggccggagcatctcaggggctacacgctttgctggaggaacggattcacaactaccgagaggctgcggccagtgccaaggaggcaggcgaagcagccaaagccaggcgctgcgagcgcggcctgaagaccttggagtcgcagctagcctctgtgaggagaggcagaaagatcaatgaggatgagatcccacctccagtggccttaggaaagcggcccctggccccccaggaaccagccaacaggagccctgagacagaccctccagctccccctgccttggagtcagacaacccctcccaacctgagaccagcctccctggcatttctgcccagcccgtttcagacttagacccagacccgcgggccctgctgtcatcccgacagagagagtacaaagtggctgccctcagtgccaagcgggctggagagctagaccgtgcccgagagctcatgaggattgggaagagattcggtgctgtcctggaggccctggagaaggggcagcccgtggatctgagtgccatgcccccggcacctgaggatctgaagccccagcaggcttctcaggctcccacagcaccctcagtcattcccccagccgtggagcgagtgcagccagtgatggcccctgacgtcccagcaaccccagtggcccctacagagtcacagacagtgctggatgccctgcagcagaggctgaacaagtaccgcgaggcgggcatccaggcccggagtggtggggacgagcgcaaggctcggatgcatgagcgcattgccaagcaatatcaagatgctattcgagcacaccgagcaggacggaaagtcaactttgctgaattgcctgttcctccaggatttccccccatccctggcctggagtccactatgggtgttgaggaggacgcagtggcagcgacattggcagctgcagagaaactggcctctgcagaggattcagccccggctgataaagacgaggacgagcctcctgggcacctgcagggtgagcccccagcacaggccccagtggccaagaaacctgcacggcccacagtcccttcatcccagcgcctgcctgagcccagggcctcaagttctaaggagtcaccgagtccatctgtgcgggagcagctggcactgctggaggcacggaaactgcagtatcagcgggcagccctgcaggccaagcgcagccaggacctggagcaggccaaagcctatctgcgggtagccaaatggcttgaggctcagatcatccaggcccgatctggcagacctgttgatctgtccaaggtgccttcgcccttgacggatgaggagggtgacttcatcctcatccaccatgaggacctgcgactctcccagaaggcggaggaggtgtatgcccagctgcaaaaaatgcttctggagcaacaagagaagtgcctgctgttctccaagcagttcatgcaccagggcaacgtggctgagaccacccgatttgagaagcttgctcaggaccgcaagaaacagctggagatcctgcagctggcccaggctcagggcctcgaccctcccacccaccactttgagttgaagacattccagactgtgaggatcttctcagaactcaacagcacagaaatgcatctgatcattgtccggggaatgaacctcccagcccctccaggggtgactcccgatgacctggatgcttttgtgcggtttgagtttcactaccctaactcggaccaggctcaaaaaagcaaaacagctgtggtgaagaacacaaactctccagaatttgatcaactcttcaaactaaacatcaaccgaaaccaccggggcttcaagagggtgatccagagcaaaggcatcaagtttgagatcttccacaaagggtccttcttcagaagcgacaagctggttggcacagcacacctgaaactggagcggctggagaatgagtgtgagatcagagaaattgtggaggtcctggatggaaggaagcccaccggggggaagctggaggtgaaggtgaggctgcgggagcctctgagtggccaggatgtgcagatggtcactgagaactggctggttctggagcccaggggcttgtgaggtgggcagctctctgggccttcagaacctttgccccctccttttactcaactaactactcaactcatatctggagagaaaacctaggagtttctcatctatgagaaagacctaccatgctgggtagggcttatgggctgagtttctgatgttcctcagtagaactgggaagagaaggtaaccttccaaggtttaactatctatctatctatctatcttcaggaaaccctttctaaaatctttgtgttttcactgcagtttagactgacttcttgtgctttgcacccctgtgtagccgatggccagcaccaggagaggagtcaggccgcgactgtgcaggagatgactttcccagctttgctggcttcagaagcctttgtacataagagatgctgctacccaagcaccaaagacctgttaagcatgtgcactactgaccacgactctggtctttcctgttgttggcccctctggggctctacagaaacaggctgggttccaggagcccatctccccgctgtctccccctgccccgagtctggaagagggcaaggacacttccattcctctgtaccatggagtcctgcagccccttaacccctgcgtggcaactgtgtacagcttacccctgcctccagttgcaccacttctagatgtgcctttaaaagatctaactatgggatgggagaacttgagggtgatcgggaacctcccctgctgagggtggtgtcagggttccgtgactccagtgggccagtggtagcctgtcccagacaactccgtcaccccagctctgcctgtgcctttatccctgacagctgctgcactagccttcctgcttccctaaggacttagtggagggggaaagttgtttttggtactacttggtgggaagtaaggggaaggttggatcttgggtttggtctacccacccaagagaaaagactgttaactggaagaaaaaatatatatataaaattttatgtagacacgtttatttatctaggaaactaagtctaactcattgtagggattttatactcaactatacagagtatccaccaaagtcctaatctaaagtcctgctccctgtcactttttaaaagccagggtagcagtaacatgacaaacggctgctgtggcttcctcttgagagaggacagggaaagcctttcctcttcggctggttatgtggggaacttccttagtttttttccacaagaaattctcctttggctttgtttttctgaatggatggagactatgaaggggtttgtagttgtaagagatttaatattcaaaactgaaatattctgcatttcttagaaataccccatcttcccccaccccctttttgaattattaattcaagatcaacaaagcattcctcaagatcacttttaaaaaaggttagaagtgaagcaaatacattcagcttactgatcactatagtattgcataagcacagctcaagaactgagctttgtatgtgtccttttgggggataacagggctggaccatgcttccctgcccttaaacgcagagcttttagtgggtcacagagcgggaactacacacaagtgacttttttccccatgagccctctggccgattttttttttttttttttttttgagacagagtagctctctgccagccaggctggagtgcagtggcatgatctcagctcgctgcaacccccacctcccaggttcaagcgattctcctgtgtcagtctcctgagtagctgggattacaggcacccaccactatgcccagctaatttttttatttttagtagagacggtgtttcaccatgttggtcaggctggtctcgaactcctgacctcatgatccacccacctcagcctcccaaagtgctgggattacaggtgtgagccaccgcacccggctggccaatcttatcagaagtgagctaccaaaacttccacagatgtgagatttaacacttaattgcagtcacgtgtatgcaacacagcaataatctagaatgaaaaggagggtgattagccttcataagatgacctatagagcaaagaaaggtgactggaagggttcctaacccaacctactccccttagggtgtgtatccaacccagtgcttcctaagagggttacggaccactgtggttatcctctaaagttccagccagctctaggagtttctaaattcaggcctctgttggaaatggcctatttcgatagatagaaagttttctatagctctaaaggtttctcctttgcaacccattcaatttcagtctgctgctttgctctttcaaaacagaacctccaggctgacgaggcaagacaaagcctcccaccagacttggagattgaagttcttaaaaggcctttgttgtagccaaaggcatgcatgcgtcactggtagtaggaggagcctgtcccagcttcatcttgtcctgagatttatccacatacaggaaacaggcgggacacagtggctcacgcctgtaatcccaccactttggaaagctgaggcaggtggatcacctgaggtcaggaattcaagaccagcctggccaacatggtgaaaccccgtctccactaaaaacaaaaacaattagctgggcatggtggccggcgcctgtaatcccagctactagggaggctgagacacacgaatcccttgagcccaggaagcagaggttgcagtgagcctcgattgtaccactgcactccagcctgggcgacagagcaagactctgtctcaaaacaaacacaaatacagtatccaaacattggagattagtgactcacctgcagttgggagccagctacaacccaaatcattttaaaattttcaattctttgatctcatgcaatgcacactttcttctgaattagcaaactgaataaactacagaaattttttagaatcaaaaaaaaaaaaaaaaaa

SEQ ID NO: 5639 - DNA, 2199 bp, Homo Sapiens
  NM_032464
acgtgatccacccgcctcggcctcccaaagtttttggattacaggtgtgagccacctcgcccggtcctatctctctttcttctctttctccctctcactttgtttctcttctctctctctctcccgcctccttcccccgtctcccctcccttccccccaccgccctcttcatagctgagcctgtccggcagtgcggcggatgtacggatgattcagtggctggcaggaagcccgccctgcccgcccgccagtgtcagtggtgttggcatcagcttgggcaggtgtgcgggctcaggatggggcggccgtggtgaggaaccctggactctcagagatggaatttcaccgtgttgcctaggctggtctggagctcttgatctcaagcgatcctccctgcctcggcctcccaacgtgctgggattataggcgtgagccaccgctcctggccagggtctgttcctagttgcaacagttcttggaaacccactcgagagggccacgcctccattcaccaggccacgcatcacaagaggcaacaccaggagccaacatgagctcggggactgaactgctgtggcccggagcagcgctgctggtgctgttgggggtggcagccagtctgtgtgtgcgctgctcacgcccaggtgcaaagaggtcagagaaaatctaccagcagagaagtctgcgtgaggaccaacagagctttacggggtcccggacctactccttggtcgggcaggcatggccaggacccctggcggacatggcacccacaaggaaggacaagctgttgcaattctaccccagcctggaggatccagcatcttccaggtaccagaacttcagcaaaggaagcagacacgggtcggaggaagcctacatagaccccattgccatggagtattacaactgggggcggttctcgaagcccccagaagatgatgatgccaattcctacgagaatgtgctcatttgcaagcagaaaaccacagagacaggtgcccagcaggagggcataggtggcctctgcagaggggacctcagcctgtcactggccctgaagactggccccacttctggtctctgtccctctgcctccccggaagaagatgaggaatctgaggattatcagaactcagcatccatccatcagtggcgcgagtccaggaaggtcatggggcaactccagagagaagcatcccctggcccggtgggaagcccagacgaggaggacggggaaccggattacgtgaatggggaggtggcagccacagaagcctagggcagaccaagaagaaaggagccaaggcaaagagggaccactgtgctcatggacccatcgctgccttccaaggaccatttcccagagctactcaacttttaagcccctgccatggttgctcctggaaggagaaccagccaccctgaggaccacctggccatgcgtgcacagcctgggaaaagacagttactcacgggagctgcaggcccgtcaccaagccctctcccgacccaggctttgtggggcaggcacctggtaccaagggtaacccggctcctggtatggacggatgcgcaggatttaggataagctgtcacccagtccccataacaaaaccactgtccaacactggtatctgtgttcttttgtgctatgaatttggattcctaattgctattgttggttgctggggttttaaatgattgataagcttgtacagttaacttatagagggggagccatatttaacattctggatttcagagtagagatttctgtgttgtctcctagaaagcattacatgtagtttatttcagcatccttgttgggtggggccctggctctcttcccctttggtgggacctcccctttctttgggcttcagttcactcaggaagaaatgaggctgtcgccatctttatgtgcttccagtggaaatgtcacttgctacagacaatagtgcatgagagtctagagaagtagtgaccagaacagggcagagtaggtcccctccatggccctgaatcctcctctgctccagggctggcctctgcagagctgattaaacagtgttgtgactgtctcatgggaagagctggggcccagagggaccttgagtcagaaatgttgccagaaaaagtatctcctccaaccaaaacatctcaataaaaccattttagttgaaaagcaaaaaaaaa

SEQ ID NO: 5640 - DNA, 3642 bp, Homo Sapiens
  NM_032468
tttcagttctagaggcccttacagtgcagggattggccagtctcaagctctggtaggcaagtgcatgcagtgtgcctaaaacctgccagcagtacttttgagtttttttttttgttttgttttactttagcatttattattcatggattgaagaaatcaaaatggctgaagataaagagacaaagcatggaggacacaagaatgggaggaaaggcggactctcaggaacttcattcttcacgtggtttatggtgattgcattgctgggcgtctggacatctgtagctgtcgtttggtttgatcttgttgactatgaggaagttctagccaaagcaaaggacttccgttataacttatcagaggtgcttcaaggaaaactaggaatctatgatgctgatggtgatggagattttgatgtggatgatgccaaagttttattaggacttaaagagagatctacttcagagccagcagtcccgccagaagaggctgagccacacactgagcccgaggagcaggttcctgtggaggcagaaccccagaatatcgaagatgaagcaaaagaacaaattcagtcccttctccatgaaatggtacacgcagaacatgttgagggagaagacttgcaacaagaagatggacccacaggagaaccacaacaagaggatgatgagtttcttatggcgactgatgtagatgatagatttgagaccctggaacctgaagtatctcatgaagaaaccgagcatagttaccacgtggaagagacagtttcacaagactgtaatcaggatatggaagagatgatgtctgagcaggaaaatccagattccagtgaaccagtagtagaagatgaaagattgcaccatgatacagatgatgtaacataccaagtctatgaggaacaagcagtatatgaacctctagaaaatgaagggatagaaatcacagaagtaactgctccccctgaggataatcctgtagaagattcacaggtaattgtagaagaagtaagcatttttcctgtggaagaacagcaggaagtaccaccagatacttaaagcttcaaaaagactgcccctaccaccacaggaggaccagcctaaccatacgctccaaaagatggctgtgatagatcttgtgaagcaattactgagcagatcaagatctttgggaaggaacactaaagatgttttgaatgaattatagtccactggcattttagtgtatttttttttctttttagaaacacacatttctaaaaatgtcatgttacattcctgcatgtcccttttgatagcattagtggatccattggatttcttttttctttttgtgagacagcttttagtcttacctgaatttatgtgtgtttttccgacagtggttaataattatattggtgatgtagcagcaattgtgttggcagggttttcatatattattagtaattaacactaactgttggactgacttgtgtacactgtgttaaacatgatttaaaagctattaagagtactttgtgttagcactcttaaaaacgctaacagagatcatcattagctgtgaagatttgagttgtatatacctgcactgatattcttatcaaaaatttctacattagctttaagtgttcagattaacacttttgaaatttttgtagcttttagctgattaattagaaaaatttaatatttcagtgaaagttttaaattatcatttatttatttttttaaatgagaggggaaagctgaaattccttgttaagacacaaggaaaaagaatggccctactattatcatgcaaaaatgctttgttggcacctcagattaatcatataatagctatagtctcttcagcatttgtttaaattttagaaaacctgtataaattactggtgcataacttaaagattattctgcctttggctaattgagtaattcccctccagcactagagaccgctcagtgctcttactagatgaactcagtaacgccttgagctgggttgattgaggatgtgtgaaaagctcacagagcccgatgcctgctgctatttcacggcaatgagcctttttctttctacactgaagattttcttcttatttaatgtggtttattttgggctcagaaataattgctctgttgaaaataatcctttgtcagaaaagaaggtagctaccacatcattttgaaaggaccatgagcaactataagcaaagccataagaagtggtttgatcgatatattaggggtagctcttgattttgttaacattaagataaggtgactttttccccctgcttttaggattaaaatcaaagatacttctatatttttatcactatagatcatagttattatacaatgtagtgagtcctgcatgggtactcgatgtgtaatgaaacctgaaataataagataataagaaaagcaataattttctaaagctgtgctgtcggtgatacagagatgatactcaaattataataaaactcttcattttgtgaattatagaagctactttttataaagccatatttttttagggaaactaaggagtgacatagaactgatgaatgagtaaaagtaagttttgctggatttttgtagaactctggacgttgaggattcattatgctgtggttaactttaaatatttttgaattccaaatatctgaattaatgagccttgtctttacaaatatgtgccattgtgcaacatcggtggattttctaaaaataatgtaaatgtcttctattaaatgttgagtgcaataaaatacagaagaattctctatattgtcattatttttgaagtataaggtatttttaatttgttacataataaaatcagttcattttatccttactagtattttagaagattatagcatttttgataactaaaatcacaaaggaataccttcagccagttaacgtatttctaacagataatgcttattttgcatttactatcatgctacattgccaggaagcaagattaaaattaaatagcccctgcagccatcctttgtagattttgtcctgcacctagaagttttgattattccctggacagcctgctccaccttttttccccaaatttttaatttttgtgagtatataatagatgtataaatttgactatatgagatatttcgatacagatatagaaaatgtacaataaattattgttggctatagtaactctgttttgctatcaaatactagatcttattcattgtatataactatatttttgtacccattaaccatcttcacctcctgctcccctctcccctcactacccttcccaacctctggtaaccatccttctaccctctacctctgtgagttcaattgttttaatttttagcacccacaaattagtgagaacatgtgatgtttatctttctgtgcctggcttatttcacctaacataatgacctccagttccatccatgttgtttcaaatggcaggatcttattcttttttatggctgagtagtactccattatatatgtaccacattttcttcattcgtctgttgacagacccttaagttgattccaaagcttagctattgtaaatagtgcaataaacatgagagtgcgtaaatttaaaaaaaaaaaaaaaaaa

SEQ ID NO: 5641 - DNA, 1017 bp, Homo Sapiens
  NM_032476
cggcgtctgcgcagctgccagcgcctttaagcccgggctcgcgctctcggaccgtgctttcgccgcctgggagccgtccggcgcagcagtttctaggtccccactgtccccgccgtcccgccccttcgcgtcccgggaaccggctggcttccgagccgcactcgccgatcctccaggcatgccccgctacgagctggctttaatcctgaaagccatgcagcggccagagactgctgctactttgaaacgtacgatagaggccctgatggacagaggagcaatagtgagggacttggaaaacctgggtgaacgagcgcttccttataggatctctgcccacagtcagcagcacaacagaggcgggtatttcttggtggatttttatgcacccaccgcagctgttgaaagcatggtggagcacttgtctcgagatatagatgtgattagagggaatattgtcaaacaccctctgacccaggaactaaaagaatgtgaagggattgtcccagtcccactcgcagaaaaattatattccacaaagaagaggaagaagtgagaagattcgccagattttagccttatatgtaattccttcacatttgggcagcatggacgagaaggaagaatttgcaagtttggcctttatataagcatgtgttgcaggtgctgtttgatttttctaaggtatttttagcccttgatcccctttgcttgcgagaggtggggaactgctcactgacagcttctctgtaacctgcagtaccagtggatcgttcttgattttgttttcattagtgtcatttctttgtcattgaggacttttccccttacaacagtaacaccattttttgaagagcaaaacttataatacctcctgggattgtgagctagtcattcagcctgtgtaaccatgtggaaataaaaattgacgaccaatgtattatatggacaacttttgctttgagtaataaacttgattgtaggaatgtgaaaaaaaaaaaaaaaaaaaaaaaaaaa

SEQ ID NO: 5642 - DNA, 632 bp, Homo Sapiens
  NM_032477
gcggccgcggccaatcggagccgctcttgctgcgacgcagcggtcggaagcggagcaaggtcgaggccgggttggcgccggagccggggccgcttggagctcgtgtggggtctccggtccagggcgcggcatgggcgtcctggccgcagcggcgcgctgcctggtccggggtgcggaccgaatgagcaagtggacgagcaagcggggcccgcgcagcttcaggggccgcaagggccggggcgccaagggcatcggcttcctcacctcgggctggaggttcgtgcagatcaaggagatggtcccggagttcgtcgtcccggatctgaccggcttcaagctcaagccctacgtgagctacctcgcccctgagagcgaggagacgcccctgacggccgcgcagctcttcagcgaagccgtggcgcctgccatcgaaaaggacttcaaggacggtaccttcgaccctgacaacctggaaaagtacggcttcgagcccacacaggagggaaagctcttccagctctaccccaggaacttcctgcgctagctgggcgggggaggggcggcctgccctcatctcatttctattaaacgcctttgccagctaaaaaaaaaaaaaaaaaaaaaaaaaaaaa

SEQ ID NO: 5643 - DNA, 1614 bp, Homo Sapiens
  NM_032478
aacgggcacttccggagccgggcgtctacagaccgcggccaccttccacctgcgcccgaggcagacggtgcaggggcctccgggacaggcgtctgaggcctgctccgcagcgcgggcccgggggcgggcctaggggcggggcctgctgtggtgcgctcaggcaccgcgctggccacctgtgcccgggtcctagtggcggccgcagtgtcgcaggccggagggaagatggcggcgccctggtggcgagccgcgctgtgcgagtgtcggagatggcggggcttcagcacctcggccgtcctgggccgccggacacccccgctggggccgatgcccaacagtgacatcgacttgagcaacctggagcggctggagaagtaccggagcttcgaccgctaccggcgccgagcagagcaggaggcgcaggccccgcactggtggcggacctaccgagagtatttcggggagaagacagatcccaaagagaagattgatattgggctgcctccacccaaagtctcccggacccaacagctactggaacggaaacaggccatccaggagcttcgggccaatgtggaagaggagcgggctgcccgcctccgcacagccagtgtcccgctggatgccgtgcgggccgagtgggagaggacctgtggcccctaccacaagcagcgtctggctgagtattacggcctctaccgagacctgttccacggtgccacctttgtgccccgagtccccctgcacgtggcctacgctgtgggtgaggatgacctgatgcctgtgtactgtggcaatgaggtgactccaaccgaggctgcccaagcgccagaggtgacctatgaggcagaagagggctccttgtggacgttgctactcactagcttggatgggcacctgctggagccagatgctgagtacctccactggctgctaaccaacatcccgggtaaccgggtggctgaaggacaggtgacgtgtccctacctcccccccttccctgcccgaggctccggcatccaccgtcttgccttcctgctcttcaagcaggaccagccgattgacttctctgaggacgcacgcccctcaccctgctatcagctggcccagcggaccttccgcacttttgatttctacaagaaacaccaagaaaccatgactccagccggcttgtccttcttccagtgccgctgggatgactccgtcacctacatcttccaccagcttctggacatgcgggagccggtgtttgagttcgtgcggccgcccccttaccaccccaagcagaagcgcttcccccaccggcagcccctgcgctacctggaccggtacagggacagtcatgagcccacctatggcatctactaaggagccagagtgtgcgcatttcagagcatgggattgatcggcagcaagagtaaagacacagctccagaggcccacactgtggggtctgggccctgccttaggcagcccccctctttggccccctcccgtcaggcccagggcttggagtgaaagtgactctcaggtggtggggtggggaatgtgaataaacatgatttcttgccgggcaaaaaaaaaaaaaaaaaaaaaaaaaaaaaaaaaaaaaaa

SEQ ID NO: 5644 - DNA, 880 bp, Homo Sapiens
  NM_032483
tcgctcggagctcgcggccggatggggaaggcggcggcggcggtggcctttggggccgaagtgggcgtgcggctcgcgctgttcgcggccttcctggtgacggagctgctccccccgttccagagactcatccagccggaggagatgtggctctaccggaacccctacgtggaggcggagtatttccccaccaagccgatgtttgttattgcatttctctctccactgtctctgatcttcctggccaaatttctcaagaaggcagacacaagagacagcagacaagcctgcctggctgccagccttgccctggctctgaatggcgtctttaccaacacaataaaactgatcgtagggaggccacgcccagatttcttctaccgctgcttccctgatgggctagcccattctgacttgatgtgtacaggggataaggacgtggtgaatgagggccgaaagagcttccccagtggacattcttcctttgcatttgctggtctggcctttgcgtccttctacctggcagggaagttacactgcttcacaccacaaggccgtgggaaatcttggaggttctgtgcctttctgtcacctctactttttgcagctgtgattgcactgtcccgcacatgtgactacaagcatcactggcaaggaccctttaaatggtgaaaatgggcagatgaatagcaataagtggacctttgttactcttctgagttagaaaaattctaatttagtacactctgaacaaagcttattatacttacttaagatgtgttttgatttggtgttcagaaagcaacctgacaatgataatactgtaactatgataaaattgagaataaaaagattttatttagaaaaaaaaaaaaaaaaa

SEQ ID NO: 5645 - DNA, 2496 bp, Homo Sapiens
  NM_032484
cctggtggccggatttcccagttggggcccagccttttaaagccatcgctccttctttctggccggatgtgtgctgagacccagagtcacccaggggtctccgtcacgtgccaggagtaggcagaagtgggctgtgacagatcaggaaacagagctcagtgcagcccactaaattgctcagggccctacagctaacaagcggcagaggcaggatctgcactcaggagctgcttggagatgctgctgtggccactgctgctgctgctgctgctgctgccaacattggccctgctcaggcagcagcggtcccaggatgccaggctgtcctggcttgctggcctccagcaccgagtggcatggggggccctggtctgggcagccacctggcagcggcggaggctggagcagagcacgctccatgtgcaccagagccagcagcaggccctgaggtggtgtctacagggagcccagcgcccccactgttccctcagaaggagcacagacataagcaccttccggaatcatctccctctgaccaaggccagccagacccagcaggaagacagtggagagcagccactgcccccgacctcaaaccaggaccttggggaggcctctctgcaggccaccttgctgggtctggcagccctaaacaaggcctacccagaagtgctggctcagggacgcactgcccgtgtgacgcttacatccccttggccccgacccctgccttggcctgggaataccctgggccaggtgggcacccctggaaccaaggaccctagggccctgctgctggacgcactgaggtccccagggctgagggcactggaggctgggacggctgtcgaacttctggatgttttcttgggcctggagactgatggtgaagagctagctggggcgatagctgccgggaaccctggagcgcctctccgtgaacgggcagctgagctccgggaggccctagagcaggggccacggggactggcccttcggctctggccaaagctgcaggtggtggtgactctggatgcaggaggccaggccgaggctgtggctgccctcggggccttgtggtgccaaggactagccttcttctctcctgcttatgctgcctcgggaggggtgctgggcctaaacctacagccagagcagccccatgggctctaccttctgccccctggggccccctttatcgagctgctcccagtcaaggaaggcacccaggaggaagctgcctccaccctccttttggccgaggcccagcagggcaaggagtatgagctggtgctgacggaccgcgccagcctcaccaggtgccgcctgggtgatgtggtgcgagtggttggtgcctacaatcagtgtccagtcgtcaggttcatctgcaggctggaccagaccctgagtgtgcgaggggaagatattggtgaagacctgttctctgaggccctgggccgggcagtggggcagtgggcgggggccaagctgctggaccatggctgtgtggagagcagcattctggattcctctgcgggctctgctccccactacgaggtgtttgtggcgctgagggggctgaggaatctgtcagaggaaaatcgagacaagctggaccactgccttcaggaagcctctccccgctacaagtccctgcggttctggggcagcgtgggccctgccagagtccacctggtggggcagggagccttccgagcactccgggcagccctcgctgcctgcccctcctcccccttcccccctgcgatgccccgggtccttcggcacaggcacctggcccagtgtctgcaggagagggtggtgtcctgagtcaagtcctgccccaccgcccagctccccccagaggccacctcgcccctccctctgggacctctccggatggggagtccttggccagggtctctgactctgtgtcacctgacatttgcccatgagagccgctgggccttagagaggccttggcccagctgaccggttctgaagtatgggcctccggggttagcagatgccagcagtgcctgcccgtgtccccatgtcccggcatgaaggacactgctagagagttaccatgcacaccgatggtttcctgtatcacagcccaaagaggttctctggtggccacagctgtgtgctcagtcagtgcactgggcaagctagaagtgttggggggttaatgtccccaggagcagcaaccctgagtcaataaggagcaggacctcagcttcattgtccttgagcaggacaattctgaagtgtattctacataaactctcagaggatgcccagcaggatggagtcccagttgcccgcagcagtaacccactcattcatgtacttcctgcgggggctctcccttccctctcttccccactcccccgccttgggcttcctgggatggctcccaaataaacctcttgcacccagaaaaaaaaaaaaaaaaaaaaaaaaaaaaaaaaaaaaaaaaaaaaaaaaaaa

SEQ ID NO: 5646 - DNA, 3704 bp, Homo Sapiens
  NM_032485
ctttgagcggaagttggatcactgaagcgccaaaaaagaatttaggggaagacctgattttcgcttgaggcatttttgcggcgctgtgcgctacagacaccttctggaagctgcggtggggaaactgagtttcccgagccgttgagacagatggggttcagcaccgcgcggggacgacaggaaagctgcggctgaagagaactgcggacttggcaggagtcgcctgaggagctaagatcccggagactcttagccccgtggtgcttctctacgggagggagggagggagaatccggccggacagatctgcgcgtatcctggagccggcccagttgtgaactaggagagctttgggacctctgtcccaagcaagagagatgaatggagagtatagaggcagaggatttggacgaggaagatttcaaagctggaaaaggggaagaggtggtgggaacttctcaggaaaatggagagaaagagaacacagacctgatctgagtaaaaccacaggaaaacgtacttctgaacaaaccccacagtttttgctttcaacaaagaccccacagtcaatgcagtcaacattggatcgattcataccatataaaggctggaagctttatttctctgaagtttacagcgatagctctcctttgattgagaagattcaagcatttgaaaaatttttcacaaggcatattgatttgtatgacaaggatgaaatagaaagaaagggaagtattttggtagattttaaagaactgacagaaggtggtgaagtaactaacttgataccagatatagcaactgaactaagagatgcacctgagaaaaccttggcttgcatgggtttggcaatacatcaggtgttaactaaggaccttgaaaggcatgcagctgagttacaagcccaggaaggattgtctaatgatggagaaacaatggtaaatgtgccacatattcatgcaagggtgtacaactatgagcctttgacacagctcaagaatgtcagagcaaattactatggaaaatacattgctctaagagggacagtggttcgtgtcagtaatataaagcctctttgcaccaagatggcttttctttgtgctgcatgtggagaaattcagagctttcctcttccagatggaaaatacagtcttcccacaaagtgtcctgtgcctgtgtgtcgaggcaggtcatttactgctctccgcagctctcctctcacagttacgatggactggcagtcaatcaaaatccaggaattgatgtctgatgatcagagagaagcaggtcggattccacgaacaatagaatgtgagcttgttcatgatcttgtggatagctgtgtcccgggagacacagtgactattactggaattgtcaaagtctcaaatgcggaagaaggttctcgaaataagaatgacaagtgtatgttccttttgtatattgaagcaaattctattagtaatagcaaaggacagaaaacaaagagttctgaggatgggtgtaagcatggaatgttgatggagttctcacttaaagacctttatgccatccaagagattcaagctgaagaaaacctgtttaaactcattgtcaactcgctttgccctgtcatttttggtcatgaacttgttaaagcaggtttggcattagcactctttggaggaagccagaaatacgcagatgacaaaaacagaattccaattcggggagacccccacatccttgttgttggagatccaggcctaggaaaaagtcaaatgctacaggcagcgtgcaatgttgccccacgtggcgtgtatgtttgtggtaacaccacgaccacctctggtctgacggtaactctttcaaaagatagttcctctggagattttgctttggaagctggtgccctggtacttggtgatcaaggtatttgtggaatcgatgaatttgataagatggggaatcaacatcaagccttgttggaagccatggagcagcaaagtattagtcttgctaaggctggtgtggtttgtagccttcctgcaagaacttccattattgctgctgcaaatccagttggaggacattacaataaagccaaaacagtttctgagaatttaaaaatggggagtgcactactatccagatttgatttggtctttatcctgttagatactccaaatgagcatcatgatcacttactctctgaacatgtgattgcaataagagctggaaagcagagaaccattagcagtgccacagtagctcgtatgaatagtcaagattcaaatacttccgtacttgaagtagtttctgagaagccattatcagaaagactaaaggtggttcctggagaaacaatagatcccattccccaccagctattgagaaagtacattggctatgctcggcagtatgtgtacccaaggctatccacagaagctgctcgagttcttcaagatttttaccttgagctccggaaacagagccagaggttaaatagctcaccaatcactaccaggcagctggaatctttgattcgtctgacagaggcacgagcaaggttggaattgagagaggaagcaaccaaagaagacgctgaggatatagtggaaattatgaaatatagcatgctaggaacttactctgatgaatttgggaacctagattttgagcgatcccagcatggttctggaatgagcaacaggtcaacagcgaaaagatttatttctgctctcaacaacgttgctgaaagaacttataataatatatttcaatttcatcaacttcggcagattgccaaagaactaaacattcaggttgctgattttgaaaattttattggatcactaaatgaccagggttacctcttgaaaaaaggcccaaaagtttaccagcttcaaactatgtaaaaggacttcaccaagttagggcctcctgggtttattgcagattaaagccatctcagtgaagatatgcgtgcacgcacagacagacagacacacacacacacacacacacacacacacacacacacacacacagtcaaatactgttctctgaaaaatgatgtcccaaaagtattataataggaaaaaagcattaaatataataaactaatttaagaagtgataaagtctccagatgcagtagctcacactgtaatcacagtgactcaggaggctgaggtgagaggattccttgaggccagggttcgagaccaaccttgggcaacatagcaagaccccatttcttaaaaaaaaaaaaaaaaaatttaaacttagctgggtatggtggcacatgcctatagtctcagctacttgtgaggctgaggcaggaggattctttgagcccaggagtttgaggttacagtgagccacaatcacaccaatcactgcactccagcctgggcaataaagtaactcttgactcaaaaaaataaaaaaaattgtagtggtagccatgtgttaattgttaaataaattctccaaagggctaaaagtaaattacttataaattttttatagttgtatttttgacctgccttttatatgtatgaatatttcatagttttgcatatcagatgtaggcatacagacaaatacataaaccaatgaatatattacatattctgtgttccaataaaactttatttatggacactaaaatttgaatttcataaaattttcccatgtcaagaatacaaaaaaaaaaaa

SEQ ID NO: 5647 - DNA, 7329 bp, Homo Sapiens
  NM_032486
agccgtagacggccgagcagtggagcgaggccgcctaaaggagagccgcgctgtcgatgagtcccagtgggccacctggagcggaagtggaggagcggccggaagtagccggaatctctgaaagactgaccgactgactctgacaggatccggggctgagggaaggaggcggcggccatggagttgggcgagctgctctacaacaagtctgagtacatcgagacggcatctgggaacaaagtcagtcgccagtcagtgttgtgtggaagccagaacatcgttctcaatggcaagaccattgtgatgaatgactgtattatccgaggggatctggcaaatgtaagagttggacgtcattgtgttgtgaaaagtcgtagtgtcataaggccaccattcaagaagttcagcaaaggtgttgcattctttcctttacatattggagaccatgtctttattgaggaagattgtgtggtcaacgcagcacagattggttcctatgttcatgttgggaagaactgtgtgattgggcgccgatgtgtgttgaaagactgctgcaaaattcttgacaacacagtattacctccagaaactgtggttccaccattcactgtcttctcaggctgcccaggactcttctcaggggagctcccggagtgcactcaggagctgatgattgacgtcaccaagagctactaccagaagtttttgcccctgacgcaagtctagcatctctgcctcatgtcttgaatctgcttgagctctaagatgaacctggggacaaagtgagccagtcagcacctacaaagagcttttgtgtctttgacatctaccaccctcctccttttaaaaaatttctttagaatttctcaatcttcaaggctctaagtgcttaagaattcactaacagacagaccatctggaggagctgtcttcaaatgctgtgcttacaccttatctatgaacagtcactttgtaccattatctgtggaacacagaatcatctgttcccaacactccagccccttggtcctgtggatggctggatcccgcctgaaacggacctgcagagcagcagcacccttccggtgtggaggctatgtagctggtgcgctgctcacggccattcactgcccatgctgagcgcctctcacacaggtaatgcccagcttttctgctgctaacacatttggccagttgttgcagttgctcatcatcttgggaaaggtgtttgtgacttttcagagcccagattcctgttgtctattaaaacttgaagggaggggtgaatagtgtttctctcttcttcccaaaatgaccttagctgtcctaggatagttagtaaaagactttttagcattttgacctagggcctttggctttcactaaaagtggggacctcagtatcccagattgtaattttgccaagtgttagatttgagtctctcatgtggatgcattagtcaggtggttactccttgcttcaaggtacttaccttatttcattgaagacaccgcatttgtgaactcttgcttcctggcctagaaccattcagcctaccctgtatttgccataaactccacaattcacaccaaaatgtctgtacttagagctaattcgcatatatacaggaagggctcttagaatcagtttgtgggcacagagcctcaggagtaaatgaagttactagggctgttcttaccatctccttctggccaaatagcacaacatttcctcgttctgctctgacctcttagcttagaaggaagattcagaagtgaggggctaagaaggttgtccttgcctaatgctctgatctgtaagtgaatagggcagaacagttcagccttgaggttagaatttagcaggagctatcctgacttaatatccagttgtggggtttgcaaaacaaaacagctgtatgtaatcattgccactagttccatctagaactcctttctagtttgttatttttaaaatgtttatacataaaaccaccaaaatacatagcttcgacaagatggaagtttatttctctctcccataacagtgcagtgatagtcagctggtccaggccaggcaaggggctggtccatgatgtcatcaggcacccaggttcctactgtcttgccatgtggccacagttagcaacaaaggaggctgtaaatttagtttctacttgggcagccaaaactctgaggaaggagattctgctagtaaaaaggagtgggggaagaatggccattgggagacaacaagcagactcaaccaggcctctttgttggcttcctttcctcctgctgcacatgagccttcgccgtgcatttggagccatgacagctgatagctccagacctgcatcctcctagcttgggggctctgaatgaaaggtttcttcccttccagttcgaatttggaaactcccaaagttctcaatggtttgttgtgagttccatgtcctcttggatcagtcactgtggccatgcatgtttggccacatgattaatccagtctgggtcatgaccttttcttcatccaaaacaaggtgatgggaagacaaaaacaatagctactacaaacaataggagtttataattatgtgctgatgtattcgaagatgtgttgacagtcgtgagtgtgtatcctaggaaaggcgagctggactctgtctccatggtggctctcaccccagggacctaggaacagcctgtcaccacacaattacttttataaccctggagatgaaaatctccttgtcctcaaaatacttccagaagaacaaccagatgggaaggaccttggttgggactctttccagttcacttggggcagagggaatttaatggctcacgtagctgaaaaggatgggctagattgggcttcaggctgcatcccaggactccaaacagggatctgtctctttggctctcagctctgctttcatttgagttggctttattcttgggcttcacagtgtggccccacagcaccagttattgataaaaagagctcccctttgctgacagaactgctggatttggttctcattggtccagacgaggaaggtatccagcctcaagtcatcattgtggccaggaagatggaatacaccaaatggacaggcctggcatgtacccacagagactgagagttggtgctggtggttgtggtggcagatgatattacctgaagaagggacgaatgggtgctgggcaggacaaagcatcagctgtccagttcaggcctctcctctttccctggtgtcttcattttcctccgtctccctgctgtcccttaccctctgcccaatctctcattactcctggtcttgggagttgccttctgaggatactccactgggggtacctgagcctggattagagggcagggggaggatattgcctagccaaagtgggtgttcaataaagaaccatttggagatggtcttctgtctggaactgcttcctttttgttttattatttttccccagatgagctgactgggccatggaactgcatccttatggttcccatagcaccttaccgaggcgcccttatcaatagagttttagttatgtacctgtgttcttgtctgaacccctactaactgtgagctcctgaggagtcaggcctgagtctgtgggtcatctagcacatccttaatagaatgattgcctggatgtgaccaccctcacccccaaccctcacacaccctgccagcatgcctcagaccttaccccagctcaagataagtctcagattgcaggatacctgctgcagggaacaaaggtgaatgattgtcttgtgagcctcctgttgactgattctgttttacatggctgcacagagcccttgtggttatttggggttggggtggtggcttctgtattagtcacttctgcatgaaccatttcactcaggatctgaggccacagttcctttcttagtcactgatacatctggcagacttgaaattaatcagacaaacattgttcatagttaacatatccttggaagtttctcagctataaggaagaggtcttggtggctagggaggcctttctctgtatcctgttctatccagtgagagcctagagggtgctgcccagccatattctggctagcctcagcggttctcctgaaaaaaaattggcatctgacaacctggatggtgactataggtagtcaaatccagctggctggtctcctgggggttagcttccatggagctgcaagtcccctgaaatgatactggcagtgttgggacagcgtgtccgaaggcctggttttttcagaactggtctcagcaaaatgtctcgccaacttctacagttcccataagtacatgataactgaaacacttctagagccccccagcaatgggcttgtgcttttagtagaatatgtgcttgcttccatttaggggtaagaaggtgggcccctcaccatatgctgcacagagaagagagacaccatcactcatttattcatttaacaagtgctttccaagccactactaggtgccaagcacttcctaggtcctggggatacagtggagactaagatggagccagttctttctcatagggatctcacagcttagtgagtgagaaagccaaagagtcaaaatacagagagggtctgaggggcccattttgagagccatcatagtggtgaggagtgtgagtgctagagtcaggctgatcaaatcccagcctgccattggctagccttgtgactttgagcaagttatcttacttcgtggaacctcaggtttctcatccataaaatggggaagttggatagggtattatgatgattgaaatgcatttatacatgtaaagcataagtactggctcagggtgagcactcaataaacggcagtttattaggcacttttattaggaagtgatacaccttgagcaaaaccccttagagtataaggcatagcattcttacatatttttaaaatttaaaataaaatttaaaacatcttgccctttataatcagtccgccacaaacaagagatggagaaatcacccttccttgttttgtatctatggggtgcaaacatttaatcctcccaactgtcaaaaaagtgagagtttcacagcctgttttacagcagaggaaactgatattcagagaggttaagtaaatttgcccaatgccacacatctaataaatggctgagctggaatcaaggccagctcttacttggctgcaaaatccatgttttatgcagctcctccactatcttggcctccaaggcagctggctttgaacactacccttgcagcccagtcagccaatcccttgctctcctgaagcttttgctggtgggccagccccacctgctttccttgtgcactctgacttggaccctgaagtgagaagagttggcacaggacatcttacttccctgaaaacagtacctggacttttctgtatcttcacatccattgggcattgggcaaatgggtcatgcagatgaaaaccatccaagataagagacatgggagtgaaattcacacccactctggctttcataccatgggtctgaacattagcccatggtgtttcttggccatactgacctgtgccatttcagctgcattcatctcagttggtgttgtctgctggctgctctttctgatttcccacaggagcagtaagaacctgaggaagagtagggtcagaggagtctgggagaatgaggaaatatgagagccccaggaactgaaaaggcctgtgagagactctgagcttcctgggaacaggtataggttctttttatttcaataataacagaaacaactgtcaaaaccatgtgcctgtactatttggagtgctgtccttgcagaatctcattataagaaccttaggaaataggcacatcatctcctggatagaatcctaggaaatgggcactataatgggcactttatcccattttataaacatggaaattgaggcacagagagattaagtactttcccaaggtcatacagctagtgatggaggagctagcatttgaacccggagtttttagtctattgagtttaaccgacagatcatactgtgttttggtagggagggagggaggaagcaagcaagtgaacaaatgagtctgggatttaggacttgccagacaaacaaggcccaagaggcaagtgtgcaggtgggtgtagttgggagtcagcagagttgggttggaattcaagctttgccacctgctggctataaaccttggttgggtaagtaacccaaggtaaatgagatcatctctgtaaaactcttagccttgtgcctggcacatagtaaatgcttaataagggttcactgttagtattactgttactgataacatacaaatagattgtattaatggaccataattgcaactgtataaaacaaattccatgtttggccaggcgcagtggctcaagcctgtaatcccatcacttcgggaggccgaggtgggcagatcacgaggtcaggagatcaagaccatcctggctaacacagtgaaaccccatctctactaaaaatacaaaaaaattagccaggcatggtggcgggtgcctgtattcccagctacttgggaggctgaggcaggagaatggcgcgaacccagggggcggagcttgcagtgagctgtaattgtgccactgcactccagcctgggcgacagagcgagactccgtctcaaaaaaaaaaaaaaaaaccacaacaacaacaacaaaaattccatgttgacaaggatgggaatatgagaacatggaaacagctatgaaaagacataagagaattaggaggattttctttaatatatcattttttaaaaaaaaacttgcttgtatttgtttattttttaaatagagacagggttttaccatgttgcccagactagtcttgaactcctgggctcaagcgatcttggcctccctaagtgctgggattacagtcatgagccactgtgccccgccattttttaataaacctttctaatggaacaagtaaaacacatgcagtggatgctcagcaggccttgagtgtgtgaatgaaaaatatttgaacttgtttttactggttgatttcattgcttaaaaaacataccttagctggacgcagtggcgtgcgcctgtagtcccagctactcatctcttaaaaaaaaagttttatgcttgttaatttcataaatgctagagggatcaccctaatcaaataaagctactcaaaaataaaatatgaaaggtgttagtgggatacagctttctagttttttgccactagtggataggttggaatttaaattcttcggatattg

SEQ ID NO: 5648 - DNA, 3072 bp, Homo Sapiens
  NM_032497
catttacaggaggtgagcatgaagtggccaatgggaaaattctaggaggtattgggactcatgaaggttctgtttcggagcccttgagctgccgcttggccagttcccacactgtggagtatgctttcgttttcaacaaatcccagctcttgttcttttgttgcttcattctttctttgctttgctgggcgttttgtctaattctttgttcaaaacgccagtaacctggacagcttgcagtcaagaccccctaccggtgacacttgcgctcttcggggaggtaaacagcatttcctctcagctctgggttggaaaaagccgcagcagctgatgggcccgggaacccgaggccccgccccctaggtggtcctagcctttgcgcgtgcgcggcgtgtctgcgtgggcgcatgcgcataacggccgccatcttaacagcgcgttcccgttggcgtctgaggaacagcatctctgccttcctgttcacggtgaccttcgcttggtgtcctcctggcctcagcaacctgacaattctgtcgtgtcccgagagatggctaatgaatggcgcttgatgacagatgagtaatgcctgttgctgaaagattgacgatcatctttctcaagatgttttctgtcttcatgagtcaaaatttgaagaggaaaggatggtggctgggtggttgacaaattactctcaggactcagtgacctttgaggatgtggctgtggacttcacccaggaggagtggactttgctggatcaaactcagagaaacttatacagagatgtgatgctggagaactataagaatctagttgcagtagattgggagagtcatattaataccaaatggtcagcacctcagcagaattttttgcaggggaaaacatccagtgtggtggaaatggagagaaaccattttggagaggaactgtttgactttaaccaatgtgaaaaagccttgagtgaacactcatgccttaagactcacaggagaacttactttagaaagaaaacctgtgagtgtaatcaatgtgaaaaagccttcagaaaaccctctatctttactttacacaagaaaactgatatcggagaggaacttcctaactgtaatcaatgtgaaacagccttcagccaacatctacatcttgtttgcaagaaaactagccaaaatctacatcttgtttgcaagaaaactcacactcaagagaaaccatataaatgcagtgactgtgaaaaaggcttaccttcctcctcacacctcagagaatgtgtaagaatttatggtggagagagaccatatactcataaggagtatgtcgaaaccttttctcattctacagccctttttgtacacatgcaaactcaagatggagaaaaattctatgaatgtaaagcatgtgggaaacccttcactgagtcgtcatatcttactcaacatttaagaactcatagtagagtgttacctatagaacataagaaatttggcaaagcctttgctttttccccagatcttgctaaacatataagacttagaactagaggaaaacactatgtttgtaatgaatgtggcaaagaatttacttgtttctcaaaactcaacattcacataagggttcacactggagaaaaaccgtatgagtgcaacaaatgtgggaaagccttcactgattcatcaggtcttataaaacacaggcgaactcacactggagaaaagccttatgaatgtaaggaatgtgggaaagcttttgctaactcttcacatcttactgtacatatgagaactcacactggtgagaagccttatcaatgtaaggaatgtggaaaagcctttattaattcctcttcctttaaaagtcacatgcagactcatcctggtgtaaaaccctatgactgtcaacagtgtgggaaagccttcattcgatcctcatttcttattcgacatttgagaagtcacagtgcagaaaggccttttgaatgtgaggaatgtgggaaagcctttagatactcctcgcaccttagtcaacataaaagaatacatacaggggagaggccatataaatgtcaaaagtgtgggcaagccttcagtatctcatcaggccttacagtacacatgagaactcacactggtgaacggccctttgaatgtcaggaatgtgggaaagcctttactcggtccacatatcttattcgacatctaagaagtcatagtgtggagaaaccatataaggaatgtgggcaaacctttagtaattcctcatgccttactgaatgtgtgtgaattggggctgatacttggaaagaatgtggtaaagccactacttcctcacacttactgaacatgtactcattcatagtggcaatgtacacagtcataaggaatgtgggaagccttccttggtgtctcagatcttaacaattccaatagaagagaagacatatgaatgtaaggaatgtgggaaaatcttggctccttccataggccttactattcatgtgtctgtgcatcctaggaaacaaactgaacgtaggaaacctgtcgatgcttacatcttactgagtctgtttgaactcatgctggagagaaatgctatgaatgtgaggaaggtggaaaagctttcattattttcctcgggccttactgagcttgtgagcacattggatataaatgcacgtcctctggctgtaaggaatgtgttgaaacctttcactctgccttataccttaatattcagctgtgatctcacaagtgtgaaaaatcttatgaatgtaaaatgtgtggagattcttctttgtttttagcttccactttgggaacatgtcaaagcacacattgagaagtcccatgagtgaaagagatgttggaaagcccttgaacttggtcgttaggaaacatccacactgaagaggaacctgactgtatggaaggtcaaaaaggctgtattaatttacatgcaaaaagtcacactagaggaatgccatatcagaatgcttttggtaaatatacatgttttaaagaggttatatatcattaataaaaatatctagctggtctgaaaaaaaaaaaaaaaaaa

SEQ ID NO: 5649 - DNA, 2595 bp, Homo Sapiens
  NM_032499
agattgcatactcaagaagaggaggaacataaaatacgtgatgtcttctcttaagtcaatcgcaggccactctgctgagcatcttctcccaggagtaccagaaacacattaaaagaacacatgccaaacatcatacttcggaagcaattgaaagttattaccagaggtacctgaatggagtggtgaaaaatggagctgccccagtgctcctggacctggccaatgaggtggactatgcgccctcattaatggctcggcttatactggagaggtttctacaggaacacgaggaaactccaccctccaagtctattataaatagtatgctacgggacccttctcagattccagatggagttctagcaaatcaggtctatcagtgcattgtgaacgactgctgttacggaccactagtggactgcatcaagcatgccattggtcatgagcatgaggtcctgctgagagacttgcttctagagaaaaacctgtccttcctagatgaagatcagcttcgtgcaaagggttatgacaaaacaccagacttcattttacaagtaccagttgctgtagaagggcacataattcactggattgaaagcaaagcctcatttggtgatgaatgtagccaccacgcctacctgcatgaccagttctggagctactggaatagatttgggccaggcttagtcatctattggtatggatttatccaggagctggactgcaaccgggaaaggggcatcctgctcaaagcctgtttccccacgaacattgtcaccttatgccacagcatagcttgaccctgaagatcctggaagagaagctgggaggaaaaggtgaatccggaagcaattttactttcctgcactgtaagatcctggcaacatctgccctgaacttcagctgaactcttgctgcccgtagtcacaccactacctctttagacaaacatatcaagagtttctgttttccttcatcccttgctgatgtgaacagccaagaactacagacacaacccactcattatcagcatttctgtctctgtcaaacaattagtttatagatagtcataatctttctttcttccggatggtttatccttgtatgctgaacaaaagaaaaaatgtgaagactgaaaggtgtgatttttcaattctcctcccagttaccgaatcaccctcttatttttttttccctaagcctccgttcactgtctctccctctccctttctcttcatgtgcactcacagagacccagcattgcattaccatcgtggaataatctagcgcaaacctaggaaagctgaagccacaaagtccaaagccacctttgtactcacctgcagagctccagaagaccttgatggcagcctgcctatgctgtgtgtttgctatattcaatctttacggcttcctgacttctgtgacagtaagccaagtgcaaaaatacacttgatgagaatttcctcttttaataatgttatttgaacaccacatattttagatttatcttatttgaaagtattagttccattgtgcctggaaaccacactcctttagattgggggccgagaggcgacaacccaacattgaggagagtttatttttaaacatggctagttgtcagtatgtacgtgagctagtatttttatgagtcgagttttttaaaggcacattctgtatactgcttagtatatgcattttataccatgtaattataaaacactcgagtaagttcagcattagaaatgtttagctttgtatgaactgagtgtgccagaaataaacctggagcaatttttaaataagcaaaataaaggagatttttctatttgttcactttaatttattcacttttgtgtacttttatgtactgcaaatcagatttcagtctaaagcgaaacatcagtaagttaataataaacctatcttttgggaagttgaatattaatctgtacccaaaacgtatttagtaaaatatttgcccccgccaccctgccatgctgacataacaacttttataatgttgaatagatgatatgggaaatactaataacaacaatgtaatttttgcagacagctttaacttatatacattgcttgatttttttcaaaagactaaatatgtcatttatactttgtttattttctaccaaagaaggtttgtaaaaatatgcctgctgcttttccttttgaaggacacaaacctggtcccaacatgtgtggattttaactctgagtggggtgcattaaatcaaaagagagaggcagaagatgaaatgctaaagaagggtcaggcaaacttctgtttcagtataaaattcatcatgcaggcttctgagtgaaatagaatgatttgaaaccactactgtattgcctggatacacacacacacacacacacacactttatacaaaaatgttaaaagcaggtttcctggcatgttctaaactgttttttctttaggaataaattacatttatctgcacagatgttgaaaatcctgttaaacccttgtcaaggatttgtttattttacattaaacaaatttattatgatgaacgtgaacaaataaattaaaaaataaaaaaggta

SEQ ID NO: 5650 - DNA, 4488 bp, Homo Sapiens
  NM_032501
aaaaggaaaacgaggcaccgagaagttaaggaacttgctcaaggtcacagagtttgaactcaggctacagatgctgcagcaactggagaaagtcctcatcgccccatatcacccaccaccgacccccagcaggacgtgacccccgccaggacggaggccggcagctggggggctggagcatgggacccagaacacggactcaggcttgcgcagcctcctggcttctaggcgggagcctagaaaggcgccagcccctttcgcgtgctgctgagactccaggggtggggttcactctcaggggcgcacaaaggcatgaaaaccttggcttcagcctctgagatgcggaactgaccgacctattgtcttgggacccaccagtgcgcttgggtgcaccagcccccttaacgttggtgccggctccctcccggctcctccccatcccagagggtcccctcgccccaggccctgagcctgcgtcctggggtcctgggccgcacgtgcctctggcagctcgaagaagctgtcggggcttgcaggagagcgtgcaaactgaaaccaaaacaggccgactcgaggaacatccgggtgggaccgcagactcaccggagcgcagcgcctgggccagggcctgggaccctgctccgccccgcgctcccctgcaccccttccccacgctgctcccctcttcctaagcggccccccctctcccgggcagcagaagaaggggtgggacccgggcgggctccgggagggggccctggaggaatggatggtggcggaagggcggagcaggggcggggcccgcggagactccacggggcgccccgggcgtgaggcacccactctgggagcacagagagctcaggtagcctgcctagatggcggcgcgcaccctgggccgcggcgtcgggaggctgctgggcagcctgcgagggctctcggggcagcccgcgcggccgccgtgcggggtgagcgcgccgcgcagggcggcctcgggaccctcgggcagcgctcccgcagttgcagcagcagcagcacagccaggctcgtatcccgcgctgagtgcacaggcagcccgggagccggccgccttctgggggcctctggcgcgggacactctcgtgtgggacaccccctaccacaccgtctgggactgcgacttcagcactggcaagatcggctggttcctgggaggccagttaaatgtctctgtcaactgcttggaccagcatgttcggaagtcccccgagagcgttgctttgatctgggagcgcgatgagcctggaacggaagtgaggatcacctacagggaactactggagaccacgtgccgcctggccaacacgctgaagaggcatggagtccaccgtggggaccgtgttgccatctacatgcccgtgtccccattggctgtggcagcaatgctggcctgtgccaggatcggagctgtccacacagtcatctttgctggcttcagtgcagagtccttggctgggaggatcaatgatgccaagtgcaaggtggttatcaccttcaaccaaggactccggggtgggcgcgtggtggagctgaagaaaatagtggatgaggctgtgaagcactgccccaccgtgcagcatgtcctggtggctcacaggacagacaacaaggtccacatgggggatctggacgtcccgctggagcaggaaatggccaaggaggaccctgtttgcgccccagagagcatgggcagtgaggacatgctcttcatgctgtacacctcagggagcaccggaatgcccaagggcatcgtccatacccaggcaggctacctgctctatgccgccctgactcacaagcttgtgtttgaccaccagccaggtgacatctttggctgtgtggccgacatcggttggattacaggacacagctacgtggtgtatgggcctctctgcaatggtgccaccagcgtcctttttgagagcaccccagtttatcccaatgctggtcggtactgggagacagtagagaggttgaagatcaatcagttctatggcgccccaacggctgtccggctgttgctgaaatacggtgatgcctgggtgaagaagtatgatcgctcctccctgcggaccctggggtcagtgggagagcccatcaactgtgaggcctgggagtggcttcacagggtggtgggggacagcaggtgcacgctggtggacacctggtggcagacagaaacaggtggcatctgcatcgcaccacggccctcggaagaaggggcggaaatcctccctgccatggcgatgaggcccttctttggcatcgtccccgtcctcatggatgagaagggcagcgtcgtggagggcagcaacgtctccggggccctgtgcatctcccaggcctggccgggcatggccaggaccatctatggcgaccaccagcgatttgtggacgcctacttcaaggcctacccaggctattacttcactggagacggggcttaccgaactgagggcggctattaccagatcacagggcggatggatgatgtcatcaacatcagtggccaccggctggggaccgcagagattgaggacgccatcgccgaccaccctgcagtaccagaaagtgctgtcattggctacccccacgacatcaaaggagaagctgcctttgccttcattgtggtgaaagatagtgcgggtgactcagatgtggtggtgcaggagctcaagtccatggtggccaccaagatcgccaaatatgctgtgcctgatgagatcctggtggtgaaacgtcttccaaaaaccaggtctgggaaggtcatgcggcggctcctgaggaagatcatcactagtgaggcccaggagctgggagacactaccaccttggaggaccccagcatcatcgcagagatcctgagtgtctaccagaagtgcaaggacaagcaggctgctgctaagtgagctggcaccttgtggggctcttgggatgggcgggcacccaagccctggcttgtccttcccagaaggtacccctgaggttggcgtcttcctacgtcccagaagcagcccccaccccacacatgacccacaccgccctcacgtgaagctgggctgagagccctttctcccatccattggaggtcccaggagtgtcacccatggagaggctatgcgacatggctagggctggttctgccatctgagtttggtttcctggaatgaaaaggcattgccatctccattcctctgccctcttgagccagcacaggaaggtgaggccctgggatagcgcgcctgctcagataacacagagctagttagctagtagcaaccgtgttttctccagatctgtctagatacaaaggtcagaaatcttatttttatacttttatattgtggaagaacagcatgcaacactcacatgtagtgtgtggatttacttgaacatgttctttttaacatgtagttatgaaaatctccttttttgcctctactggtgaggaaacatgaggatcagaggccacatttttaattattgttagtgtatttggaagtctgaattggagatgtttgtacctctgtctaaacagttcccttgagaacttccaagcctccggcatcttttcctggtgagtgtttctcctgtgcttggttgtgtataatggagctaactcctaagcggtggggtgaatgtggccgccttagttctgaagctactccagttatgttctgtttcttcaagctgtgatccagaaagatttttgtgcccccagatgcctcttgataggagaggcaacatactccaaatagttgggttcttcagggaagctattagaaactcaggtgacttgttagagcactaacttggtcagagccaaatcctggcaaacgctgcctgaccttcactctgtggttggggcggtgagaaccactgaggtccaatgatgagacttggaggtctggatccagtctctctttgttttaatgtgacttaggtgctgtcaacattagcaagataatggaaatcacgacgccagtgggtgcttacctccctgctaggcatgcaggggctggcggttggcaggggaaggaggcccagtgagccgggtcccttaggggagggagagtttgtcctctttgccccacagtctacccttcagggccttgtggcagtgccagtgttcggggggtgtctgggccactgagtacccactcggtcgtggttgtgctggcctcttgggtgagtgaacctgtgaagcccaggaggtggtgttggctgcagggtacacaaatactgagtggtggtcttttgttacaggcttagcaacaaagctgtgccctgggcatggggggctgtagtgtagctacagttgtgcgtttgtgaaatggcttagctttccatgttgctgagaggaacctggacatggtcccgggcatctgaatgatctgtaggggagggagttcaaataaagctttattttgttcaaaaaaaaaaaaaaaa

SEQ ID NO: 5651 - DNA, 3590 bp, Homo Sapiens
  NM_032509
cgcgatccgaccggaagttgcacgctgagccgcggacaccatgcagtcggatgatgttatctgggatacactaggaaacaagcaattttgttccttcaaaataagaaccaagactcagagcttctgccgaaatgaatatagcctgactggactgtgtaatcggtcatcctgtcccctggcaaatagtcagtatgccactattaaagaagagaaaggacagtgctacttgtatatgaaggttatagaacgagcggcttttcctcggcgtctctgggaacgggtccggcttagtaaaaactatgagaaagcactggagcaaatagatgaaaatctgatttactggccccgtttcattcgacacaaatgtaagcagagattcaccaagatcacccaatacctaattcgaattagaaaacttacactaaagcgacagaggaaacttgttcctttgagtaagaaggtggagcgtagggagaaaagaagagaggaaaaggcattaatagctgctcagctggacaatgccattgagaaggaattactggagagactgaaacaagatacgtatggcgacatctacaacttccccattcatgccttcgacaaagccctggaacaacaggaggcagagagtgactcttcagatactgaggaaaaagatgatgatgatgatgatgaggaagatgtggggaaaagagaatttgtcgaagatggtgaggtagatgagagtgacataagtgattttgaggatatggataaactggatgccagcagtgatgaagatcaggatggtaaatcctccagtgaggaggaggaagaaaaggcccttagtgcgaaacacaaaggcaaaatgcccttgagaggaccactgcagagaaaacgagcctatgtggaaatagaatacgagcaggagacagagcccgtggccaaagccaaaaccacgtgatttccctttcagcatttatacccaggactgaacatgcagaactgttttttttttttttttatcttaaacacatacacacctccagtttttgctcttttgtgttgtactgaacacaatatttgtgtttttattatttatgccacgtcagtggggcaagaaatctggagtgagtgaagaaagctaagttgtgaacaagagtgtttttatagcatatgtgttgaagtaacagcttgtgcccgagaaacttaacagatgagttcttgaatctgggatgagatgacggatgtaaatatttctaaattttaaatgctacattacttggtgtccttttttctcccaaactttatttagaaatggaaggagttcaattttttcttgttctactttccctattcttatggaggtaaaaggaaaggaaggaaggaaaaagcagctttcacttacaaagtttcgtgtaaaaatatctttttttcttaaataactccattcatacaaattgggatgggaagaaaatcctttcctcttgggaaagtaatacaagtcttaagttccattgtagggtgcgccttcagaaacctgctgcacttttctgatatagttcaccacttttctgtcttcacagctttggggaattttggccaggagaccctgaaacatgaaaccaaacaggctttgatatttttttttttttaattactttccccttttgcttgattcttcttccttggtatcatattcaaaggaggaaagaatggatgacacttagggacaggtcactaagcagaataggtattagttggttttttattatttttaaatttatatagctctcatgtattgaaggtgctactttaaaaactgtgttaatgtacttgcaaatctcctgctggctcatgaaacagcagaattccagccaaggcaaattcagttggatctagggcttgaaaactgcccaagattaaagagctaagatgaaatagtttgaataaactggtaaaataacaattcatactatctctacatatttttaggatatgaatttttttttcctgctgggtagattgtccagtgacttatggcatgaatttcttttcatgctaccttcaatcttcaactaaagatttctaaaaggggtaagaaatgaggcagtagtttattaaatacatagaagtacacagctattatatgctgtggctttgagaagttaacttttgtggaatatgaaaccaaaggaagaatttccatgtagataaattaagaatagggaaaaacatctacctaaaagatggttgtccctaaaaaactggaaacatctgaaatgctctatttatgttattattcctgggagcttatagcccattatttttactttttttttttaattcagaagactagaacagaacttaaattttacaaacttttgatcataatgcttttgcccatactgtctcgtccttagccccagtgacatgtgctgatcctcctgcctttagttctaaatggttctgaatagctttaaaagatgaataagaaaaaagatcaagctcttttgaggctagagggctcatatggagatctaaaaccctccatgttcatttccagacttggtcaggcacatacatagtaaattataatcaatcatgggaattacataaggataatgaggcccaactgaaaccaagtttcagtctgccttacctttacccgtccttgagaacagcggtccaggagaatcaggcagtctgtggcctcctgtagcagggcgctcttaacagactcaggtgtaaggtttggatcccttgctacatcacaaatcagtttcaagagggccttcagtaagaccacaagtctgcaggaaactctggaatcaggaagaaaagctatgttcatactctaaatctggatattaaaattggaagagacttcaaagactgtcaagtggaaagctatcatttcctaaattaaggaacttaggtcaaagttaaatgaaaaagacctaaaaacagaaccaaagacagcctctagatttcttaccctcaagtctcctgttagcatactgcctatacacacagacacaccctctgccacactgctctcttccttccagaagcttggttctactgtaagcaacagctccttcatgggctgagaaggggaaaccaggatctccccaaccaagggcctatacttttatttttcaactctattaactgaactatgcttggagagagccctgaatcctttaactttaatgccatcttaggcctggaagttagagtgagggaaatgagcttggcttctgggactgtgtcaagttgaattttctgtcatttaatttcagatcctagctcatcatcagtgaagtccagcctacttacttgtaactattaacctttctaaaagttttcatcgccttggtaaagctccagaaatggacaatgctagtgactgcacaatattgtgactgtacttaatgccactgaactgtacactttaaaatggaaaatttatatgtatttttaccacaataaacaaaaaaccctaaaaaaactttaatgaaaggtggaaaataatttaacttacaatgtgaaaatacaatgtgaaatgtacaataaatcatatttatggacaaaaaaaaaaaaaaaaa

SEQ ID NO: 5652 - DNA, 3745 bp, Homo Sapiens
  NM_032512
cgctgccctttttctcctggccgggtgcgagggagcatgcccgcgcctggcctcggccagcgaagagttaacctgaggggcgagccgctgcccccacctcgggggcgtgcccccctcccccgctaggcggcccgccccccgcgccagggtatggcccctggccccggcccgggacccgaggtcccgcgcccgggtcagtgaaaggcgtcttcccgttcccgccctccgcctcctctcgccggccagcaacatgggatgtaatatgtgcgtggtccagaaaccggaggagcagtacaaagtgatgctgcaggtgaacgggaaggagctctccaagctgtctcaggagcaaactctgcaggccctgcgctcctccaaggagcccctggtgatccaggtgctgagacgcagcccccgcctccggggggacagctcctgtcacgacctgcagctggtggacagtggcactcagaccgacatcaccttcgagcatatcatggcgctgggcaagctgcgtccgcccaccccgcccatggtcatcctggagccccccccaatcagccatgagtattatgacccggcggagtttatggagggcggcccgcaggaggcagaccgcttggatgagctggagtatgaggaggtggagctgtataaaagcagccaccgggacaagctgggcctgatggtttgctaccgcacggacgacgaggaggacctgggcatttatgtcggagaggtaaatcccaacagcattgcagccaaagacggccggatccgtgagggagaccgcatcatccagattaacggtgtagacgtccagaaccgggaagaggcggtggccatcctgagccaggaagagaacaccaacatctccctgctggtggcccgacctgagagtcagctggcgaaaaggtggaaggacagcgaccgggatgacttcctggatgactttggctctgagaatgagggggagctgcgtgctcgtaaactgaaatcaccccctgcccagcagcccggaaacgaagaggagaagggggctcccgatgccggcccaggcctgagcaacagccaggagctggacagcggggtgggccggactgacgagagcacccggaacgaagagagctctgagcacgacctgctgggggacgaacccccgagctccaccaacaccccgggaagcctgcgcaagtttggcctgcaaggggacgccctgcagagccgggacttccatttcagcatggactctctgctggccgagggggcggggctgggagggggcgacgtcccgggcctcacggatgaggagtatgagcgctaccgtgagctcctggagatcaagtgccacctggagaacggcaaccagctgggcctcctctttccccgggcctccggaggcaacagcgccctggacgtcaaccgcaacgagagcctgggccacgagatggccatgctggaggaggagctaaggcacctggaattcaagtgccgcaacatactgcgggcgcagaagatgcagcagctgcgtgagcgctgcatgaaggcctggctgctggaggaggagagcctctacgacctggcggccagcgagcccaagaagcacgagctgtccgacatctccgagctgcccgagaagtcggacaaggacagcaccagcgcctacaacactggggagagctgccgcagcaccccgctgcttgtggagcccctgcccgagagccccctgcggcgggccatggccggcaactccaacttgaaccggacccctcccggccccgctgttgccacccccgccaaggcagctcctccaccggggagccccgccaagttccggtccctctcccgggatcctgaggccggccggaggcagcacgcggaggagcgcggccgccgcaaccccaagacggggttgaccctggagcgtgtgggccctgaaagcagcccttacctctcgcggcgccaccgcggccagggccaggagggcgagcactaccacagctgcgtgcagctggccccgacgcgaggcctggaggagctgggccacggccccctgagcttggccggtggccctcgggtgggcggggtggcggccgcggccactgaagcaccgcgcatggagtggaaagtgaaggtgcgcagcgacggaacccgctacgtggccaagcggcccgtgcgagatcggctgctgaaagcccgtgccctgaagatccgggaggagcgcagcggtatgacgaccgacgacgacgcggtgagcgagatgaagatgggccgctactggagcaaggaggagcggaagcagcacctgatccgggcccgtgagcagcggaagcggcgcgagttcatgatgcagagccggctggagtgcctgcgggagcagcagaatggcgacagcaagcccgagctcaacatcattgccctgagccaccgcaaaaccatgaagaagcggaacaagaagatcctggacaactggatcaccatccaggagatgctggcccacggcgcgcgctccgccgatggcaagcgggtctacaaccctcttctctcagtcaccaccgtgtgagctgcccgggcgggtacacggcccaggcccagggaaccccctggggccccggccctcactctcctatagagattgtgtgtgtgtgtgtgtgcgcgcgcgcgtgctcgctgtgcgcacgcacacatctcctcgtctgggtgtgcgcacagggctttgttagcagagagaagcccctgaggagaagggacgcttttcttccttctgcccaagtaaagtgaccatgccagtggccagcactgggggcacacctgtgatgggcaccccttcagctgtgcgtgtgcattccccatcccccatgctcttgcgtgtgcttgcacgtgcacgcacacacacacccagtgctctctccacccgacccgtgtacttgcagacagggaagctgagctgaaaggagcacaagagagtgtccggcttcgctgctgagcgcggcctctccccgccgctgcgcactgcagttatttgtagacaaaggcacccctgatttttgtggtttttctccctttctgtgcttgccaatagttgttttgttttgtggacctgccctgggggctggcagctccttcaggcagcctggcagaagtggaactcccctctccactgatggctgggaagggagttggggaggaagagtgggagggagggctggggatggatgggagggaaggggagggaaaggtgggaggaatgggaagcagctgttctggtggcttccactctgaggtgtgggaacggggagcctctggggggcacctgtttccccagtgactcagagagagcaagactgcaggaacggaggggtcctgcagggtgtccaccaagaagtcacagagcccgttctgcgccccacaccatctggagcaggggcttctcttctgagtgaactgaggaaggtgcttagatggtgagggctctagaaaccaagccccatgagcagcagtggaagacctcgggccatgcggcctggggaggacttggtggcgatccgcaacctggaccccagtgagaggcggtgggctgactgggaaggagaggcccccaacctcctcaggatttgcacgtgtgaactacgctgcctgtggggtgccccttaggcttggagagccccagattggaggcagacagactgcaccaccccttccccccctgcatctcaagaataaagcaagctgcctttgtacttggttg

SEQ ID NO: 5653 - DNA, 2617 bp, Homo Sapiens
  NM_032515
ctcgctgcccaggcccccgacgccgcggcaggagccccccaagagcgcgggaagccccgtggacctggcgctcccggctcgggcgtggacggggcgggcgccggggcggggcgcgcgtcctcgcgggtctgaatggaagggtcgaggtcgtcgtcggcggcgagcagatcctgaagccagaactccaccccggcgcccgcgccatgcggcgggagaggtgcggcgccccccacccgcgtcgccgccatggaggtgctgcggcgctcctcggtcttcgccgccgagatcatggacgcctttgaccgctcgcccacagacaaggagctggtggcccaggccaaggcgctgggccgggagtacgtgcacgcgcggctgctgcgcgccggcctctcctggagcgcgcccgagcgtgccgcgccggtcccgggacgcctggctgaggtgtgcgcggtgctgctgcgcctgggcgatgagctggagatgatccggcccagcgtctaccgcaacgtggcgcgtcagctgcacatctccctgcagtctgagcctgtggtgaccgatgcgttcctggccgtggctggccacatcttctctgcaggcatcacgtggggcaaggtggtgtccctgtatgcggtggccgcggggctggccgtggactgtgtgaggcaggcccagcctgccatggtccacgccctcgtggactgcctgggggagttcgtgcgcaagaccctggcaacctggctgcggagacgcggcggatggactgatgtcctcaagtgtgtggtcagcacagaccctggcctccgctcccactggctggtggctgcactctgcagcttcggccgcttcctgaaggctgccttcttcgtgctgctgccagagagatgagctgcccacctggcagtggccgcagcctggccctctgggcccaacgcaggaggccctcagcacccgaacacatcttcctcctccccacccgagcctggagcactctaaccctcggagaccccctaagccccgttcctccgcagacccaggccctccggaaggggtgagtggggaggggctttcctgagcctggagctgggctttggggcagcctgcgaccctccccgcttgtgtcccttctcctgtgatctctgtgttttcccttttctttctggggccaggaagtcagggtcaactcccaggcctcagatgcaggggcccagaacacctgctctcacctgagccccaggtgaaggggcccgggaacacctgctctcacctgagccccaggtgaaggggcccgggaacacctgctctcacctgaaccccaggtgaaggggcccggaacacctgctctcacctgagccccaggtgaaggggcccggaacacctgctctcacctgagccccaggtgaaggggcccgggaacacctgctctcacctgagccccaggtgaaggggcccgggaacacctgctctcacctgaaccccaggtgaaggggcccagaacacctgctctcacctgagccccaggtgaaggggcccggaacacctgctctcacctgagccccaggtgaaggggcccgggaacacctgctctcacctgagcccctggtgaaggggcccggaacacttgctctcacctgagccccaggtgaaggggcccggaacacctgctctcacctgagcccccggtgaaggggcccggaacacttgctctcacctgagccccaggtgaaggggcccggaacacctcctctcacctgagccccaggtgaaggggcccggaacacctcctgtcacctgagccccaggtgaaggggcccgggaacacctctcacctgaacccgggggtcccatcccaggaagaagggccatctcaggacatgagtcctcaggggccctgcacattcaatctgaaggtgaccctggcctggctgaagctggaagagctgtggggactcagcctgtaaacagagcgtaaggttcacatgctggttgcttaatccgtttctggaggaagagtatgacacccacttgtgatggggtccttgtgcggtggggaccggggccggcgggctccaggccagcacacctaacccatggatgtggaacctacggccgagaaggaatgttgcatgagtcggatcccagtccattgtcagtggagggtgagggtgaccccatctgctatttttgtgctcatcctcatacaaccatttggggatgtgcctattagggctccgtaagaactcagatgcctgggaagcccagcccctcaggtgcccccacacacagccttcccttgacgcctacatttctaggcacatgtgaggcatctttcctggagccccgagccagccctgtccctccccagtgcagcatggcactcaggagatacaggctggacatggggcagtcgttctggggaggcctggcctagcagccacccacctgagccctcccggccaggcttcgtgctggggtgggccatgtgccaggacaggagggtcccggcggaaagccagccccggactcatcgtgacattgagatcccactggagggtaggggtggtaataaacttctccaaacgatcgttgtcattttagacagaaaaaaaaaaaaaaaaaa

SEQ ID NO: 5654 - DNA, 1255 bp, Homo Sapiens
  NM_032520
ccacttccggtccccgtggtcacgtgaccgtcacttcacgtgaccgcgcggcggccgctgcggcgcgatggcggcggggctggcgcggctcctgttgctcctcgggctctcggccggcgggcccgcgccggcaggtgcagcgaagatgaaggtggtggaggagcccaacgcgtttggggtgaacaacccgttcttgcctcaggccagtcgcctccaggccaagagggatccttcacccgtgtctggacccgtgcatctcttccgactctcgggcaagtgcttcagcctggtggagtccacgtacaagtatgagttctgcccgttccacaacgtgacccagcacgagcagaccttccgctggaacgcctacagtgggatcctcggcatctggcacgagtgggagatcgccaacaacaccttcacgggcatgtggatgagggacggtgacgcctgccgttcccggagccggcagagcaaggtggagctggcgtgtggaaaaagcaaccggctggcccatgtgtccgagccgagcacctgcgtctacgcgctgacgttcgagacccccctcgtctgccacccccacgccttgctagtgtacccaaccctgccagaggccctgcagcggcagtgggaccaggtagagcaggacctggccgatgagctgatcaccccccagggccatgagaagttgctgaggacactttttgaggatgctggctacttaaagaccccagaagaaaatgaacccacccagctggagggaggtcctgacagcttggggtttgagaccctggaaaactgcaggaaggctcataaagaactctcaaaggagatcaaaaggctgaaaggtttgctcacccagcacggcatcccctacacgaggcccacagaaacttccaacttggagcacttgggccacgagacgcccagagccaagtctccagagcagctgcggggtgacccaggactgcgtgggagtttgtgaccttgtggtgggagagcagaggtggacgcggccgagagccctacagagaagctggctggtaggacccgcagggaccagctgaccaggcttgtgctcagagaagcagacaaaacaaagattcaaggttttaattaattcccatactgataaaaataactccatgaattctgtaaaccattgcataaatgctatagtgtaaaaaaatttaaacaagtgttaactttaaacagttcgctacaagtaaatgattataaatactaaaaaaaaaaa

SEQ ID NO: 5655 - DNA, 2028 bp, Homo Sapiens
  NM_032527
gcgcgccaagcacttccggaagcggcggcgctcgggaggaagtgccgatcggctgctggggcgaaaagggggcgccgggccgctctagccggtgaggccggcgggctctctgtggctgcggctgggaaaccgcgcggaggaggtgcccggccggggaccagccctggtccagcgcctccctctctcagcatggacgaggagagcctggagtcggccttgcagacctaccgtgcgcagctgcagcaggtggagctggccttgggcgccggcctggattcgtctgagcaggctgacctgcgccagctgcagggggacctgaaggagctcatcgagctcaccgaggccagcctggtgtctgtcaggaagagcagcttgttggccgcgctggacgaagagcgcccgggccgccaggaagatgctgagtaccaggctttccgggaggccatcactgaggcggtggaggcaccagcagcggcccgtgggtccggatcagagaccgttcctaaagcagaggcggggccagaatctgcggcaggtgggcaggaggaggaagagggagaggacgaggaagagctgagtgggacaaaggtgagcgcgccctactacagctcctggggcactctggagtatcacaacgccatggtggtgggaacggaagaggcggaggatggctcggcgggtgtccgtgtgctttacctgtaccccactcacaagtctctgaagccgtgcccgttcttcctggagggaaagtgccgctttaaggagaactgcaggttctcccatgggcaggtggtctctctggatgagctgcgccccttccaggacccagacctgagctccctgcaggccggctctgcgtgtctggccaagcaccaggatggcctctggcacgcagcacgcatcaccgatgtggacaacggctactacacagtcaagtttgactcgctgctgctgagggaggccgtggtggagggggacggcatcctgcccccactgcgcacagaggccacagagtccgactcagacagcgacggtacgggtgactccagctatgccagagtggtggggtcggacgccgtggactctgcacagtcctctgccctctgtccgtctcttgcagtggtggggtcagatgctgtggactctgggacctgcagctctgcctttgctggctgggaggtgcacacgcgaggtataggctccagactcctcaccaagatgggctatgagtttggcaagggtttgggccgacacgcggaaggccgggtggagcccatccatgctgtggtgttgcctcgagggaagtcgctggaccagtgtgtggagaccctgcagaagcagaccagggttggcaaggctggcaccaacaagccccccaggtgccggggaagaggggccaggcctgggggccgcccagctcctcggaatgtgtttgacttcctcaatgaaaagctgcaaggtcaggctcctggggccctagaagccggggcggccccagcggggaggaggagcaaggacatgtaccatgccagcaagagtgccaagcgggccctgagcctgcggctcttccagactgaggagaagatcgagcgaacccagcgggacatcaggagcatccaggaggctctcgcccgcaacgctggccggcatagcgtggcgtcagcccagctgcaggagaagctggcaggagcccagcgccagctggggcagctccgggctcaggaagccggcctgcagcaggagcagaggaaggcagacacccacaagaagatgactgagttctagagaccccacaagcactatggacgaagcgtgggaccccagcacgggctgccctcaggaagaccagtgttgcccgaggaggggccggcctgctggcctggggcgtgcagacactgctgagtggagacagagctgcggggtcccatctggacacttacttgcccacctgccagtgtcttgggcatttccttggcaaggacattaaagtgatttcatcacagtgtcaaaaaaaaaaaaaaaaaaaaa

SEQ ID NO: 5656 - DNA, 5187 bp, Homo Sapiens
  NM_032529
gggctctgggaccgcagttgctgaaatggaggcagaggtgtgggaggcagaaggctacaacctagttctggactcggacctgtatgatgcggatggctatgatgtcccagaccctgggctgctcaccgaaaagaatgagttgactttcacggagccgtcgcaggtcctgccctttttgaccagcagccaacagtggcaaagcctgaccccgcgcgcccgcgcccgccggctgtggctgcttctgcgcaccagcctccacgaagtcgtggaaaaggagaagagagccgagctgcgcgcggcgcgcctgacgcatgggctggaaccactgcgccgcctggaggtggcagccgggctgcgctcggtggcgcaggacccggtgggtggacgcttcgtggtgctggacggcgcgggccgcctgcacctgcacaaggaagacggctgggcacaggagacgctgctggcgcctgtccggcttacggggctggtgaccgtgctgggcccgctgggtgccgtgggccgttttgtaggctggggccccgcggggctggcaattctgaggcccaacctcagcctgctgtggctgagcgagcagggggtgggcagggccccgggttgggcgcccacctgctgcctgccggttcccgacctcaggctgctgctcgttgcggagatgaacagcagcctggcgctctggcagttccgttcaggtggtcgccgcctggtgctgcgagggtcagcactgcacccgcccccgagcccaacaggcaggctcatgcgtctggctgtggcgccggttcctccccaccacgtcctgcgctgcttcgcggcctatggctcggccgtgctcaccttcgatctgcatgcctggactctcgtagatgtgcgccgggatttgcacaaaaccaccatctcggacctggcttactgcgaggaagtagaggcaatggtgacagcttcccgggacagcaccgtgaaggtgtgggaggctgactggcagatccggatggtgttcgtgggccacacaggcccggtgacggctatgactgtgctcccgaacacgaccctggtgttgtcggcctcgcaggacgggacgctacgcacctgggacctgcaggcggcggcgcaggtgggcgaggtagcgctgggcttctggggccaggacaagctgtcccggcgcgtgggccgtctgctggcgccggtgcgcccgggctggccggtgctgtccctgtgcgcgagcagcatgcagctgtggcgcgtacgcgagctctactcgccgttggcgcaactgcccgccaaggtgctccacgtgcaggtggcgcccgcgttgcccgcgcctgcgcaccagtcgctgcctacgcgcctcgtgtgcgcgtgcgccgacggctcggtctacctcctgtcggctgccaccgggcgcatagtgagctcactgctgctggagccggaggactgcgcggcagccgtggcctactgcctgccgcgcgaggcgctgtggctgctgaccagggctgggcacctggtccgcgccaacgcggcgcgctgccccatgagcgtgctgcaccgcgtgtgcccgccgccgccccctgcgccgcagccttgctgtctgcacctgtacagccacctcacggatctcggaggcgccttctcctcctgggagatcgtgcgccagcactggggcgagttgcgctgcagctctgtggcctgcgcctggaagaacaagaaccggtacctgccagtggtggggcacacggacggcacgctgtcggtgctggagtggctctcgtcgaagactgtcttccaaacggaggcgcacagcccgggcccggttgtcgccatcgcatccacctggaacagcattgtgtcttcgggtggggacctgacggtgaagatgtggcgcgtcttcccctatgccgaagagagcctgagcctgctgcgcaccttctcctgctgctacccggccgtggcgctctgtgcgctaggcagacgcgtcaccgcgggctttgaggacccagacagcgctacctacggcctggtgcagtttggcctgggcgacagtccgcgattagaccaccggccccaggacgaccccacggaccacatcactggcctgtgctgctgccccacgctcaaactgtatgcctgctccagcctggactgcaccgttcgcatctggactgctgagaaccgcctcctgcggctcctgcagctgaatggtgcccctcaggccctggctttctgcagcaacagtggagacctggtgctggcgctgggatcccgcctctgcctggtgtcccacaggctctacctgcctacatcctacctagttaagaagatgtgccggaaggccccagacgtggtggacgaccctccgctgccactgatgagccaggagtcactgacttccgcccaactgcagaggctcaccaacctccatggggcagccagcctcaggtcccatgcaggcctgctcagccctcctggaggccctcctttcccactctgggtgggggcctggcggtgtggggccctctggagttgatacaagcctgcctgagccctggcacacccgtttggggttggtccttgtcccagcctctgccccagcccactggcatgccacccagcatcccacctgtgcctgtccctgtttgcagcgaggccttgtctctcatccatcgtcggagggcaacatctcagcacctggtgccgaaggaggacttggacgccatagtggcccgggaccgagaccttcagcagttgaggctggggctagtggtcccagcagcccagcccccaccctcctggcagcagcgccaggaaggctttgacaattacctccgtctgatctacggctctggcctgctgggcatgcagtctggaagggggtcccagcagtggagtgccgggaccctcagagtggagagagagacccgggatgtgtgtgctgtaccccaagctgcccactgtcttgcccgggctgaggtcagcactgcagcccaaacagtgccaacagccctgtccccacaggacctgggagccctgggccagcacttctcccagtctccccgagtcacagtgccgatcccacccacccaccgtagggtgcacagcaaggcatcccagcttctggcccgctcctcactgagccactacctgggcatcagtctggatctgcagctgcagttggagcagctccgagggaggacgaccatggccctggacctgccatcctcccacttgcagtgcaggatcccactgctgccaaagagatgggacaaggaacctctctctagcctcaggggcttctttcctgccaccgtgcagccccacaagcactgcctgaggcccatctgcttccccggctatgtgcccaactccgcggtgctacagcagatgtggctaaatgcggagccaggggcaagccaggatgccctgtggttgtggcgccccaggccatcccaagcccagtggcagaggaagctgctccaatggatgggggagaagcctggggaggagggggaggaagacaagaaggaagaggaggaggagaaggaagacgaggagctggactgggccttggcttccctgagcccgcactccaaccagcagctggattcctgggaactggaggatcagagtgctgtggactggacccaggagccccggcggcgcagctgcaaggttgccaggacccaccctcatccctggcaccgtcatgggagtttgctcttggatgagcattacgggcatctgcccaagtttctgcatttcttcatctaccagacctggttcaaaaagttgttccccatcttcagcctgcaggcatacccggaggcgggcacgatcgagggcctggcctcgctgttggtggccctgctggagaagaccacgtgggtcgaccgtgtgcacatcctgcaggtgctactgagactgctgcccaacatgagcagtgatctccaaggccagctgcagggcctgctcgtacacttgctcaacctggaccagccccccagcctccaggaccagacacagaagaagttcgtgatactggcgctgcagctgctcctggcctgctccctggagtcccgggatgtggtgctggagctcatgtcctacttcctctactctcccgtgcactgccggccagagctcaagaagctgctgcacgggctgggccttcaggacccagagggcttcctattcaaggagatgatgacctgggtccagggcccagacctggactccaaggccggcctgcgcacttgctgccaccagaaactggaggacatgatccaggagcttcaggagaccccatcgcagacgtcagtggtctctggggcacccacacgcgcctccgtgataccctcgggcacctcctggtcggcctccggcatcttcgggaggctctcgcaggtctcagaggtgcctttgatggtggtctcacctgcggagccgcactctttagccccggagctccaggcccagcggatgctggcacccacgcgcagctgggggacccctcagctccgtctcagagtgctctccgagacgctgaagagcttctgcctggagcccgaggcccgcctgcaccctgccgggcctgctcagctgcccggagagccgccgccgctggaggagaccgactggtcgcactcgcagctgctggacttgggccccatcgacgcgctcaacttcttctgtgagcagctgcgggcgcagcagcggagttcgctccaggagaaggctgcgcacccacacccgccagtgccctacacggtggcgccggtgcccgacatggtggtgccacctccgcgggagcactggtaccaccccatcctccggctgcaggaggccaagccgcagaggtccgcgaggtccgcgatgagactgaggggccccatgccgtcccggctctgtgcgggccgcaccctggacggccccatccggacgctgaagctgccgttgccgcgtgtggagccgcagcctttccccctggactggcctatgcccccgcgcccgctgcccccgcggctcctgcagccggccctgcagcgctactttctgccagcggacgcggaccctgacacctacagctgaccggactggtggcctcagcccgcctggctctggggcctgtcattggtatttggccaaggcctgcatcgggaataaagtccagagaatttc

SEQ ID NO: 5657 - DNA, 3113 bp, Homo Sapiens
  NM_032536
cgctcagcccgggcgggcgatgcgggcggcgcgggcggccccctcccccggcccgcgtctccgggacggctgcgggcggcccccccggcggccggagggctccctggccccgatctgacggcggcggcggcggcggccacagcggcgggagcggcgcggggaaggagcagcggctcgcagccctcggcccgcgcccccacccagcgccagcccgaggggggaggcgcagcgccggagggtggcggtcctcggccctcccaggtctccgcgccgggaagccgctccgagccggggctggagggttgttttgccgttgtgttgagcacgtcacccattaagagccctttaaagacctggattgattggaaggacaaaaattaaaagcaatctgatccagcctcatgcaggatccctgcggattttctccttatcccatttccatccactgtcacaatttgagaatctgcctgatttgatcagattcacctccaggggaggtgtgataccagggttaggaggacgtgaagttatgggcaactttctgatctgtccatcagcagtctgagaaacgctggctctgaattttccgtgtcggccttttggaaacaacaagttcctcgctgtttgcaaagcttcagtgctcgggtccctgggacaccccggccaccctcgcctggtagatgtggcatttccatgctgaggccgcgagtcccgcctgaccccgtcgctgcctctccagggcttctctgggccgcgcctctgcagactgcgcagccatgctgcatctgctggcgctcttcctgcactgcctccctctggcctctggggactatgacatctgcaaatcctgggtgaccacagatgagggccccacctgggagttctacgcctgccagcccaaggtgatgcgcctgaaggactacgtcaaggtgaaggtggagccctcaggcatcacatgtggagacccccctgagaggttctgctcccatgagaatccctacctatgcagcaacgagtgtgacgcctccaacccggacctggcccacccgcccaggctcatgttcgacaaggaggaggagggcctggccacctactggcagagcatcacctggagccgctaccccagcccgctggaagccaacatcaccctttcgtggaacaagaccgtggagctgaccgacgacgtggtgatgaccttcgagtacggccggcccacggtcatggtcctggagaagtccctggacaacgggcgcacctggcagccctaccagttctacgccgaggactgcatggaggccttcggtatgtccgcccgccgggcccgcgacatgtcatcctccagcgcgcaccgcgtgctctgcaccgaggagtactcgcgctgggcaggctccaagaaggagaagcacgtgcgcttcgaggtgcgggaccgcttcgccatctttgccggccccgacctgcgcaacatggacaacctctacacgcggctggagagcgccaagggcctcaaggagttcttcaccctcaccgacctgcgcatgcggctgctgcgcccggcgctgggcggcacctatgtgcagcgggagaacctctacaagtacttctacgccatctccaacatcgaggtcatcggcaggtgcaagtgcaacctgcacgccaacctgtgctccatgcgcgagggcagcctgcagtgcgagtgcgagcacaacaccaccggccccgactgcggcaagtgcaagaagaatttccgcacccggtcctggcgggccggctcctacctgccgctgccccatggctctcccaacgcctgtgccactgcaggttcctttggcaactgcgaatgctacggtcactccaaccgctgcagctacattgacttcctgaatgtggtgacctgcgtcagctgcaagcacaacacgcgaggtcagcactgccagcactgccggctgggctactaccgcaacggctcggcagagctggatgatgagaacgtctgcattgagtgtaactgcaaccagataggctccgtgcacgaccggtgcaacgagaccggcttctgcgagtgccgcgagggcgcggcgggccccaagtgcgacgactgcctccccacgcactactggcgccagggctgctaccccaacgtgtgcgacgacgaccagctgctgtgccagaacggaggcacctgcctgcagaaccagcgctgcgcctgcccgcgcggctacaccggcgtgcgctgcgagcagccccgctgcgaccccgccgacgatgacggcggtctggactgcgaccgcgcgcccggggccgccccgcgccccgccaccctgctcggctgcctgctgctgctggggctggccgcccgcctgggccgctgagccccgcccggaggacgctccccgcacccggaggccgggggtcccggggtcccggggcggggccggcgtccgaggccgggcggtgagaagggtgcggcccgaggtgctcccaggtgctactcagcagggccccccgcccggcccgcgctcccgcccgcactgccctccccccgcagcaggggcgccttgggactccggtccccgcgcctgcgatttggtttcgtttttcttttgtattatccgccgcccagttccttttttgtctttctctctctctctttttttttttttttttctggcggtgagccagagggtcgggagaaacgctgctcgccccacaccccgtcctgcctcccaccacacttacacacacgggactgtggccgacaccccctggcctgtgccaggctcacgggcggcggcggaccccgacctccagttgcctacaattccagtcgctgacttggtcctgttttctattctttatttttcctgcaacccaccagaccccaggcctcaccggaggcccggtgaccacggaactcaccgtctgggggaggaggagagaaggaaggggtggggggcctggaaacttcgttctgtagagaactatttttgtttgtattcactgtcccctgcaagggggacggggcgggagcactggtcaccgcgggggccgatggtggagaatccgaggagtaaagagtttgctcactgctgccaaaaaaaaaaaaaaaaaaaaaa

SEQ ID NO: 5658 - DNA, 1539 bp, Homo Sapiens
  NM_032549
cggccgcgagtcctgcgtgatcgcgagcatgtgtgcgtgcgcgtgtttatctgaggcgcgtgcggcggccaccccagcctagtcctcttcttggtgccactggctaactaggttgagaaaccggcgccacaggcggcacacctggcccggagctggcccgctcctccccgccgagccggcgccccaacaacgcgccctctcccagtcctcacaaaggggcctagtccggcccccggctctggccgtgagggagcgctgtgggggcgcgctgccttctgcctggaagtgttgggcaggtggtgggagagcgtcaggcttgaacaacatgattttaaagcacgtgtctgtctgtcgttttttacttttagggttttggccaaattgggcgagggcacaaaataaccacttaccccttctcaccgaggaagagcgggagaaagggtatggcacagtcacaagggtgggtgaaaagatacatcaaggccttttgtaaaggcttctttgtggcggtgcctgtggcagtgactttcttggatcgggtcgcctgtgtggcaagagtagaaggagcatcgatgcagccttctttgaatcctggggggagccagtcatctgatgtggtgcttttgaaccactggaaagtgaggaattttgaagtacaccgtggtgacattgtatcattggtgtctcctaaaaacccagaacagaagatcattaagagagtgattgctcttgaaggagatattgtcagaaccataggacacaaaaaccggtatgtcaaagtcccccgtggtcacatctgggttgaaggtgatcatcatggacacagttttgacagtaattcttttgggccggtttccctaggacttctgcatgcccatgccacacatatcctgtggcccccagagcgctggcagaaattggaatctgttcttcctccagagcgcttaccagtacagagagaagaggaatgactgcatgaatctacctgagttgctggcattgggaggccagttactggaaaggaatggaaaaaagaagcctccaaaagggaaaaacttctgacaatatgatgctgtgcgagaaatatttacagcacattaaaacgatctgtattattaaataaataattttcaaatgttaaacagtattaaatggcacctgattttgtgttaaattttagttccctgttgtttaatgcccccaaaatatgcagacctttgggaatataaaaatattgcacccacatgtcttaatggggctgaatttcagattatttgttacatatacttattatattgattgttgggttttgattttggtgcttgctgctgaaataaattgaaaattaatattcaataaaaatgatgtatttgtcacttgctgttaaggtagaacaagaaggaacacatattatacacataatgatgggaattacattgtgatttgtactatctacaaaggagtaactgccagttaggaagaacagtaaacagtgatgttaaaataaaacaatgatttgtaaaaaaaaaaaaaaaaaaa

SEQ ID NO: 5659 - DNA, 1650 bp, Homo Sapiens
  NM_032551
gccgagcccagcacagctgccctctggaccctgcggaccccagccgagccccttcctgagttccacaggcgcagcccccgggcggtcgggcggaggggtccccggggcggtgccagggcgcaatcctggagggcggccgggaggaggaggtgcgcgcggccatgcacaccgtggctacgtccggacccaacgcgtcctggggggcaccggccaacgcctccggctgcccgggctgtggcgccaacgcctcggacggcccagtcccttcgccgcgggccgtggacgcctggctcgtgccgctcttcttcgcggcgctgatgctgctgggcctggtggggaactcgctggtcatctacgtcatctgccgccacaagccgatgcggaccgtgaccaacttctacatcgccaacctggcggccacggacgtgaccttcctcctgtgctgcgtccccttcacggccctgctgtacccgctgcccggctgggtgctgggcgacttcatgtgcaagttcgtcaactacatccagcaggtctcggtgcaggccacgtgtgccactctgaccgccatgagtgtggaccgctggtacgtgacggtgttcccgttgcgcgccctgcaccgccgcacgccccgcctggcgctggctgtcagcctcagcatctgggtaggctctgcggcggtgtctgcgccggtgctcgccctgcaccgcctgtcacccgggccgcgcgcctactgcagtgaggccttccccagccgcgccctggagcgcgccttcgcactgtacaacctgctggcgctgtacctgctgccgctgctcgccacctgcgcctgctatgcggccatgctgcgccacctgggccgggtcgccgtgcgccccgcgcccgccgatagcgccctgcaggggcaggtgctggcagagcgcgcaggcgccgtgcgggccaaggtctcgcggctggtggcggccgtggtcctgctcttcgccgcctgctggggccccatccagctgttcctggtgctgcaggcgctgggccccgcgggctcctggcacccacgcagctacgccgcctacgcgcttaagacctgggctcactgcatgtcctacagcaactccgcgctgaacccgctgctctacgccttcctgggctcgcacttccgacaggccttccgccgcgtctgcccctgcgcgccgcgccgcccccgccgcccccgccggcccggaccctcggaccccgcagccccacacgcggagctgctccgcctggggtcccacccggcccccgccagggcgcagaagccagggagcagtgggctggccgcgcgcgggctgtgcgtcctgggggaggacaacgcccctctctgagcggacccggtgggaatccgagcggctccctcgggagcggggactgctggaacagcggctattcttctgttattagtatttttcttactgtccaagatcaactgtggaaatattttggtctcttgtgacgttcggtgcagtttcgttgtgaagtttgctattgatattgaaattatgacttctgtgtttcctgaaattaaacatgtgtcaacacaggactttctggatcattccagaaagtgtcagacgttttctcattgtcttgtaaaaaaaaaaaaaaaaaaaaaaaaaa

SEQ ID NO: 5660 - DNA, 3312 bp, Homo Sapiens
  NM_032558
cccgcccctgacgccgccggtaactgcgagagtcggggtcggtgcggtttgataagtggtcggttcctggagctgcggtcttctgctagcctgatccgcagcttcagcctccgccgcctcctcagccctcggcgccgccgctggcgccgccgcctgacccgcaggccgccgcgggccgcagagcccatgagggcgcgggcaccgccgccgcctccgcggcgtcgccgtcgtcccggagcgccccgggctggcgcgggcatggccgcggcatgagcgtggagccgccgccggagctggaggagaaggcggcgtcggagcccgaggcgggagccatgccggagaagcgcgcgggcgcgcaggccgcggggagcacctggctacaaggctttggccgaccaagtgtgtaccatgctgctattgtcatcttccttgaattctttgcgtggggcctgttgacaactccaatgttgactgttctacatgaaacattttctcaacacacattcctcatgaatggtctcattcaaggtgtaaagggcctgctctcttttttgagtgccccactcattggtgccctgtctgatgtgtgggggaggaagccctttctcctcggcactgtattctttacctgcttcccaatcccactgatgaggatcagcccatggtggtattttgcgatgatttctgtgtctggagtcttctcggtcacgttttctgttatatttgcctatgtagctgatgtcactcaggagcacgagcgaagtacagcttatggatgggtctcagccacctttgcggctagtcttgtcagcagcccggccattggagcatatctttctgccagttacggagacagcctcgttgtgctggtggccacagtggtggctcttctggacatctgcttcatcttagtggctgttccagaatctctgcctgagaaaatgagaccggtttcctggggagctcagatttcttggaaacaagcagacccttttgcgtcgttgaagaaagttggaaaagattctactgtcttactaatctgcatcaccgtgtttctttcataccttcctgaagctggacagtattcaagtttttttctctatctcaggcaggtcataggttttggatctgttaaaattgcagcattcatagctatggtaggaattctgtctattgtggctcagacggcctttcttagcatcttgatgagatcattaggaaataagaatactgtcctccttggcttgggcttccagatgctccagttagcctggtacggttttggatcacaggcctggatgatgtgggcagcagggaccgtggctgccatgtccagcatcacgtttccggcaatcagtgccctcgtctctcggaatgcagagtcagatcagcaaggagttgcccaggggatcataactggaataagaggactatgcaatggcctggggccagcactgtatggcttcatattctacatgttccatgtggaactgactgagttgggcccgaaattgaattctaacaacgttcccctgcagggagctgtcatcccaggcccgccgtttttatttggggcatgtatagtccttatgtcttttctggttgccttattcattcctgaatacagtaaagccagtggagttcaaaaacacagtaacagcagcagcggcagcctgaccaacaccccagaacggggcagtgatgaggacattgagccactactgcaagacagcagcatctgggagctctcttcatttgaggagcctgggaatcagtgcactgagctgtaaactcggcagaaagtgggattctgcatacgccatctctgagagccatggagggagccacacccctggtgacttcatggtgctggatgggagacgctagcggcatccttcagggccaagtttgataaataccaccgccatcattctgctcatcctcctcctgttttttttttttctcttacattctttttttttttcctgtttatacattagaacaagataagatttgaaatacttccttgcaaataatgtgcaactcccaaggtgaaactcaaatagaaaaagtcatctctctggtagaaaggatggctttcctgtaatgactatagagtaagagtggcagcaatctttccatgcccttttcagcagaaggcacagaacagtagcgggactgccatctctggcaagatttcaggtaaagaatctcttcttaatttctaccttcctgtttctctgaatcagcccataggtgttgatgagtggccactcttaaagagtcactcagtatcagggatctactgtctttgttcaaaggtcaaataaaaacctagtctccttttattctactttctattcttagctagaatgaaactcagcatatatacacttctggacataataatattgaatagtaattacctttactagatgaaagaaattttcattacaaacttaaatcatgtaaaactcaacaactcagattcctggacctggtgtcctggttgggtccaaggtgattttacagaagaaaaaaacaactcaagcattctggtggcaacatagagattgtaggctgcttctaagaaagttattaacaatttggaaattcctaagtaggatgagagttagtaactggatacgagtgaagtttatatccaagttcagactcaaaggcattattatgatttgcttcttcccatgtcttccatgtcctgcttctcaaagtttttctcatccatcacactcctgccttaactgctctgagtatgcatttgttttcaattcatctttatttcaatctgtttaacttttgaatcgcatgggaatacgcacattaagttcctttctaaaataaggttttatgaagctgagtttcacgataagtgtcttgctattttttgagatgttttatggacaaagaaaactttacagatttatatgtattttgctgcaccagtaaatggaccattaactagggcccacctttaacagagcacccctttgaaagttttataggtatgaaatatatgtagatatttgtaaagggttttaattttttttttttgatggggtgctgtgtaaatcttgtatttataaatgtaatgaaggtattgacagaaaaaaatatatacaacttttataaaggattgtgtactgactgaatacatttaaaagaaaatatattttgaaacctgttctgctatgaacagagataacatatctttttactatgctattggtttttaggttaagcttcctaatgcataataaatttacagtggttacttttaaaaaaaaaaaaaaa

SEQ ID NO: 5661 - DNA, 3894 bp, Homo Sapiens
  NM_032560
tgaggggcgaaccaagatggcggcggttttggctgtgtgaggaagacggaagagacggcggcggagggaaaccgacttccactagtccgggtcgcttgggcggccgggggccctcagagtctcccgggcagtggtagcagttgcagcaggatcaggcgcctgtcggcttctgacgtttaaaacagggggagcggaagggagccactggccgcggtggcagggccagggcccctttcctgggcgtctactggcggggcccccgccccggttcccgggcggcacgatgaccgacacccggcggcgggtgaaggtgtacacgctcaacgaggaccggcagtgggacgaccggggcaccgggcatgtgtcgtctggctacgtggagcggctgaagggcatgtccctgcttgtcagggctgagagcgacggttctctacttttagagtcgaaaataaatcctaacactgcataccagaaacaacaggacactctgattgtgtggtctgaagcagaaaattatgacttggcccttagctttcaagaaaaagctggatgtgatgaaatttgggagaaaatatgtcaggttcaaggaaaggacccttccgtggacatcactcaggaccttgtggatgaatctgaagaggagcgttttgatgatatgtcatcgccaggcttagaattgccatcttgtgaattaagtcgccttgaagaaattgcagaacttgtggcatcatctttaccttcacctcttcgtcgtgaaaaacttgcactggcactagaaaatgagggttatattaaaaagctcctggagctttttcatgtgtgtgaagatttggaaaatattgaaggactgcaccacttgtatgaaattatcaaaggcatctttctcttgaatcgaactgctctttttgaagttatgttctctgaagaatgtataatggacgtcattggatgtttagaatatgatcctgctttatcacaaccacgaaaacacagggaatttctaacaaaaacagccaagtttaaagaagtgattcccatatcagatcctgagctgaaacaaaaaattcatcagacatacagagttcagtatatacaagatatggttctaccaactccttcggtctttgaagaaaacatgttatcaacacttcactcttttatctttttcaataaggtagagattgttggcatgttgcaggaagatgaaaaatttctgacagatttgtttgcacaactaacagatgaagcaacagatgaggaaaaaagacaggaattggttaactttttaaaagaattttgtgcgttttcccaaacgctacagcctcaaaacagagatgcttttttcaagactttgtcaaacatgggcatattaccagctttagaagtcatccttggcatggatgatacacaggtgcgaagtgctgctactgatatattctcatacttggttgaatataatccatccatggtacgagagtttgtcatgcaggaggcacaacagaatgatgatgatattttgctcatcaacctcattatagaacatatgatttgtgatacagatcctgaacttggaggagcagtccagcttatgggcctgcttcgaactttagttgacccagagaacatgctagccactgccaataaaacagaaaagactgaatttctgggtttcttctacaagcactgtatgcatgttctcactgctcctttactagcaaatacaacagaagacaaacctagtaaagatgattttcagactgcccaactattggcacttgtattggaattgttaacattttgtgtggagcaccatacctaccacataaagaactacattattaataaggatatcctccggagagtgctagttcttatggcctcgaagcatgctttcttggcattatgtgcccttcgttttaaaagaaagattattggattaaaagatgagttttacaaccgctacataatgaaaagttttttgtttgaaccagtagtgaaagcatttctcaacaatggatcccgctacaatctgatgaactctgccataatagagatgtttgaatttattagagtggaagatataaaatcattaactgctcatgtaattgaaaattactggaaagcactggaagatgtagattatgtacagacatttaaaggattaaaactgagatttgaacaacaaagagaaaggcaagataatcccaaacttgacagtatgcgttccattttgaggaatcacagatatcgaagagatgccagaacactagaagatgaagaagagatgtggtttaacacagatgaagatgacatggaagatggagaagctgtagtgtctccatctgacaaaactaaaaatgatgatgatattatggatccaataagtaaattcatggaaaggaagaaattaaaagaaagtgaggaaaaggaagtgcttctgaaaacaaacctttctggacggcagagcccaagtttcaagctttccctgtccagtggaacgaagactaacctcaccagccagtcatctacaacaaatctgcctggttctccgggatcacctggatccccaggatctccaggctctcctggatccgtacctaaaaatacatctcagacggcagctattactacaaagggaggcctcgtgggtctggtagattatcctgatgatgatgaagatgatgatgaggatgaagataaggaagatacgttaccattgtcaaagaaagcaaaatttgattcataataatggcaacggcctaggatcagtacctgttgaaaaaaactggttctccacccctcccccatacaaaatccacaacaaagcgcagtggtctcttgtgaatgactgacacagatcagcctcttacacttgacttctgctcatcaagtgccaattcaatggagcaggaggaggggatatcatatatttaggggaaagacttaagcctttgagctctccagcttggaccacacattgcccttttctcagggaaggaaatggaaacaaaaagccaacagggcaggggttttgtaagtggaactctggattgactggtcagttgctacaatcagaatatgctttcttggaccatgtttgagactcagaagaatgggcctttctgccataattcttcactagtcaagaatgccagcagtttctttgtataaagagacctgcctttaaaatcatacattctgaacattttagtcaagctacaacaggtttggaaaacctctgtgggggaggggcgagtataaagttttcctcttttttaactgttccctttgcccttcaaactgcagatatttttttttttaagtggggacttctccctacttgattaaagattgagtggaattctagatgtggtcatttgtgtcataatttttttgttttattttgtttttgattttttttttcctcccctgagtgtatgcttagttgttgagtatatatatttgggaccattaaaactttttttgatgtaatataacctaacgttgtgctggtacctgttttaccatgtgtaatttttgttctacatcacagttcttaatttgtttagagttttatgaaagatggtatagtttttattgacaaaagcaaagtaatcttacaactatgtgcatacaaaagcaatactattttgtgactaaatattttatattaaaatttacatcagcaactgtcttgagaattcagggaaatagaatggaatttaaaacttcaacagttttgttaaatctagaaacatgaaattagtattccaaagagattctgaaatttcttttcttggggaaatgacggtacattaaatcaaaattgaggatggatgatttaaaaacatttgacttttgaataataaaaagaaaagtgaagagtaagagaaa

SEQ ID NO: 5662 - DNA, 2485 bp, Homo Sapiens
  NM_032564
tgccccgttgtgaggtgataaagtgttgcgctccgggacgccagcgccgcggctgccgcctctgctggggtctaggctgtttctctcgcgccaccactggccgccggccgcagctccaggtgtcctagccgcccagcctcgacgccgtcccgggacccctgtgctctgcgcgaagccctggccccgggggccggggcatgggccaggggcgcggggtgaagcggcttcccgcggggccgtgactgggcgggcttcagccatgaagaccctcatagccgcctactccggggtcctgcgcggcgagcgtcaggccgaggctgaccggagccagcgctctcacggaggacctgcgctgtcgcgcgaggggtctgggagatggggcactggatccagcatcctctccgccctccaggacctcttctctgtcacctggctcaataggtccaaggtggaaaagcagctacaggtcatctcagtgctccagtgggtcctgtccttccttgtactgggagtggcctgcagtgccatcctcatgtacatattctgcactgattgctggctcatcgctgtgctctacttcacttggctggtgtttgactggaacacacccaagaaaggtggcaggaggtcacagtgggtccgaaactgggctgtgtggcgctactttcgagactactttcccatccagctggtgaagacacacaacctgctgaccaccaggaactatatctttggataccacccccatggtatcatgggcctgggtgccttctgcaacttcagcacagaggccacagaagtgagcaagaagttcccaggcatacggccttacctggctacactggcaggcaacttccgaatgcctgtgttgagggagtacctgatgtctggaggtatctgccctgtcagccgggacaccatagactatttgctttcaaagaatgggagtggcaatgctatcatcatcgtggtcgggggtgcggctgagtctctgagctccatgcctggcaagaatgcagtcaccctgcggaaccgcaagggctttgtgaaactggccctgcgtcatggagctgacctggttcccatctactcctttggagagaatgaagtgtacaagcaggtgatcttcgaggagggctcctggggccgatgggtccagaagaagttccagaaatacattggtttcgccccatgcatcttccatggtcgaggcctcttctcctccgacacctgggggctggtgccctactccaagcccatcaccactgttgtgggagagcccatcaccatccccaagctggagcacccaacccagcaagacatcgacctgtaccacaccatgtacatggaggccctggtgaagctcttcgacaagcacaagaccaagttcggcctcccggagactgaggtcctggaggtgaactgagccagccttcggggccaattccctggaggaaccagctgcaaatcacttttttgctctgtaaatttggaagtgtcatgggtgtctgtgggttatttaaaagaaattataacaattttgctaaaccattacaatgttaggtcttttttaagaaggaaaaagtcagtatttcaagttctttcacttccagcttgccctgttctaggtggtggctaaatctgggcctaatctgggtggctcagctaacctctcttcttcccttcctgaagtgacaaaggaaactcagtcttcttggggaagaaggattgccattagtgacttggaccagttagatgattcactttttgcccctagggatgagaggcgaaagccacttctcatacaagcccctttattgccactaccccacgctcgtctagtcctgaaactgcaggaccagtttctctgccaaggggaggagttggagagcacagttgccccgttgtgtgagggcagtagtaggcatctggaatgctccagtttgatctcccttctgccacccctacctcacccctagtcactcatatcggagcctggactggcctccaggatgaggatgggggtggcaatgacaccctgcaggggaaaggactgccccccatgcaccattgcagggaggatgccgccaccatgagctaggtggagtaactggtttttcttgggtggctgatgacatggatgcagcacagactcagccttggcctggagcacatgcttactggtggcctcagtttaccttccccagatcctagattctggatgtgaggaagagatccctcttcagaaggggcctggccttctgagcagcagattagttccaaagcaggtggcccccgaacccaagcctcacttttctgtgccttcctgagggggttgggccggggaggaaacccaaccctctcctgtgtgttctgttatctcttgatgagatcattgcaccatgtcagacttttgtatatgccttgaaaataaatgaaagtgagaatcctcaaaaaaaaaaaaaaaaaaaaaaaaaaaaaaaaa

SEQ ID NO: 5663 - DNA, 2310 bp, Homo Sapiens
  NM_032571
gcttttctgatagcaatttcatgagtcagctgacctaagatacatacttcaattctcatgggatttcttgagctaggaaaggtggttggcttacggcacagtagagagcttccagggctggctggcgtgggatacccgtaccacagaaatgcagggaccattgcttcttccaggcctctgctttctgctgagcctctttggagctgtgactcagaaaaccaaaacttcctgtgctaagtgccccccaaatgcttcctgtgtcaataacactcactgcacctgcaaccatggatatacttctggatctgggcagaaactattcacattccccttggagacatgtaacgacattaatgaatgtacaccaccctatagtgtatattgtggatttaacgctgtgtgttacaatgtcgaaggaagtttctactgtcaatgtgtcccaggatatagactgcattctgggaatgaacaattcagtaattccaatgagaacacctgtcaggacaccacctcctcaaagacaaccgagggcaggaaagagctgcaaaagattgtggacaaatttgagtcacttctcaccaatcagactttatggagaacagaagggagacaagaaatctcatccacagctaccactattctccgggatgtggaatcgaaagttctagaaactgccttgaaagatccagaacaaaaagtcctgaaaatccaaaacgatagtgtagctattgaaactcaagcgattacagacaattgctctgaagaaagaaagacattcaacttgaacgtccaaatgaactcaatggacatccgttgcagtgacatcatccagggagacacacaaggtcccagtgccattgcctttatctcatattcttctcttggaaacatcataaatgcaactttttttgaagagatggataagaaagatcaagtgtatctgaactctcaggttgtgagtgctgctattggacccaaaaggaacgtgtctctctccaagtctgtgacgctgactttccagcacgtgaagatgacccccagtaccaaaaaggtcttctgtgtctactggaagagcacagggcagggcagccagtggtccagggatggctgcttcctgatacacgtgaacaagagtcacaccatgtgtaattgcagtcacctgtccagcttcgctgtcctgatggccctgaccagccaggaggaggatcccgtgctgactgtcatcacctacgtggggctgagcgtctctctgctgtgcctcctcctggcggccctcacttttctcctgtgtaaagccatccggaacaccagcacctcactgcatctgcagctctcgctctgcctcttcctggcccacctcctcttcctcgtggggattgatcgaactgaacccaaggtgctgtgctccatcatcgccggtgctttgcactatctctacctggccgccttcacctggatgctgctggagggtgtgcacctcttcctcactgcacggaacctgacagtggtcaactactcaagcatcaatagactcatgaagtggatcatgttcccagtcggctatggcgttcccgctgtgactgtggccatttctgcagcctcctggcctcacctttatggaactgctgatcgatgctggctccacctggaccagggattcatgtggagtttccttggcccagtctgtgccattttctctgcgaatttagtattgtttatcttggtcttttggattttgaaaagaaaactttcctccctcaatagtgaagtgtcaaccatccagaacacaaggatgctggctttcaaagcaacagctcagctcttcatcctgggctgcacatggtgtctgggcttgctacaggtgggtccagctgcccaggtcatggcctacctcttcaccatcatcaacagcctccaaggcttcttcatcttcttggtctactgcctcctcagccagcaggtccagaaacaatatcaaaagtggtttagagagatcgtaaaatcaaaatctgagtctgagacatacacactttccagcaagatgggtcctgactcaaaacccagtgagggggatgtttttccaggacaagtgaagagaaaatattaaaactagaatattcaactccatatggaaaatcatatccatggatctctttggcattatgaagaatgaagctaaggaaaagggaattcattaaacatatcatccttggagaggaagtaatcaacctttacttcccaagctgtttgttctccacaataggctctcaacaaatgtgtggtaaattgcatttctcttcaaaaaaaaaa

SEQ ID NO: 5664 - DNA, 800 bp, Homo Sapiens
  NM_032574
tggcgcggtgcagggctcttaagaacgaacggcttgggcgcgggtaatcagctccctttcccccactttctcacttattctaggtacttgggactgtcgtagagtttccagaccccatgtaggcgcccagtcgtggactgtcccactctgctgctctactgctcgtggtgctcccgcgcccagactggtatccggggactgtgacttgcagggtccgccatggagccagagcagatgctggagggacaaacgcaggttgcagaaaatcctcactctgagtacggtctcacagacaacgttgagagaatagtagaaaatgagaagattaatgcagaaaagtcatcaaagcagaaggtagatctccagtctttgccaactcgtgcctacctggatcagacagttgtgcctatcttattacagggacttgctgtgcttgcaaaggaaagaccaccaaatcccattgaatttctagcatcttatcttttaaaaaacaaggcacagtttgaagatcgaaactgacttaatgggaagaacagaaaaatttagttgctactgtagatttacatgattaagaggcagctttaattgccatgatcattccctctttttggatgtataagaaccttccggacaacagaacctatttctggaattgcagaagataacatatttcccttattttgatttaatcaccataaaccatacctatttaatgagtgtattctgtgcaatttttttctcagattgtctttaactttgtttttaaaatgaccttcaaaataaactgtcaaaacaccatt

SEQ ID NO: 5665 - DNA, 4242 bp, Homo Sapiens
  NM_032584
acgcgcagttttctgcagttccggaagcggatcgtgttgggtgcgggtgacgccgccgagcgaagaacccttgaagaagaggaagaggaaagaaagacaagtcaggcatggctctcacccagggacaggtgacattcagggatgtggctatagaattctctcaggaggagtggacatgcctggaccccgctcagaggactttgtacagggacgtgatgttggagaattataggaacctggcctccctgggaatctcttgttttgacctcagtattatctctatgttggagcaagggaaggagcctttcactttggagagccaagtacaaatagcaggaaacccagatggatgggaatggatcaaagctgtgatcacagctctctcttccgaatttgtaatgaaagatttactacacaaagggaagagtaatacaggagaagtattccaaacagtgatgttggaaagacaggaaagccaagacattgaaggatgttccttcagggaagtccagaaaaatacacatggccttgagtatcaatgcagagatgctgaaggaaattacaaaggagtgcttttgacccaagaaggcaatctcactcatggaagagatgaacatgataaaagagatgcaagaaacaagcttattaaaaatcagcttggattaagccttcagtcacatctgcctgaactgcagctttttcaatatgaagggaaaatttatgaatgtaatcaggttgagaagtctttcaacaataattcctcagtttcaccacctcaacaaatgccttataatgtcaaaacccacatttctaagaaatatctcaaagattttatctcttctttattactcacacaggggcaaaaagcaaataattggggaagcccttacaaatctaatggatgtggcatggtctttcctcaaaattcacaccttgcaagtcatcagagaagtcatactaaagagaaaccttacaaatgttatgagtgtggcaaagcctttagaacacgttcaaacctaactacccatcaggtgatccatactggcgaaaaacgttacaaatgtaatgagtgtggtaaggtctttagtcgaaattcacaactctcacaacatcagaaaattcacactggagagaaaccttataaatgtaacgaatgtggcaaggtcttcactcagaattcacaccttgtaagacatcgaggaattcatactggagagaaaccttacaagtgtaatgagtgtgggaaagcctttagagctcgttcaagcttagctatccatcaggcaacccacagtggagaaaaaccttacaaatgtaatgaatgtggcaaggtcttcactcaaaattcacaccttacaaatcactggagaattcacactggagagaaaccttacaagtgtaatgagtgcggcaaagcctttggtgttcgttcaagcctagctattcatctggtaattcacaccggagaaaagccttacaaatgtcatgaatgcggcaaggtctttaggcgtaattcacaccttgcaaggcatcagctaattcatactggagagaaaccttataagtgtaatgagtgtggcaaagcctttagagcacattcaaacctaactacccatcaggtcatccatactggagaaaagccttacaaatgtaatgaatgtggcaaggtcttcactcaaaattcacaccttgcaaatcatcaaagaattcatactggagtgaagccttatatgtgtaatgagtgcggcaaagccttcagtgtgtattcaagcctaactacccatcaggtcatccatactggagaaaaaccttacaaatgtaatgagtgtggcaaggtcttcactcagaattcacaccttgcaagacatcggggaattcatactggagagaaaccttataaatgtaatgaatgtggcaaggtctttaggcataattcatacctttcaaggcatcagcgaattcatactggagagaaaccttacaagtataatgagtatggcaaagcctttagtgaacattcaaacctaactacccatcaggtcatccatactggtgaaaaaccttacaaatgtaatgagtgtggcaaggtcttcactcagaattcacaccttgcaagacatcggagagttcatactggaggtaaaccttaccagtgtaatgaatgtggcaaagcctttagtcaaacatcaaagcttgcaaggcatcagagagttcatactggagagaaaccatatgagtgtaatcagtgtgggaaagcctttagtgtccgttcaagcctaactacccatcaggcaatccatactggaaaaaaaccttacaaatgcaatgagtgtgggaaggtcttcactcagaattcacaccttgcaagacatcggggaattcatactggagagaaaccttacaagtgtaatgagtgtggcaaagcctttagtcaaacttcaaaacttgcaaggcatcagagaattcataccggagagaaaccatatgagtgtgggaaaccctttagtatctgttcaagcctaactacccatcagacaatccatactggtgggaaaccttacaaatgtaacgtgtggaaagttctaaagtcagagttcaaaccttgcaagccatcacagaattcatagtggagagaaaccttacaaatgaaggtggtaacttttgcagttagaattcattcctttgacaacgtcagagaatttatgcctgagagattccttgaaaatgcaatgactggctgggtgcagtggctcatgcctgtaatcccaacactttgggagtccgaggcaggtggatcacctgaggtcaggagttcaagaccagcctgaccaacatggcgaaaccccatttctactaaaagtacacaattagctaggcctggtggcgtgcgcctgtaatcccagctatataggaggctgaggcaggagaatcacttgaacccaggaggcggaggttgcagtgagccaagatcgtgccaatgcactccatcctgggcaaaaagagcaaaactccatcttaaaggaaaaaaaaaaaatgcaatgactgtggcaaactcctcatgagttcaagtattaatagacatccaagagtccataataatgagaaatcacataaatgtactgtgtgtgacagaggctttattcaggcctcacagctttgcaggcattaaaatctacgtatttgatggaaccacacaaatgtaatgtgtaagagcatcctgaagctcttactctaagactgtaactgtaggtgaggattcatacaaagagtgactcagtctctagttctttgattcacttttaaaatgataaactgcacaataattacacgttccaatatggtaaaacttaagacattatatatttcaaaggtcaaaggacatttggaaatggctacttaccttcaggttataaaatcttttattccattgtttgaggtttctcaaaaaggctactgtttgtgactttcaacctgaactatggatctgtggctattttgcatccttaagcacctttcgtggtgcctatctgggaaagaaccacagtatggaaaggcttacttcattacatgaggatcatttttatccatgtttattgaagaaggaggactctgccttgtaaaattaaatattctctcaattgagagaccatggttttggggcagaaaataatgtaaaactatgatatcaatcatcatactgattgtgttcagggtgcttttctgagagaaagacaccatgggttttagggaagtaaggctctacctgcattgagcaggccaagacctcaggacactggaatttttatgagaggagagtaataagttattagtgactgattatgtgatgggaatagtgcaggggaaatggttgccactttctctactgaatggcaatagctgttttatagcagagattgatgaaaaataggcttatttttgaaattgaagaggtaacagttattagagtggagagcttggtcagaaaaaccagaataccatggttttttttgttttgttttgtttttagtagaattcacactaattgctggaattacattttgctacagttttattaagaatgtgtcacagacataatgttttgctaaaaaaaattcaacgttttcttataactataaacaaatcacattctttgtaccaacatcattttatcctacctcagtaggatacttcatagcagataataacaatacactcagtcttttaggttggaaaaaaaaaaaa

SEQ ID NO: 5666 - DNA, 4097 bp, Homo Sapiens
  NM_032587
attctttttttaacttttacttattcattaggatgatttcataatatatttcctggtttagaggaaacaggaacaatggctaccgagagtactccctcagagatcatagaaagagaaagaaaaaagttgcttgaaatccttcaacatgatcctgattctatcttagacacgttaacttctcggaggctgatttctgaggaagagtatgagactctggagaatgttacagatctcctgaagaaaagtcggaagctgttaattttggtacagaaaaagggagaggcgacctgtcagcattttctcaagtgtttatttagtacttttccacagtcagctgccatttgcggcttaaggcatgaagttttaaaacatgagaatacagtacctcctcaatctatgggggcaagcagtaattcagaagatgctttttctcctggaataaaacagcctgaagcccctgagatcacagtgttcttcagtgagaaggaacacttggatttggaaacctctgagtttttcagggacaagaaaactagttatagggaaacagctttgtctgccaggaagaatgagaaggaatatgacacaccagaagtcacattatcatattcagttgagaaagttggatgtgaagttccagcaactattacatatataaaagatggacagagatatgaggagctagatgattctttatacttaggaaaagaggaatatctaggatctgttgacacccctgaagatgcagaagccactgtggaagaggaggtttatgatgacccagagcacgttggatatgatggtgaagaggacttcgagaattcagaaaccacagagttctctggtgaagaaccaagttatgagggatcagaaaccagcctttcattggaggaggaacaggagaaaagtatagaagaaagaaaaaaggtgtttaaagatgtcctgttatgtttgaacatggatagaagcagaaaggttctgccagattttgttaaacaattctccttagatcgaggatgtaagtggacccctgagagtccaggagacttagcctggaatttcctgatgaaagttcaagcacgagatgtgacggctagggattcaatcctcagtcacaaggttctggatgaagatagcaaggaggatttgctggctggagtggagaatttggaaattcgagacatacaaaccattaatccccttgacgtgctttgtgccaccatgctgtgttcagatagctctttgcaacgccaagtcatgtcaaacatgtatcagtgccagtttgctcttcccctgctactgccagatgcagaaaacaacaaaagcatcttaatgctgggggccatgaaagacattgtgaagaagcagtcaacacagttttcaggggggcctacagaggatacagaaaagtttctgactctcatgaagatgcctgtcatctcttttgtgcgtctaggatactgtagcttctctaagtccagaatcctcaacacacttctcagccctgcccagttgaaattacacaaaatctttcttcatcaagatttgcctcttttggtgcttccccggcaaatctctgatggcctggttgagataacatggtgttttcctgatagcgatgatagaaaggaaaacccctttttccaaaagcctgttgctctggctaatctccgtggaaatctagaaagcttttggactcagtttggttttttgatggaagtttcttcagctgtgttttttttcactgactgtttaggtgagaaggaatgggacttgctaatgtttttaggagaggctgccattgaaagatgctactttgttctcagttcccaagccagggagagtgaagaggctcaaatttttcagaggatactgaacttgaagccagcacagctactgttttgggagaggggagatgctggggatagaaggaagaacatggagggccttcaagctgccctccaggaagtgatgttctcttcttgcctcagatgtgtgtctgtggaggatatggccgccctggccagggagctggggattcaggtagatgaagactttgaaaacactcagagaattcaagtttcctctggagaaaacatggctgggacagctgaaggtgagggtcagcaaagacacagtcagctaaaaagctcatctaaaagccaggctctaatgccaattcaagagcctgggactcaatgtgagctcagccagaatcttcagaatctctatggtaccccagtattcaggcctgttctagagaactcctggctctttccaaccagaattggaggtaactttaaccatgtttccttgaaagcctcctgggttatgggccgcccctttgggtcagagcagaggcctaagtggttccatcctttgccttttcagaatgcaggggcccagggccgaggtaaaagttttggtattcaatccttccatccccagatattttattcaggtgaaagattcatgaaattttccagagttgctcggggatgtcactcgaatggaacatttgggagactgccaagacccatttgtcagcatgtacaggcctgccctgagagaccacaaatgatgggaactcttgaaaggtctagggcagtagcctccaagataggtcactcctattccctggattcacagccagcaagagcagtagggaagccatggcctcagcaagcttgcaccagggtaacagagttaactgaagcaactggaaaactgataagaacatcccatattggaaagcctcaccctcagtcctttcaaccagcagcagccacacaaaaactaagacctgcttctcagcaaggagtccagatgaagacacaaggtggggcttcaaatccagctctccaaatagggtcccatcccatgtgcaagagctctcagttcaaatccgatcagtccaacccatccacagtcaaacactcccagcctaaacccttccattctgtgccctctcaacctaaatcctctcagacaaaatcctgtcagtcccagccctcccaaactaaaccttctccatgcaaatctactcagcctaagccaagccagccctggcctccccagtctaagccttctcagcccagaccccctcaacctaagtcatcctcaaccaatccttcacaagctaaggcacaccactcaaaagcagggcagaagaggggagggaagcattaaagagctaactccagagatctataaagcatatcctttacccaggccattcctatcatatagtaagcagaagagttgccatgaaagtaaaagactactgtcattagcatgtaaaacaaagaaagatatacatgactgaattggatatctttgtttgtttgtttgagacagagtttcactcttgttgcccaggctggagtgcaatggcacgatctcggctcaccgcaacctctgcttcctggcttaaagtgattctcctgcctcagcctctcgagtagctgggattacaggcatgcaccaccacacccagctaattttgtatttttagtagaggcagggtttctccatgttggtcaggctggtcttgaactcccgacctcaggtgatccgcccacctaggcctctcaaagtgttgggattacgtgtgtaagccacagtgcccagcccgaattggatatctttaagatatctgtaagtgttatatccctaaccaagaagaaaaatatgaaaataattaagactagaatcaagcagtagataattgaatccaatcttgggtattattagataatgtataacttgcacccagggaatgggggtctatgagacaaccccacttggagaagaatggggttagggtctctaattgcaaagtgactgtacaataggacgaaagttgcctctgtgtctgagaaagtatcttagttgttggctgctccagaggtatctttgtcaaaagcttctggttcaatatcagccactgagcagataaccctgcttatttggtgtggttaaatcaactagcttctgctaatagccccaatttgcttgaatgggaaaactctctcatttgacccttataggtagaaataatgaattaacaaccaataaaattaatcatttggcattaa

SEQ ID NO: 5667 - DNA, 5318 bp, Homo Sapiens
  NM_032590
gtgtgtccacatctttgagtgccgggagtttaaaagttaggcagtccttataggtatggaagccgagctaatttccttctgagccccccaaatgcctcctccacatggcgggtccgcaaatggggggatctgcagaggatcaccccccacgaaaaagacatgcagcagaaaagcaaaaaaagaaaacagttatatatacaaaatgctttgaatttgagtcggccacacagcgcccgattgaccgccagcgatacgacgagaacgaggacttgtcggacgtggaggagatcgtcagcgtccgcggcttcagcctggaggagaagcttcgcagccagctgtaccagggggacttcgtgcacgccatggagggcaaagatttcaactatgagtacgtacagagagaagctctcagggttcccctgatatttcgagaaaaggatggactgggaattaagatgcctgaccctgatttcacagtccgagacgtcaaactcctagtggggagccggcggcttgtggacgtgatggatgtgaacacccagaagggcacggagatgagcatgtcccagtttgtgcgttactacgagacgcccgaggcccagcgggacaagctgtacaacgtcatcagcctagagttcagccacaccaagctggagcacttggtcaagcgtccgactgtggtagacctggtggactgggtggacaacatgtggccccagcatctgaaggagaagcagacagaagccacgaacgccattgcagagatgaagtacccgaaagtgaaaaagtactgtctgatgagcgtgaaaggttgtttcaccgacttccacatcgactttggaggcacttccgtttggtaccatgttttccggggtgggaagattttttggctgattcctccaacgctgcacaatttggcgctgtacgaggagtgggtgctgtcaggcaaacagagtgacatctttctgggagaccgtgtggaacgatgccaaagaattgagctgaagcagggctacacatttttcatcccttccggttggatccatgccgtctacacccctgtagactctttggtgttcggcggaaacatcctgcacagctttaacgtgcccatgcagctgcggatctacgagatcgaggacaggacgcgggtgcagcccaaattccgttaccccttctactatgagatgtgctggtatgtcctggagagatacgtgtactgtgtgacccagcgctcccacctcactcaggaataccagagggagtcgatgcttattgatgccccgaggaagcccagcatagacggcttctcttcggattcctggctggagatggaggaggaggcctgtgatcagcagcctcaggaggaggaggagaaggacgaggagggcgagggcagggacagggcacccaaaccgcccaccgatggctccacttcacccaccagcacgccctctgaggaccaggaggccctcgggaagaagcccaaagcacctgccctgcgattcctcaaaaggactttgtctaatgagtcggaggaaagtgtgaagtccaccacattggccgtagactaccccaagacccccaccggctctcccgccacggaggtctctgccaaatggacccatctcactgagtttgaactgaagggcctgaaagctctggtggagaaactggaatccctcccggagaacaagaagtgtgtccccgagggcatcgaggacccccaggcactcctggagggtgtgaagaacgtcctgaaggagcacgcagatgatgaccctagtctggccatcactggggtccctgtggtgacttggccaaagaagactccaaagaaccgggctgtgggtcggcccaaggggaagctgggcccggcctccgcggtgaagttggccgccaaccggacaacggcaggagctcggcggcgccggacgcgatgccgcaagtgcgaggcctgcctgcggaccgagtgcggagagtgccacttctgcaaggacatgaagaagttcgggggccccgggcgcatgaagcagagctgcatcatgcggcagtgcatcgcgccagtgctgccccacaccgccgtgtgccttgtgtgtggcgaggcggggaaggaagacacggtggaagaggaggaaggcaagtttaacctcatgctcatggagtgctccatctgcaatgaaatcatccaccctggatgccttaagattaaggagtcagagggtgtggtcaacgacgagcttccaaactgctgggagtgtccgaagtgtaaccacgccggcaagaccgggaaacaaaagcgtggccctggctttaagtacgcctccaacctgcccggctccctgctcaaggagcagaagatgaaccgggacaacaaggaagggcaggaacctgccaagcggaggagtgagtgtgaggaggcgccccggcgcaggtcggatgagcactcgaagaaggtgccgccggacggccttctgcgcagaaagtctgacgacgtgcacctgaggaagaagcggaaatacgagaagccccaggagctgagtggacgcaagcgggcctcatcgcttcaaacgtcccccggttcctcctctcacctctcgccgaggccccctctaggcagcagcctcagcccctggtggagatccagtctcacttacttccagcagcagctcaaacctggcaaagaagataagcttttcaggaaaaagcggcggtcctggaagaacgccgaggaccgcatggcgctggccaacaagcccctccggcgcttcaagcaggaacccgaggacgaactgcccgaggcgccccccaagaccagggagagcgaccactcccgctccagctcccccaccgcgggacccagcaccgaaggggccgagggcccggaggagaagaagaaggtgaagatgcgccggaagcggcggcttcccaacaaggagctgagcagggagctgagcaaggagctcaaccacgagatccagaggacggagaacagcctggccaacgagaaccagcagcccatcaagtcggagcctgagagcgagggcgaggagcccaagcggcccccgggcatctgcgagcgtccccaccgcttcagcaaggggctcaacggcaccccccgggagctgcggcaccagctggggcccagcctgcgcagcccgccccgtgtcatctcccggcccccaccctccgtgtccccgcccaagtgtatccagatggagcgccatgtgatccggccaccccccatcagccccccgcctgactcgctacccctggacgatggggcagcccacgtcatgcacagggaggtgtggatggccgtcttcagctacctcagccaccaagacctgtgtgtgtgcatgcgggtctgcaggacctggaaccgctggtgctgcgataagcggttgtggacccgcattgacctgaaccactgcaagtctatcacacccctgatgctgagtggcatcatccggcgacagcccgtctccctcgacctcagctggaccaatatctccaagaagcagctgagctggctcatcaaccggctgcctgggctccgggacttggtgctgtcaggctgctcatggatcgcggtctcggccctttgcagctccagttgtccgctgctccggaccctggatgtccagtgggtggagggactaaaggatgcccagatgcgggatctcctgtccccgcccacagacaacaggccaggtcagatggacaatcggagcaagctccggaacatcgtggagctgcgcctggcaggcctggacatcacagatgcctccctgcggctcatcatccgccacatgcccctgctctccaagctccacctcagttactgtaaccacgtcaccgaccagtctatcaacctgctcactgctgttggcaccaccacccgagactccttaaccgagatcaacctgtctgactgcaataaggtcactgatcagtgcctgtccttcttcaaacgctgtggaaacatctgtcatattgacctgaggtactgcaagcaagtcaccaaggaaggctgtgagcagttcatagccgagatgtctgtgagtgtccagtttgggcaagtagaagaaaaactcctgcaaaaactgagttagtccaaggataagtatgtaaatacggggcgggctctgggaggggagagactttacaaaaatgagggcttttattttccatttggaacgtgggacaacagaccacaacgcaattccattttgcaagtctttccaagggagaagctgttcaaccacccgtttgggggatgagtgagccgacactttcctttggtctttctgaatcgtaactgcactgctttctggaccatttctaaggcggcctttacaagaagacattcctgtcggagaggagggtggacttcggagaaattctcatactgaagcatgagcttaggagtttctgttagtggtagtggtgttttggacacttcattccttgcaacaccgaggttttgggtgttgacataaagtggaccacacaccacatctgctgccgtcttgacacttttttttgtttggttggttttgttacatcttacattatgcagaactatttttgtacaaattgtttaaaagttatttatgcaaggtttgaatgcataccagtgtttttattgttttgagattgccaattttcctgatttccttaaggtaggagagaatttaacgtgtacttcatcgacacaacccatctacaaatgtgcccagatctaacaaagtaggctaagaccttccacttaaaagcatgtttaactggaagttgagagtctgctttgtacctcaagagttacatgagcatgttgtggataaatgtaaattatagtcaaagtaagatactctgccaagtttcctctgtagagaattcacttttctcaaattttaaaatttcgacttcagcctttgcactcaggaggttctgctccagcatgagctcttgtacttacatagatctaatttatacagtgagtcaagacgtagaataaatgctcccacatagcctttcttttgcttttgcttctctcctctgaagtgtgagttgagttctcatttaggtttgtaacatggctatttcctagttgtaaagttctgcatttataagtgccattgttgtaaggtggtgtttcctagaccttccctgatgcgattttacctttgttgaatttgtataaacaattgtacaaaaaaaaccactcttgaactttgagggtttctgttctaggagtggactagaagtttaagcccagagtcagtaaacactgttttgaagtccaaaaaaaaaaaaaa

SEQ ID NO: 5668 - DNA, 2196 bp, Homo Sapiens
  NM_032592
gaaaacctacacgtgatgggcgcccaccgagtgccagcaccgcctcctccagctccgccaagtaggtgggatccactactttgcagaggaggaagccgttcaggcctccctctgtgcactttgcaaaagcctctgcccttccatctcgaatcccttggcgccgatcacacttcctctgcctggaaacctggagccgtctctcgcgagacgtcctccgccctgtagaaggccgtttcggttcttcgtgcgcggtagccgccccacttgcgggattccaaggcctcatcgagtgcgggtatctggctgtggattcgccgccgtcctgctggacgcctggaggctcgaaccccgccgcccccctaccccaggctttactcccaccccggcttccgcccactgtgctgcccttcctcggacctgggctgtcgggagagctggagatgttcacccttcctcaaaaggacttcagggctcccaccacctgtctgggccccacctgcatgcaggacctgggcagtagccatggggaagatctggaaggagaatgctccagaaaactggaccagaagctgccagagctccgtggagtgggtgatcctgccatgatctcctctgatacctcctacctgtcctctagaggaagaatgattaaatggttctgggattcagctgaggagggctacaggacctaccacatggatgagtatgatgaggacaagaaccccagtggcatcattaacttgggcaccagtgagaacaaactctgctttgacctgctgtcctggcggctgagtcagcgcgacatgcagagggtggagccatccctgctgcagtatgctgactggaggggacatctgttcctccgggaggaagtggccaagttcctgtctttctactgcaagagcccagtacccctcagaccagagaatgtggttgtcctgaatggtggtgcctcgctcttctctgctctggccacggtgctgtgtgaggccggggaggctttcctgatccccaccccttactatggcgctatcacacagcacgtgtgtctctatggcaacatccggctggcctatgtctacctggacagtgaggtcactgggctagacacacgccccttccagctcacagtggagaagctggagatggccctgagagaagctcactctgagggtgtgaaggtcaaaggcctcatcctcatcagcccccagaaccctctgggtgatgtatactcccctgaagagctacaggagtacctggtatttgccaagaggcacaggctgcatgtgattgtggatgaggtctacatgctgtccgtgtttgagaagtctgttgggtaccgcagtgtcctaagcctggaaaggctccctgacccccagaggacccatgtgatgtgggcaaccagcaaggacttcgggatgtctgggctccgctttggcacgctgtacacagaaaaccaggatgtggccactgccgtggcttccctctgccgctaccacggcctcagtggcttggtccagtaccagatggcacagctgctccgggaccgtgactggatcaaccaggtgtacctgccggaaaaccatgcccggctcaaggctgcccacacctatgtctcagaagagcttagggcattggggatccccttcttgagtcgtggggctggcttcttcatctgggttgacttgagaaagtacctgcccaagggcacctttgaggaggaaatgctgctctggcgccgctttttggacaacaaggtgctgctgtcctttggcaaggccttcgagtgtaaagagcctggttggtttcgctttgtcttctcagaccaggtccaccggctttgcctggggatgcagagggtccagcaggtgcttgcaggcaaatcccaagtggcagaagacccccgtccctctcagagccaggagccaagtgaccaacgcaggtgagctggtcattgtctcgtggccagagggcccagcagccactgtggacctggggcgttctggggctgcagaagactgactgtggatgtgccatttgccaggaaggtatctaacttggctttgtgcctgaagaactgtttcttgtctttcgctgtagcagtgggaaactccttaagctgtggttcagcctgggccctccctctctcctattaaacaaaactaggagagtcaaaaaaaaaaaaaaaaaaaaaaa

SEQ ID NO: 5669 - DNA, 652 bp, Homo Sapiens
  NM_032593
cccacccacggccggccgcggagccgagtgctgacccgggtgagaggttcccgcggctcagggaagatggcggcagccgtggtgctggctgctgggttgcgcgcggcgcgcagagccgtggcggccacgggggtgcgcggggggcaggtccgaggagctgcaggtgtgactgatgggaatgaagtggccaaggcccagcaggcaactcctgggggagcagccccaaccatcttctcccggatcctggacaagagcctcccagctgacattctctatgaggaccagcagtgtcttgtgttccgtgatgtggcccctcaggctcctgtgcacttcctggtcattcctaagaagcccattcctcggattagccaggctgaagaagaagaccagcagcttctaggacacctactccttgtggccaagcagacagcaaaggctgagggcctgggagatggataccgacttgtgatcaacgatgggaagctgggtgcacaatctgtgtatcatctgcacattcatgtacttgggggccggcagctccagtggcctccaggttgaacctgccaactgattaaaggacaccagactctggatgcttggatggaaagggaaaaatggaccctgtgatgctaataaaactgttctcccttaa
